United States Patent Application Publication US 2023/0302116 A1 - sequence listing, part 2

SEQ ID NO: 1420 - DNA, 3846 bp, Artificial Sequence
  Description of Artificial Sequence: Synthetic polynucleotide
atgggcatcctgccaagcccaggaatgcccgccctgctgtctctggtgagcctgctgtccgtgctgctgatgggatgcgtggcagagacaggcacacagtgcgtgaacctgaccacaaggacccagctgccccctgcctataccaattctttcacacggggcgtgtactatcccgacaaggtgtttagaagctccgtgctgcactccacacaggatctgtttctgcctttcttttctaacgtgacctggttccacgccatccacgtgtccggcaccaatggcacaaagcggttcgacaatcccgtgctgccttttaacgatggcgtgtacttcgccagcaccgagaagtccaacatcatcagaggctggatctttggcaccacactggactctaagacacagagcctgctgatcgtgaacaatgccaccaacgtggtgatcaaggtgtgcgagttccagttttgtaatgatccattcctgggcgtgtactatcacaagaacaataagtcctggatggagtctgagtttcgcgtgtattctagcgccaacaattgcacatttgagtacgtgagccagcccttcctgatggacctggagggcaagcagggcaatttcaagaacctgagggagttcgtgtttaagaatatcgatggctacttcaagatctacagcaagcacaccccaatcaacctggtgcgcgacctgccacagggattctccgccctggagccactggtggatctgcccatcggcatcaacatcacccggtttcagacactgctggccctgcacagatcctacctgacaccaggcgactcctctagcggatggaccgcaggagctgccgcctactatgtgggctatctgcagccccggaccttcctgctgaagtacaacgagaatggcaccatcacagacgcagtggattgcgccctggaccccctgtctgagacaaagtgtacactgaagagctttaccgtggagaagggcatctatcagacaagcaatttcagggtgcagcctaccgagtccatcgtgcgctttcccaatatcacaaacctgtgcccttttggcgaggtgttcaacgccaccagattcgccagcgtgtacgcctggaatcggaagagaatctccaactgcgtggccgactattctgtgctgtacaactccgcctctttcagcacctttaagtgctatggcgtgtctcccacaaagctgaatgatctgtgctttaccaacgtgtacgccgatagcttcgtgatcaggggagacgaagtgagacagatcgcaccaggacagacaggaaagatcgcagactacaattataagctgcctgacgatttcaccggctgcgtgatcgcctggaactccaacaatctggattctaaagtgggcggcaactacaattatctgtacaggctgtttcgcaagtccaatctgaagccattcgagcgggacatctccacagagatctaccaggccggctctaccccctgcaatggcgtggagggctttaactgttatttccctctgcagtcttacggcttccagccaacaaacggcgtgggctatcagccctacagagtggtggtgctgtcctttgagctgctgcacgcaccagcaacagtgtgcggcccaaagaagtctaccaatctggtgaagaacaagtgcgtgaacttcaacttcaacggactgaccggcacaggcgtgctgaccgagagcaataagaagttcctgccttttcagcagttcggcagggacatcgcagatttgacagacgccgtgcgcgaccctcagaccctggagatcctggacatcacaccatgcagcttcggcggcgtgtccgtgatcacaccaggcaccaatacatccaaccaggtggccgtgctgtatcaggacgtgaattgtaccgaggtgcccgtggcaatccacgcagatcagctgacccctacatggcgggtgtactctaccggcagcaacgtgttccagacaagagccggatgcctgatcggagcagagcacgtgaacaatagctatgagtgcgacatccctatcggcgccggcatctgtgccagctaccagacccagacaaactccccatctggagcaggctccgtggccagccagtccatcatcgcctataccatgagcctgggcgccgagaacagcgtggcctactccaacaattctatcgccatccctaccaacttcacaatcagcgtgaccacagagatcctgccagtgtctatgaccaagacaagcgtggactgcacaatgtatatctgtggcgatagcaccgagtgctccaacctgctgctgcagtacggctccttttgtacccagctgaatagagccctgacaggcatcgccgtggagcaggataagaacacacaggaggtgttcgcccaggtgaagcagatctacaagaccccacccatcaaggactttggcggcttcaacttcagccagatcctgcctgatccaagcaagccctccaagaggtcttttatcgaggacctgctgttcaacaaggtgaccctggccgatgccggcttcatcaagcagtatggagattgcctgggagacatcgcagcccgcgacctgatctgtgcccagaagtttaatggcctgaccgtgctgcctccactgctgacagatgagatgatcgcccagtacacatctgccctgctggccggcaccatcacaagcggatggaccttcggcgcaggagccgccctgcagatcccttttgccatgcagatggcctataggttcaacggcatcggcgtgacccagaatgtgctgtacgagaaccagaagctgatcgccaatcagtttaacagcgccatcggcaagatccaggactctctgtcctctacagccagcgccctgggcaagctgcaggatgtggtgaatcagaacgcccaggccctgaataccctggtgaagcagctgagctccaacttcggcgccatctctagcgtgctgaatgacatcctgagccggctggacccccctgaggcagaggtgcagatcgacaggctgatcacaggccgcctgcagagcctgcagacctacgtgacacagcagctgatcagggcagcagagatcagagcctccgccaatctggccgccaccaagatgagcgagtgcgtgctgggacagtccaagagggtggacttttgtggcaagggctatcacctgatgtctttcccacagagcgcccctcacggcgtggtgtttctgcacgtgacctacgtgccagcccaggagaagaacttcaccacagcaccagccatctgccacgatggaaaggcacactttcctagggagggcgtgttcgtgtctaacggcacccactggtttgtgacacagcgcaatttctacgagccacagatcatcaccacagacaatacattcgtgagcggcaactgtgatgtggtgatcggcatcgtgaacaataccgtgtatgatccactgcagcccgagctggactcctttaaggaggagctggataagtacttcaagaatcacacctctcccgacgtggatctgggcgacatctccggcatcaatgcctctgtggtgaacatccagaaggagatcgaccggctgaacgaggtggccaagaatctgaacgagagcctgatcgatctgcaggagctgggcaagtatgagcagtacatcaagggctctggcagagagaacctgtatttccagggaggaggaggcagcggatacatccctgaggcaccaagggacggacaggcctacgtgcgcaaggatggcgagtgggtgctgctgtccacctttctgggccatcatcaccaccaccaccaccactga

SEQ ID NO: 1421 - DNA, 3846 bp, Artificial Sequence
  Description of Artificial Sequence: Synthetic polynucleotide
atgggcatcctgccaagcccaggaatgcccgccctgctgtctctggtgagcctgctgtccgtgctgctgatgggatgcgtggcagagacaggcacacagtgcgtgaacctgaccacaaggacccagctgccccctgcctataccaattctttcacacggggcgtgtactatcccgacaaggtgtttagaagctccgtgctgcactccacacaggatctgtttctgcctttcttttctaacgtgacctggttccacgccatccacgtgtccggcaccaatggcacaaagcggttcgacaatcccgtgctgccttttaacgatggcgtgtacttcgccagcaccgagaagtccaacatcatcagaggctggatctttggcaccacactggactctaagacacagagcctgctgatcgtgaacaatgccaccaacgtggtgatcaaggtgtgcgagttccagttttgtaatgatccattcctgggcgtgtactatcacaagaacaataagtcctggatggagtctgagtttcgcgtgtattctagcgccaacaattgcacatttgagtacgtgagccagcccttcctgatggacctggagggcaagcagggcaatttcaagaacctgagggagttcgtgtttaagaatatcgatggctacttcaagatctacagcaagcacaccccaatcaacctggtgcgcgacctgccacagggattctccgccctggagccactggtggatctgcccatcggcatcaacatcacccggtttcagacactgctggccctgcacagatcctacctgacaccaggcgactcctctagcggatggaccgcaggagctgccgcctactatgtgggctatctgcagccccggaccttcctgctgaagtacaacgagaatggcaccatcacagacgcagtggattgcgccctggaccccctgtctgagacaaagtgtacactgaagagctttaccgtggagaagggcatctatcagacaagcaatttcagggtgcagcctaccgagtccatcgtgcgctttcccaatatcacaaacctgtgcccttttggcgaggtgttcaacgccaccagattcgccagcgtgtacgcctggaatcggaagagaatctccaactgcgtggccgactattctgtgctgtacaactccgcctctttcagcacctttaagtgctatggcgtgtctcccacaaagctgaatgatctgtgctttaccaacgtgtacgccgatagcttcgtgatcaggggagacgaagtgagacagatcgcaccaggacagacaggaaagatcgcagactacaattataagctgcctgacgatttcaccggctgcgtgatcgcctggaactccaacaatctggattctaaagtgggcggcaactacaattatctgtacaggctgtttcgcaagtccaatctgaagccattcgagcgggacatctccacagagatctaccaggccggctctaccccctgcaatggcgtggagggctttaactgttatttccctctgcagtcttacggcttccagccaacaaacggcgtgggctatcagccctacagagtggtggtgctgtcctttgagctgctgcacgcaccagcaacagtgtgcggcccaaagaagtctaccaatctggtgaagaacaagtgcgtgaacttcaacttcaacggactgaccggcacaggcgtgctgaccgagagcaataagaagttcctgccttttcagcagttcggcagggacatcgcagataccacagacgccgtgcgcgaccctcagaccctggagatcctggacatcacaccatgcagcttcggcggcgtgtccgtgatcacaccaggcaccaatacatccaaccaggtggccgtgctgtatcaggacgtgaattgtaccgaggtgcccgtggcaatccacgcagatcagctgacccctacatggcgggtgtactctaccggcagcaacgtgttccagacaagagccggatgcctgatcggagcagagcacgtgaacaatagctatgagtgcgacatccctatcggcgccggcatctgtgccagctaccagacccagacaaactccccatctggatcaggctccgtggccagccagtccatcatcgcctataccatgagcctgggcgccgagaacagcgtggcctactccaacaattctatcgccatccctaccaacttcacaatcagcgtgaccacagagatcctgccagtgtctatgaccaagacaagcgtggactgcacaatgtatatctgtggcgatagcaccgagtgctccaacctgctgctgcagtacggctccttttgtacccagctgaatagagccctgacaggcatcgccgtggagcaggataagaacacacaggaggtgttcgcccaggtgaagcagatctacaagaccccacccatcaaggactttggcggcttcaacttcagccagatcctgcctgatccaagcaagccctccaagaggtcttttatcgaggacctgctgttcaacaaggtgaccctggccgatgccggcttcatcaagcagtatggagattgcctgggagacatcgcagcccgcgacctgatctgtgcccagaagtttaatggcctgaccgtgctgcctccactgctgacagatgagatgatcgcccagtacacatctgccctgctggccggcaccatcacaagcggatggaccttcggcgcaggagccgccctgcagatcccttttgccatgcagatggcctataggttcaacggcatcggcgtgacccagaatgtgctgtacgagaaccagaagctgatcgccaatcagtttaacagcgccatcggcaagatccaggactctctgtcctctacagccagcgccctgggcaagctgcaggatgtggtgaatcagaacgcccaggccctgaataccctggtgaagcagctgagctccaacttcggcgccatctctagcgtgctgaatgacatcctgagccggctggacccccctgaggcagaggtgcagatcgacaggctgatcacaggccgcctgcagagcctgcagacctacgtgacacagcagctgatcagggcagcagagatcagagcctccgccaatctggccgccaccaagatgagcgagtgcgtgctgggacagtccaagagggtggacttttgtggcaagggctatcacctgatgtctttcccacagagcgcccctcacggcgtggtgtttctgcacgtgacctacgtgccagcccaggagaagaacttcaccacagcaccagccatctgccacgatggaaaggcacactttcctagggagggcgtgttcgtgtctaacggcacccactggtttgtgacacagcgcaatttctacgagccacagatcatcaccacagacaatacattcgtgagcggcaactgtgatgtggtgatcggcatcgtgaacaataccgtgtatgatccactgcagcccgagctggactcctttaaggaggagctggataagtacttcaagaatcacacctctcccgacgtggatctgggcgacatctccggcatcaatgcctctgtggtgaacatccagaaggagatcgaccggctgaacgaggtggccaagaatctgaacgagagcctgatcgatctgcaggagctgggcaagtatgagcagtacatcaagggctctggcagagagaacctgtatttccagggaggaggaggcagcggatacatccctgaggcaccaagggacggacaggcctacgtgcgcaaggatggcgagtgggtgctgctgtccacctttctgggccatcatcaccaccaccaccaccactga

SEQ ID NO: 1422 - DNA, 3846 bp, Artificial Sequence
  Description of Artificial Sequence: Synthetic polynucleotide
atgggcatcctgccaagcccaggaatgcccgccctgctgtctctggtgagcctgctgtccgtgctgctgatgggatgcgtggcagagacaggcacacagtgcgtgaacctgaccacaaggacccagctgccccctgcctataccaattctttcacacggggcgtgtactatcccgacaaggtgtttagaagctccgtgctgcactccacacaggatctgtttctgcctttcttttctaacgtgacctggttccacgccatccacgtgtccggcaccaatggcacaaagcggttcgacaatcccgtgctgccttttaacgatggcgtgtacttcgccagcaccgagaagtccaacatcatcagaggctggatctttggcaccacactggactctaagacacagagcctgctgatcgtgaacaatgccaccaacgtggtgatcaaggtgtgcgagttccagttttgtaatgatccattcctgggcgtgtactatcacaagaacaataagtcctggatggagtctgagtttcgcgtgtattctagcgccaacaattgcacatttgagtacgtgagccagcccttcctgatggacacggagggcaagcagggcaatttcaagaacctgagggagttcgtgtttaagaatatcgatggctacttcaagatctacagcaagcacaccccaatcaacctggtgcgcgacctgccacagggattctccgccctggagccactggtggatctgcccatcggcatcaacatcacccggtttcagacactgctggccctgcacagatcctacctgacaccaggcgactcctctagcggatggaccgcaggagctgccgcctactatgtgggctatctgcagccccggaccttcctgctgaagtacaacgagaatggcaccatcacagacgcagtggattgcgccctggaccccctgtctgagacaaagtgtacactgaagagctttaccgtggagaagggcatctatcagacaagcaatttcagggtgcagcctaccgagtccatcgtgcgctttcccaatatcacaaacctgtgcccttttggcgaggtgttcaacgccaccagattcgccagcgtgtacgcctggaatcggaagagaatctccaactgcgtggccgactattctgtgctgtacaactccgcctctttcagcacctttaagtgctatggcgtgtctcccacaaagctgaatgatctgtgctttaccaacgtgtacgccgatagcttcgtgatcaggggagacgaagtgagacagatcgcaccaggacagacaggaaagatcgcagactacaattataagctgcctgacgatttcaccggctgcgtgatcgcctggaactccaacaatctggattctaaagtgggcggcaactacaattatctgtacaggctgtttcgcaagtccaatctgaagccattcgagcgggacatctccacagagatctaccaggccggctctaccccctgcaatggcgtggagggctttaactgttatttccctctgcagtcttacggcttccagccaacaaacggcgtgggctatcagccctacagagtggtggtgctgtcctttgagctgctgcacgcaccagcaacagtgtgcggcccaaagaagtctaccaatctggtgaagaacaagtgcgtgaacttcaacttcaacggactgaccggcacaggcgtgctgaccgagagcaataagaagttcctgccttttcagcagttcggcagggacatcgcagataccacagacgccgtgcgcgaccctcagaccctggagatcctggacatcacaccatgcagcttcggcggcgtgtccgtgatcacaccaggcaccaatacatccaaccaggtggccgtgctgtatcaggacgtgaattgtaccgaggtgcccgtggcaatccacgcagatcagctgacccctacatggcgggtgtactctaccggcagcaacgtgttccagacaagagccggatgcctgatcggagcagagcacgtgaacaatagctatgagtgcgacatccctatcggcgccggcatctgtgccagctaccagacccagacaaactccccatctggagcaggctccgtggccagccagtccatcatcgcctataccatgagcctgggcgccgagaacagcgtggcctactccaacaattctatcgccatccctaccaacttcacaatcagcgtgaccacagagatcctgccagtgtctatgaccaagacaagcgtggactgcacaatgtatatctgtggcgatagcaccgagtgctccaacctgctgctgcagtacggctccttttgtacccagctgaatagagccctgacaggcatcgccgtggagcaggataagaacacacaggaggtgttcgcccaggtgaagcagatctacaagaccccacccatcaaggactttggcggcttcaacttcagccagatcctgcctgatccaagcaagccctccaagaggtcttttatcgaggacctgctgttcaacaaggtgaccctggccgatgccggcttcatcaagcagtatggagattgcctgggagacatcgcagcccgcgacctgatctgtgcccagaagtttaatggcctgaccgtgctgcctccactgctgacagatgagatgatcgcccagtacacatctgccctgctggccggcaccatcacaagcggatggaccttcggcgcaggagccgccctgcagatcccttttgccatgcagatggcctataggttcaacggcatcggcgtgacccagaatgtgctgtacgagaaccagaagctgatcgccaatcagtttaacagcgccatcggcaagatccaggactctctgtcctctacagccagcgccctgggcaagctgcaggatgtggtgaatcagaacgcccaggccctgaataccctggtgaagcagctgagctccaacttcggcgccatctctagcgtgctgaatgacatcctgagccggctggacccccctgaggcagaggtgcagatcgacaggctgatcacaggccgcctgcagagcctgcagacctacgtgacacagcagctgatcagggcagcagagatcagagcctccgccaatctggccgccaccaagatgagcgagtgcgtgctgggacagtccaagagggtggacttttgtggcaagggctatcacctgatgtctttcccacagagcgcccctcacggcgtggtgtttctgcacgtgacctacgtgccagcccaggagaagaacttcaccacagcaccagccatctgccacgatggaaaggcacactttcctagggagggcgtgttcgtgtctaacggcacccactggtttgtgacacagcgcaatttctacgagccacagatcatcaccacagacaatacattcgtgagcggcaactgtgatgtggtgatcggcatcgtgaacaataccgtgtatgatccactgcagcccgagctggactcctttaaggaggagctggataagtacttcaagaatcacacctctcccgacgtggatctgggcgacatctccggcatcaatgcctctgtggtgaacatccagaaggagatcgaccggctgaacgaggtggccaagaatctgaacgagagcctgatcgatctgcaggagctgggcaagtatgagcagtacatcaagggctctggcagagagaacctgtatttccagggaggaggaggcagcggatacatccctgaggcaccaagggacggacaggcctacgtgcgcaaggatggcgagtgggtgctgctgtccacctttctgggccatcatcaccaccaccaccaccactga

SEQ ID NO: 1423 - DNA, 3846 bp, Artificial Sequence
  Description of Artificial Sequence: Synthetic polynucleotide
atgggcatcctgccaagcccaggaatgcccgccctgctgtctctggtgagcctgctgtccgtgctgctgatgggatgcgtggcagagacaggcacacagtgcgtgaacctgaccacaaggacccagctgccccctgcctataccaattctttcacacggggcgtgtactatcccgacaaggtgtttagaagctccgtgctgcactccacacaggatctgtttctgcctttcttttctaacgtgacctggttccacgccatccacgtgtccggcaccaatggcacaaagcggttcgacaatcccgtgctgccttttaacgatggcgtgtacttcgccagcaccgagaagtccaacatcatcagaggctggatctttggcaccacactggactctaagacacagagcctgctgatcgtgaacaatgccaccaacgtggtgatcaaggtgtgcgagttccagttttgtaatgatccattcctgggcgtgtactatcacaagaacaataagtcctggatggagtctgagtttcgcgtgtattctagcgccaacaattgcacatttgagtacgtgagccagcccttcaaaatggacctggagggcaagcagggcaatttcaagaacctgagggagttcgtgtttaagaatatcgatggctacttcaagatctacagcaagcacaccccaatcaacctggtgcgcgacctgccacagggattctccgccctggagccactggtggatctgcccatcggcatcaacatcacccggtttcagacactgctggccctgcacagatcctacctgacaccaggcgactcctctagcggatggaccgcaggagctgccgcctactatgtgggctatctgcagccccggaccttcctgctgaagtacaacgagaatggcaccatcacagacgcagtggattgcgccctggaccccctgtctgagacaaagtgtacactgaagagctttaccgtggagaagggcatctatcagacaagcaatttcagggtgcagcctaccgagtccatcgtgcgctttcccaatatcacaaacctgtgcccttttggcgaggtgttcaacgccaccagattcgccagcgtgtacgcctggaatcggaagagaatctccaactgcgtggccgactattctgtgctgtacaactccgcctctttcagcacctttaagtgctatggcgtgtctcccacaaagctgaatgatctgtgctttaccaacgtgtacgccgatagcttcgtgatcaggggagacgaagtgagacagatcgcaccaggacagacaggaaagatcgcagactacaattataagctgcctgacgatttcaccggctgcgtgatcgcctggaactccaacaatctggattctaaagtgggcggcaactacaattatctgtacaggctgtttcgcaagtccaatctgaagccattcgagcgggacatctccacagagatctaccaggccggctctaccccctgcaatggcgtggagggctttaactgttatttccctctgcagtcttacggcttccagccaacaaacggcgtgggctatcagccctacagagtggtggtgctgtcctttgagctgctgcacgcaccagcaacagtgtgcggcccaaagaagtctaccaatctggtgaagaacaagtgcgtgaacttcaacttcaacggactgaccggcacaggcgtgctgaccgagagcaataagaagttcctgccttttcagcagttcggcagggacatcgcagataccacagacgccgtgcgcgaccctcagaccctggagatcctggacatcacaccatgcagcttcggcggcgtgtccgtgatcacaccaggcaccaatacatccaaccaggtggccgtgctgtatcaggacgtgaattgtaccgaggtgcccgtggcaatccacgcagatcagctgacccctacatggcgggtgtactctaccggcagcaacgtgttccagacaagagccggatgcctgatcggagcagagcacgtgaacaatagctatgagtgcgacatccctatcggcgccggcatctgtgccagctaccagacccagacaaactccccatctggagcaggctccgtggccagccagtccatcatcgcctataccatgagcctgggcgccgagaacagcgtggcctactccaacaattctatcgccatccctaccaacttcacaatcagcgtgaccacagagatcctgccagtgtctatgaccaagacaagcgtggactgcacaatgtatatctgtggcgatagcaccgagtgctccaacctgctgctgcagtacggctccttttgtacccagctgaatagagccctgacaggcatcgccgtggagcaggataagaacacacaggaggtgttcgcccaggtgaagcagatctacaagaccccacccatcaaggactttggcggcttcaacttcagccagatcctgcctgatccaagcaagccctccaagaggtcttttatcgaggacctgctgttcaacaaggtgaccctggccgatgccggcttcatcaagcagtatggagattgcctgggagacatcgcagcccgcgacctgatctgtgcccagaagtttaatggcctgaccgtgctgcctccactgctgacagatgagatgatcgcccagtacacatctgccctgctggccggcaccatcacaagcggatggaccttcggcgcaggagccgccctgcagatcccttttgccatgcagatggcctataggttcaacggcatcggcgtgacccagaatgtgctgtacgagaaccagaagctgatcgccaatcagtttaacagcgccatcggcaagatccaggactctctgtcctctacagccagcgccctgggcaagctgcaggatgtggtgaatcagaacgcccaggccctgaataccctggtgaagcagctgagctccaacttcggcgccatctctagcgtgctgaatgacatcctgagccggctggacccccctgaggcagaggtgcagatcgacaggctgatcacaggccgcctgcagagcctgcagacctacgtgacacagcagctgatcagggcagcagagatcagagcctccgccaatctggccgccaccaagatgagcgagtgcgtgctgggacagtccaagagggtggacttttgtggcaagggctatcacctgatgtctttcccacagagcgcccctcacggcgtggtgtttctgcacgtgacctacgtgccagcccaggagaagaacttcaccacagcaccagccatctgccacgatggaaaggcacactttcctagggagggcgtgttcgtgtctaacggcacccactggtttgtgacacagcgcaatttctacgagccacagatcatcaccacagacaatacattcgtgagcggcaactgtgatgtggtgatcggcatcgtgaacaataccgtgtatgatccactgcagcccgagctggactcctttaaggaggagctggataagtacttcaagaatcacacctctcccgacgtggatctgggcgacatctccggcatcaatgcctctgtggtgaacatccagaaggagatcgaccggctgaacgaggtggccaagaatctgaacgagagcctgatcgatctgcaggagctgggcaagtatgagcagtacatcaagggctctggcagagagaacctgtatttccagggaggaggaggcagcggatacatccctgaggcaccaagggacggacaggcctacgtgcgcaaggatggcgagtgggtgctgctgtccacctttctgggccatcatcaccaccaccaccaccactga

SEQ ID NO: 1424 - DNA, 3846 bp, Artificial Sequence
  Description of Artificial Sequence: Synthetic polynucleotide
atgggcatcctgccaagcccaggaatgcccgccctgctgtctctggtgagcctgctgtccgtgctgctgatgggatgcgtggcagagacaggcacacagtgcgtgaacctgaccacaaggacccagctgccccctgcctataccaattctttcacacggggcgtgtactatcccgacaaggtgtttagaagctccgtgctgcactccacacaggatctgtttctgcctttcttttctaacgtgacctggttccacgccatccacgtgtccggcaccaatggcacaaagcggttcgacaatcccgtgctgccttttaacgatggcgtgtacttcgccagcaccgagaagtccaacatcgttagaggctggatctttggcaccacactggactctaagacacagagcctgctgatcgtgaacaatgccaccaacgtggtgatcaaggtgtgcgagttccagttttgtaatgatccattcctgggcgtgtactatcacaagaacaataagtcctggatggagtctgagtttcgcgtgtattctagcgccaacaattgcacatttgagtacgtgagccagcccttcctgatggacctggagggcaagcagggcaatttcaagaacctgagggagttcgtgtttaagaatatcgatggctacttcaagatctacagcaagcacaccccaatcaacctggtgcgcgacctgccacagggattctccgccctggagccactggtggatctgcccatcggcatcaacatcacccggtttcagacactgctggccctgcacagatcctacctgacaccaggcgactcctctagcggatggaccgcaggagctgccgcctactatgtgggctatctgcagccccggaccttcctgctgaagtacaacgagaatggcaccatcacagacgcagtggattgcgccctggaccccctgtctgagacaaagtgtacactgaagagctttaccgtggagaagggcatctatcagacaagcaatttcagggtgcagcctaccgagtccatcgtgcgctttcccaatatcacaaacctgtgcccttttggcgaggtgttcaacgccaccagattcgccagcgtgtacgcctggaatcggaagagaatctccaactgcgtggccgactattctgtgctgtacaactccgcctctttcagcacctttaagtgctatggcgtgtctcccacaaagctgaatgatctgtgctttaccaacgtgtacgccgatagcttcgtgatcaggggagacgaagtgagacagatcgcaccaggacagacaggaaagatcgcagactacaattataagctgcctgacgatttcaccggctgcgtgatcgcctggaactccaacaatctggattctaaagtgggcggcaactacaattatctgtacaggctgtttcgcaagtccaatctgaagccattcgagcgggacatctccacagagatctaccaggccggctctaccccctgcaatggcgtggagggctttaactgttatttccctctgcagtcttacggcttccagccaacaaacggcgtgggctatcagccctacagagtggtggtgctgtcctttgagctgctgcacgcaccagcaacagtgtgcggcccaaagaagtctaccaatctggtgaagaacaagtgcgtgaacttcaacttcaacggactgaccggcacaggcgtgctgaccgagagcaataagaagttcctgccttttcagcagttcggcagggacatcgcagataccacagacgccgtgcgcgaccctcagaccctggagatcctggacatcacaccatgcagcttcggcggcgtgtccgtgatcacaccaggcaccaatacatccaaccaggtggccgtgctgtatcaggacgtgaattgtaccgaggtgcccgtggcaatccacgcagatcagctgacccctacatggcgggtgtactctaccggcagcaacgtgttccagacaagagccggatgcctgatcggagcagagcacgtgaacaatagctatgagtgcgacatccctatcggcgccggcatctgtgccagctaccagacccagacaaactccccatctggagcaggctccgtggccagccagtccatcatcgcctataccatgagcctgggcgccgagaacagcgtggcctactccaacaattctatcgccatccctaccaacttcacaatcagcgtgaccacagagatcctgccagtgtctatgaccaagacaagcgtggactgcacaatgtatatctgtggcgatagcaccgagtgctccaacctgctgctgcagtacggctccttttgtacccagctgaatagagccctgacaggcatcgccgtggagcaggataagaacacacaggaggtgttcgcccaggtgaagcagatctacaagaccccacccatcaaggactttggcggcttcaacttcagccagatcctgcctgatccaagcaagccctccaagaggtcttttatcgaggacctgctgttcaacaaggtgaccctggccgatgccggcttcatcaagcagtatggagattgcctgggagacatcgcagcccgcgacctgatctgtgcccagaagtttaatggcctgaccgtgctgcctccactgctgacagatgagatgatcgcccagtacacatctgccctgctggccggcaccatcacaagcggatggaccttcggcgcaggagccgccctgcagatcccttttgccatgcagatggcctataggttcaacggcatcggcgtgacccagaatgtgctgtacgagaaccagaagctgatcgccaatcagtttaacagcgccatcggcaagatccaggactctctgtcctctacagccagcgccctgggcaagctgcaggatgtggtgaatcagaacgcccaggccctgaataccctggtgaagcagctgagctccaacttcggcgccatctctagcgtgctgaatgacatcctgagccggctggacccccctgaggcagaggtgcagatcgacaggctgatcacaggccgcctgcagagcctgcagacctacgtgacacagcagctgatcagggcagcagagatcagagcctccgccaatctggccgccaccaagatgagcgagtgcgtgctgggacagtccaagagggtggacttttgtggcaagggctatcacctgatgtctttcccacagagcgcccctcacggcgtggtgtttctgcacgtgacctacgtgccagcccaggagaagaacttcaccacagcaccagccatctgccacgatggaaaggcacactttcctagggagggcgtgttcgtgtctaacggcacccactggtttgtgacacagcgcaatttctacgagccacagatcatcaccacagacaatacattcgtgagcggcaactgtgatgtggtgatcggcatcgtgaacaataccgtgtatgatccactgcagcccgagctggactcctttaaggaggagctggataagtacttcaagaatcacacctctcccgacgtggatctgggcgacatctccggcatcaatgcctctgtggtgaacatccagaaggagatcgaccggctgaacgaggtggccaagaatctgaacgagagcctgatcgatctgcaggagctgggcaagtatgagcagtacatcaagggctctggcagagagaacctgtatttccagggaggaggaggcagcggatacatccctgaggcaccaagggacggacaggcctacgtgcgcaaggatggcgagtgggtgctgctgtccacctttctgggccatcatcaccaccaccaccaccactga

SEQ ID NO: 1425 - DNA, 3846 bp, Artificial Sequence
  Description of Artificial Sequence: Synthetic polynucleotide
atgggcatcctgccaagcccaggaatgcccgccctgctgtctctggtgagcctgctgtccgtgctgctgatgggatgcgtggcagagacaggcacacagtgcgtgaacctgaccacaaggacccagctgccccctgcctataccaattctttcacacggggcgtgtactatcccgacaaggtgtttagaagctccgtgctgcactccacacaggatctgtttctgcctttcttttctaacgtgacctggttccacgccatccacgtgtccggcaccaatggcacaaagcggttcgacaatcccgtgctgccttttaacgatggcgtgtacttcgccagcaccgagaagtccaacatcatcagaggctggatctttggcaccacactggactctaagacacagagcctgctgatcgtgaacaatgccaccaacgtggtgatcaaggtgtgcgagttccagttttgtaatgatccattcctgggcgtgtactatcacaagaacaataagtcctggatggagtctgagtttcgcgtgtattctagcgccaacaattgcacatttgagtacgtgagccagcccttcctgatggacctggagggcaagcagggcaatttcaagaacctgagggagttcgtgtttaagaatatcgatggctacttcaagatctacagcaagcacaccccaatcaacctggtgcgcgacctgccacagggattctccgccctggagccactggtggatctgcccatcggcatcaacatcacccggtttcagacactgctggccctgcacagatcctacctgacaccaggcgactcctctagcggatggaccgcaggagctgccgcctactatgtgggctatctgcagccccggaccttcctgctgaagtacaacgagaatggcaccatcacagacgcagtggattgcgccctggaccccctgtctgagacaaagtgtacactgaagagctttaccgtggagaagggcatctatcagacaagcaatttcagggtgcagcctaccgagtccatcgtgcgctttcccaatatcacaaacctgtgcccttttggcgaggtgttcaacgccaccagattcgccagcgtgtacgcctggaatcggaagagaatctccaactgcgtggccgactattctgtgctgtacaactccgcctctttcagcacctttaagtgctatggcgtgtctcccacaaagctgaatgatctgtgctttaccaacgtgtacgccgatagcttcgtgatcaggggagacgaagtgagacagatcgcaccaggacagacaggaaagatcgcagactacaattataagctgcctgacgatttcaccggctgcgtgatcgcctggaactccaacaatctggattctaaagtgggcggcaactacaattatctgtacaggctgtttcgcaagtccaatctgaagccattcgagcgggacatctccacagagatctaccaggccggctctaccccctgcaatggcgtggagggctttaactgttatttccctctgcagtcttacggcttccagccaacaaacggcgtgggctatcagccctacagagtggtggtgctgtcctttgagctgctgcacgcaccagcaacagtgtgcggcccaaagaagtctaccaatctggtgaagaacaagtgcgtgaacttcaacttcaacggactgaccggcacaggcgtgctgaccgagagcaataagaagttcctgccttttcagcagttcggcagggacatcgcagataccacagacgccgtgcgcgaccctcagaccctggagatcctggacatcacaccatgcagcttcggcggcgtgtccgtgatcacaccaggcaccaatacatccaaccaggtggccgtgctgtatcaggacgtgaattgtaccgaggtgcccgtggcaatccacgcagatcagctgacccctacatggcgggtgtactctaccggcagcaacgtgttccagacaagagccggatgcctgatcggagcagagcacgtgaacaatagctatgagtgcgacatccctatcggcgccggcatctgtgccagctaccagacccagacaaactccccatctggagcaggctccgtggccagccagtccatcatcgcctataccatgagcctgggcgccgagaacccggtgccgtactccaacaataacatcgccatccctaccaacttcacaatcagcgtgaccacagagatcctgccagtgtctatgaccaagacaagcgtggactgcacaatgtatatctgtggcgatagcaccgagtgctccaacctgctgctgcagtacggctccttttgtacccagctgaatagagccctgacaggcatcgccgtggagcaggataagaacacacaggaggtgttcgcccaggtgaagcagatctacaagaccccacccatcaaggactttggcggcttcaacttcagccagatcctgcctgatccaagcaagccctccaagaggtcttttatcgaggacctgctgttcaacaaggtgaccctggccgatgccggcttcatcaagcagtatggagattgcctgggagacatcgcagcccgcgacctgatctgtgcccagaagtttaatggcctgaccgtgctgcctccactgctgacagatgagatgatcgcccagtacacatctgccctgctggccggcaccatcacaagcggatggaccttcggcgcaggagccgccctgcagatcccttttgccatgcagatggcctataggttcaacggcatcggcgtgacccagaatgtgctgtacgagaaccagaagctgatcgccaatcagtttaacagcgccatcggcaagatccaggactctctgtcctctacagccagcgccctgggcaagctgcaggatgtggtgaatcagaacgcccaggccctgaataccctggtgaagcagctgagctccaacttcggcgccatctctagcgtgctgaatgacatcctgagccggctggacccccctgaggcagaggtgcagatcgacaggctgatcacaggccgcctgcagagcctgcagacctacgtgacacagcagctgatcagggcagcagagatcagagcctccgccaatctggccgccaccaagatgagcgagtgcgtgctgggacagtccaagagggtggacttttgtggcaagggctatcacctgatgtctttcccacagagcgcccctcacggcgtggtgtttctgcacgtgacctacgtgccagcccaggagaagaacttcaccacagcaccagggatctgccacgatggaaaggcatattttcctagggagggcgtgttcgtgtctaacggcacctcatggtatataacacagcgcaatttctacgagccacgtccgatcaccacagacaatacattcgtgagcggcaactgtgatgtggtgatcggcatcgtgaacaataccgtgtatgatccactgcagcccgagctggactcctttaaggaggagctggataagtacttcaagaatcacacctctcccgacgtggatctgggcgacatctccggcatcaatgcctctgtggtgaacatccagaaggagatcgaccggctgaacgaggtggccaagaatctgaacgagagcctgatcgatctgcaggagctgggcaagtatgagcagtacatcaagggctctggcagagagaacctgtatttccagggaggaggaggcagcggatacatccctgaggcaccaagggacggacaggcctacgtgcgcaaggatggcgagtgggtgctgctgtccacctttctgggccatcatcaccaccaccaccaccactga

SEQ ID NO: 1426 - DNA, 3846 bp, Artificial Sequence
  Description of Artificial Sequence: Synthetic polynucleotide
atgggcatcctgccaagcccaggaatgcccgccctgctgtctctggtgagcctgctgtccgtgctgctgatgggatgcgtggcagagacaggcacacagtgcgtgaacctgaccacaaggacccagctgccccctgcctataccaattctttcacacggggcgtgtactatcccgacaagatttttagaagcaacgtgctgcactccacacaggatctgtttctgcctttcttttctaacgtgacctggttccacgccctacacgtgaaaggcaccaatggcacaaagcggttcgacaatcccgtgctgccttttaacgatggcgtgtacttcgccgcaatcgagaagtccaacatcatcagaggctggatctttggcaccacactggactctaagacacagagcctgctgatcgtgaacaatgccaccaacgtggtgatccgcgtgtgcgagttccagttttgtgaaaatccattcctgggcgtgtactatcacaagaacaataagtcctggcgagaggaagagtggcgcgtgtattctagcgccaacaattgcacatttgagtacgtgagccagcccttcctgtatgacctgaatggcaagcagggcaatttccatcatctgagggagttcgtgtttaagaatatcgatggctacttcaagatctacagcaagtgggaaccaatcaacctggtgcgcgacctgccacagggattctccgccctggagccactgatggatctgcccatcggcatcaacatcacccattttcagacaattctgagtctgtcaagatcctaccgtacaccaggcgactcctctagcggatggaccgcaggagctgccgcctactatgtgggctatctgcagccccggaccttcctgctgaagtacgatgagaatggctatatcacagacgcagtggattgctcgctggaccccctgtctgagacaaagtgtaaactgaagagctttaccgtggagaagggcatctatcagacaagcaatttcagggtgcagcctacctacgaaatcgtgcgctttcccaatatcacaaactgttgcccttttgacgaggtgttcaacgccaccagattcgccagcgtgtacaactggaatcggcaaagaatctccaactgcgtggccgactattctgtgctgtacaactccgcctctttcagcacctttcaatgctatggcgtgtctcccacaaagctgaatgatctgtgctttaccaacgtgtacgccgatatattcgtgatcaggggatcagaagtgagacagatcgcaccaggacagacaggagaaatcgcagactacaattataagctgcctgacgatttcaccggctgcgtgatcgcctggaactccaacaatctggattctacggtgggcggcaactacaattatctgtacaggctgtttcgcaagtccaatatgaagccattcgagcgggacatctccacagaggcttaccaggccggctgtaccccctgcaatggcgtggagggctttaactgttatttccctctgcagtcttacggcttccagccaacaaacggcgtgggctatcagccctacagagtggtggtgctgaaatttgagctgctgcacgcaccagcaacagtgtgcggcccaaaggattctaccaatctggtgaagaacaagtgcgtggattataacttcaacggaaggaccggcacaggcgtgctgaccgagagcaataagaagttcctgccttttcagcagttcggcagggacatctcagataccctcgacgccgtgcgcgaccctacgaccggggagatcctgtgtatcacaccatgcagcttcggcggcgtgtccgtgatcacaccaggcaccaatacatccaaccaggtggccgtgctgtatcaggacgtgaattgtaccgaggtgcccgaagcaatccacagtaatcagctgcgacctacatggcgggtgtactctaccggcagcaacgtgttccagacaagagccggatgcctgatcggagcagagcacgtgaacaatagctatgagtgcgacatccctatcggcaatggcatctgtgccagctaccagacccagacaaactccccatctggatcgggctccgtgagtagccagtccatcatcgcctataccatgagcctgggcgccgagaacactgtggcctactccaacaataatatcgccatccctaccaacttcacaatcagcgtgcaaacagagatcctgccagtgtctatgaccaaggtaagcgtggactgcacaatgtatatctgtggcgatagcacccgttgcctcaacctgctgagtcagtacggctccttttgttcacagctggaaagagccctgaacggcatcgcccgagagcaggataagaacttactaaatgtgttcgcccaggtgaagcagatctacaagaccccacccatcaaggactttggcggcttcaacttcagccagatcctgcctgatccaagcaagccctccaagaggtcttttatcgaggacctgctgttcaacaaggtgaccctggccgatcttggcttcgtcaagcagtataaagattgcctgggagatcaagcagcccgcgacctgatctgtgcccagaagtacaatggcataatggtgctgcctccactgctgacagatgagatgatcgcccagtacacagcgagtctgctggccggcaccatcacagctggatggaccttcggcgcaggagccgccctgcagatcccttttgccatgcagatggcctataggttcaacggcatcggcgtgcaacagaatgtgctgtacgagaaccagaagataatcgccaatcagtttaacaatgccatcggcaatatccaggacggactgtccactacagccagcgccctgtcaaagctgcaggatgtggtgaatcagcaagcccaggccctgaatgaactggtgaagcagctgagctccaacttcggcgccatctctagcgtgataaatgacatctataatcggctggacccccctgaggcagaggcacagatcgacaggctgatcacaggccgcctgcagagcctgcagacctacgtgacacagcagctgatcagggcaactgagatcagagcctccgcccaactggccgccgaaaagatgagcgagtgcgtgaaaggacagtccaacaggtatggtttttgtggcaatggctatcacctgatgtctttcccacagagcgcccctcacggcgtggtgtttctgcacgtgacctacgtgccaactcagtttaagaacttcaccacagcaccagggatctgccacgatggaaaggcattttttcctagggagggcgtgttcgtgtctaacggcaccgaatggtacattacacagcgcaatttctacgagccacgaatcatcaccacagacaatacattcgtgagcggcaactgtgatgtggtgatcggcatcgtgaacaataccgtgtatgatccactgcagcccgagctggactcctttaaggaggagctggataagtacttcaagaatcacacctctcccgacgtggatctgggcgacatctccggcatcaatgcctctgtggtgaacatccagaaggagatcgaccggctgaacgaggtggccaagaatctgaacgagagcctgatcgatctgcaggagctgggcaagtatgagcagtacatcaagggctctggcagagagaacctgtatttccagggaggaggaggcagcggatacatccctgaggcaccaagggacggacaggcctacgtgcgcaaggatggcgagtgggtgctgctgtccacctttctgggccatcatcaccaccaccaccaccactga

SEQ ID NO: 1427 - DNA, 3846 bp, Artificial Sequence
  Description of Artificial Sequence: Synthetic polynucleotide
atgggcatcctgccaagcccaggaatgcccgccctgctgtctctggtgagcctgctgtccgtgctgctgatgggatgcgtggcagagacaggcacacagtgcgtgaacctgaccacaaggacccagctgccccctgcctataccaattctttcacacggggcgtgtactatcccgacaaggtgtttagaagctccgtgctgcactccacacaggatctgtttctgcctttcttttctaacgtgacctggttccacgccatccacgtgtccggcaccaatggcacagtacggttcgacaatcccgtgctgccttttaacgatggcgtgtacttcgccagcaccgagaagtccaacatcatcagaggctggatctttggcaccacactggactctaagacacagagcctgctgatcgtgaacaatgccaccaacgtggtgatcaaggtgtgcgagttccagttttgtaatgatccattcctgggcgtgtactatcacaagaacaataagtcctggatggagtctgagtttcgcgtgtattctagcgccaacaattgcacatttgagtacgtgagccagcccttcctgatggacctggagggcaagcagggcaatttcaagaacctgagggagttcgtgtttaagaatatcgatggctacttcaagatctacagcaagcacaccccaatcaacctggtgcgcgacctgccacagggattctccgccctggagccactggtggatctgcccatcggcatcaacatcacccggtttcagacactgctggccctgcacagatcctacctgacaccaggcgactcctctagcggatggaccgcaggagctgccgcctactatgtgggctatctgcagccccggaccttcctgctgaagtacaacgagaatggcaccatcacagacgcagtggattgcgccctggaccccctgtctgagacaaagtgtacactgaagagctttaccgtggagaagggcatctatcagacaagcaatttcagggtgcagcctaccgagtccatcgtgcgctttcccaatatcacaaacctgtgcccttttggcgaggtgttcaacgccaccagattcgccagcgtgtacgcctggaatcggaagagaatctccaactgcgtggccgactattctgtgctgtacaactccgcctctttcagcacctttaagtgctatggcgtgtctcccacaaagctgaatgatctgtgctttaccaacgtgtacgccgatagcttcgtgatcaggggagacgaagtgagacagatcgcaccaggacagacaggaaagatcgcagactacaattataagctgcctgacgatttcaccggctgcgtgatcgcctggaactccaacaatctggattctaaagtgggcggcaactacaattatctgtacaggctgtttcgcaagtccaatctgaagccattcgagcgggacatctccacagagatctaccaggccggctctaccccctgcaatggcgtggagggctttaactgttatttccctctgcagtcttacggcttccagccaacaaacggcgtgggctatcagccctacagagtggtggtgctgtcctttgagctgctgcacgcaccagcaacagtgtgcggcccaaagaagtctaccaatctggtgaagaacaagtgcgtgaacttcaacttcaacggactgaccggcacaggcgtgctgaccgagagcaataagaagttcctgccttttcagcagttcggcagggacatcgcagataccacagacgccgtgcgcgaccctcagaccctggagatcctggacatcacaccatgcagcttcggcggcgtgtccgtgatcacaccaggcaccaatacatccaaccaggtggccgtgctgtatcaggacgtgaattgtaccgaggtgcccgtggcaatccacgcagatcagctgacccctacatggcgggtgtactctaccggcagcaacgtgttccagacaagagccggatgcctgatcggagcagagcacgtgaacaatagctatgagtgcgacatccctatcggcgccggcatctgtgccagctaccagacccagacaaactccccatctggagcaggctccgtggccagccagtccatcatcgcctataccatgagcctgggcgccgagaacagcgtggcctactccaacaattctatcgccatccctaccaacttcacaatcagcgtgaccacagagatcctgccagtgtctatgaccaagacaagcgtggactgcacaatgtatatctgtggcgatagcaccgagtgctccaacctgctgctgcagtacggctccttttgtacccagctgaatagagccctgacaggcatcgccgtggagcaggataagaacacacaggaggtgttcgcccaggtgaagcagatctacaagaccccacccatcaaggactttggcggcttcaacttcagccagatcctgcctgatccaagcaagccctccaagaggtcttttatcgaggacctgctgttcaacaaggtgaccctggccgatgccggcttcatcaagcagtatggagattgcctgggagacatcgcagcccgcgacctgatctgtgcccagaagtttaatggcctgaccgtgctgcctccactgctgacagatgagatgatcgcccagtacacatctgccctgctggccggcaccatcacaagcggatggaccttcggcgcaggagccgccctgcagatcccttttgccatgcagatggcctataggttcaacggcatcggcgtgacccagaatgtgctgtacgagaaccagaagctgatcgccaatcagtttaacagcgccatcggcaagatccaggactctctgtcctctacagccagcgccctgggcaagctgcaggatgtggtgaatcagaacgcccaggccctgaataccctggtgaagcagctgagctccaacttcggcgccatctctagcgtgctgaatgacatcctgagccggctggacccccctgaggcagaggtgcagatcgacaggctgatcacaggccgcctgcagagcctgcagacctacgtgacacagcagctgatcagggcagcagagatcagagcctccgccaatctggccgccaccaagatgagcgagtgcgtgctgggacagtccaagagggtggacttttgtggcaagggctatcacctgatgtctttcccacagagcgcccctcacggcgtggtgtttctgcacgtgacctacgtgccagcccaggagaagaacttcaccacagcaccagccatctgccacgatggaaaggcacactttcctagggagggcgtgttcgtgtctaacggcacccactggtttgtgacacagcgcaatttctacgagccacagatcatcaccacagacaatacattcgtgagcggcaactgtgatgtggtgatcggcatcgtgaacaataccgtgtatgatccactgcagcccgagctggactcctttaaggaggagctggataagtacttcaagaatcacacctctcccgacgtggatctgggcgacatctccggcatcaatgcctctgtggtgaacatccagaaggagatcgaccggctgaacgaggtggccaagaatctgaacgagagcctgatcgatctgcaggagctgggcaagtatgagcagtacatcaagggctctggcagagagaacctgtatttccagggaggaggaggcagcggatacatccctgaggcaccaagggacggacaggcctacgtgcgcaaggatggcgagtgggtgctgctgtccacctttctgggccatcatcaccaccaccaccaccactga

SEQ ID NO: 1428 - DNA, 3846 bp, Artificial Sequence
  Description of Artificial Sequence: Synthetic polynucleotide
atgggcatcctgccaagcccaggaatgcccgccctgctgtctctggtgagcctgctgtccgtgctgctgatgggatgcgtggcagagacaggcacacagtgcgtgaacctgaccacaaggacccagctgccccctgcctataccaattctttcacacggggcgtgtactatcccgacaaggtgtttagaagctccgtgctgcactccacacaggatctgtttctgcctttcttttctaacgtgacctggttccacgccatccacgtgtccggcaccaatggcacaaagcggttcgacaatcccgtgctgccttttaacgatggcgtgtacttcgccagcaccgagaagtccaacatcatcagaggctggatctttggcaccacactggactctaagacacagagcctgctgatcgtgaacaatgccaccaacgtggtgatcaaggtgtgcgagttccagttttgtaatgatccattcctgggcgtgtactatcacaagaacaataagtcctggatggagtctgagtttcgcgtgtattctagcgccaacaattgcacatttgagtacgtgagccagcccttcctgatggacctggagggcaagcagggcaatttcaagaacctgagggagttcgtgtttaagaatatcgatggctacttcaagatctacagcaagcacaccccaatcaacctggtgcgcgacctgccacagggattctccgccctggagccactggtggatctgcccatcggcatcaacatcacccggtttcagacactgctggccctgcacagatcctacctgacaccaggcgactcctctagcggatggaccgcaggagctgccgcctactatgtgggctatctgcagccccggaccttcctgctgaagtacaacgagaatggcaccatcacagacgcagtggattgcgccctggaccccctgtctgagacaaagtgtacactgaagagctttaccgtggagaagggcatctatcagacaagcaatttcagggtgcagcctaccgagtccatcgtgcgctttcccaatatcacaaacctgtgcccttttggcgaggtgttcaacgccaccagattcgccagcgtgtacgcctggaatcggaagagaatctccaactgcgtggccgactattctgtgctgtacaactccgcctctttcagcacctttaagtgctatggcgtgtctcccacaaagctgaatgatctgtgctttaccaacgtgtacgccgatagcttcgtgatcaggggagacgaagtgagacagatcgcaccaggacagacaggaaagatcgcagactacaattataagctgcctgacgatttcaccggctgcgtgatcgcctggaactccaacaatctggattctaaagtgggcggcaactacaattatctgtacaggctgtttcgcaagtccaatctgaagccattcgagcgggacatctccacagagatctaccaggccggctctaccccctgcaatggcgtggagggctttaactgttatttccctctgcagtcttacggcttccagccaacaaacggcgtgggctatcagccctacagagtggtggtgctgtcctttgagctgctgcacgcaccagcaacagtgtgcggcccaaagaagtctaccaatctggtgaagaacaagtgcgtgaacttcaacttcaacggactgaccggcacaggcgtgctgaccgagagcaataagaagttcctgccttttcagcagttcggcagggacatcgcagataccacagacgccgtgcgcgaccctcagaccctggagatcctggacatcacaccatgcagcttcggcggcgtgtccgtgatcacaccaggcaccaatacatccaaccaggtggccgtgctgtatcaggacgtgaattgtaccgaggtgcccgtggcaatccacgcagatcagctgacccctacatggcgggtgtactctaccggcagcaacgtgttccagacaagagccggatgcctgatcggagcagagcacgtgaacaatagctatgagtgcgacatccctatcggcgccggcatctgtgccagctaccagacccagacaaactccccatctggagcaggctccgtggccagccagtccatcatcgcctataccatgagcctgggcgccgagaacagcgtggcctactccaacaattctatcgccatccctaccaacttcacaatcagcgtgaccacagagatcctgccagtgtctatgaccaagacaagcgtggactgcacaatgtatatctgtggcgatagcaccgagtgctccaacctgctgctgcagtacggctccttttgtacccagctgaatagagccctgacaggcatcgccgtggagcaggataagaacacacaggaggtgttcgcccaggtgaagcagatctacaagaccccacccatcaaggactttggcggcttcaacttcagccagatcctgcctgatccaagcaagccctccaagaggtcttttatcgaggacctgctgttcaacaaggtgaccctggccgatgccggcttcatcaagcagtatggagattgcctgggagacatcgcagcccgcgacctgatctgtgcccagaagtttaatggcctgaccgtgctgcctccactgctgacagatgagatgatcgcccagtacacatctgccctgctggccggcaccatcacaagcggatggaccttcggcgcaggagccgccctgcagatcccttttgccatgcagatggcctataggttcaacggcatcggcgtgacccagaatgtgctgtacgagaaccagaagctgatcgccaatcagtttaacaatgccatcggcaagatccaggactctctgtcctctacagccagcgccctgggcaagctgcaggatgtggtgaatcagaacgcccaggccctgaataccctggtgaagcagctgagctccaacttcggcgccatctctagcgtgctgaatgacatcctgagccggctggacccccctgaggcagaggtgcagatcgacaggctgatcacaggccgcctgcagagcctgcagacctacgtgacacagcagctgatcagggcagcagagatcagagcctccgccaatctggccgccaccaagatgagcgagtgcgtgctgggacagtccaagagggtggacttttgtggcaagggctatcacctgatgtctttcccacagagcgcccctcacggcgtggtgtttctgcacgtgacctacgtgccagcccaggagaagaacttcaccacagcaccagccatctgccacgatggaaaggcacactttcctagggagggcgtgttcgtgtctaacggcacccactggtttgtgacacagcgcaatttctacgagccacagatcatcaccacagacaatacattcgtgagcggcaactgtgatgtggtgatcggcatcgtgaacaataccgtgtatgatccactgcagcccgagctggactcctttaaggaggagctggataagtacttcaagaatcacacctctcccgacgtggatctgggcgacatctccggcatcaatgcctctgtggtgaacatccagaaggagatcgaccggctgaacgaggtggccaagaatctgaacgagagcctgatcgatctgcaggagctgggcaagtatgagcagtacatcaagggctctggcagagagaacctgtatttccagggaggaggaggcagcggatacatccctgaggcaccaagggacggacaggcctacgtgcgcaaggatggcgagtgggtgctgctgtccacctttctgggccatcatcaccaccaccaccaccactga

SEQ ID NO: 1429 - DNA, 3846 bp, Artificial Sequence
  Description of Artificial Sequence: Synthetic polynucleotide
atgggcatcctgccaagcccaggaatgcccgccctgctgtctctggtgagcctgctgtccgtgctgctgatgggatgcgtggcagagacaggcacacagtgcgtgaacctgaccacaaggacccagctgccccctgcctataccaattctttcacacggggcgtgtactatcccgacaaggtgtttagaagctccgtgctgcactccacacaggatctgtttctgcctttcttttctaacgtgacctggttccacgccatccacgtgtccggcaccaatggcacaaagcggttcgacaatcccgtgctgccttttaacgatggcgtgtacttcgccagcaccgagaagtccaacatcatcagaggctggatctttggcaccacactggactctaagacacagagcctgctgatcgtgaacaatgccaccaacgtggtgatcaaggtgtgcgagttccagttttgtaatgatccattcctgggcgtgtactatcacaagaacaataagtcctggatggagtctgagtttcgcgtgtattctagcgccaacaattgcacatttgagtacgtgagccagcccttcctgatggacctggagggcaagcagggcaatttcaagaacctgagggagttcgtgtttaagaatatcgatggctacttcaagatctacagcaagcacaccccaatcaacctggtgcgcgacctgccacagggattctccgccctggagccactggtggatctgcccatcggcatcaacatcacccggtttcagacactgctggccctgcacagatcctacctgacaccaggcgactcctctagcggatggaccgcaggagctgccgcctactatgtgggctatctgcagccccggaccttcctgctgaagtacaacgagaatggcaccatcacagacgcagtggattgcgccctggaccccctgtctgagacaaagtgtacactgaagagctttaccgtggagaagggcatctatcagacaagcaatttcagggtgcagcctaccgagtccatcgtgcgctttcccaatatcacaaacctgtgcccttttggcgaggtgttcaacgccaccagattcgccagcgtgtacgcctggaatcggaagagaatctccaactgcgtggccgactattctgtgctgtacaactccgcctctttcagcacctttaagtgctatggcgtgtctcccacaaagctgaatgatctgtgctttaccaacgtgtacgccgatagcttcgtgatcaggggagacgaagtgagacagatcgcaccaggacagacaggaaagatcgcagactacaattataagctgcctgacgatttcaccggctgcgtgatcgcctggaactccaacaatctggattctaaagtgggcggcaactacaattatctgtacaggctgtttcgcaagtccaatctgaagccattcgagcgggacatctccacagagatctaccaggccggctctaccccctgcaatggcgtggagggctttaactgttatttccctctgcagtcttacggcttccagccaacaaacggcgtgggctatcagccctacagagtggtggtgctgtcctttgagctgctgcacgcaccagcaacagtgtgcggcccaaagaagtctaccaatctggtgaagaacaagtgcgtgaacttcaacttcaacggactgaccggcacaggcgtgctgaccgagagcaataagaagttcctgccttttcagcagttcggcagggacatcgcagataccacagacgccgtgcgcgaccctcagaccctggagatcctggacatcacaccatgcagcttcggcggcgtgtccgtgatcacaccaggcaccaatacatccaaccaggtggccgtgctgtatcaggacgtgaattgtaccgaggtgcccgtggcaatccacgcagatcagctgacccctacatggcgggtgtactctaccggcagcaacgtgttccagacaagagccggatgcctgatcggagcagagcacgtgaacaatagctatgagtgcgacatccctatcggcgccggcatctgtgccagctaccagacccagacaaactccccatctggagcaggctccgtggccagccagtccatcatcgcctataccatgagcctgggcgccgagaacagcgtggcctactccaacaattctatcgccatccctaccaacttcacaatcagcgtgaccacagaggtcctgccagtgtctatgaccaagacaagcgtggactgcacaatgtatatctgtggcgatagcaccgagtgctccaacctgctgctgcagtacggctccttttgtacccagctgaatagagccctgacaggcatcgccgtggagcaggataagaacacacaggaggtgttcgcccaggtgaagcagatctacaagaccccacccatcaaggactttggcggcttcaacttcagccagatcctgcctgatccaagcaagccctccaagaggtcttttatcgaggacctgctgttcaacaaggtgaccctggccgatgccggcttcatcaagcagtatggagattgcctgggagacatcgcagcccgcgacctgatctgtgcccagaagtttaatggcctgaccgtgctgcctccactgctgacagatgagatgatcgcccagtacacatctgccctgctggccggcaccatcacaagcggatggaccttcggcgcaggagccgccctgcagatcccttttgccatgcagatggcctataggttcaacggcatcggcgtgacccagaatgtgctgtacgagaaccagaagctgatcgccaatcagtttaacagcgccatcggcaagatccaggactctctgtcctctacagccagcgccctgggcaagctgcaggatgtggtgaatcagaacgcccaggccctgaataccctggtgaagcagctgagctccaacttcggcgccatctctagcgtgctgaatgacatcctgagccggctggacccccctgaggcagaggtgcagatcgacaggctgatcacaggccgcctgcagagcctgcagacctacgtgacacagcagctgatcagggcagcagagatcagagcctccgccaatctggccgccaccaagatgagcgagtgcgtgctgggacagtccaagagggtggacttttgtggcaagggctatcacctgatgtctttcccacagagcgcccctcacggcgtggtgtttctgcacgtgacctacgtgccagcccaggagaagaacttcaccacagcaccagccatctgccacgatggaaaggcacactttcctagggagggcgtgttcgtgtctaacggcacccactggtttgtgacacagcgcaatttctacgagccacagatcatcaccacagacaatacattcgtgagcggcaactgtgatgtggtgatcggcatcgtgaacaataccgtgtatgatccactgcagcccgagctggactcctttaaggaggagctggataagtacttcaagaatcacacctctcccgacgtggatctgggcgacatctccggcatcaatgcctctgtggtgaacatccagaaggagatcgaccggctgaacgaggtggccaagaatctgaacgagagcctgatcgatctgcaggagctgggcaagtatgagcagtacatcaagggctctggcagagagaacctgtatttccagggaggaggaggcagcggatacatccctgaggcaccaagggacggacaggcctacgtgcgcaaggatggcgagtgggtgctgctgtccacctttctgggccatcatcaccaccaccaccaccactga

SEQ ID NO: 1430 - DNA, 3846 bp, Artificial Sequence
  Description of Artificial Sequence: Synthetic polynucleotide
atgggcatcctgccaagcccaggaatgcccgccctgctgtctctggtgagcctgctgtccgtgctgctgatgggatgcgtggcagagacaggcacacagtgcgtgaacctgaccacaaggacccagctgccccctgcctataccaattctttcacacggggcgtgtactatcccgacaaggtgtttagaagctccgtgctgcactccacacaggatctgtttctgcctttcttttctaacgtgacctggttccacgccatccacgtgtccggcaccaatggcacaaagcggttcgacaatcccgtgctgccttttaacgatggcgtgtacttcgccagcaccgagaagtccaacatcatcagaggctggatctttggcaccacactggactctaagacacagagcctgctgatcgtgaacaatgccaccaacgtggtgatcaaggtgtgcgagttccagttttgtaatgatccattcctgggcgtgtactatcacaagaacaataagtcctggatggagtctgagtttcgcgtgtattctagcgccaacaattgcacatttgagtacgtgagccagcccttcctgatggacctggagggcaagcagggcaatttcaagaacctgagggagttcgtgtttaagaatatcgatggctacttcaagatctacagcaagcacaccccaatcaacctggtgcgcgacctgccacagggattctccgccctggagccactggtggatctgcccatcggcatcaacatcacccggtttcagacactgctggccctgcacagatcctacctgacaccaggcgactcctctagcggatggaccgcaggagctgccgcctactatgtgggctatctgcagccccggaccttcctgctgaagtacaacgagaatggcaccatcacagacgcagtggattgcgccctggaccccctgtctgagacaaagtgtacactgaagagctttaccgtggagaagggcatctatcagacaagcaatttcagggtgcagcctaccgagtccatcgtgcgctttcccaatatcacaaacctgtgcccttttggcgaggtgttcaacgccaccagattcgccagcgtgtacgcctggaatcggaagagaatctccaactgcgtggccgactattctgtgctgtacaactccgcctctttcagcacctttaagtgctatggcgtgtctcccacaaagctgaatgatctgtgctttaccaacgtgtacgccgatagcttcgtgatcaggggagacgaagtgagacagatcgcaccaggacagacaggaaagatcgcagactacaattataagctgcctgacgatttcaccggctgcgtgatcgcctggaactccaacaatctggattctaaagtgggcggcaactacaattatctgtacaggctgtttcgcaagtccaatctgaagccattcgagcgggacatctccacagagatctaccaggccggctctaccccctgcaatggcgtggagggctttaactgttatttccctctgcagtcttacggcttccagccaacaaacggcgtgggctatcagccctacagagtggtggtgctgtcctttgagctgctgcacgcaccagcaacagtgtgcggcccaaagaagtctaccaatctggtgaagaacaagtgcgtgaacttcaacttcaacggactgaccggcacaggcgtgctgaccgagagcaataagaagttcctgccttttcagcagttcggcagggacatctcagataatacagacgccgtgcgcgaccctactaccctggagatcctggacatcacaccatgcagcttcggcggcgtgtccgtgatcacaccaggcaccaatacatccaaccaggtggccgtgctgtatcaggacgtgaattgtaccgaggtgcccgtggcaatccacgcagatcagctgacccctacatggcgggtgtactctaccggcagcaacgtgttccagacaagagccggatgcctgatcggagcagagcacgtgaacaatagctatgagtgcgacatccctatcggcgccggcatctgtgccagctaccagacccagacaaactccccatctggagcaggctccgtggccagccagtccatcatcgcctataccatgagcctgggcgccgagaacagcgtggcctactccaacaattctatcgccatccctaccaacttcacaatcagcgtgaccacagagatcctgccagtgtctatgaccaagacaagcgtggactgcacaatgtatatctgtggcgatagcaccgagtgctccaacctgctgctgcagtacggctccttttgtacccagctgaatagagccctgacaggcatcgccgtggagcaggataagaacacacaggaggtgttcgcccaggtgaagcagatctacaagaccccacccatcaaggactttggcggcttcaacttcagccagatcctgcctgatccaagcaagccctccaagaggtcttttatcgaggacctgctgttcaacaaggtgaccctggccgatgccggcttcatcaagcagtatggagattgcctgggagacatcgcagcccgcgacctgatctgtgcccagaagtttaatggcctgaccgtgctgcctccactgctgacagatgagatgatcgcccagtacacatctgccctgctggccggcaccatcacaagcggatggaccttcggcgcaggagccgccctgcagatcccttttgccatgcagatggcctataggttcaacggcatcggcgtgacccagaatgtgctgtacgagaaccagaagctgatcgccaatcagtttaacagcgccatcggcaagatccaggactctctgtcctctacagccagcgccctgggcaagctgcaggatgtggtgaatcagaacgcccaggccctgaataccctggtgaagcagctgagctccaacttcggcgccatctctagcgtgctgaatgacatcctgagccggctggacccccctgaggcagaggtgcagatcgacaggctgatcacaggccgcctgcagagcctgcagacctacgtgacacagcagctgatcagggcagcagagatcagagcctccgccaatctggccgccaccaagatgagcgagtgcgtgctgggacagtccaagagggtggacttttgtggcaagggctatcacctgatgtctttcccacagagcgcccctcacggcgtggtgtttctgcacgtgacctacgtgccagcccaggagaagaacttcaccacagcaccagccatctgccacgatggaaaggcacactttcctagggagggcgtgttcgtgtctaacggcacccactggtttgtgacacagcgcaatttctacgagccacagatcatcaccacagacaatacattcgtgagcggcaactgtgatgtggtgatcggcatcgtgaacaataccgtgtatgatccactgcagcccgagctggactcctttaaggaggagctggataagtacttcaagaatcacacctctcccgacgtggatctgggcgacatctccggcatcaatgcctctgtggtgaacatccagaaggagatcgaccggctgaacgaggtggccaagaatctgaacgagagcctgatcgatctgcaggagctgggcaagtatgagcagtacatcaagggctctggcagagagaacctgtatttccagggaggaggaggcagcggatacatccctgaggcaccaagggacggacaggcctacgtgcgcaaggatggcgagtgggtgctgctgtccacctttctgggccatcatcaccaccaccaccaccactga

SEQ ID NO: 1431 - DNA, 3846 bp, Artificial Sequence
  Description of Artificial Sequence: Synthetic polynucleotide
atgggcatcctgccaagcccaggaatgcccgccctgctgtctctggtgagcctgctgtccgtgctgctgatgggatgcgtggcagagacaggcacacagtgcgtgaacctgaccacaaggacccagctgccccctgcctataccaattctttcacacggggcgtgtactatcccgacaaggtgtttagaagctccgtgctgcactccacacaggatctgtttctgcctttcttttctaacgtgacctggttccacgccatccacgtgtccggcaccaatggcacaaagcggttcgacaatcccgtgctgccttttaacgatggcgtgtacttcgccagcaccgagaagtccaacatcatcagaggctggatctttggcaccacactggactctaagacacagagcctgctgatcgtgaacaatgccaccaacgtggtgatcaaggtgtgcgagttccagttttgtaatgatccattcctgggcgtgtactatcacaagaacaataagtcctggatggagtctgagtttcgcgtgtattctagcgccaacaattgcacatttgagtacgtgagccagcccttcctgatggacctggagggcaagcagggcaatttcaagaacctgagggagttcgtgtttaagaatatcgatggctacttcaagatctacagcaagcacaccccaatcaacctggtgcgcgacctgccacagggattctccgccctggagccactggtggatctgcccatcggcatcaacatcacccggtttcagacactgctggccctgcacagatcctacctgacaccaggcgactcctctagcggatggaccgcaggagctgccgcctactatgtgggctatctgcagccccggaccttcctgctgaagtacaacgagaatggcaccatcacagacgcagtggattgcgccctggaccccctgtctgagacaaagtgtcgtctgaagagctttaccgtggagaagggcatctatcagacaagcaatttcagggtgcagcctaccgagtccatcgtgcgctttcccaatatcacaaacctgtgcccttttggcgaggtgttcaacgccaccagattcgccagcgtgtacgcctggaatcggaagagaatctccaactgcgtggccgactattctgtgctgtacaactccgcctctttcagcacctttaagtgctatggcgtgtctcccacaaagctgaatgatctgtgctttaccaacgtgtacgccgatagcttcgtgatcaggggagacgaagtgagacagatcgcaccaggacagacaggaaagatcgcagactacaattataagctgcctgacgatttcaccggctgcgtgatcgcctggaactccaacaatctggattctaaagtgggcggcaactacaattatctgtacaggctgtttcgcaagtccaatctgaagccattcgagcgggacatctccacagagatctaccaggccggctctaccccctgcaatggcgtggagggctttaactgttatttccctctgcagtcttacggcttccagccaacaaacggcgtgggctatcagccctacagagtggtggtgctgtcctttgagctgctgcacgcaccagcaacagtgtgcggcccaaagaagtctaccaatctggtgaagaacaagtgcgtgaacttcaacttcaacggactgaccggcacaggcgtgctgaccgagagcaataagaagttcctgccttttcagcagttcggcagggacatcgcagataccacagacgccgtgcgcgaccctcagaccctggagatcctggacatcacaccatgcagcttcggcggcgtgtccgtgatcacaccaggcaccaatacatccaaccaggtggccgtgctgtatcaggacgtgaattgtaccgaggtgcccgtggcaatccacgcagatcagctgacccctacatggcgggtgtactctaccggcagcaacgtgttccagacaagagccggatgcctgatcggagcagagcacgtgaacaatagctatgagtgcgacatccctatcggcgccggcatctgtgccagctaccagacccagacaaactccccatctggagcaggctccgtggccagccagtccatcatcgcctataccatgagcctgggcgccgagaacagcgtggcctactccaacaattctatcgccatccctaccaacttcacaatcagcgtgaccacagagatcctgccagtgtctatgaccaagacaagcgtggactgcacaatgtatatctgtggcgatagcaccgagtgctccaacctgctgctgcagtacggctccttttgtacccagctgaatagagccctgacaggcatcgccgtggagcaggataagaacacacaggaggtgttcgcccaggtgaagcagatctacaagaccccacccatcaaggactttggcggcttcaacttcagccagatcctgcctgatccaagcaagccctccaagaggtcttttatcgaggacctgctgttcaacaaggtgaccctggccgatgccggcttcatcaagcagtatggagattgcctgggagacatcgcagcccgcgacctgatctgtgcccagaagtttaatggcctgaccgtgctgcctccactgctgacagatgagatgatcgcccagtacacatctgccctgctggccggcaccatcacaagcggatggaccttcggcgcaggagccgccctgcagatcccttttgccatgcagatggcctataggttcaacggcatcggcgtgacccagaatgtgctgtacgagaaccagaagctgatcgccaatcagtttaacagcgccatcggcaagatccaggactctctgtcctctacagccagcgccctgggcaagctgcaggatgtggtgaatcagaacgcccaggccctgaataccctggtgaagcagctgagctccaacttcggcgccatctctagcgtgctgaatgacatcctgagccggctggacccccctgaggcagaggtgcagatcgacaggctgatcacaggccgcctgcagagcctgcagacctacgtgacacagcagctgatcagggcagcagagatcagagcctccgccaatctggccgccaccaagatgagcgagtgcgtgctgggacagtccaagagggtggacttttgtggcaagggctatcacctgatgtctttcccacagagcgcccctcacggcgtggtgtttctgcacgtgacctacgtgccagcccaggagaagaacttcaccacagcaccagccatctgccacgatggaaaggcacactttcctagggagggcgtgttcgtgtctaacggcacccactggtttgtgacacagcgcaatttctacgagccacagatcatcaccacagacaatacattcgtgagcggcaactgtgatgtggtgatcggcatcgtgaacaataccgtgtatgatccactgcagcccgagctggactcctttaaggaggagctggataagtacttcaagaatcacacctctcccgacgtggatctgggcgacatctccggcatcaatgcctctgtggtgaacatccagaaggagatcgaccggctgaacgaggtggccaagaatctgaacgagagcctgatcgatctgcaggagctgggcaagtatgagcagtacatcaagggctctggcagagagaacctgtatttccagggaggaggaggcagcggatacatccctgaggcaccaagggacggacaggcctacgtgcgcaaggatggcgagtgggtgctgctgtccacctttctgggccatcatcaccaccaccaccaccactga

SEQ ID NO: 1432 - DNA, 3846 bp, Artificial Sequence
  Description of Artificial Sequence: Synthetic polynucleotide
atgggcatcctgccaagcccaggaatgcccgccctgctgtctctggtgagcctgctgtccgtgctgctgatgggatgcgtggcagagacaggcacacagtgcgtgaacctgaccacaaggacccagctgccccctgcctataccaattctttcacacggggcgtgtactatcccgacaaggtgtttagaagctccgtgctgcactccacacaggatctgtttctgcctttcttttctaacgtgacctggttccacgccatccacgtgtccggcaccaatggcacaaagcggttcgacaatcccgtgctgccttttaacgatggcgtgtacttcgccagcaccgagaagtccaacatcatcagaggctggatctttggcaccacactggactctaagacacagagcctgctgatcgtgaacaatgccaccaacgtggtgatcaaggtgtgcgagttccagttttgtgatgatccattcctgggcgtgtactatcacaagaacaataagtcctggatggagacggagtttcgcgtgtattctagcgccaacaattgcacatttgagtacgtgagccagcccttcctgatggacctggagggcaagcagggcaatttcaagaacctgagggagttcgtgtttaagaatatcgatggctacttcaagatctacagcaagcacaccccaatcaacctggtgcgcgacctgccacagggattctccgccctggagccactggtggatctgcccatcggcatcaacatcacccggtttcagacactgctggccctgcacagatcctacctgacaccaggcgactcctctagcggatggaccgcaggagctgccgcctactatgtgggctatctgcagccccggaccttcctgctgaagtacaacgagaatggcaccatcacagacgcagtggattgcgccctggaccccctgtctgagacaaagtgtacactgaagagctttaccgtggagaagggcatctatcagacaagcaatttcagggtgcagcctaccgagtccatcgtgcgctttcccaatatcacaaacctgtgcccttttggcgaggtgttcaacgccaccagattcgccagcgtgtacgcctggaatcggaagagaatctccaactgcgtggccgactattctgtgctgtacaactccgcctctttcagcacctttaagtgctatggcgtgtctcccacaaagctgaatgatctgtgctttaccaacgtgtacgccgatagcttcgtgatcaggggagacgaagtgagacagatcgcaccaggacagacaggaaagatcgcagactacaattataagctgcctgacgatttcaccggctgcgtgatcgcctggaactccaacaatctggattctaaagtgggcggcaactacaattatctgtacaggctgtttcgcaagtccaatctgaagccattcgagcgggacatctccacagagatctaccaggccggctctaccccctgcaatggcgtggagggctttaactgttatttccctctgcagtcttacggcttccagccaacaaacggcgtgggctatcagccctacagagtggtggtgctgtcctttgagctgctgcacgcaccagcaacagtgtgcggcccaaagaagtctaccaatctggtgaagaacaagtgcgtgaacttcaacttcaacggactgaccggcacaggcgtgctgaccgagagcaataagaagttcctgccttttcagcagttcggcagggacatcgcagataccacagacgccgtgcgcgaccctcagaccctggagatcctggacatcacaccatgcagcttcggcggcgtgtccgtgatcacaccaggcaccaatacatccaaccaggtggccgtgctgtatcaggacgtgaattgtaccgaggtgcccgtggcaatccacgcagatcagctgacccctacatggcgggtgtactctaccggcagcaacgtgttccagacaagagccggatgcctgatcggagcagagcacgtgaacaatagctatgagtgcgacatccctatcggcgccggcatctgtgccagctaccagacccagacaaactccccatctggagcaggctccgtggccagccagtccatcatcgcctataccatgagcctgggcgccgagaacagcgtggcctactccaacaattctatcgccatccctaccaacttcacaatcagcgtgaccacagagatcctgccagtgtctatgaccaagacaagcgtggactgcacaatgtatatctgtggcgatagcaccgagtgctccaacctgctgctgcagtacggctccttttgtacccagctgaatagagccctgacaggcatcgccgtggagcaggataagaacacacaggaggtgttcgcccaggtgaagcagatctacaagaccccacccatcaaggactttggcggcttcaacttcagccagatcctgcctgatccaagcaagccctccaagaggtcttttatcgaggacctgctgttcaacaaggtgaccctggccgatgccggcttcatcaagcagtatggagattgcctgggagacatcgcagcccgcgacctgatctgtgcccagaagtttaatggcctgaccgtgctgcctccactgctgacagatgagatgatcgcccagtacacatctgccctgctggccggcaccatcacaagcggatggaccttcggcgcaggagccgccctgcagatcccttttgccatgcagatggcctataggttcaacggcatcggcgtgacccagaatgtgctgtacgagaaccagaagctgatcgccaatcagtttaacagcgccatcggcaagatccaggactctctgtcctctacagccagcgccctgggcaagctgcaggatgtggtgaatcagaacgcccaggccctgaataccctggtgaagcagctgagctccaacttcggcgccatctctagcgtgctgaatgacatcctgagccggctggacccccctgaggcagaggtgcagatcgacaggctgatcacaggccgcctgcagagcctgcagacctacgtgacacagcagctgatcagggcagcagagatcagagcctccgccaatctggccgccaccaagatgagcgagtgcgtgctgggacagtccaagagggtggacttttgtggcaagggctatcacctgatgtctttcccacagagcgcccctcacggcgtggtgtttctgcacgtgacctacgtgccagcccaggagaagaacttcaccacagcaccagccatctgccacgatggaaaggcacactttcctagggagggcgtgttcgtgtctaacggcacccactggtttgtgacacagcgcaatttctacgagccacagatcatcaccacagacaatacattcgtgagcggcaactgtgatgtggtgatcggcatcgtgaacaataccgtgtatgatccactgcagcccgagctggactcctttaaggaggagctggataagtacttcaagaatcacacctctcccgacgtggatctgggcgacatctccggcatcaatgcctctgtggtgaacatccagaaggagatcgaccggctgaacgaggtggccaagaatctgaacgagagcctgatcgatctgcaggagctgggcaagtatgagcagtacatcaagggctctggcagagagaacctgtatttccagggaggaggaggcagcggatacatccctgaggcaccaagggacggacaggcctacgtgcgcaaggatggcgagtgggtgctgctgtccacctttctgggccatcatcaccaccaccaccaccactga

SEQ ID NO: 1433 - DNA, 3846 bp, Artificial Sequence
  Description of Artificial Sequence: Synthetic polynucleotide
atgggcatcctgccaagcccaggaatgcccgccctgctgtctctggtgagcctgctgtccgtgctgctgatgggatgcgtggcagagacaggcacacagtgcgtgaacctgaccacaaggacccagctgccccctgcctataccaattctttcacacggggcgtgtactatcccgacaaggtgtttagaagctccgtgctgcactccacacaggatctgtttctgcctttcttttctaacgtgacctggttccacgccatccacgtgtccggcaccaatggcacaaagcggttcgacaatcccgtgctgccttttaacgatggcgtgtacttcgccagcaccgagaagtccaacatcatcagaggctggatctttggcaccacactggactctaagacacagagcctgctgatcgtgaacaatgccaccaacgtggtgatcaaggtgtgcgagttccagttttgtaatgatccattcctgggcgtgtactatcacaagaacaataagtcctggatggagtctgagtttcgcgtgtattctagcgccaacaattgcacatttgagtacgtgagccagcccttcctgatggacctggagggcaagcagggcaatttcaagaacctgagggagttcgtgtttaagaatatcgatggctacttcaagatctacagcaagcacaccccaatcaacctggtgcgcgacctgccacagggattctccgccctggagccactggtggatctgcccatcggcatcaacatcacccggtttcagacactgctggccctgcacagatcctacctgacaccaggcgactcctctagcggatggaccgcaggagctgccgcctactatgtgggctatctgcagccccggaccttcctgctgaagtacaacgagaatggcaccatcacagacgcagtggattgcgccctggaccccctgtctgagacaaagtgtacactgaagagctttaccgtggagaagggcatctatcagacaagcaatttcagggtgcagcctaccgagtccatcgtgcgctttcccaatatcacaaacctgtgcccttttggcgaggtgttcaacgccaccagattcgccagcgtgtacgcctggaatcggaagagaatctccaactgcgtggccgactattctgtgctgtacaactccgcctctttcagcacctttaagtgctatggcgtgtctcccacaaagctgaatgatctgtgctttaccaacgtgtacgccgatagcttcgtgatcaggggagacgaagtgagacagatcgcaccaggacagacaggaaagatcgcagactacaattataagctgcctgacgatttcaccggctgcgtgatcgcctggaactccaacaatctggattctaaagtgggcggcaactacaattatctgtacaggctgtttcgcaagtccaatctgaagccattcgagcgggacatctccacagagatctaccaggccggctctaccccctgcaatggcgtggagggctttaactgttatttccctctgcagtcttacggcttccagccaacaaacggcgtgggctatcagccctacagagtggtggtgctgtcctttgagctgctgcacgcaccagcaacagtgtgcggcccaaagaagtctaccaatctggtgaagaacaagtgcgtgaacttcaacttcaacggactgaccggcacaggcgtgctgaccgagagcaataagaagttcctgccttttcagcagttcggcagggacatcgcagataccacagacgccgtgcgcgaccctcagaccctggagatcctggacatcacaccatgcagcttcggcggcgtgtccgtgatcacaccaggcaccaatacatccaaccaggtggccgtgctgtatcaggacgtgaattgtaccgaggtgcccgtggcaatccacgcagatcagctgacccctacatggcgggtgtactctaccggcagcaacgtgttccagacaagagccggatgcctgatcggagcagagcacgtgaacaatagctatgagtgcgacatccctatcggcgccggcatctgtgccagctaccagacccagacaaactccccatctggagcaggctccgtggccagccagtccatcatcgcctataccatgagcctgggcgccgagaacagcgtggcctactccaacaattctatcgccatccctaccaacttcacaatcagcgtgaccacagagatcctgccagtgtctatgaccaagacaagcgtggactgcacaatgtatatctgtggcgatagcaccgagtgctccaacctgctgctgcagtacggctccttttgtacccagctgaatagagccctgacaggcatcgcctcggagcaggataagaacacacaggaggtgttcgcccaggtgaagcagatctacaagaccccacccatcaaggactttggcggcttcaacttcagccagatcctgcctgatccaagcaagccctccaagaggtcttttatcgaggacctgctgttcaacaaggtgaccctggccgatgccggcttcatcaagcagtatggagattgcctgggagacatcgcagcccgcgacctgatctgtgcccagaagtttaatggcctgaccgtgctgcctccactgctgacagatgagatgatcgcccagtacacatctgccctgctggccggcaccatcacaagcggatggaccttcggcgcaggagccgccctgcagatcccttttgccatgcagatggcctataggttcaacggcatcggcgtgacccagaatgtgctgtacgagaaccagaagctgatcgccaatcagtttaacagcgccatcggcaagatccaggactctctgtcctctacagccagcgccctgggcaagctgcaggatgtggtgaatcagaacgcccaggccctgaataccctggtgaagcagctgagctccaacttcggcgccatctctagcgtgctgaatgacatcctgagccggctggacccccctgaggcagaggtgcagatcgacaggctgatcacaggccgcctgcagagcctgcagacctacgtgacacagcagctgatcagggcagcagagatcagagcctccgccaatctggccgccaccaagatgagcgagtgcgtgctgggacagtccaagagggtggacttttgtggcaagggctatcacctgatgtctttcccacagagcgcccctcacggcgtggtgtttctgcacgtgacctacgtgccagcccaggagaagaacttcaccacagcaccagccatctgccacgatggaaaggcacactttcctagggagggcgtgttcgtgtctaacggcacccactggtttgtgacacagcgcaatttctacgagccacagatcatcaccacagacaatacattcgtgagcggcaactgtgatgtggtgatcggcatcgtgaacaataccgtgtatgatccactgcagcccgagctggactcctttaaggaggagctggataagtacttcaagaatcacacctctcccgacgtggatctgggcgacatctccggcatcaatgcctctgtggtgaacatccagaaggagatcgaccggctgaacgaggtggccaagaatctgaacgagagcctgatcgatctgcaggagctgggcaagtatgagcagtacatcaagggctctggcagagagaacctgtatttccagggaggaggaggcagcggatacatccctgaggcaccaagggacggacaggcctacgtgcgcaaggatggcgagtgggtgctgctgtccacctttctgggccatcatcaccaccaccaccaccactga

SEQ ID NO: 1434 - DNA, 3846 bp, Artificial Sequence
  Description of Artificial Sequence: Synthetic polynucleotide
atgggcatcctgccaagcccaggaatgcccgccctgctgtctctggtgagcctgctgtccgtgctgctgatgggatgcgtggcagagacaggcacacagtgcgtgaacctgaccacaaggacccagctgccccctgcctataccaattctttcacacggggcgtgtactatcccgacaaggtgtttagaagctccgtgctgcactccacacaggatctgtttctgcctttcttttctaacgtgacctggttccacgccatccacgtgtccggcaccaatggcacaaagcggttcgacaatcccgtgctgccttttaacgatggcgtgtacttcgccagcaccgagaagtccaacatcatcagaggctggatctttggcaccacactggactctaagacacagagcctgctgatcgtgaacaatgccaccaacgtggtgatcaaggtgtgcgagttccagttttgtaatgatccattcctgggcgtgtactatcacaagaacaataagtcctggatggagtctgagtttcgcgtgtattctagcgccaacaattgcacatttgagtacgtgagccagcccttcctgatggacctggagggcaagcagggcaatttcaagaacctgagggagttcgtgtttaagaatatcgatggctacttcaagatctacagcaagcacaccccaatcaacctggtgcgcgacctgccacagggattctccgccctggagccactggtggatctgcccatcggcatcaacatcacccggtttcagacactgctggccctgcacagatcctacctgacaccaggcgactcctctagcggatggaccgcaggagctgccgcctactatgtgggctatctgcagccccggaccttcctgctgaagtacaacgagaatggcaccatcacagacgcagtggattgcgccctggaccccctgtctgagacaaagtgtacactgaagagctttaccgtggagaagggcatctatcagacaagcaatttcagggtgcagcctaccgagtccatcgtgcgctttcccaatatcacaaacctgtgcccttttggcgaggtgttcaacgccaccagattcgccagcgtgtacgcctggaatcggaagagaatctccaactgcgtggccgactattctgtgctgtacaactccgcctctttcagcacctttaagtgctatggcgtgtctcccacaaagctgaatgatctgtgctttaccaacgtgtacgccgatagcttcgtgatcaggggagacgaagtgagacagatcgcaccaggacagacaggaaagatcgcagactacaattataagctgcctgacgatttcaccggctgcgtgatcgcctggaactccaacaatctggattctaaagtgggcggcaactacaattatctgtacaggctgtttcgcaagtccaatctgaagccattcgagcgggacatctccacagagatctaccaggccggctctaccccctgcaatggcgtggagggctttaactgttatttccctctgcagtcttacggcttccagccaacaaacggcgtgggctatcagccctacagagtggtggtgctgtcctttgagctgctgcacgcaccagcaacagtgtgcggcccaaagaagtctaccaatctggtgaagaacaagtgcgtgaacttcaacttcaacggactgaccggcacaggcgtgctgaccgagagcaataagaagttcctgccttttcagcagttcggcagggacatcgcagataccacagacgccgtgcgcgaccctcagaccctggagatcctggacatcacaccatgcagcttcggcggcgtgtccgtgatcacaccaggcaccaatacatccaaccaggtggccgtgctgtatcaggacgtgaattgtaccgaggtgcccctagcaatccacgcagatcagctgacccctacatggcgggtgtactctaccggcagcaacgtgttccagacaagagccggatgcctgatcggagcagagcacgtgaacaatagctatgagtgcgacatccctatcggcgccggcatctgtgccagctaccagacccagacaaactccccatctggagcaggctccgtggccagccagtccatcatcgcctataccatgagcctgggcgccgagaacagcgtggcctactccaacaattctatcgccatccctaccaacttcacaatcagcgtgaccacagagatcctgccagtgtctatgaccaagacaagcgtggactgcacaatgtatatctgtggcgatagcaccgagtgctccaacctgctgctgcagtacggctccttttgtacccagctgaatagagccctgacaggcatcgccgtggagcaggataagaacacacaggaggtgttcgcccaggtgaagcagatctacaagaccccacccatcaaggactttggcggcttcaacttcagccagatcctgcctgatccaagcaagccctccaagaggtcttttatcgaggacctgctgttcaacaaggtgaccctggccgatgccggcttcatcaagcagtatggagattgcctgggagacatcgcagcccgcgacctgatctgtgcccagaagtttaatggcctgaccgtgctgcctccactgctgacagatgagatgatcgcccagtacacatctgccctgctggccggcaccatcacaagcggatggaccttcggcgcaggagccgccctgcagatcccttttgccatgcagatggcctataggttcaacggcatcggcgtgacccagaatgtgctgtacgagaaccagaagctgatcgccaatcagtttaacagcgccatcggcaagatccaggactctctgtcctctacagccagcgccctgggcaagctgcaggatgtggtgaatcagaacgcccaggccctgaataccctggtgaagcagctgagctccaacttcggcgccatctctagcgtgctgaatgacatcctgagccggctggacccccctgaggcagaggtgcagatcgacaggctgatcacaggccgcctgcagagcctgcagacctacgtgacacagcagctgatcagggcagcagagatcagagcctccgccaatctggccgccaccaagatgagcgagtgcgtgctgggacagtccaagagggtggacttttgtggcaagggctatcacctgatgtctttcccacagagcgcccctcacggcgtggtgtttctgcacgtgacctacgtgccagcccaggagaagaacttcaccacagcaccagccatctgccacgatggaaaggcacactttcctagggagggcgtgttcgtgtctaacggcacccactggtttgtgacacagcgcaatttctacgagccacagatcatcaccacagacaatacattcgtgagcggcaactgtgatgtggtgatcggcatcgtgaacaataccgtgtatgatccactgcagcccgagctggactcctttaaggaggagctggataagtacttcaagaatcacacctctcccgacgtggatctgggcgacatctccggcatcaatgcctctgtggtgaacatccagaaggagatcgaccggctgaacgaggtggccaagaatctgaacgagagcctgatcgatctgcaggagctgggcaagtatgagcagtacatcaagggctctggcagagagaacctgtatttccagggaggaggaggcagcggatacatccctgaggcaccaagggacggacaggcctacgtgcgcaaggatggcgagtgggtgctgctgtccacctttctgggccatcatcaccaccaccaccaccactga

SEQ ID NO: 1435 - DNA, 3846 bp, Artificial Sequence
  Description of Artificial Sequence: Synthetic polynucleotide
atgggcatcctgccaagcccaggaatgcccgccctgctgtctctggtgagcctgctgtccgtgctgctgatgggatgcgtggcagagacaggcacacagtgcgtgaacctgaccacaaggacccagctgccccctgcctataccaattctttcacacggggcgtgtactatcccgacaaggtgtttagaagctccgtgctgcactccacacaggatctgtttctgcctttcttttctaacgtgacctggttccacgccatccacgtgtccggcaccaatggcacaaagcggttcgacaatcccgtgctgccttttaacgatggcgtgtacttcgccagcaccgagaagtccaacatcatcagaggctggatctttggcaccacactggactctaagacacagagcctgctgatcgtgaacaatgccaccaacgtggtgatcaaggtgtgcgagttccagttttgtaatgatccattcctgggcgtgtactatcacaagaacaataagtcctggatggagatagagtttcgcgtgtattctagcgccaacaattgcacatttgagtacgtgagccagcccttcctgatggacctggagggcaagcagggcaatttcaagaacctgagggagttcgtgtttaagaatatcgatggctacttcaagatctacagcaagcacaccccaatcaacctggtgcgcgacctgccacagggattctccgccctggagccactggtggatctgcccatcggcatcaacatcacccggtttcagacactgctggccctgcacagatcctacctgacaccaggcgactcctctagcggatggaccgcaggagctgccgcctactatgtgggctatctgcagccccggaccttcctgctgaagtacaacgagaatggcaccatcacagacgcagtggattgcgccctggaccccctgtctgagacaaagtgtacactgaagagctttaccgtggagaagggcatctatcagacaagcaatttcagggtgcagcctaccgagtccatcgtgcgctttcccaatatcacaaacctgtgcccttttggcgaggtgttcaacgccaccagattcgccagcgtgtacgcctggaatcggaagagaatctccaactgcgtggccgactattctgtgctgtacaactccgcctctttcagcacctttaagtgctatggcgtgtctcccacaaagctgaatgatctgtgctttaccaacgtgtacgccgatagcttcgtgatcaggggagacgaagtgagacagatcgcaccaggacagacaggaaagatcgcagactacaattataagctgcctgacgatttcaccggctgcgtgatcgcctggaactccaacaatctggattctaaagtgggcggcaactacaattatctgtacaggctgtttcgcaagtccaatctgaagccattcgagcgggacatctccacagagatctaccaggccggctctaccccctgcaatggcgtggagggctttaactgttatttccctctgcagtcttacggcttccagccaacaaacggcgtgggctatcagccctacagagtggtggtgctgtcctttgagctgctgcacgcaccagcaacagtgtgcggcccaaagaagtctaccaatctggtgaagaacaagtgcgtgaacttcaacttcaacggactgaccggcacaggcgtgctgaccgagagcaataagaagttcctgccttttcagcagttcggcagggacatcgcagataccacagacgccgtgcgcgaccctcagaccctggagatcctggacatcacaccatgcagcttcggcggcgtgtccgtgatcacaccaggcaccaatacatccaaccaggtggccgtgctgtatcaggacgtgaattgtaccgaggtgcccgtggcaatccacgcagatcagctgacccctacatggcgggtgtactctaccggcagcaacgtgttccagacaagagccggatgcctgatcggagcagagcacgtgaacaatagctatgagtgcgacatccctatcggcgccggcatctgtgccagctaccagacccagacaaactccccatctggagcaggctccgtggccagccagtccatcatcgcctataccatgagcctgggcgccgagaacagcgtggcctactccaacaattctatcgccatccctaccaacttcacaatcagcgtgaccacagagatcctgccagtgtctatgaccaagacaagcgtggactgcacaatgtatatctgtggcgatagcaccgagtgctccaacctgctgctgcagtacggctccttttgtacccagctgaatagagccctgacaggcatcgccgtggagcaggataagaacacacaggaggtgttcgcccaggtgaagcagatctacaagaccccacccatcaaggactttggcggcttcaacttcagccagatcctgcctgatccaagcaagccctccaagaggtcttttatcgaggacctgctgttcaacaaggtgaccctggccgatgccggcttcatcaagcagtatggagattgcctgggagacatcgcagcccgcgacctgatctgtgcccagaagtttaatggcctgaccgtgctgcctccactgctgacagatgagatgatcgcccagtacacatctgccctgctggccggcaccatcacaagcggatggaccttcggcgcaggagccgccctgcagatcccttttgccatgcagatggcctataggttcaacggcatcggcgtgacccagaatgtgctgtacgagaaccagaagctgatcgccaatcagtttaacagcgccatcggcaagatccaggactctctgtcctctacagccagcgccctgggcaagctgcaggatgtggtgaatcagaacgcccaggccctgaataccctggtgaagcagctgagctccaacttcggcgccatctctagcgtgctgaatgacatcctgagccggctggacccccctgaggcagaggtgcagatcgacaggctgatcacaggccgcctgcagagcctgcagacctacgtgacacagcagctgatcagggcagcagagatcagagcctccgccaatctggccgccaccaagatgagcgagtgcgtgctgggacagtccaagagggtggacttttgtggcaagggctatcacctgatgtctttcccacagagcgcccctcacggcgtggtgtttctgcacgtgacctacgtgccagcccaggagaagaacttcaccacagcaccagccatctgccacgatggaaaggcacactttcctagggagggcgtgttcgtgtctaacggcacccactggtttgtgacacagcgcaatttctacgagccacagatcatcaccacagacaatacattcgtgagcggcaactgtgatgtggtgatcggcatcgtgaacaataccgtgtatgatccactgcagcccgagctggactcctttaaggaggagctggataagtacttcaagaatcacacctctcccgacgtggatctgggcgacatctccggcatcaatgcctctgtggtgaacatccagaaggagatcgaccggctgaacgaggtggccaagaatctgaacgagagcctgatcgatctgcaggagctgggcaagtatgagcagtacatcaagggctctggcagagagaacctgtatttccagggaggaggaggcagcggatacatccctgaggcaccaagggacggacaggcctacgtgcgcaaggatggcgagtgggtgctgctgtccacctttctgggccatcatcaccaccaccaccaccactga

SEQ ID NO: 1436 - DNA, 3846 bp, Artificial Sequence
  Description of Artificial Sequence: Synthetic polynucleotide
atgggcatcctgccaagcccaggaatgcccgccctgctgtctctggtgagcctgctgtccgtgctgctgatgggatgcgtggcagagacaggcacacagtgcgtgaacctgaccacaaggacccagctgccccctgcctataccaattctttcacacggggcgtgtactatcccgacaaggtgtttagaagctccgtgctgcactccacacaggatctgtttctgcctttcttttctaacgtgacctggttccacgccatccacgtgtccggcaccaatggcacaaagcggttcgacaatcccgtgctgccttttaacgatggcgtgtacttcgccagcaccgagaagtccaacatcatcagaggctggatctttggcaccacactggactctaagacacagagcctgctgatcgtgaacaatgccaccaacgtggtgatcaaggtgtgcgagttccagttttgtaatgatccattcctgggcgtgtactatcacaagaacaataagtcctggatggagtctgagtttcgcgtgtattctagcgccaacaattgcacatttgagtacgtgagccagcccttcctgatggacctggagggcaagcagggcaatttcaagaacctgagggagttcgtgtttaagaatatcgatggctacttcaagatctacagcaagcacaccccaatcaacctggtgcgcgacctgccacagggattctccgccctggagccactggtggatctgcccatcggcatcaacatcacccggtttcagacactgctggccctgcacagatcctacctgacaccaggcgactcctctagcggatggaccgcaggagctgccgcctactatgtgggctatctgcagccccggaccttcctgctgaagtacaacgagaatggcaccatcacagacgcagtggattgcgccctggaccccctgtctgagacaaagtgtacactgaagagctttaccgtggagaagggcatctatcagacaagcaatttcagggtgcagcctaccgagtccatcgtgcgctttcccaatatcacaaacctgtgcccttttggcgaggtgttcaacgccaccagattcgccagcgtgtacgcctggaatcggaagagaatctccaactgcgtggccgactattctgtgctgtacaactccgcctctttcagcacctttaagtgctatggcgtgtctcccacaaagctgaatgatctgtgctttaccaacgtgtacgccgatagcttcgtgatcaggggagacgaagtgagacagatcgcaccaggacagacaggaaagatcgcagactacaattataagctgcctgacgatttcaccggctgcgtgatcgcctggaactccaacaatctggattctaaagtgggcggcaactacaattatctgtacaggctgtttcgcaagtccaatctgaagccattcgagcgggacatctccacagagatctaccaggccggctctaccccctgcaatggcgtggagggctttaactgttatttccctctgcagtcttacggcttccagccaacaaacggcgtgggctatcagccctacagagtggtggtgctgtcctttgagctgctgcacgcaccagcaacagtgtgcggcccaaagaagtctaccaatctggtgaagaaccaatgcgtgaacttcaacttcaacggactgaccggcacaggcgtgctgaccgagagcaataagaagttcctgccttttcagcagttcggcagggacatcgcagataccacagacgccgtgcgcgaccctcagaccctggagatcctggacatcacaccatgcagcttcggcggcgtgtccgtgatcacaccaggcaccaatacatccaaccaggtggccgtgctgtatcaggacgtgaattgtaccgaggtgcccgtggcaatccacgcagatcagctgacccctacatggcgggtgtactctaccggcagcaacgtgttccagacaagagccggatgcctgatcggagcagagcacgtgaacaatagctatgagtgcgacatccctatcggcgccggcatctgtgccagctaccagacccagacaaactccccatctggagcaggctccgtggccagccagtccatcatcgcctataccatgagcctgggcgccgagaacagcgtggcctactccaacaattctatcgccatccctaccaacttcacaatcagcgtgaccacagagatcctgccagtgtctatgaccaagacaagcgtggactgcacaatgtatatctgtggcgatagcaccgagtgctccaacctgctgctgcagtacggctccttttgtacccagctgaatagagccctgacaggcatcgccgtggagcaggataagaacacacaggaggtgttcgcccaggtgaagcagatctacaagaccccacccatcaaggactttggcggcttcaacttcagccagatcctgcctgatccaagcaagccctccaagaggtcttttatcgaggacctgctgttcaacaaggtgaccctggccgatgccggcttcatcaagcagtatggagattgcctgggagacatcgcagcccgcgacctgatctgtgcccagaagtttaatggcctgaccgtgctgcctccactgctgacagatgagatgatcgcccagtacacatctgccctgctggccggcaccatcacaagcggatggaccttcggcgcaggagccgccctgcagatcccttttgccatgcagatggcctataggttcaacggcatcggcgtgacccagaatgtgctgtacgagaaccagaagctgatcgccaatcagtttaacagcgccatcggcaagatccaggactctctgtcctctacagccagcgccctgggcaagctgcaggatgtggtgaatcagaacgcccaggccctgaataccctggtgaagcagctgagctccaacttcggcgccatctctagcgtgctgaatgacatcctgagccggctggacccccctgaggcagaggtgcagatcgacaggctgatcacaggccgcctgcagagcctgcagacctacgtgacacagcagctgatcagggcagcagagatcagagcctccgccaatctggccgccaccaagatgagcgagtgcgtgctgggacagtccaagagggtggacttttgtggcaagggctatcacctgatgtctttcccacagagcgcccctcacggcgtggtgtttctgcacgtgacctacgtgccagcccaggagaagaacttcaccacagcaccagccatctgccacgatggaaaggcacactttcctagggagggcgtgttcgtgtctaacggcacccactggtttgtgacacagcgcaatttctacgagccacagatcatcaccacagacaatacattcgtgagcggcaactgtgatgtggtgatcggcatcgtgaacaataccgtgtatgatccactgcagcccgagctggactcctttaaggaggagctggataagtacttcaagaatcacacctctcccgacgtggatctgggcgacatctccggcatcaatgcctctgtggtgaacatccagaaggagatcgaccggctgaacgaggtggccaagaatctgaacgagagcctgatcgatctgcaggagctgggcaagtatgagcagtacatcaagggctctggcagagagaacctgtatttccagggaggaggaggcagcggatacatccctgaggcaccaagggacggacaggcctacgtgcgcaaggatggcgagtgggtgctgctgtccacctttctgggccatcatcaccaccaccaccaccactga

SEQ ID NO: 1437 - DNA, 3846 bp, Artificial Sequence
  Description of Artificial Sequence: Synthetic polynucleotide
atgggcatcctgccaagcccaggaatgcccgccctgctgtctctggtgagcctgctgtccgtgctgctgatgggatgcgtggcagagacaggcacacagtgcgtgaacctgaccacaaggacccagctgccccctgcctataccaattctttcacacggggcgtgtactatcccgacaaggtgtttagaagctccgtgctgcactccacacaggatctgtttctgcctttcttttctaacgtgacctggttccacgccatccacgtgtccggcaccaatggcacaaagcggttcgacaatcccgtgctgccttttaacgatggcgtgtacttcgccaataccgagaagtccaacatcatcagaggctggatctttggcaccacactggactctaagacacagagcctgctgatcgtgaacaatgccaccaacgtggtgatcaaggtgtgcgagttccagttttgtaatgatccattcctgggcgtgtactatcacaagaacaataagtcctggatggagtctgagtttcgcgtgtattctagcgccaacaattgcacatttgagtacgtgagccagcccttcctgatggacctggagggcaagcagggcaatttcaagaacctgagggagttcgtgtttaagaatatcgatggctacttcaagatctacagcaagcacaccccaatcaacctggtgcgcgacctgccacagggattctccgccctggagccactggtggatctgcccatcggcatcaacatcacccggtttcagacactgctggccctgcacagatcctacctgacaccaggcgactcctctagcggatggaccgcaggagctgccgcctactatgtgggctatctgcagccccggaccttcctgctgaagtacaacgagaatggcaccatcacagacgcagtggattgcgccctggaccccctgtctgagacaaagtgtacactgaagagctttaccgtggagaagggcatctatcagacaagcaatttcagggtgcagcctaccgagtccatcgtgcgctttcccaatatcacaaacctgtgcccttttggcgaggtgttcaacgccaccagattcgccagcgtgtacgcctggaatcggaagagaatctccaactgcgtggccgactattctgtgctgtacaactccgcctctttcagcacctttaagtgctatggcgtgtctcccacaaagctgaatgatctgtgctttaccaacgtgtacgccgatagcttcgtgatcaggggagacgaagtgagacagatcgcaccaggacagacaggaaagatcgcagactacaattataagctgcctgacgatttcaccggctgcgtgatcgcctggaactccaacaatctggattctaaagtgggcggcaactacaattatctgtacaggctgtttcgcaagtccaatctgaagccattcgagcgggacatctccacagagatctaccaggccggctctaccccctgcaatggcgtggagggctttaactgttatttccctctgcagtcttacggcttccagccaacaaacggcgtgggctatcagccctacagagtggtggtgctgtcctttgagctgctgcacgcaccagcaacagtgtgcggcccaaagaagtctaccaatctggtgaagaacaagtgcgtgaacttcaacttcaacggactgaccggcacaggcgtgctgaccgagagcaataagaagttcctgccttttcagcagttcggcagggacatcgcagataccacagacgccgtgcgcgaccctcagaccctggagatcctggacatcacaccatgcagcttcggcggcgtgtccgtgatcacaccaggcaccaatacatccaaccaggtggccgtgctgtatcaggacgtgaattgtaccgaggtgcccgtggcaatccacgcagatcagctgacccctacatggcgggtgtactctaccggcagcaacgtgttccagacaagagccggatgcctgatcggagcagagcacgtgaacaatagctatgagtgcgacatccctatcggcgccggcatctgtgccagctaccagacccagacaaactccccatctggagcaggctccgtggccagccagtccatcatcgcctataccatgagcctgggcgccgagaacagcgtggcctactccaacaattctatcgccatccctaccaacttcacaatcagcgtgaccacagagatcctgccagtgtctatgaccaagacaagcgtggactgcacaatgtatatctgtggcgatagcaccgagtgctccaacctgctgctgcagtacggctccttttgtacccagctgaatagagccctgacaggcatcgccgtggagcaggataagaacacacaggaggtgttcgcccaggtgaagcagatctacaagaccccacccatcaaggactttggcggcttcaacttcagccagatcctgcctgatccaagcaagccctccaagaggtcttttatcgaggacctgctgttcaacaaggtgaccctggccgatgccggcttcatcaagcagtatggagattgcctgggagacatcgcagcccgcgacctgatctgtgcccagaagtttaatggcctgaccgtgctgcctccactgctgacagatgagatgatcgcccagtacacatctgccctgctggccggcaccatcacaagcggatggaccttcggcgcaggagccgccctgcagatcccttttgccatgcagatggcctataggttcaacggcatcggcgtgacccagaatgtgctgtacgagaaccagaagctgatcgccaatcagtttaacagcgccatcggcaagatccaggactctctgtcctctacagccagcgccctgggcaagctgcaggatgtggtgaatcagaacgcccaggccctgaataccctggtgaagcagctgagctccaacttcggcgccatctctagcgtgctgaatgacatcctgagccggctggacccccctgaggcagaggtgcagatcgacaggctgatcacaggccgcctgcagagcctgcagacctacgtgacacagcagctgatcagggcagcagagatcagagcctccgccaatctggccgccaccaagatgagcgagtgcgtgctgggacagtccaagagggtggacttttgtggcaagggctatcacctgatgtctttcccacagagcgcccctcacggcgtggtgtttctgcacgtgacctacgtgccagcccaggagaagaacttcaccacagcaccagccatctgccacgatggaaaggcacactttcctagggagggcgtgttcgtgtctaacggcacccactggtttgtgacacagcgcaatttctacgagccacagatcatcaccacagacaatacattcgtgagcggcaactgtgatgtggtgatcggcatcgtgaacaataccgtgtatgatccactgcagcccgagctggactcctttaaggaggagctggataagtacttcaagaatcacacctctcccgacgtggatctgggcgacatctccggcatcaatgcctctgtggtgaacatccagaaggagatcgaccggctgaacgaggtggccaagaatctgaacgagagcctgatcgatctgcaggagctgggcaagtatgagcagtacatcaagggctctggcagagagaacctgtatttccagggaggaggaggcagcggatacatccctgaggcaccaagggacggacaggcctacgtgcgcaaggatggcgagtgggtgctgctgtccacctttctgggccatcatcaccaccaccaccaccactga

SEQ ID NO: 1438 - DNA, 3846 bp, Artificial Sequence
  Description of Artificial Sequence: Synthetic polynucleotide
atgggcatcctgccaagcccaggaatgcccgccctgctgtctctggtgagcctgctgtccgtgctgctgatgggatgcgtggcagagacaggcacacagtgcgtgaacctgaccacaaggacccagctgccccctgcctataccaattctttcacacggggcgtgtactatcccgacaaggtgtttagaagctccgtgctgcactccacacaggatctgtttctgcctttcttttctaacgtgacctggttccacgccatccacgtgtccggcaccaatggcacaaagcggttcgacaatcccgtgctgccttttaacgatggcgtgtacttcgccagcaccgagaagtccaacatcatcagaggctggatctttggcaccacactggactctaagacacagagcctgctgatcgtgaacaatgccaccaacgtggtgatcaaggtgtgcgagttccagttttgtaatgatccattcctgggcgtgtactatcacaagaacaataagtcctggatggagtctgagtttcgcgtgtattctagcgccaacaattgcacatttgagtacgtgagccagcccttcctgatggacctggagggcaagcagggcaatttcaagaacctgagggagttcgtgtttaagaatatcgatggctacttcaagatctacagcaagcacaccccaatcaacctggtgcgcgacctgccacagggattctccgccctggagccactggtggatctgcccatcggcatcaacatcacccggtttcagacactgctggccctgcacagatcctacctgacaccaggcgactcctctagcggatggaccgcaggagctgccgcctactatgtgggctatctgcagccccggaccttcctgctgaagtacaacgagaatggcaccatcacagacgcagtggattgcgccctggaccccctgtctgagacaaagtgtacactgaagagctttaccgtggagaagggcatctatcagacaagcaatttcagggtgcagcctaccgagtccatcgtgcgctttcccaatatcacaaacctgtgcccttttggcgaggtgttcaacgccaccagattcgccagcgtgtacgcctggaatcggaagagaatctccaactgcgtggccgactattctgtgctgtacaactccgcctctttcagcacctttaagtgctatggcgtgtctcccacaaagctgaatgatctgtgctttaccaacgtgtacgccgatagcttcgtgatcaggggagacgaagtgagacagatcgcaccaggacagacaggaaagatcgcagactacaattataagctgcctgacgatttcaccggctgcgtgatcgcctggaactccaacaatctggattctaaagtgggcggcaactacaattatctgtacaggctgtttcgcaagtccaatctgaagccattcgagcgggacatctccacagagatctaccaggccggctctaccccctgcaatggcgtggagggctttaactgttatttccctctgcagtcttacggcttccagccaacaaacggcgtgggctatcagccctacagagtggtggtgctgtcctttgagctgctgcacgcaccagcaacagtgtgcggcccaaagaagtctaccaatctggtgaagaacaagtgcgtgaacttcaacttcaacggactgaccggcacaggcgtgctgaccgagagcaataagaagttcctgccttttcagcagttcggcagggacatcgcagataccacagacgccgtgcgcgaccctcagaccctggagatcctggacatcacaccatgcagcttcggcggcgtgtccgtgatcacaccaggcaccaatacatccaaccaggtggccgtgctgtatcaggacgtgaattgtaccgaggtgcccgtggcaatccacgcagatcagctgacccctacatggcgggtgtactctaccggcagcaacgtgttccagacaagagccggatgcctgatcggagcagagcacgtgaacaatagctatgagtgcgacatccctatcggcgccggcatctgtgccagctaccagacccagacaaactccccatctggagcaggctccgtggccagccagtccatcatcgcctataccatgagcctgggcgccgagaacagcgtggcctactccaacaattctatcgccatccctaccaacttcacaatcagcgtgaccacagagatcctgccagtgtctatgaccaagacaagcgtggactgcacaatgtatatctgtggcgatagcaccgagtgctccaacctgctgctgcagtacggctccttttgtacccagctgaatagagccctgacaggcatcgccgtggagcaggataagaacacacaggaggtgttcgcccaggtgaagcagatctacaagaccccacccatcaaggactttggcggcttcaacttcagccagatcctgcctgatccaagcaagccctccaagaggtcttttatcgaggacctgctgttcaacaaggtgaccctggccgatgccggcttcatcaagcagtatggagattgcctgggagacatcgcagcccgcgacctgatctgtgcccagaagtttaatggcctgaccgtgctgcctccactgctgacagatgagatgatcgcccagtacacatctgccctgctggccggcaccatcacaagcggatggaccttcggcgcaggagccgccctgcagatcccttttgccatgcagatggcctataggttcaacggcatcggcgtgacccagaatgtgctgtacgagaaccagaagctgatcgccaatcagtttaacagcgccatcggccaaatccaggactctctgtcctctacagccagcgccctgggcaagctgcaggatgtggtgaatcagaacgcccaggccctgaataccctggtgaagcagctgagctccaacttcggcgccatctctagcgtgctgaatgacatcctgagccggctggacccccctgaggcagaggtgcagatcgacaggctgatcacaggccgcctgcagagcctgcagacctacgtgacacagcagctgatcagggcagcagagatcagagcctccgccaatctggccgccaccaagatgagcgagtgcgtgctgggacagtccaagagggtggacttttgtggcaagggctatcacctgatgtctttcccacagagcgcccctcacggcgtggtgtttctgcacgtgacctacgtgccagcccaggagaagaacttcaccacagcaccagccatctgccacgatggaaaggcacactttcctagggagggcgtgttcgtgtctaacggcacccactggtttgtgacacagcgcaatttctacgagccacagatcatcaccacagacaatacattcgtgagcggcaactgtgatgtggtgatcggcatcgtgaacaataccgtgtatgatccactgcagcccgagctggactcctttaaggaggagctggataagtacttcaagaatcacacctctcccgacgtggatctgggcgacatctccggcatcaatgcctctgtggtgaacatccagaaggagatcgaccggctgaacgaggtggccaagaatctgaacgagagcctgatcgatctgcaggagctgggcaagtatgagcagtacatcaagggctctggcagagagaacctgtatttccagggaggaggaggcagcggatacatccctgaggcaccaagggacggacaggcctacgtgcgcaaggatggcgagtgggtgctgctgtccacctttctgggccatcatcaccaccaccaccaccactga

SEQ ID NO: 1439 - DNA, 3846 bp, Artificial Sequence
  Description of Artificial Sequence: Synthetic polynucleotide
atgggcatcctgccaagcccaggaatgcccgccctgctgtctctggtgagcctgctgtccgtgctgctgatgggatgcgtggcagagacaggcacacagtgcgtgaacctgaccacaaggacccagctgccccctgcctataccaattctttcacacggggcgtgtactatcccgacaaggtgtttagaagctccgtgctgcactccacacaggatctgtttctgcctttcttttctaacgtgacctggttccacgccatccacgtgtccggcaccaatggcacaaagcggttcgacaatcccgtgctgccttttaacgatggcgtgtacttcgccagcaccgagaagtccaacatcatcagaggctggatctttggcaccacactggactctaagacacagagcctgctgatcgtgaacaatgccaccaacgtggtgatcaaggtgtgcgagttccagttttgtaatgatccattcctgggcgtgtactatcacaagaacaataagtcctggatggagtctgagtttcgcgtgtattctagcgccaacaattgcacatttgagtacgtgagccagcccttcctgatggacctggagggcaagcagggcaatttcaagaacctgagggagttcgtgtttaagaatatcgatggctacttcaagatctacagcaagcacaccccaatcaacctggtgcgcgacctgccacagggattctccgccctggagccactggtggatctgcccatcggcatcaacatcacccggtttcagacactgctggccctgcacagatcctacctgacaccaggcgactcctctagcggatggaccgcaggagctgccgcctactatgtgggctatctgcagccccggaccttcctgctgaagtacaacgagaatggcaccatcacagacgcagtggattgcgccctggaccccctgtctgagacaaagtgtacactgaagagctttaccgtggagaagggcatctatcagacaagcaatttcagggtgcagcctaccgagtccatcgtgcgctttcccaatatcacaaacctgtgcccttttggcgaggtgttcaacgccaccagattcgccagcgtgtacgcctggaatcggaagagaatctccaactgcgtggccgactattctgtgctgtacaactccgcctctttcagcacctttaagtgctatggcgtgtctcccacaaagctgaatgatctgtgctttaccaacgtgtacgccgatagcttcgtgatcaggggagacgaagtgagacagatcgcaccaggacagacaggaaagatcgcagactacaattataagctgcctgacgatttcaccggctgcgtgatcgcctggaactccaacaatctggattctaaagtgggcggcaactacaattatctgtacaggctgtttcgcaagtccaatctgaagccattcgagcgggacatctccacagagatctaccaggccggctctaccccctgcaatggcgtggagggctttaactgttatttccctctgcagtcttacggcttccagccaacaaacggcgtgggctatcagccctacagagtggtggtgctgtcctttgagctgctgcacgcaccagcaacagtgtgcggcccaaagaagtctaccaatctggtgaagaacaagtgcgtgaacttcaacttcaacggactgaccggcacaggcgtgctgaccgagagcaataagaagttcctgccttttcagcagttcggcagggacatcgcagataccacagacgccgtgcgcgaccctcagaccctggagatcctggacatcacaccatgcagcttcggcggcgtgtccgtgatcacaccaggcaccaatacatccaaccaggtggccgtgctgtatcaggacgtgaattgtaccgaggtgcccgtggcaatccacgcagatcagctgacccctacatggcgggtgtactctaccggcagcaacgtgttccagacaagagccggatgcctgatcggagcagagcacgtgaacaatagctatgagtgcgacatccctatcggcgccggcatctgtgccagctaccagacccagacaaactccccatctggagcaggctccgtggccagccagtccatcatcgcctataccatgagcctgggcgccgagaacagcgtggcctactccaacaattctatcgccatccctaccaacttcagtatcagcgtgaccacagagatcctgccagtgtctatgaccaagacaagcgtggactgcacaatgtatatctgtggcgatagcaccgagtgctccaacctgctgctgcagtacggctccttttgtacccagctgaatagagccctgacaggcatcgccgtggagcaggataagaacacacaggaggtgttcgcccaggtgaagcagatctacaagaccccacccatcaaggactttggcggcttcaacttcagccagatcctgcctgatccaagcaagccctccaagaggtcttttatcgaggacctgctgttcaacaaggtgaccctggccgatgccggcttcatcaagcagtatggagattgcctgggagacatcgcagcccgcgacctgatctgtgcccagaagtttaatggcctgaccgtgctgcctccactgctgacagatgagatgatcgcccagtacacatctgccctgctggccggcaccatcacaagcggatggaccttcggcgcaggagccgccctgcagatcccttttgccatgcagatggcctataggttcaacggcatcggcgtgacccagaatgtgctgtacgagaaccagaagctgatcgccaatcagtttaacagcgccatcggcaagatccaggactctctgtcctctacagccagcgccctgggcaagctgcaggatgtggtgaatcagaacgcccaggccctgaataccctggtgaagcagctgagctccaacttcggcgccatctctagcgtgctgaatgacatcctgagccggctggacccccctgaggcagaggtgcagatcgacaggctgatcacaggccgcctgcagagcctgcagacctacgtgacacagcagctgatcagggcagcagagatcagagcctccgccaatctggccgccaccaagatgagcgagtgcgtgctgggacagtccaagagggtggacttttgtggcaagggctatcacctgatgtctttcccacagagcgcccctcacggcgtggtgtttctgcacgtgacctacgtgccagcccaggagaagaacttcaccacagcaccagccatctgccacgatggaaaggcacactttcctagggagggcgtgttcgtgtctaacggcacccactggtttgtgacacagcgcaatttctacgagccacagatcatcaccacagacaatacattcgtgagcggcaactgtgatgtggtgatcggcatcgtgaacaataccgtgtatgatccactgcagcccgagctggactcctttaaggaggagctggataagtacttcaagaatcacacctctcccgacgtggatctgggcgacatctccggcatcaatgcctctgtggtgaacatccagaaggagatcgaccggctgaacgaggtggccaagaatctgaacgagagcctgatcgatctgcaggagctgggcaagtatgagcagtacatcaagggctctggcagagagaacctgtatttccagggaggaggaggcagcggatacatccctgaggcaccaagggacggacaggcctacgtgcgcaaggatggcgagtgggtgctgctgtccacctttctgggccatcatcaccaccaccaccaccactga

SEQ ID NO: 1440 - DNA, 3846 bp, Artificial Sequence
  Description of Artificial Sequence: Synthetic polynucleotide
atgggcatcctgccaagcccaggaatgcccgccctgctgtctctggtgagcctgctgtccgtgctgctgatgggatgcgtggcagagacaggcacacagtgcgtgaacctgaccacaaggacccagctgccccctgcctataccaattctttcacacggggcgtgtactatcccgacaagatttttagaagctccgtgctgcacttaacacaggatctgtttctgcctttcttttctaacgtgacctggttccacgccatccacgtgtccggcaccaatggcacaaagcggttcgacaatcccgtgctgccttttaacgatggcgtgtacttcgccgcgaccgagaagtccaacatcatcagaggctggatctttggcaccacactggactctaagacacagagcctgctgatcgtgaacaatgccaccaacgtggtgatcaaggtgtgcgagttccagttttgtaatgatccattcctgggcgtgtactatcacaagaacaataagtcctggatggagtctgagtttcgcgtgtattctagcgccaacaattgcacatttgagtacgtgagccagcccttcctgatggacctggagggcaagcagggcaatttcaagaacctgagggagttcgtgtttaagaatatcgatggctacttcaagatctacagcaagtataccccaatcaacctggtgcgcgacctgccacagggattctccgccctggagccactggtgaaactgcccatcggcatcaacatcacccggtttcagacactgctggccctgcacagatcctacctgacaccaggcgactcctctagcggatggaccgcaggagctgccgcctactatgtgggctatctgcagccccggaccttcctgctgaagtacaacgagaatggcaccatcacagacgcagtggattgcgccctggaccccctgtctgagacaaagtgtacactgaagagctttaccgtggagaagggcatctatcagacaagcaatttcagggtgcagcctaccgagtccatcgtgcgctttcccaatatcacaaacctgtgcccttttggcgaggtgttcaacgccaccagattcgccagcgtgtacgcctggaatcggaagagaatctccaactgcgtggccgactattctgtgctgtacaactccgcctctttcagcacctttaagtgctatggcgtgtctcccacaaagctgaatgatctgtgctttaccaacgtgtacgccgatagcttcgtgatcaggggagacgaagtgagacagatcgcaccaggacagacaggaaagatcgcagactacaattataagctgcctgacgatttcaccggctgcgtgatcgcctggaactccaacaatctggattctaaagtgggcggcaactacaattatctgtacaggctgtttcgcaagtccaatctgaagccattcgagcgggacatctccacagagatctaccaggccggctctaccccctgcaatggcgtggagggctttaactgttatttccctctgcagtcttacggcttccagccaacaaacggcgtgggctatcagccctacagagtggtggtgctgtcctttgagctgctgcacgcaccagcaacagtgtgcggcccaaagaagtctaccaatctggtgaagaacaagtgcgtgaacttcaacttcaacggactgaccggcacaggcgtgctgaccgagagcaataagaagttcctgccttttcagcagttcggcagggacatcagtgataccacagacgccgtgcgcgaccctcagaccctggagatcctggacatcacaccatgcagcttcggcggcgtgtccgtgatcacaccaggcaccaatacatccaaccaggtggccgtgctgtatcaggacgtgaattgtaccgatgtgcccgtggcaatccacgcagatcagctgacccctacatggcgggtgtactctaccggcagcaacgtgttccagacacaagccggatgcctgatcggagcagagcacgtgaacaatagctatgagtgcgacatccctatcggcgccggcatctgtgccagctaccagacccagacaaactccccatctggagcaggctccgtggccagcaaatccatcatcgcctataccatgagcctgggcgccgagaacagcgtggcctactccaacaattctatcgccatccctaccaacttcacaatcagcgtgaccacagagatcctgccagtgtctatgaccaagacaagcgtggactgcacaatgtatatctgtggcgatagcaccgagtgctccaacctgctgctgcagtacggctccttttgtacccagctgaatagagccctgacaggcatcgccgtggagcaggataagaacacacaggaggtgttcgcccaggtgaagcagatctacaagaccccacccatcaaggactttggcggcttcaacttcagccagatcctgcctgatccaagcaagccctccaagaggtcttttatcgaggacctgctgttcaacaaggtgaccctggccgatgccggcttcatcaagcagtatggagattgcctgggagacatcgcagcccgcgacctgatctgtgcccagaagtttaatggcctgaccgtgctgcctccactgctgacagatgagatgatcgccgcttacacagctgccctgctggccggcaccgcgacagcgggatggaccttcggcgcaggagccgccctgcagatcccttttgccatgcagatggcctataggttcaacggcatcggcgtgacccagaatgtgctgtacgagaaccagaagctgatcgccaatcagtttaacagcgccatcggcaagatccaggactctctgtcctctacagccagcgccctgggcaagctgcaggatgtggtgaatcagaacgcccaggccctgaataccctggtgaagcagctgagctccaacttcggcgccatctctagcgtgctgaatgacatcctgagccggctggacccccctgaggcagaggtgcagatcgacaggctgatcacaggccgcctgcagagcctgcagacctacgtgacacagcagctgatcagggcagcagagatcagagcctccgccaatctggccgccaccaagatgagcgagtgcgtgctgggacagtccaagagggtggacttttgtggcaagggctatcacctgatgtctttcccacagagcgcccctcacggcgtggtgtttctgcacgtgacctacgtgccagcccaggagaagaacttcaccacagcaccagccatctgccacgatggaaaggcacactttcctagggagggcgtgttcgtgtctaacggcacccactggtttgtgacacagcgcaatttctacgagccacagatcatcaccacagacaatacattcgtgagcggcaactgtgatgtggtgatcggcatcgtgaacaataccgtgtatgatccactgcagcccgagctggactcctttaaggaggagctggataagtacttcaagaatcacacctctcccgacgtggatctgggcgacatctccggcatcaatgcctctgtggtgaacatccagaaggagatcgaccggctgaacgaggtggccaagaatctgaacgagagcctgatcgatctgcaggagctgggcaagtatgagcagtacatcaagggctctggcagagagaacctgtatttccagggaggaggaggcagcggatacatccctgaggcaccaagggacggacaggcctacgtgcgcaaggatggcgagtgggtgctgctgtccacctttctgggccatcatcaccaccaccaccaccactga

SEQ ID NO: 1441 - DNA, 3846 bp, Artificial Sequence
  Description of Artificial Sequence: Synthetic polynucleotide
atgggcatcctgccaagcccaggaatgcccgccctgctgtctctggtgagcctgctgtccgtgctgctgatgggatgcgtggcagagacaggcacacagtgcgtgaacctgaccacaaggacccagctgccccctgcctataccaattctttcacacggggcgtgtactatcccgacaaggtgtttagaagctccgtgctgcactccacacaggatctgtttctgcctttcttttctaacgtgacctggttccacgccatccacgtgtccggcaccaatggcacaaagcggttcgacaatcccgtgctgccttttaacgatggcgtgtacttcgccagcaccgagaagtccaacatcatcagaggctggatctttggcaccacactggactctaagacacagagcctgctgatcgtgaacaatgccaccaacgtggtgatcaaggtgtgcgagttccagttttgtaatgatccattcctgggcgtgtactatcacaagaacaataagtcctggatggagtctgagtttcgcgtgtattctagcgccaacaattgcacatttgagtacgtgagccagcccttcctgatggacctggagggcaagcagggcaatttcaagaacctgagggagttcgtgtttaagaatatcgatggctacttcaagatctacagcaagcacaccccaatcaacctggtgcgcgacctgccacagggattctccgccctggagccactggtggatctgcccatcggcatcaacatcacccggtttcagacactgctggccctgcacagatcctacctgacaccaggcgactcctctagcggatggaccgcaggagctgccgcctactatgtgggctatctggaaccccggaccttcctgctgaagtacaacgagaatggcaccatcacagacgcagtggattgcgccctggaccccctgtctgagacaaagtgtacactgaagagctttaccgtggagaagggcatctatcagacaagcaatttcagggtgcagcctaccgagtccatcgtgcgctttcccaatatcacaaacctgtgcccttttggcgaggtgttcaacgccaccagattcgccagcgtgtacgcctggaatcggaagagaatctccaactgcgtggccgactattctgtgctgtacaactccgcctctttcagcacctttaagtgctatggcgtgtctcccacaaagctgaatgatctgtgctttaccaacgtgtacgccgatagcttcgtgatcaggggagacgaagtgagacagatcgcaccaggacagacaggaaagatcgcagactacaattataagctgcctgacgatttcaccggctgcgtgatcgcctggaactccaacaatctggattctaaagtgggcggcaactacaattatctgtacaggctgtttcgcaagtccaatctgaagccattcgagcgggacatctccacagagatctaccaggccggctctaccccctgcaatggcgtggagggctttaactgttatttccctctgcagtcttacggcttccagccaacaaacggcgtgggctatcagccctacagagtggtggtgctgtcctttgagctgctgcacgcaccagcaacagtgtgcggcccaaagaagtctaccaatctggtgaagaacaagtgcgtgaacttcaacttcaacggactgaccggcacaggcgtgctgaccgagagcaataagaagttcctgccttttcagcagttcggcagggacatcgcagataccacagacgccgtgcgcgaccctcagaccctggagatcctggacatcacaccatgcagcttcggcggcgtgtccgtgatcacaccaggcaccaatacatccaaccaggtggccgtgctgtatcaggacgtgaattgtaccgaggtgcccgtggcaatccacgcagatcagctgacccctacatggcgggtgtactctaccggcagcaacgtgttccagacaagagccggatgcctgatcggagcagagcacgtgaacaatagctatgagtgcgacatccctatcggcgccggcatctgtgccagctaccagacccagacaaactccccatctggagcaggctccgtggccagccagtccatcatcgcctataccatgagcctgggcgccgagaacagcgtggcctactccaacaattctatcgccatccctaccaacttcacaatcagcgtgaccacagagatcctgccagtgtctatgaccaagacaagcgtggactgcacaatgtatatctgtggcgatagcaccgagtgctccaacctgctgctgcagtacggctccttttgtacccagctgaatagagccctgacaggcatcgccgtggagcaggataagaacacacaggaggtgttcgcccaggtgaagcagatctacaagaccccacccatcaaggactttggcggcttcaacttcagccagatcctgcctgatccaagcaagccctccaagaggtcttttatcgaggacctgctgttcaacaaggtgaccctggccgatgccggcttcatcaagcagtatggagattgcctgggagacatcgcagcccgcgacctgatctgtgcccagaagtttaatggcctgaccgtgctgcctccactgctgacagatgagatgatcgcccagtacacatctgccctgctggccggcaccatcacaagcggatggaccttcggcgcaggagccgccctgcagatcccttttgccatgcagatggcctataggttcaacggcatcggcgtgacccagaatgtgctgtacgagaaccagaagctgatcgccaatcagtttaacagcgccatcggcaagatccaggactctctgtcctctacagccagcgccctgggcaagctgcaggatgtggtgaatcagaacgcccaggccctgaataccctggtgaagcagctgagctccaacttcggcgccatctctagcgtgctgaatgacatcctgagccggctggacccccctgaggcagaggtgcagatcgacaggctgatcacaggccgcctgcagagcctgcagacctacgtgacacagcagctgatcagggcagcagagatcagagcctccgccaatctggccgccaccaagatgagcgagtgcgtgctgggacagtccaagagggtggacttttgtggcaagggctatcacctgatgtctttcccacagagcgcccctcacggcgtggtgtttctgcacgtgacctacgtgccagcccaggagaagaacttcaccacagcaccagccatctgccacgatggaaaggcacactttcctagggagggcgtgttcgtgtctaacggcacccactggtttgtgacacagcgcaatttctacgagccacagatcatcaccacagacaatacattcgtgagcggcaactgtgatgtggtgatcggcatcgtgaacaataccgtgtatgatccactgcagcccgagctggactcctttaaggaggagctggataagtacttcaagaatcacacctctcccgacgtggatctgggcgacatctccggcatcaatgcctctgtggtgaacatccagaaggagatcgaccggctgaacgaggtggccaagaatctgaacgagagcctgatcgatctgcaggagctgggcaagtatgagcagtacatcaagggctctggcagagagaacctgtatttccagggaggaggaggcagcggatacatccctgaggcaccaagggacggacaggcctacgtgcgcaaggatggcgagtgggtgctgctgtccacctttctgggccatcatcaccaccaccaccaccactga

SEQ ID NO: 1442 - DNA, 3846 bp, Artificial Sequence
  Description of Artificial Sequence: Synthetic polynucleotide
atgggcatcctgccaagcccaggaatgcccgccctgctgtctctggtgagcctgctgtccgtgctgctgatgggatgcgtggcagagacaggcacacagtgcgtgaacctgaccacaaggacccagctgccccctgcctataccaattctttcacacggggcgtgtactatcccgacaaggtgtttagaagctccgtgctgcactccacacaggatctgtttctgcctttcttttctaacgtgacctggttccacgccatccacgtgaaaggcaccaatggcacaaagcggttcgacaatcccgtgctgccttttaacgatggcgtgtacttcgccagcaccgagaagtccaacatcatcagaggctggatctttggcaccacactggactctaagacacagagcctgctgatcgtgaacaatgccaccaacgtggtgatcaaggtgtgcgagttccagttttgtaatgatccattcctgggcgtgtactatcacaagaacaataagtcctggatggagtctgagtttcgcgtgtattctagcgccaacaattgcacatttgagtacgtgagccagcccttcctgatggacctggagggcaagcagggcaatttcaagaacctgagggagttcgtgtttaagaatatcgatggctacttcaagatctacagcaagcacaccccaatcaacctggtgcgcgacctgccacagggattctccgccctggagccactggtggatctgcccatcggcatcaacatcacccggtttcagacactgctggccctgcacagatcctacctgacaccaggcgactcctctagcggatggaccgcaggagctgccgcctactatgtgggctatctgcagccccggaccttcctgctgaagtacaacgagaatggcaccatcacagacgcagtggattgcgccctggaccccctgtctgagacaaagtgtacactgaagagctttaccgtggagaagggcatctatcagacaagcaatttcagggtgcagcctaccgagtccatcgtgcgctttcccaatatcacaaacctgtgcccttttggcgaggtgttcaacgccaccagattcgccagcgtgtacgcctggaatcggaagagaatctccaactgcgtggccgactattctgtgctgtacaactccgcctctttcagcacctttaagtgctatggcgtgtctcccacaaagctgaatgatctgtgctttaccaacgtgtacgccgatagcttcgtgatcaggggagacgaagtgagacagatcgcaccaggacagacaggaaagatcgcagactacaattataagctgcctgacgatttcaccggctgcgtgatcgcctggaactccaacaatctggattctaaagtgggcggcaactacaattatctgtacaggctgtttcgcaagtccaatctgaagccattcgagcgggacatctccacagagatctaccaggccggctctaccccctgcaatggcgtggagggctttaactgttatttccctctgcagtcttacggcttccagccaacaaacggcgtgggctatcagccctacagagtggtggtgctgtcctttgagctgctgcacgcaccagcaacagtgtgcggcccaaagaagtctaccaatctggtgaagaacaagtgcgtgaacttcaacttcaacggactgaccggcacaggcgtgctgaccgagagcaataagaagttcctgccttttcagcagttcggcagggacatcgcagataccacagacgccgtgcgcgaccctcagaccctggagatcctggacatcacaccatgcagcttcggcggcgtgtccgtgatcacaccaggcaccaatacatccaaccaggtggccgtgctgtatcaggacgtgaattgtaccgaggtgcccgtggcaatccacgcagatcagctgacccctacatggcgggtgtactctaccggcagcaacgtgttccagacaagagccggatgcctgatcggagcagagcacgtgaacaatagctatgagtgcgacatccctatcggcgccggcatctgtgccagctaccagacccagacaaactccccatctggagcaggctccgtggccagccagtccatcatcgcctataccatgagcctgggcgccgagaacagcgtggcctactccaacaattctatcgccatccctaccaacttcacaatcagcgtgaccacagagatcctgccagtgtctatgaccaagacaagcgtggactgcacaatgtatatctgtggcgatagcaccgagtgctccaacctgctgctgcagtacggctccttttgtacccagctgaatagagccctgacaggcatcgccgtggagcaggataagaacacacaggaggtgttcgcccaggtgaagcagatctacaagaccccacccatcaaggactttggcggcttcaacttcagccagatcctgcctgatccaagcaagccctccaagaggtcttttatcgaggacctgctgttcaacaaggtgaccctggccgatgccggcttcatcaagcagtatggagattgcctgggagacatcgcagcccgcgacctgatctgtgcccagaagtttaatggcctgaccgtgctgcctccactgctgacagatgagatgatcgcccagtacacatctgccctgctggccggcaccatcacaagcggatggaccttcggcgcaggagccgccctgcagatcccttttgccatgcagatggcctataggttcaacggcatcggcgtgacccagaatgtgctgtacgagaaccagaagctgatcgccaatcagtttaacagcgccatcggcaagatccaggactctctgtcctctacagccagcgccctgggcaagctgcaggatgtggtgaatcagaacgcccaggccctgaataccctggtgaagcagctgagctccaacttcggcgccatctctagcgtgctgaatgacatcctgagccggctggacccccctgaggcagaggtgcagatcgacaggctgatcacaggccgcctgcagagcctgcagacctacgtgacacagcagctgatcagggcagcagagatcagagcctccgccaatctggccgccaccaagatgagcgagtgcgtgctgggacagtccaagagggtggacttttgtggcaagggctatcacctgatgtctttcccacagagcgcccctcacggcgtggtgtttctgcacgtgacctacgtgccagcccaggagaagaacttcaccacagcaccagccatctgccacgatggaaaggcacactttcctagggagggcgtgttcgtgtctaacggcacccactggtttgtgacacagcgcaatttctacgagccacagatcatcaccacagacaatacattcgtgagcggcaactgtgatgtggtgatcggcatcgtgaacaataccgtgtatgatccactgcagcccgagctggactcctttaaggaggagctggataagtacttcaagaatcacacctctcccgacgtggatctgggcgacatctccggcatcaatgcctctgtggtgaacatccagaaggagatcgaccggctgaacgaggtggccaagaatctgaacgagagcctgatcgatctgcaggagctgggcaagtatgagcagtacatcaagggctctggcagagagaacctgtatttccagggaggaggaggcagcggatacatccctgaggcaccaagggacggacaggcctacgtgcgcaaggatggcgagtgggtgctgctgtccacctttctgggccatcatcaccaccaccaccaccactga

SEQ ID NO: 1443 - DNA, 3846 bp, Artificial Sequence
  Description of Artificial Sequence: Synthetic polynucleotide
atgggcatcctgccaagcccaggaatgcccgccctgctgtctctggtgagcctgctgtccgtgctgctgatgggatgcgtggcagagacaggcacacagtgcgtgaacctgaccacaaggacccagctgccccctgcctataccaattctttcacacggggcgtgtactatcccgacaaggtgtttagaagctccgtgctgcactccacacaggatctgtttctgcctttcttttctaacgtgacctggttccacgccatccacgtgtccggcaccaatggcacaaagcggttcgacaatcccgtgctgccttttaacgatggcgtgtacttcgccagcaccgagaagtccaacatcatcagaggctggatctttggcaccacactggactctaagacacagagcctgctgatcgtgaacaatgccaccaacgtggtgatcaaggtgtgcgagttccagttttgtaatgatccattcctgggcgtgtactatcacaagaacaataagtcctggatggagtctgagtttcgcgtgtattctagcgccaacaattgcacatttgagtacgtgagccagcccttcctgatggacctggagggcaagcagggcaatttcaagaacctgagggagttcgtgtttaagaatatcgatggctacttcaagatctacagcaagcacaccccaatcaacctggtgcgcgacctgccacagggattctccgccctggagccactggtggatctgcccatcggcatcaacatcacccggtttcagacactgctggccctgcacagatcctacctgacaccaggcgactcctctagcggatggaccgcaggagctgccgcctactatgtgggctatctgcagccccggaccttcctgctgaagtacaacgagaatggcaccatcacagacgcagtggattgcgccctggaccccctgtctgagacaaagtgtacactgaagagctttaccgtggagaagggcatctatcagacaagcaatttcagggtgcagcctaccgagtccatcgtgcgctttcccaatatcacaaacctgtgcccttttggcgaggtgttcaacgccaccagattcgccagcgtgtacgcctggaatcggaagagaatctccaactgcgtggccgactattctgtgctgtacaactccgcctctttcagcacctttaagtgctatggcgtgtctcccacaaagctgaatgatctgtgctttaccaacgtgtacgccgatagcttcgtgatcaggggagacgaagtgagacagatcgcaccaggacagacaggaaagatcgcagactacaattataagctgcctgacgatttcaccggctgcgtgatcgcctggaactccaacaatctggattctaaagtgggcggcaactacaattatctgtacaggctgtttcgcaagtccaatctgaagccattcgagcgggacatctccacagagatctaccaggccggctctaccccctgcaatggcgtggagggctttaactgttatttccctctgcagtcttacggcttccagccaacaaacggcgtgggctatcagccctacagagtggtggtgctgtcctttgagctgctgcacgcaccagcaacagtgtgcggcccaaagaagcctaccaatctggtgaagaacaagtgcgtgaacttcaacttcaacggactgaccggcacaggcgtgctgaccgagagcaataagaagttcctgccttttcagcagttcggcagggacatcgcagataccacagacgccgtgcgcgaccctcagaccctggagatcctggacatcacaccatgcagcttcggcggcgtgtccgtgatcacaccaggcaccaatacatccaaccaggtggccgtgctgtatcaggacgtgaattgtaccgaggtgcccgtggcaatccacgcagatcagctgacccctacatggcgggtgtactctaccggcagcaacgtgttccagacaagagccggatgcctgatcggagcagagcacgtgaacaatagctatgagtgcgacatccctatcggcgccggcatctgtgccagctaccagacccagacaaactccccatctggagcaggctccgtggccagccagtccatcatcgcctataccatgagcctgggcgccgagaacagcgtggcctactccaacaattctatcgccatccctaccaacttcacaatcagcgtgaccacagagatcctgccagtgtctatgaccaagacaagcgtggactgcacaatgtatatctgtggcgatagcaccgagtgctccaacctgctgctgcagtacggctccttttgtacccagctgaatagagccctgacaggcatcgccgtggagcaggataagaacacacaggaggtgttcgcccaggtgaagcagatctacaagaccccacccatcaaggactttggcggcttcaacttcagccagatcctgcctgatccaagcaagccctccaagaggtcttttatcgaggacctgctgttcaacaaggtgaccctggccgatgccggcttcatcaagcagtatggagattgcctgggagacatcgcagcccgcgacctgatctgtgcccagaagtttaatggcctgaccgtgctgcctccactgctgacagatgagatgatcgcccagtacacatctgccctgctggccggcaccatcacaagcggatggaccttcggcgcaggagccgccctgcagatcccttttgccatgcagatggcctataggttcaacggcatcggcgtgacccagaatgtgctgtacgagaaccagaagctgatcgccaatcagtttaacagcgccatcggcaagatccaggactctctgtcctctacagccagcgccctgggcaagctgcaggatgtggtgaatcagaacgcccaggccctgaataccctggtgaagcagctgagctccaacttcggcgccatctctagcgtgctgaatgacatcctgagccggctggacccccctgaggcagaggtgcagatcgacaggctgatcacaggccgcctgcagagcctgcagacctacgtgacacagcagctgatcagggcagcagagatcagagcctccgccaatctggccgccaccaagatgagcgagtgcgtgctgggacagtccaagagggtggacttttgtggcaagggctatcacctgatgtctttcccacagagcgcccctcacggcgtggtgtttctgcacgtgacctacgtgccagcccaggagaagaacttcaccacagcaccagccatctgccacgatggaaaggcacactttcctagggagggcgtgttcgtgtctaacggcacccactggtttgtgacacagcgcaatttctacgagccacagatcatcaccacagacaatacattcgtgagcggcaactgtgatgtggtgatcggcatcgtgaacaataccgtgtatgatccactgcagcccgagctggactcctttaaggaggagctggataagtacttcaagaatcacacctctcccgacgtggatctgggcgacatctccggcatcaatgcctctgtggtgaacatccagaaggagatcgaccggctgaacgaggtggccaagaatctgaacgagagcctgatcgatctgcaggagctgggcaagtatgagcagtacatcaagggctctggcagagagaacctgtatttccagggaggaggaggcagcggatacatccctgaggcaccaagggacggacaggcctacgtgcgcaaggatggcgagtgggtgctgctgtccacctttctgggccatcatcaccaccaccaccaccactga

SEQ ID NO: 1444 - DNA, 3846 bp, Artificial Sequence
  Description of Artificial Sequence: Synthetic polynucleotide
atgggcatcctgccaagcccaggaatgcccgccctgctgtctctggtgagcctgctgtccgtgctgctgatgggatgcgtggcagagacaggcacacagtgcgtgaacctgaccacaaggacccagctgccccctgcctataccaattctttcacacggggcgtgtactatcccgacaaggtgtttagaagctccgtgctgcactccacacaggatctgtttctgcctttcttttctaacgtgacctggttccacgccatccacgtgtccggcaccaatggcacaaagcggttcgacaatcccgtgctgccttttaacgatggcgtgtacttcgccagcaccgagaagtccaacatcatcagaggctggatctttggcaccacactggactctaagacacagagcctgctgatcgtgaacaatgccaccaacgtggtgatcaaggtgtgcgagttccagttttgtaatgatccattcctgggcgtgtactatcacaagaacaataagtcctggatggagtctgagtttcgcgtgtattctagcgccaacaattgcacatttgagtacgtgagccagcccttcctgatggacctggagggcaagcagggcaatttcaagaacctgagggagttcgtgtttaagaatatcgatggctacttcaagatctacagcaagcacaccccaatcaacctggtgcgcgacctgccacagggattctccgccctggagccactggtggatctgcccatcggcatcaacatcacccggtttcagacactgctggccctgcacagatcctacctgacaccaggcgactcctctagcggatggaccgcaggagctgccgcctactatgtgggctatctgcagccccggaccttcctgctgaagtacaacgagaatggcaccatcacagacgcagtggattgcgccctggaccccctgtctgagacaaagtgtacactgaagagctttaccgtggagaagggcatctatcagacaagcaatttcagggtgcagcctaccgagtccatcgtgcgctttcccaatatcacaaacctgtgcccttttggcgaggtgttcaacgccaccagattcgccagcgtgtacgcctggaatcggaagagaatctccaactgcgtggccgactattctgtgctgtacaactccgcctctttcagcacctttaagtgctatggcgtgtctcccacaaagctgaatgatctgtgctttaccaacgtgtacgccgatagcttcgtgatcaggggagacgaagtgagacagatcgcaccaggacagacaggaaagatcgcagactacaattataagctgcctgacgatttcaccggctgcgtgatcgcctggaactccaacaatctggattctaaagtgggcggcaactacaattatctgtacaggctgtttcgcaagtccaatctgaagccattcgagcgggacatctccacagagatctaccaggccggctctaccccctgcaatggcgtggagggctttaactgttatttccctctgcagtcttacggcttccagccaacaaacggcgtgggctatcagccctacagagtggtggtgctgtcctttgagctgctgcacgcaccagcaacagtgtgcggcccaaagaagtctaccaatctggtgaagaacaagtgcgtgaacttcaacttcaacggactgaccggcacaggcgtgctgaccgagagcaataagaagttcctgccttttcagcagttcggcagggacgctgcagataccacagacgccgtgcgcgaccctcagaccctggagatcctggacatcacaccatgcagcttcggcggcgtgtccgtgatcacaccaggcaccaatacatccaaccaggtggccgtgctgtatcaggacgtgaattgtaccgaggtgcccgtggcaatccacgcagatcagctgacccctacatggcgggtgtactctaccggcagcaacgtgttccagacaagagccggatgcctgatcggagcagagcacgtgaacaatagctatgagtgcgacatccctatcggcgccggcatctgtgccagctaccagacccagacaaactccccatctggagcaggctccgtggccagccagtccatcatcgcctataccatgagcctgggcgccgagaacagcgtggcctactccaacaattctatcgccatccctaccaacttcacaatcagcgtgaccacagagatcctgccagtgtctatgaccaagacaagcgtggactgcacaatgtatatctgtggcgatagcaccgagtgctccaacctgctgctgcagtacggctccttttgtacccagctgaatagagccctgacaggcatcgccgtggagcaggataagaacacacaggaggtgttcgcccaggtgaagcagatctacaagaccccacccatcaaggactttggcggcttcaacttcagccagatcctgcctgatccaagcaagccctccaagaggtcttttatcgaggacctgctgttcaacaaggtgaccctggccgatgccggcttcatcaagcagtatggagattgcctgggagacatcgcagcccgcgacctgatctgtgcccagaagtttaatggcctgaccgtgctgcctccactgctgacagatgagatgatcgcccagtacacatctgccctgctggccggcaccatcacaagcggatggaccttcggcgcaggagccgccctgcagatcccttttgccatgcagatggcctataggttcaacggcatcggcgtgacccagaatgtgctgtacgagaaccagaagctgatcgccaatcagtttaacagcgccatcggcaagatccaggactctctgtcctctacagccagcgccctgggcaagctgcaggatgtggtgaatcagaacgcccaggccctgaataccctggtgaagcagctgagctccaacttcggcgccatctctagcgtgctgaatgacatcctgagccggctggacccccctgaggcagaggtgcagatcgacaggctgatcacaggccgcctgcagagcctgcagacctacgtgacacagcagctgatcagggcagcagagatcagagcctccgccaatctggccgccaccaagatgagcgagtgcgtgctgggacagtccaagagggtggacttttgtggcaagggctatcacctgatgtctttcccacagagcgcccctcacggcgtggtgtttctgcacgtgacctacgtgccagcccaggagaagaacttcaccacagcaccagccatctgccacgatggaaaggcacactttcctagggagggcgtgttcgtgtctaacggcacccactggtttgtgacacagcgcaatttctacgagccacagatcatcaccacagacaatacattcgtgagcggcaactgtgatgtggtgatcggcatcgtgaacaataccgtgtatgatccactgcagcccgagctggactcctttaaggaggagctggataagtacttcaagaatcacacctctcccgacgtggatctgggcgacatctccggcatcaatgcctctgtggtgaacatccagaaggagatcgaccggctgaacgaggtggccaagaatctgaacgagagcctgatcgatctgcaggagctgggcaagtatgagcagtacatcaagggctctggcagagagaacctgtatttccagggaggaggaggcagcggatacatccctgaggcaccaagggacggacaggcctacgtgcgcaaggatggcgagtgggtgctgctgtccacctttctgggccatcatcaccaccaccaccaccactga

SEQ ID NO: 1445 - DNA, 3846 bp, Artificial Sequence
  Description of Artificial Sequence: Synthetic polynucleotide
atgggcatcctgccaagcccaggaatgcccgccctgctgtctctggtgagcctgctgtccgtgctgctgatgggatgcgtggcagagacaggcacacagtgcgtgaacctgaccacaaggacccagctgccccctgcctataccaattctttcacacggggcgtgtactatcccgacaaggtgtttagaagctccgtgctgcactccacacaggatctgtttctgcctttcttttctaacgtgacctggttccacgccatccacgtgtccggcaccaatggcacaaagcggttcgacaatcccgtgctgccttttaacgatggcgtgtacttcgccagcaccgagaagtccaacatcatcagaggctggatctttggcaccacactggactctaagacacagagcctgctgatcgtgaacaatgccaccaacgtggtgatcaaggtgtgcgagttccagttttgtaatgatccattcctgggcgtgtactatcacaagaacaataagtcctggatggagtctgagtttcgcgtgtattctagcgccaacaattgcacatttgagtacgtgagccagcccttcctgatggacctggagggcaagcagggcaatttcaagaacctgagggagttcgtgtttaagaatatcgatggctacttcaagatctacagcaagcacaccccaatcaacctggtgcgcgacctgccacagggattctccgccctggagccactggtggatctgcccatcggcatcaacatcacccggtttcagacactgctggccctgcacagatcctacctgacaccaggcgactcctctagcggatggaccgcaggagctgccgcctactatgtgggctatctgcagccccggaccttcctgctgaagtacaacgagaatggcaccatcacagacgcagtggattgcgccctggaccccctgtctgagacaaagtgtacactgaagagctttaccgtggagaagggcatctatcagacaagcaatttcagggtgcagcctaccgagtccatcgtgcgctttcccaatatcacaaacctgtgcccttttggcgaggtgttcaacgccaccagattcgccagcgtgtacgcctggaatcggaagagaatctccaactgcgtggccgactattctgtgctgtacaactccgcctctttcagcacctttaagtgctatggcgtgtctcccacaaagctgaatgatctgtgctttaccaacgtgtacgccgatagcttcgtgatcaggggagacgaagtgagacagatcgcaccaggacagacaggaaagatcgcagactacaattataagctgcctgacgatttcaccggctgcgtgatcgcctggaactccaacaatctggattctaaagtgggcggcaactacaattatctgtacaggctgtttcgcaagtccaatctgaagccattcgagcgggacatctccacagagatctaccaggccggctctaccccctgcaatggcgtggagggctttaactgttatttccctctgcagtcttacggcttccagccaacaaacggcgtgggctatcagccctacagagtggtggtgctgtcctttgagctgctgcacgcaccagcaacagtgtgcggcccaaagaagtctaccaatctggtgaagaacaagtgcgtgaacttcaacttcaacggactgaccggcacaggcgtgctgaccgagagcaataagaagttcctgccttttcagcagttcggcagggacatcgcagataccacagacgccgtgcgcgaccctcagaccctggagatcctggacatcacaccatgcagcttcggcggcgtgtccgtgatcacaccaggcaccaatacatccaaccaggtggccgtgctgtatcaggacgtgaattgtaccgaggtgcccgtggcaatccacgcagatcagctgacccctacatggcgggtgtactctaccggcagcaacgtgttccagacaagagccggatgcctgatcggagcagagcacgtgaacaatagctatgagtgcgacatccctatcggcgccggcatctgtgccagctaccagacccagacaaactccccatctggagcaggctccgtggccagccagtccatcatcgcctataccatgagcctgggcgccgagaacagcgtggcctactccaacaattctatcgccatccctaccaacttcacaatcagcgtgaccacagagatcctgccagtgtctatgaccaagacaagcgtggactgcacaatgtatatctgtggcgatagcaccgagtgctccaacctgctgctgcagtacggctccttttgtacccagctgaatagagccctgacaggcatcgccattgagcaggataagaacacacaggaggtgttcgcccaggtgaagcagatctacaagaccccacccatcaaggactttggcggcttcaacttcagccagatcctgcctgatccaagcaagccctccaagaggtcttttatcgaggacctgctgttcaacaaggtgaccctggccgatgccggcttcatcaagcagtatggagattgcctgggagacatcgcagcccgcgacctgatctgtgcccagaagtttaatggcctgaccgtgctgcctccactgctgacagatgagatgatcgcccagtacacatctgccctgctggccggcaccatcacaagcggatggaccttcggcgcaggagccgccctgcagatcccttttgccatgcagatggcctataggttcaacggcatcggcgtgacccagaatgtgctgtacgagaaccagaagctgatcgccaatcagtttaacagcgccatcggcaagatccaggactctctgtcctctacagccagcgccctgggcaagctgcaggatgtggtgaatcagaacgcccaggccctgaataccctggtgaagcagctgagctccaacttcggcgccatctctagcgtgctgaatgacatcctgagccggctggacccccctgaggcagaggtgcagatcgacaggctgatcacaggccgcctgcagagcctgcagacctacgtgacacagcagctgatcagggcagcagagatcagagcctccgccaatctggccgccaccaagatgagcgagtgcgtgctgggacagtccaagagggtggacttttgtggcaagggctatcacctgatgtctttcccacagagcgcccctcacggcgtggtgtttctgcacgtgacctacgtgccagcccaggagaagaacttcaccacagcaccagccatctgccacgatggaaaggcacactttcctagggagggcgtgttcgtgtctaacggcacccactggtttgtgacacagcgcaatttctacgagccacagatcatcaccacagacaatacattcgtgagcggcaactgtgatgtggtgatcggcatcgtgaacaataccgtgtatgatccactgcagcccgagctggactcctttaaggaggagctggataagtacttcaagaatcacacctctcccgacgtggatctgggcgacatctccggcatcaatgcctctgtggtgaacatccagaaggagatcgaccggctgaacgaggtggccaagaatctgaacgagagcctgatcgatctgcaggagctgggcaagtatgagcagtacatcaagggctctggcagagagaacctgtatttccagggaggaggaggcagcggatacatccctgaggcaccaagggacggacaggcctacgtgcgcaaggatggcgagtgggtgctgctgtccacctttctgggccatcatcaccaccaccaccaccactga

SEQ ID NO: 1446 - DNA, 3846 bp, Artificial Sequence
  Description of Artificial Sequence: Synthetic polynucleotide
atgggcatcctgccaagcccaggaatgcccgccctgctgtctctggtgagcctgctgtccgtgctgctgatgggatgcgtggcagagacaggcacacagtgcgtgaacctgaccacaaggacccagctgccccctgcctataccaattctttcacacggggcgtgtactatcccgacaaggtgtttagaagcgatgtgctgcactccacacaggatctgtttctgcctttcttttctaacgtgacctggttccacgccatccacgtgtccggcaccaatggcacaaaggacttcgacaatcccgtgctgccttttaacgatggcgtgtacttcgccagcaccgagaagtccaacatcatcagaggctggatctttggcaccacactggactctaagacacagagcctgctgatcgtgaacaatgccaccaacgtggtgatcaaggtgtgcgagttccagttttgtgaaaatccattcctgggcgtgtactatcacaagaacaataagtcctggatggagaaagagtttcgcgtgtattctagcgccaacaattgcacatttgagtacgtgagccagcccttcctgatggacctgggtggcaagcagggcaatttcaagtggctgagggagttcgtgtttaagaatatcgatggctacttcaagatctacagcaagcacaccccaatcaacctggtgcgcgacctgccacagggattctccgccctggagccactgatggatctgcccatcggcatcaacatcacccggtttcagacactgctggccctgcacagatcctacctgacaccaggcgactcctctagcggatggaccgcaggagctgccgcctactatgtgggctatctgcagccccggaccttcctgctgaagtacaacgagaatggcaccatcacagacgcagtggattgcgccctggaccccctgtctgagacaaagtgtacactgaagagctttaccgtggagaagggcatctatcagacaagcaatttcagggtgcagcctaccgagtccatcgtgcgctttcccaatatcacaaacctgtgcccttttggcgaggtgttcaacgccaccagattcgccagcgtgtacgcctggaatcggaagagaatctccaactgcgtggccgactattctgtgctgtacaactccgcctctttcagcacctttaagtgctatggcgtgtctcccacaaagctgaatgatctgtgctttaccaacgtgtacgccgatagcttcgtgatcaggggagacgaagtgagacagatcgcaccaggacagacaggaaagatcgcagactacaattataagctgcctgacgatttcaccggctgcgtgatcgcctggaactccaacaatctggattctaaagtgggcggcaactacaattatctgtacaggctgtttcgcaagtccaatctgaagccattcgagcgggacatctccacagagatctaccaggccggctctaccccctgcaatggcgtggagggctttaactgttatttccctctgcagtcttacggcttccagccaacaaacggcgtgggctatcagccctacagagtggtggtgctgtcctttgagctgctgcacgcaccagcaacagtgtgcggcccaaagaagtctaccaatctggtgaagaacaagtgcgtgaacttcaacttcaacggactgaccggcacaggcgtgctgaccgagagcaataagaagttcctgccttttcagcagttcggcagggacatcgcagataatacagacgccgtgcgcgaccctcagaccctggagatcctggacatcacaccatgcagcttcggcggcgtgtccgtgatcacaccaggcaccaatacatccaaccaggtggccgtgctgtatcaggacgtgaattgtaccgaggtgcccaatgcaatccacgcagatcagctgacccctacatggcgggtgtactctaccggcagcaacgtgttccagacaagagccggatgcctgatcggagcagagcacgtgaacaatagctatgagtgcgacatccctatcggcgccggcatctgtgccagctaccagacccagacaaactccccatctggagcaggctccgtggccagccagtccatcatcgcctataccatgagcctgggcgccgagaacagcgtggcctactccaacaattctatcgccatccctaccaacttcacaatcagcgtgaccacagagatcctgccagtgtctatgaccaagacaagcgtggactgcacaatgtatatctgtggcgatagcaccgagtgctccaacctgctgctgcagtacggctccttttgtacccagctgaatagagccctgcaaggcatcgcccaagagcaggataagaacacacaggaggtgttcgcccaggtgaagcagatctacaagaccccacccatcaaggactttggcggcttcaacttcagccagatcctgcctgatccaagcaagccctccaagaggtcttttatcgaggacctgctgttcaacaaggtgaccctggccgatgccggcttcatcaagcagtatggagattgcctgggagacatcgcagcccgcgacctgatctgtgcccagaagtttaatggcctgaccgtgctgcctccactgctgacagatgagatgatcgcccagtacacatctgccctgctggccggcaccatcacaagcggatggaccttcggcgcaggagccgccctgcagatcccttttgccatgcagatggcctataggttcaacggcatcggcgtgacccagaatgtgctgtacgagaaccagaagctgatcgccaatcagtttaacaaagccatcggcaagatccaggactctctgtcctctacagccagcgccctgggcaagctgcaggatgtggtgaatcagaacgcccaggccctgaataccctggtgaagcagctgagctccaacttcggcgccatctctagcgtgctgaatgacatcctgagccggctggacccccctgaggcagaggtgcagatcgacaggctgatcacaggccgcctgcagagcctgcagacctacgtgacacagcagctgatcagggcagcagagatcagagcctccgccaatctggccgccaccaagatgagcgagtgcgtgctgggacagtccaagagggtggacttttgtggcaagggctatcacctgatgtctttcccacagagcgcccctcacggcgtggtgtttctgcacgtgacctacgtgccagcccaggagaagaacttcaccacagcaccagccatctgccacgatggaaaggcattttttcctagggagggcgtgttcgtgtctaacggcacccaatggtttgtgacacagcgcaatttctacgagccacagatcatcaccacagacaatacattcgtgagcggcaactgtgatgtggtgatcggcatcgtgaacaataccgtgtatgatccactgcagcccgagctggactcctttaaggaggagctggataagtacttcaagaatcacacctctcccgacgtggatctgggcgacatctccggcatcaatgcctctgtggtgaacatccagaaggagatcgaccggctgaacgaggtggccaagaatctgaacgagagcctgatcgatctgcaggagctgggcaagtatgagcagtacatcaagggctctggcagagagaacctgtatttccagggaggaggaggcagcggatacatccctgaggcaccaagggacggacaggcctacgtgcgcaaggatggcgagtgggtgctgctgtccacctttctgggccatcatcaccaccaccaccaccactga

SEQ ID NO: 1447 - DNA, 3846 bp, Artificial Sequence
  Description of Artificial Sequence: Synthetic polynucleotide
atgggcatcctgccaagcccaggaatgcccgccctgctgtctctggtgagcctgctgtccgtgctgctgatgggatgcgtggcagagacaggcacacagtgcgtgaacctgaccacaaggacccagctgccccctgcctataccaattctttcacacggggcgtgtactatcccgacaaggtgtttagaagctccgtgctgcactccacacaggatctgtttctgcctttcttttctaacgtgacctggttccacgccatccacgtgtccggcaccaatggcacaaagcggttcgacaatcccgtgctgccttttaacgatggcgtgtacttcgccagcaccgagaagtccaacatcatcagaggctggatctttggcaccacactggactctaagacacagagcctgctgatcgtgaacaatgccaccaacgtggtgatcaaggtgtgcgagttccagttttgtaatgatccattcctgggcgtgtactatcacaagaacaataagtcctggatggagtctgagtttcgcgtgtattctagcgccaacaattgcacatttgagtacgtgagccagcccttcctgatggacctggagggcaagcagggcaatttcaagaacctgagggagttcgtgtttaagaatatcgatggctacttcaagatctacagcaagcacaccccaatcaacctggtgcgcgacctgccacagggattctccgccctggagccactggtggatctgcccatcggcatcaacatcacccggtttcagacactgctggccctgcacagatcctacctgacaccaggcgactcctctagcggatggaccgcaggagctgccgcctactatgtgggctatctgcagccccggaccttcctgctgaagtacaacgagaatggcaccatcacagacgcagtggattgcgccctggaccccctgtctgagacaaagtgtacactgaagagctttaccgtggagaagggcatctatcagacaagcaatttcagggtgcagcctaccgagtccatcgtgcgctttcccaatatcacaaacctgtgcccttttggcgaggtgttcaacgccaccagattcgccagcgtgtacgcctggaatcggaagagaatctccaactgcgtggccgactattctgtgctgtacaactccgcctctttcagcacctttaagtgctatggcgtgtctcccacaaagctgaatgatctgtgctttaccaacgtgtacgccgatagcttcgtgatcaggggagacgaagtgagacagatcgcaccaggacagacaggaaagatcgcagactacaattataagctgcctgacgatttcaccggctgcgtgatcgcctggaactccaacaatctggattctaaagtgggcggcaactacaattatctgtacaggctgtttcgcaagtccaatctgaagccattcgagcgggacatctccacagagatctaccaggccggctctaccccctgcaatggcgtggagggctttaactgttatttccctctgcagtcttacggcttccagccaacaaacggcgtgggctatcagccctacagagtggtggtgctgtcctttgagctgctgcacgcaccagcaacagtgtgcggcccaaagaagtctaccaatctggtgaagaacaagtgcgtgaacttcaacttcaacggactgaccggcacaggcgtgctgaccgagagcaataagaagttcctgccttttcagcagttcggcagggacatcgcagataccacagacgccgtgcgcgaccctcagaccctggagatcctggacatcacaccatgcagcttcggcggcgtgtccgtgatcacaccaggcaccaatacatccaaccaggtggccgtgctgtatcaggacgtgaattgtaccgaggtgcccgtggcaatccacgcagatcagctgacccctacatggcgggtgtactctaccggcagcaacgtgttccagacaagagccggatgcctgatcggagcagagcacgtgaacaatagctatgagtgcgacatccctatcggcgccggcatctgtgccagctaccagacccagacaaactccccatctggagcaggctccgtggccagccagtccatcatcgcctataccatgagcctgggcgccgagaacagcgtggcctactccaacaattctatcgccatccctaccaacttcacaatcagcgtgaccacagagatcctgccagtgtctatgaccaagacaagcgtggactgcacaatgtatatctgtggcgatagcaccgagtgctccaacctgctgctgcagtacggctccttttgtacccagctgaatagagccctgacaggcatcgccgtggagcaggataagaacacacaggaggtgttcgcccaggtgaagcagatctacaagaccccacccatcaaggactttggcggcttcaacttcagccagatcctgcctgatccaagcaagccctccaagaggtcttttatcgaggacctgctgttcaacaaggtgaccctggccgatgccggcttcatcaagcagtatggagattgcctgggagacatcagtgcccgcgacctgatctgtgcccagaagtttaatggcctgaccgtgctgcctccactgctgacagatgagatgatcgcccagtacacatctgccctgctggccggcaccatcacaagcggatggaccttcggcgcaggagccgccctgcagatcccttttgccatgcagatggcctataggttcaacggcatcggcgtgacccagaatgtgctgtacgagaaccagaagctgatcgccaatcagtttaacagcgccatcggcaagatccaggactctctgtcctctacagccagcgccctgggcaagctgcaggatgtggtgaatcagaacgcccaggccctgaataccctggtgaagcagctgagctccaacttcggcgccatctctagcgtgctgaatgacatcctgagccggctggacccccctgaggcagaggtgcagatcgacaggctgatcacaggccgcctgcagagcctgcagacctacgtgacacagcagctgatcagggcagcagagatcagagcctccgccaatctggccgccaccaagatgagcgagtgcgtgctgggacagtccaagagggtggacttttgtggcaagggctatcacctgatgtctttcccacagagcgcccctcacggcgtggtgtttctgcacgtgacctacgtgccagcccaggagaagaacttcaccacagcaccagccatctgccacgatggaaaggcacactttcctagggagggcgtgttcgtgtctaacggcacccactggtttgtgacacagcgcaatttctacgagccacagatcatcaccacagacaatacattcgtgagcggcaactgtgatgtggtgatcggcatcgtgaacaataccgtgtatgatccactgcagcccgagctggactcctttaaggaggagctggataagtacttcaagaatcacacctctcccgacgtggatctgggcgacatctccggcatcaatgcctctgtggtgaacatccagaaggagatcgaccggctgaacgaggtggccaagaatctgaacgagagcctgatcgatctgcaggagctgggcaagtatgagcagtacatcaagggctctggcagagagaacctgtatttccagggaggaggaggcagcggatacatccctgaggcaccaagggacggacaggcctacgtgcgcaaggatggcgagtgggtgctgctgtccacctttctgggccatcatcaccaccaccaccaccactga

SEQ ID NO: 1448 - DNA, 3846 bp, Artificial Sequence
  Description of Artificial Sequence: Synthetic polynucleotide
atgggcatcctgccaagcccaggaatgcccgccctgctgtctctggtgagcctgctgtccgtgctgctgatgggatgcgtggcagagacaggcacacagtgcgtgaacctgaccacaaggacccagctgccccctgcctataccaattctttcacacggggcgtgtactatcccgacaaggtgtttagaagctccgtgctgcactccacacaggatctgtttctgcctttcttttctaacgtgacctggttccacgccatccacgtgtccggcaccaatggcacaaagcggttcgacaatcccgtgctgccttttaacgatggcgtgtacttcgccagcaccgagaagtccaacatcatcagaggctggatctttggcaccacactggactctaagacacagagcctgctgatcgtgaacaatgccaccaacgtggtgatcaaggtgtgcgagttccagttttgtaatgatccattcctgggcgtgtactatcacaagaacaataagtcctggatggagtctgagtttcgcgtgtattctagcgccaacaattgcacatttgagtacgtgagccagcccttcctgatggacctggagggcaagcagggcaatttcaagaacctgagggagttcgtgtttaagaatatcgatggctacttcaagatctacagcaagcacaccccaatcaacctggtgcgcgacctgccacagggattctccgccctggagccactggtggttctgcccatcggcatcaacatcacccggtttcagacactgctggccctgcacagatcctacctgacaccaggcgactcctctagcggatggaccgcaggagctgccgcctactatgtgggctatctgcagccccggaccttcctgctgaagtacaacgagaatggcaccatcacagacgcagtggattgcgccctggaccccctgtctgagacaaagtgtacactgaagagctttaccgtggagaagggcatctatcagacaagcaatttcagggtgcagcctaccgagtccatcgtgcgctttcccaatatcacaaacctgtgcccttttggcgaggtgttcaacgccaccagattcgccagcgtgtacgcctggaatcggaagagaatctccaactgcgtggccgactattctgtgctgtacaactccgcctctttcagcacctttaagtgctatggcgtgtctcccacaaagctgaatgatctgtgctttaccaacgtgtacgccgatagcttcgtgatcaggggagacgaagtgagacagatcgcaccaggacagacaggaaagatcgcagactacaattataagctgcctgacgatttcaccggctgcgtgatcgcctggaactccaacaatctggattctaaagtgggcggcaactacaattatctgtacaggctgtttcgcaagtccaatctgaagccattcgagcgggacatctccacagagatctaccaggccggctctaccccctgcaatggcgtggagggctttaactgttatttccctctgcagtcttacggcttccagccaacaaacggcgtgggctatcagccctacagagtggtggtgctgtcctttgagctgctgcacgcaccagcaacagtgtgcggcccaaagaagtctaccaatctggtgaagaacaagtgcgtgaacttcaacttcaacggactgaccggcacaggcgtgctgaccgagagcaataagaagttcctgccttttcagcagttcggcagggacatcgcagataccacagacgccgtgcgcgaccctcagaccctggagatcctggacatcacaccatgcagcttcggcggcgtgtccgtgatcacaccaggcaccaatacatccaaccaggtggccgtgctgtatcaggacgtgaattgtaccgaggtgcccgtggcaatccacgcagatcagctgacccctacatggcgggtgtactctaccggcagcaacgtgttccagacaagagccggatgcctgatcggagcagagcacgtgaacaatagctatgagtgcgacatccctatcggcgccggcatctgtgccagctaccagacccagacaaactccccatctggagcaggctccgtggccagccagtccatcatcgcctataccatgagcctgggcgccgagaacagcgtggcctactccaacaattctatcgccatccctaccaacttcacaatcagcgtgaccacagagatcctgccagtgtctatgaccaagacaagcgtggactgcacaatgtatatctgtggcgatagcaccgagtgctccaacctgctgctgcagtacggctccttttgtacccagctgaatagagccctgacaggcatcgccgtggagcaggataagaacacacaggaggtgttcgcccaggtgaagcagatctacaagaccccacccatcaaggactttggcggcttcaacttcagccagatcctgcctgatccaagcaagccctccaagaggtcttttatcgaggacctgctgttcaacaaggtgaccctggccgatgccggcttcatcaagcagtatggagattgcctgggagacatcgcagcccgcgacctgatctgtgcccagaagtttaatggcctgaccgtgctgcctccactgctgacagatgagatgatcgcccagtacacatctgccctgctggccggcaccatcacaagcggatggaccttcggcgcaggagccgccctgcagatcccttttgccatgcagatggcctataggttcaacggcatcggcgtgacccagaatgtgctgtacgagaaccagaagctgatcgccaatcagtttaacagcgccatcggcaagatccaggactctctgtcctctacagccagcgccctgggcaagctgcaggatgtggtgaatcagaacgcccaggccctgaataccctggtgaagcagctgagctccaacttcggcgccatctctagcgtgctgaatgacatcctgagccggctggacccccctgaggcagaggtgcagatcgacaggctgatcacaggccgcctgcagagcctgcagacctacgtgacacagcagctgatcagggcagcagagatcagagcctccgccaatctggccgccaccaagatgagcgagtgcgtgctgggacagtccaagagggtggacttttgtggcaagggctatcacctgatgtctttcccacagagcgcccctcacggcgtggtgtttctgcacgtgacctacgtgccagcccaggagaagaacttcaccacagcaccagccatctgccacgatggaaaggcacactttcctagggagggcgtgttcgtgtctaacggcacccactggtttgtgacacagcgcaatttctacgagccacagatcatcaccacagacaatacattcgtgagcggcaactgtgatgtggtgatcggcatcgtgaacaataccgtgtatgatccactgcagcccgagctggactcctttaaggaggagctggataagtacttcaagaatcacacctctcccgacgtggatctgggcgacatctccggcatcaatgcctctgtggtgaacatccagaaggagatcgaccggctgaacgaggtggccaagaatctgaacgagagcctgatcgatctgcaggagctgggcaagtatgagcagtacatcaagggctctggcagagagaacctgtatttccagggaggaggaggcagcggatacatccctgaggcaccaagggacggacaggcctacgtgcgcaaggatggcgagtgggtgctgctgtccacctttctgggccatcatcaccaccaccaccaccactga

SEQ ID NO: 1449 - DNA, 3846 bp, Artificial Sequence
  Description of Artificial Sequence: Synthetic polynucleotide
atgggcatcctgccaagcccaggaatgcccgccctgctgtctctggtgagcctgctgtccgtgctgctgatgggatgcgtggcagagacaggcacacagtgcgtgaacctgaccacaaggacccagctgccccctgcctataccaattctttcacacggggcgtgtactatcccgacaaggtgtttagaagctccgtgctgcactccacacaggatctgtttctgcctttcttttctaacgtgacctggttccacgccatccacgtgtccggcaccaatggcacaaagcggttcgacaatcccgtgctgccttttaacgatggcgtgtacttcgccagcaccgagaagtccaacatcatcagaggctggatctttggcaccacactggactctaagacacagagcctgctgatcgtgaacaatgccaccaacgtggtgatcaaggtgtgcgagttccagttttgtaatgatccattcctgggcgtgtactatcacaagaacaataagtcctggatggagtctgagtttcgcgtgtattctagcgccaacaattgcacatttgagtacgtgagccagcccttcctgatggacctggagggcaagcagggcaatttcaagaacctgagggagttcgtgtttaagaatatcgatggctacttcaagatctacagcaagcacaccccaatcaacctggtgcgcgacctgccacagggattctccgccctggagccactggtggatctgcccatcggcatcaacatcacccggtttcagacactgctggccctgcacagatcctacctgacaccaggcgactcctctagcggatggaccgcaggagctgccgcctactatgtgggctatctgcagccccggaccttcctgctgaagtacaacgagaatggcaccatcacagacgcagtggattgcgccctggaccccctgtctgagacaaagtgtacactgaagagctttaccgtggagaagggcatctatcagacaagcaatttcagggtgcagcctaccgagtccatcgtgcgctttcccaatatcacaaacctgtgcccttttggcgaggtgttcaacgccaccagattcgccagcgtgtacgcctggaatcggaagagaatctccaactgcgtggccgactattctgtgctgtacaactccgcctctttcagcacctttaagtgctatggcgtgtctcccacaaagctgaatgatctgtgctttaccaacgtgtacgccgatagcttcgtgatcaggggagacgaagtgagacagatcgcaccaggacagacaggaaagatcgcagactacaattataagctgcctgacgatttcaccggctgcgtgatcgcctggaactccaacaatctggattctaaagtgggcggcaactacaattatctgtacaggctgtttcgcaagtccaatctgaagccattcgagcgggacatctccacagagatctaccaggccggctctaccccctgcaatggcgtggagggctttaactgttatttccctctgcagtcttacggcttccagccaacaaacggcgtgggctatcagccctacagagtggtggtgctgtcctttgagctgctgcacgcaccagcaacagtgtgcggcccaaagaagtctaccaatctggtgaagaacaagtgcgtgaactacaacttcaacggactgaccggcacaggcgtgctgaccgagagcaataagaagttcctgccttttcagcagttcggcagggacatcgcagataccacagacgccgtgcgcgaccctcagaccctggagatcctggacatcacaccatgcagcttcggcggcgtgtccgtgatcacaccaggcaccaatacatccaaccaggtggccgtgctgtatcaggacgtgaattgtaccgaggtgcccgtggcaatccacgcagatcagctgacccctacatggcgggtgtactctaccggcagcaacgtgttccagacaagagccggatgcctgatcggagcagagcacgtgaacaatagctatgagtgcgacatccctatcggcgccggcatctgtgccagctaccagacccagacaaactccccatctggagcaggctccgtggccagccagtccatcatcgcctataccatgagcctgggcgccgagaacagcgtggcctactccaacaattctatcgccatccctaccaacttcacaatcagcgtgaccacagagatcctgccagtgtctatgaccaagacaagcgtggactgcacaatgtatatctgtggcgatagcaccgagtgctccaacctgctgctgcagtacggctccttttgtacccagctgaatagagccctgacaggcatcgccgtggagcaggataagaacacacaggaggtgttcgcccaggtgaagcagatctacaagaccccacccatcaaggactttggcggcttcaacttcagccagatcctgcctgatccaagcaagccctccaagaggtcttttatcgaggacctgctgttcaacaaggtgaccctggccgatgccggcttcatcaagcagtatggagattgcctgggagacatcgcagcccgcgacctgatctgtgcccagaagtttaatggcctgaccgtgctgcctccactgctgacagatgagatgatcgcccagtacacatctgccctgctggccggcaccatcacaagcggatggaccttcggcgcaggagccgccctgcagatcccttttgccatgcagatggcctataggttcaacggcatcggcgtgacccagaatgtgctgtacgagaaccagaagctgatcgccaatcagtttaacagcgccatcggcaagatccaggactctctgtcctctacagccagcgccctgggcaagctgcaggatgtggtgaatcagaacgcccaggccctgaataccctggtgaagcagctgagctccaacttcggcgccatctctagcgtgctgaatgacatcctgagccggctggacccccctgaggcagaggtgcagatcgacaggctgatcacaggccgcctgcagagcctgcagacctacgtgacacagcagctgatcagggcagcagagatcagagcctccgccaatctggccgccaccaagatgagcgagtgcgtgctgggacagtccaagagggtggacttttgtggcaagggctatcacctgatgtctttcccacagagcgcccctcacggcgtggtgtttctgcacgtgacctacgtgccagcccaggagaagaacttcaccacagcaccagccatctgccacgatggaaaggcacactttcctagggagggcgtgttcgtgtctaacggcacccactggtttgtgacacagcgcaatttctacgagccacagatcatcaccacagacaatacattcgtgagcggcaactgtgatgtggtgatcggcatcgtgaacaataccgtgtatgatccactgcagcccgagctggactcctttaaggaggagctggataagtacttcaagaatcacacctctcccgacgtggatctgggcgacatctccggcatcaatgcctctgtggtgaacatccagaaggagatcgaccggctgaacgaggtggccaagaatctgaacgagagcctgatcgatctgcaggagctgggcaagtatgagcagtacatcaagggctctggcagagagaacctgtatttccagggaggaggaggcagcggatacatccctgaggcaccaagggacggacaggcctacgtgcgcaaggatggcgagtgggtgctgctgtccacctttctgggccatcatcaccaccaccaccaccactga

SEQ ID NO: 1450 - DNA, 3846 bp, Artificial Sequence
  Description of Artificial Sequence: Synthetic polynucleotide
atgggcatcctgccaagcccaggaatgcccgccctgctgtctctggtgagcctgctgtccgtgctgctgatgggatgcgtggcagagacaggcacacagtgcgtgaacctgaccacaaggacccagctgccccctgcctataccaattctttcacacggggcgtgtactatcccgacaaggtgtttagaagcgatgtgctgcactccacacaggatctgtttctgcctttcttttctaacgtgacctggttccacgccatccacgtgtccggcaccaatggcacaaagcggttcgacaatcccgtgctgccttttaacgatggcgtgtacttcgccagcaccgagaagtccaacatcatcagaggctggatctttggcaccacactggactctaagacacagagcctgctgatcgtgaacaatgccaccaacgtggtgatcaaggtgtgcgagttccagttttgtgaaaatccattcctgggcgtgtactatcacaagaacaataagtcctggatggagaaagagtttcgcgtgtattctagcgccaacaattgcacatttgagtacgtgagccagcccttcctgatggacctgggtggcaagcagggcaatttcaagaacctgagggagttcgtgtttaagaatatcgatggctacttcaagatctacagcaagcacaccccaatcaacctggtgcgcgacctgccacagggattctccgccctggagccactgatggatctgcccatcggcatcaacatcacccggtttcagacactgctggccctgcacagatcctacctgacaccaggcgactcctctagcggatggaccgcaggagctgccgcctactatgtgggctatctgcagccccggaccttcctgctgaagtacaacgagaatggcaccatcacagacgcagtggattgcgccctggaccccctgtctgagacaaagtgtacactgaagagctttaccgtggagaagggcatctatcagacaagcaatttcagggtgcagcctaccgagtccatcgtgcgctttcccaatatcacaaacctgtgcccttttggcgaggtgttcaacgccaccagattcgccagcgtgtacgcctggaatcggaagagaatctccaactgcgtggccgactattctgtgctgtacaactccgcctctttcagcacctttaagtgctatggcgtgtctcccacaaagctgaatgatctgtgctttaccaacgtgtacgccgatagcttcgtgatcaggggagacgaagtgagacagatcgcaccaggacagacaggaaagatcgcagactacaattataagctgcctgacgatttcaccggctgcgtgatcgcctggaactccaacaatctggattctaaagtgggcggcaactacaattatctgtacaggctgtttcgcaagtccaatctgaagccattcgagcgggacatctccacagagatctaccaggccggctctaccccctgcaatggcgtggagggctttaactgttatttccctctgcagtcttacggcttccagccaacaaacggcgtgggctatcagccctacagagtggtggtgctgtcctttgagctgctgcacgcaccagcaacagtgtgcggcccaaagaagtctaccaatctggtgaagaacaagtgcgtgaacttcaacttcaacggactgaccggcacaggcgtgctgaccgagagcaataagaagttcctgccttttcagcagttcggcagggacatcgcagataatacagacgccgtgcgcgaccctcagaccctggagatcctggacatcacaccatgcagcttcggcggcgtgtccgtgatcacaccaggcaccaatacatccaaccaggtggccgtgctgtatcaggacgtgaattgtaccgaggtgcccaatgcaatccacgcagatcagctgacccctacatggcgggtgtactctaccggcagcaacgtgttccagacaagagccggatgcctgatcggagcagagcacgtgaacaatagctatgagtgcgacatccctatcggcgccggcatctgtgccagctaccagacccagacaaactccccatctggagcaggctccgtggccagccagtccatcatcgcctataccatgagcctgggcgccgagaacagcgtggcctactccaacaattctatcgccatccctaccaacttcacaatcagcgtgaccacagagatcctgccagtgtctatgaccaagacaagcgtggactgcacaatgtatatctgtggcgatagcaccgagtgctccaacctgctgctgcagtacggctccttttgtacccagctgaatagagccctgcaaggcatcgcccgagagcaggataagaacacacaggaggtgttcgcccaggtgaagcagatctacaagaccccacccatcaaggactttggcggcttcaacttcagccagatcctgcctgatccaagcaagccctccaagaggtcttttatcgaggacctgctgttcaacaaggtgaccctggccgatgccggcttcatcaagcagtatggagattgcctgggagacatcgcagcccgcgacctgatctgtgcccagaagtttaatggcctgaccgtgctgcctccactgctgacagatgagatgatcgcccagtacacatctgccctgctggccggcaccatcacaagcggatggaccttcggcgcaggagccgccctgcagatcccttttgccatgcagatggcctataggttcaacggcatcggcgtgacccagaatgtgctgtacgagaaccagaagctgatcgccaatcagtttaaccaagccatcggcaagatccaggactctctgtcctctacagccagcgccctgggcaagctgcaggatgtggtgaatcagaacgcccaggccctgaataccctggtgaagcagctgagctccaacttcggcgccatctctagcgtgctgaatgacatcctgagccggctggacccccctgaggcagaggtgcagatcgacaggctgatcacaggccgcctgcagagcctgcagacctacgtgacacagcagctgatcagggcagcagagatcagagcctccgccaatctggccgccaccaagatgagcgagtgcgtgctgggacagtccaagagggtggacttttgtggcaagggctatcacctgatgtctttcccacagagcgcccctcacggcgtggtgtttctgcacgtgacctacgtgccagcccaggagaagaacttcaccacagcaccagccatctgccacgatggaaaggcattttttcctagggagggcgtgttcgtgtctaacggcacccaatggtttgtgacacagcgcaatttctacgagccacagatcatcaccacagacaatacattcgtgagcggcaactgtgatgtggtgatcggcatcgtgaacaataccgtgtatgatccactgcagcccgagctggactcctttaaggaggagctggataagtacttcaagaatcacacctctcccgacgtggatctgggcgacatctccggcatcaatgcctctgtggtgaacatccagaaggagatcgaccggctgaacgaggtggccaagaatctgaacgagagcctgatcgatctgcaggagctgggcaagtatgagcagtacatcaagggctctggcagagagaacctgtatttccagggaggaggaggcagcggatacatccctgaggcaccaagggacggacaggcctacgtgcgcaaggatggcgagtgggtgctgctgtccacctttctgggccatcatcaccaccaccaccaccactga

SEQ ID NO: 1451 - DNA, 3846 bp, Artificial Sequence
  Description of Artificial Sequence: Synthetic polynucleotide
atgggcatcctgccaagcccaggaatgcccgccctgctgtctctggtgagcctgctgtccgtgctgctgatgggatgcgtggcagagacaggcacacagtgcgtgaacctgaccacaaggacccagctgccccctgcctataccaattctttcacacggggcgtgtactatcccgacaaggtgtttagaagctccgtgctgcactccacacaggatctgtttctgcctttcttttctaacgtgacctggttccacgccatccacgtgtccggcaccaatggcacaaagcggttcgacaatcccgtgctgccttttaacgatggcgtgtacttcgccagcaccgagaagtccaacatcatcagaggctggatctttggcaccacactggactctaagacacagagcctgctgatcgtgaacaatgccaccaacgtggtgatcaaggtgtgcgagttccagttttgtgaaaatccattcctgggcgtgtactatcacaagaacaataagtcctggatggaggaagagtttcgcgtgtattctagcgccaacaattgcacatttgagtacgtgagccagcccttcctgatggacctggagggcaagcagggcaatttcaagaacctgagggagttcgtgtttaagaatatcgatggctacttcaagatctacagcaagcacaccccaatcaacctggtgcgcgacctgccacagggattctccgccctggagccactggtggatctgcccatcggcatcaacatcacccggtttcagacactgctggccctgcacagatcctacctgacaccaggcgactcctctagcggatggaccgcaggagctgccgcctactatgtgggctatctgcagccccggaccttcctgctgaagtacaacgagaatggcaccatcacagacgcagtggattgcgccctggaccccctgtctgagacaaagtgtacactgaagagctttaccgtggagaagggcatctatcagacaagcaatttcagggtgcagcctaccgagtccatcgtgcgctttcccaatatcacaaacctgtgcccttttggcgaggtgttcaacgccaccagattcgccagcgtgtacgcctggaatcggaagagaatctccaactgcgtggccgactattctgtgctgtacaactccgcctctttcagcacctttaagtgctatggcgtgtctcccacaaagctgaatgatctgtgctttaccaacgtgtacgccgatagcttcgtgatcaggggagacgaagtgagacagatcgcaccaggacagacaggaaagatcgcagactacaattataagctgcctgacgatttcaccggctgcgtgatcgcctggaactccaacaatctggattctaaagtgggcggcaactacaattatctgtacaggctgtttcgcaagtccaatctgaagccattcgagcgggacatctccacagagatctaccaggccggctctaccccctgcaatggcgtggagggctttaactgttatttccctctgcagtcttacggcttccagccaacaaacggcgtgggctatcagccctacagagtggtggtgctgtcctttgagctgctgcacgcaccagcaacagtgtgcggcccaaagaagtctaccaatctggtgaagaacaagtgcgtgaacttcaacttcaacggactgaccggcacaggcgtgctgaccgagagcaataagaagttcctgccttttcagcagttcggcagggacatcgcagataccacagacgccgtgcgcgaccctcagaccctggagatcctggacatcacaccatgcagcttcggcggcgtgtccgtgatcacaccaggcaccaatacatccaaccaggtggccgtgctgtatcaggacgtgaattgtaccgaggtgcccgtggcaatccacgcagatcagctgacccctacatggcgggtgtactctaccggcagcaacgtgttccagacaagagccggatgcctgatcggagcagagcacgtgaacaatagctatgagtgcgacatccctatcggcgccggcatctgtgccagctaccagacccagacaaactccccatctggagcaggctccgtggccagccagtccatcatcgcctataccatgagcctgggcgccgagaacagcgtggcctactccaacaattctatcgccatccctaccaacttcacaatcagcgtgaccacagagatcctgccagtgtctatgaccaagacaagcgtggactgcacaatgtatatctgtggcgatagcaccgagtgctccaacctgctgctgcagtacggctccttttgtacccagctgaatagagccctgacaggcatcgccgtggagcaggataagaacacacaggaggtgttcgcccaggtgaagcagatctacaagaccccacccatcaaggactttggcggcttcaacttcagccagatcctgcctgatccaagcaagccctccaagaggtcttttatcgaggacctgctgttcaacaaggtgaccctggccgatgccggcttcatcaagcagtatggagattgcctgggagacatcgcagcccgcgacctgatctgtgcccagaagtttaatggcctgaccgtgctgcctccactgctgacagatgagatgatcgcccagtacacatctgccctgctggccggcaccatcacaagcggatggaccttcggcgcaggagccgccctgcagatcccttttgccatgcagatggcctataggttcaacggcatcggcgtgacccagaatgtgctgtacgagaaccagaagctgatcgccaatcagtttaacagcgccatcggcaagatccaggactctctgtcctctacagccagcgccctgggcaagctgcaggatgtggtgaatcagaacgcccaggccctgaataccctggtgaagcagctgagctccaacttcggcgccatctctagcgtgctgaatgacatcctgagccggctggacccccctgaggcagaggtgcagatcgacaggctgatcacaggccgcctgcagagcctgcagacctacgtgacacagcagctgatcagggcagcagagatcagagcctccgccaatctggccgccaccaagatgagcgagtgcgtgctgggacagtccaagagggtggacttttgtggcaagggctatcacctgatgtctttcccacagagcgcccctcacggcgtggtgtttctgcacgtgacctacgtgccagcccaggagaagaacttcaccacagcaccagccatctgccacgatggaaaggcacactttcctagggagggcgtgttcgtgtctaacggcacccactggtttgtgacacagcgcaatttctacgagccacagatcatcaccacagacaatacattcgtgagcggcaactgtgatgtggtgatcggcatcgtgaacaataccgtgtatgatccactgcagcccgagctggactcctttaaggaggagctggataagtacttcaagaatcacacctctcccgacgtggatctgggcgacatctccggcatcaatgcctctgtggtgaacatccagaaggagatcgaccggctgaacgaggtggccaagaatctgaacgagagcctgatcgatctgcaggagctgggcaagtatgagcagtacatcaagggctctggcagagagaacctgtatttccagggaggaggaggcagcggatacatccctgaggcaccaagggacggacaggcctacgtgcgcaaggatggcgagtgggtgctgctgtccacctttctgggccatcatcaccaccaccaccaccactga

SEQ ID NO: 1452 - DNA, 3846 bp, Artificial Sequence
  Description of Artificial Sequence: Synthetic polynucleotide
atgggcatcctgccaagcccaggaatgcccgccctgctgtctctggtgagcctgctgtccgtgctgctgatgggatgcgtggcagagacaggcacacagtgcgtgaacctgaccacaaggacccagctgccccctgcctataccaattctttcacacggggcgtgtactatcccgacaaggtgtttagaagctccgtgctgcactccacacaggatctgtttctgcctttcttttctaacgtgacctggttccacgccatccacgtgtccggcaccaatggcacaaagcggttcgacaatcccgtgctgccttttaacgatggcgtgtacttcgccagcaccgagaagtccaacatcatcagaggctggatctttggcaccacactggactctaagacacagagcctgctgatcgtgaacaatgccaccaacgtggtgatcaaggtgtgcgagttccagttttgtaatgatccattcctgggcgtgtactatcacaagaacaataagtcctggatggagtctgagtttcgcgtgtattctagcgccaacaattgcacatttgagtacgtgagccagcccttcctgatggacctggagggcaagcagggcaatttcaagaacctgagggagttcgtgtttaagaatatcgatggctacttcaagatctacagcaagcacaccccaatcaacctggtgcgcgacctgccacagggattctccgccctggagccactggtggatctgcccatcggcatcaacatcacccggtttcagacactgctggccctgcacagatcctacctgacaccaggcgactcctctagcggatggaccgcaggagctgccgcctactatgtgggctatctgcagccccggaccttcctgctgaagtacaacgagaatggcaccatcacagacgcagtggattgcgccctggaccccctgtctgagacaaagtgtacactgaagagctttaccgtggagaagggcatctatcagacaagcaatttcagggtgcagcctaccgagtccatcgtgcgctttcccaatatcacaaacctgtgcccttttggcgaggtgttcaacgccaccagattcgccagcgtgtacgcctggaatcggaagagaatctccaactgcgtggccgactattctgtgctgtacaactccgcctctttcagcacctttaagtgctatggcgtgtctcccacaaagctgaatgatctgtgctttaccaacgtgtacgccgatagcttcgtgatcaggggagacgaagtgagacagatcgcaccaggacagacaggaaagatcgcagactacaattataagctgcctgacgatttcaccggctgcgtgatcgcctggaactccaacaatctggattctaaagtgggcggcaactacaattatctgtacaggctgtttcgcaagtccaatctgaagccattcgagcgggacatctccacagagatctaccaggccggctctaccccctgcaatggcgtggagggctttaactgttatttccctctgcagtcttacggcttccagccaacaaacggcgtgggctatcagccctacagagtggtggtgctgtcctttgagctgctgcacgcaccagcaacagtgtgcggcccaaagaagtctaccaatctggtgaagaacaagtgcgtgaacttcaacttcaacggactgaccggcacaggcgtgctgaccgagagcaataagaagttcctgccttttcagcagttcggcagggacatcgcagataccacagacgccgtgcgcgaccctcagaccctggagatcctggacatcacaccatgcagcttcggcggcgtgtccgtgatcacaccaggcaccaatacatccaaccaggtggccgtgctgtatcaggacgtgaattgtaccgaggtgcccgtggcaatccacgcagatcagctgacccctacatggcgggtgtactctaccggcagcaacgtgttccagacaagagccggatgcctgatcggagcagagcacgtgaacaatagctatgagtgcgacatccctatcggcgccggcatctgtgccagctaccagacccagacaaactccccatctggagcaggctccgtggccagccagtccatcatcgcctataccatgagcctgggcgccgagaacagcgtggcctactccaacaattctatcgccatccctaccaacttcacaatcagcgtgaccacagagatcctgccagtgtctatgaccaagacaagcgtggactgcacaatgtatatctgtggcgatagcaccgagtgctccaacctgctgctgcagtacggctccttttgtacccagctgaatagagccctgacaggcatcgccgtggagcaggataagaacacacaggaggtgttcgcccaggtgaagcagatctacaagaccccacccatcaaggactttggcggcttcaacttcagccagatcctgcctgatccaagcaagccctccaagaggtcttttatcgaggacctgctgttcaacaaggtgaccctggccgatgccggcttcatcaagcagtatggagattgcctgggagacatcgcagcccgcgacctgatctgtgcccagaagtttaatggcctgaccgtgctgcctccactgctgacagatgagatgatcgcccagtacacatctgccctgctggccggcaccatcacaagcggatggaccttcggcgcaggagccgccctgcagatcccttttgccatgcagatggcctataggttcaacggcatcggcgtgacccagaatgtgctgtacgagaaccagaagctgatcgccaatcagtttaacagcgccatcggcaagatccaggactctctgtcctctacagccagcgccctgggcaagctgcaggatgtggtgaatcagaacgcccaggccctgaataccctggtgaagcagctgagctccaacttcggcgccatctctagcgtgctgaatgacatcctgagccggctggacccccctgaggcagaggtgcagatcgacaggctgatcacaggccgcctgcagagcctgcagacctacgtgacacagcagctgatcagggcagcagagatcagagcctccgccaatctggccgccaccaagatgagcgagtgcgtgctgggacagtccaagagggtggacttttgtggcaagggctatcacctgatgtctttcccacagagcgcccctcacggcgtggtgtttctgcacgtgacctacgtgccagcccaggagaagaacttcaccacagcaccagccatctgccacgatggaaaggcatattttcctagggagggcgtgttcgtgtctaacggcacctcatggtttataacacagcgcaatttctacgagccacagatcatcaccacagacaatacattcgtgagcggcaactgtgatgtggtgatcggcatcgtgaacaataccgtgtatgatccactgcagcccgagctggactcctttaaggaggagctggataagtacttcaagaatcacacctctcccgacgtggatctgggcgacatctccggcatcaatgcctctgtggtgaacatccagaaggagatcgaccggctgaacgaggtggccaagaatctgaacgagagcctgatcgatctgcaggagctgggcaagtatgagcagtacatcaagggctctggcagagagaacctgtatttccagggaggaggaggcagcggatacatccctgaggcaccaagggacggacaggcctacgtgcgcaaggatggcgagtgggtgctgctgtccacctttctgggccatcatcaccaccaccaccaccactga

SEQ ID NO: 1453 - DNA, 3846 bp, Artificial Sequence
  Description of Artificial Sequence: Synthetic polynucleotide
atgggcatcctgccaagcccaggaatgcccgccctgctgtctctggtgagcctgctgtccgtgctgctgatgggatgcgtggcagagacaggcacacagtgcgtgaacctgaccacaaggacccagctgccccctgcctataccaattctttcacacggggcgtgtactatcccgacaaggtgtttagaagctccgtgctgcactccacacaggatctgtttctgcctttcttttctaacgtgacctggttccacgccatccacgtgtccggcaccaatggcacaaagcggttcgacaatcccgtgctgccttttaacgatggcgtgtacttcgccagcaccgagaagtccaacatcatcagaggctggatctttggcaccacactggactctaagacacagagcctgctgatcgtgaacaatgccaccaacgtggtgatcaaggtgtgcgagttccagttttgtaatgatccattcctgggcgtgtactatcacaagaacaataagtcctggatggagtctgagtttcgcgtgtattctagcgccaacaattgcacatttgagtacgtgagccagcccttcctgtacgacctgaacggcaagcagggcaatttcaagaacctgagggagttcgtgtttaagaatatcgatggctacttcaagatctacagcaagcacaccccaatcaacctggtgcgcgacctgccacagggattctccgccctggagccactggtggatctgcccatcggcatcaacatcacccggtttcagacactgctggccctgcacagatcctacctgacaccaggcgactcctctagcggatggaccgcaggagctgccgcctactatgtgggctatctgcagccccggaccttcctgctgaagtacaacgagaatggcaccatcacagacgcagtggattgcgccctggaccccctgtctgagacaaagtgtacactgaagagctttaccgtggagaagggcatctatcagacaagcaatttcagggtgcagcctaccgagtccatcgtgcgctttcccaatatcacaaacctgtgcccttttggcgaggtgttcaacgccaccagattcgccagcgtgtacgcctggaatcggaagagaatctccaactgcgtggccgactattctgtgctgtacaactccgcctctttcagcacctttaagtgctatggcgtgtctcccacaaagctgaatgatctgtgctttaccaacgtgtacgccgatagcttcgtgatcaggggagacgaagtgagacagatcgcaccaggacagacaggaaagatcgcagactacaattataagctgcctgacgatttcaccggctgcgtgatcgcctggaactccaacaatctggattctaaagtgggcggcaactacaattatctgtacaggctgtttcgcaagtccaatctgaagccattcgagcgggacatctccacagagatctaccaggccggctctaccccctgcaatggcgtggagggctttaactgttatttccctctgcagtcttacggcttccagccaacaaacggcgtgggctatcagccctacagagtggtggtgctgtcctttgagctgctgcacgcaccagcaacagtgtgcggcccaaagaagtctaccaatctggtgaagaacaagtgcgtgaacttcaacttcaacggactgaccggcacaggcgtgctgaccgagagcaataagaagttcctgccttttcagcagttcggcagggacatcgcagataccacagacgccgtgcgcgaccctcagaccctggagatcctggacatcacaccatgcagcttcggcggcgtgtccgtgatcacaccaggcaccaatacatccaaccaggtggccgtgctgtatcaggacgtgaattgtaccgaggtgcccgtggcaatccacgcagatcagctgacccctacatggcgggtgtactctaccggcagcaacgtgttccagacaagagccggatgcctgatcggagcagagcacgtgaacaatagctatgagtgcgacatccctatcggcgccggcatctgtgccagctaccagacccagacaaactccccatctggagcaggctccgtggccagccagtccatcatcgcctataccatgagcctgggcgccgagaacagcgtggcctactccaacaattctatcgccatccctaccaacttcacaatcagcgtgaccacagagatcctgccagtgtctatgaccaagacaagcgtggactgcacaatgtatatctgtggcgatagcaccgagtgctccaacctgctgctgcagtacggctccttttgtacccagctgaatagagccctgacaggcatcgccgtggagcaggataagaacacacaggaggtgttcgcccaggtgaagcagatctacaagaccccacccatcaaggactttggcggcttcaacttcagccagatcctgcctgatccaagcaagccctccaagaggtcttttatcgaggacctgctgttcaacaaggtgaccctggccgatgccggcttcatcaagcagtatggagattgcctgggagacatcgcagcccgcgacctgatctgtgcccagaagtttaatggcctgaccgtgctgcctccactgctgacagatgagatgatcgcccagtacacatctgccctgctggccggcaccatcacaagcggatggaccttcggcgcaggagccgccctgcagatcccttttgccatgcagatggcctataggttcaacggcatcggcgtgacccagaatgtgctgtacgagaaccagaagctgatcgccaatcagtttaacagcgccatcggcaagatccaggactctctgtcctctacagccagcgccctgggcaagctgcaggatgtggtgaatcagaacgcccaggccctgaataccctggtgaagcagctgagctccaacttcggcgccatctctagcgtgctgaatgacatcctgagccggctggacccccctgaggcagaggtgcagatcgacaggctgatcacaggccgcctgcagagcctgcagacctacgtgacacagcagctgatcagggcagcagagatcagagcctccgccaatctggccgccaccaagatgagcgagtgcgtgctgggacagtccaagagggtggacttttgtggcaagggctatcacctgatgtctttcccacagagcgcccctcacggcgtggtgtttctgcacgtgacctacgtgccagcccaggagaagaacttcaccacagcaccagccatctgccacgatggaaaggcacactttcctagggagggcgtgttcgtgtctaacggcacccactggtttgtgacacagcgcaatttctacgagccacagatcatcaccacagacaatacattcgtgagcggcaactgtgatgtggtgatcggcatcgtgaacaataccgtgtatgatccactgcagcccgagctggactcctttaaggaggagctggataagtacttcaagaatcacacctctcccgacgtggatctgggcgacatctccggcatcaatgcctctgtggtgaacatccagaaggagatcgaccggctgaacgaggtggccaagaatctgaacgagagcctgatcgatctgcaggagctgggcaagtatgagcagtacatcaagggctctggcagagagaacctgtatttccagggaggaggaggcagcggatacatccctgaggcaccaagggacggacaggcctacgtgcgcaaggatggcgagtgggtgctgctgtccacctttctgggccatcatcaccaccaccaccaccactga

SEQ ID NO: 1454 - DNA, 3846 bp, Artificial Sequence
  Description of Artificial Sequence: Synthetic polynucleotide
atgggcatcctgccaagcccaggaatgcccgccctgctgtctctggtgagcctgctgtccgtgctgctgatgggatgcgtggcagagacaggcacacagtgcgtgaacctgaccacaaggacccagctgccccctgcctataccaattctttcacacggggcgtgtactatcccgacaaggtgtttagaagctccgtgctgcactccacacaggatctgtttctgcctttcttttctaacgtgacctggttccacgccatccacgtgtccggcaccaatggcacaaagcggttcgacaatcccgtgctgccttttaacgatggcgtgtacttcgccagcaccgagaagtccaacatcatcagaggctggatctttggcaccacactggactctaagacacagagcctgctgatcgtgaacaatgccaccaacgtggtgatcaaggtgtgcgagttccagttttgtaatgatccattcctgggcgtgtactatcacaagaacaataagtcctggatggagtctgagtttcgcgtgtattctagcgccaacaattgcacatttgagtacgtgagccagcccttcctgatggacctggagggcaagcagggcaatttcaagaacctgagggagttcgtgtttaagaatatcgatggctacttcaagatctacagcaagcacaccccaatcaacctggtgcgcgacctgccacagggattctccgccctggagccactggtggatctgcccatcggcatcaacatcacccggtttcagacactgctggccctgcacagatcctacctgacaccaggcgactcctctagcggatggggagcaggagctgccgcctactatgtgggctatctgcagccccggaccttcctgctgaagtacaacgagaatggcaccatcacagacgcagtggattgcgccctggaccccctgtctgagacaaagtgtacactgaagagctttaccgtggagaagggcatctatcagacaagcaatttcagggtgcagcctaccgagtccatcgtgcgctttcccaatatcacaaacctgtgcccttttggcgaggtgttcaacgccaccagattcgccagcgtgtacgcctggaatcggaagagaatctccaactgcgtggccgactattctgtgctgtacaactccgcctctttcagcacctttaagtgctatggcgtgtctcccacaaagctgaatgatctgtgctttaccaacgtgtacgccgatagcttcgtgatcaggggagacgaagtgagacagatcgcaccaggacagacaggaaagatcgcagactacaattataagctgcctgacgatttcaccggctgcgtgatcgcctggaactccaacaatctggattctaaagtgggcggcaactacaattatctgtacaggctgtttcgcaagtccaatctgaagccattcgagcgggacatctccacagagatctaccaggccggctctaccccctgcaatggcgtggagggctttaactgttatttccctctgcagtcttacggcttccagccaacaaacggcgtgggctatcagccctacagagtggtggtgctgtcctttgagctgctgcacgcaccagcaacagtgtgcggcccaaagaagtctaccaatctggtgaagaacaagtgcgtgaacttcaacttcaacggactgaccggcacaggcgtgctgaccgagagcaataagaagttcctgccttttcagcagttcggcagggacatcgcagataccacagacgccgtgcgcgaccctcagaccctggagatcctggacatcacaccatgcagcttcggcggcgtgtccgtgatcacaccaggcaccaatacatccaaccaggtggccgtgctgtatcaggacgtgaattgtaccgaggtgcccgtggcaatccacgcagatcagctgacccctacatggcgggtgtactctaccggcagcaacgtgttccagacaagagccggatgcctgatcggagcagagcacgtgaacaatagctatgagtgcgacatccctatcggcgccggcatctgtgccagctaccagacccagacaaactccccatctggagcaggctccgtggccagccagtccatcatcgcctataccatgagcctgggcgccgagaacagcgtggcctactccaacaattctatcgccatccctaccaacttcacaatcagcgtgaccacagagatcctgccagtgtctatgaccaagacaagcgtggactgcacaatgtatatctgtggcgatagcaccgagtgctccaacctgctgctgcagtacggctccttttgtacccagctgaatagagccctgacaggcatcgccgtggagcaggataagaacacacaggaggtgttcgcccaggtgaagcagatctacaagaccccacccatcaaggactttggcggcttcaacttcagccagatcctgcctgatccaagcaagccctccaagaggtcttttatcgaggacctgctgttcaacaaggtgaccctggccgatgccggcttcatcaagcagtatggagattgcctgggagacatcgcagcccgcgacctgatctgtgcccagaagtttaatggcctgaccgtgctgcctccactgctgacagatgagatgatcgcccagtacacatctgccctgctggccggcaccatcacaagcggatggaccttcggcgcaggagccgccctgcagatcccttttgccatgcagatggcctataggttcaacggcatcggcgtgacccagaatgtgctgtacgagaaccagaagctgatcgccaatcagtttaacagcgccatcggcaagatccaggactctctgtcctctacagccagcgccctgggcaagctgcaggatgtggtgaatcagaacgcccaggccctgaataccctggtgaagcagctgagctccaacttcggcgccatctctagcgtgctgaatgacatcctgagccggctggacccccctgaggcagaggtgcagatcgacaggctgatcacaggccgcctgcagagcctgcagacctacgtgacacagcagctgatcagggcagcagagatcagagcctccgccaatctggccgccaccaagatgagcgagtgcgtgctgggacagtccaagagggtggacttttgtggcaagggctatcacctgatgtctttcccacagagcgcccctcacggcgtggtgtttctgcacgtgacctacgtgccagcccaggagaagaacttcaccacagcaccagccatctgccacgatggaaaggcacactttcctagggagggcgtgttcgtgtctaacggcacccactggtttgtgacacagcgcaatttctacgagccacagatcatcaccacagacaatacattcgtgagcggcaactgtgatgtggtgatcggcatcgtgaacaataccgtgtatgatccactgcagcccgagctggactcctttaaggaggagctggataagtacttcaagaatcacacctctcccgacgtggatctgggcgacatctccggcatcaatgcctctgtggtgaacatccagaaggagatcgaccggctgaacgaggtggccaagaatctgaacgagagcctgatcgatctgcaggagctgggcaagtatgagcagtacatcaagggctctggcagagagaacctgtatttccagggaggaggaggcagcggatacatccctgaggcaccaagggacggacaggcctacgtgcgcaaggatggcgagtgggtgctgctgtccacctttctgggccatcatcaccaccaccaccaccactga

SEQ ID NO: 1455 - DNA, 3846 bp, Artificial Sequence
  Description of Artificial Sequence: Synthetic polynucleotide
atgggcatcctgccaagcccaggaatgcccgccctgctgtctctggtgagcctgctgtccgtgctgctgatgggatgcgtggcagagacaggcacacagtgcgtgaacctgaccacaaggacccagctgccccctgcctataccaattctttcacacggggcgtgtactatcccgacaaggtgtttagaagctccgtgctgcactccacacaggatctgtttctgcctttcttttctaacgtgacctggttccacgccatccacgtgtccggcaccaatggcacaaagcggttcgacaatcccgtgctgccttttaacgatggcgtgtacttcgccagcaccgagaagtccaacatcatcagaggctggatctttggcaccacactggactctaagacacagagcctgctgatcgtgaacaatgccaccaacgtggtgatcaaggtgtgcgagttccagttttgtaatgatccattcctgggcgtgtactatcacaagaacaataagtcctggatggagtctgagtttcgcgtgtattctagcgccaacaattgcacatttgagtacgtgagccagcccttcctgatggacctggagggcaagcagggcaatttcaagaacctgagggagttcgtgtttaagaatatcgatggctacttcaagatctacagcaagcacaccccaatcaacctggtgcgcgacctgccacagggattctccgccctggagccactggtggatctgcccatcggcatcaacatcacccggtttcagacactgctggccctgcacagatcctacctgacaccaggcgactcctctagcggatggaccgcaggagctgccgcctactatgtgggctatctgcagccccggaccttcctgctgaagtacaacgagaatggcaccatcacagacgcagtggattgcgccctggaccccctgtctgagacaaagtgtacactgaagagctttaccgtggagaagggcatctatcagacaagcaatttcagggtgcagcctaccgagtccatcgtgcgctttcccaatatcacaaacctgtgcccttttggcgaggtgttcaacgccaccagattcgccagcgtgtacgcctggaatcggaagagaatctccaactgcgtggccgactattctgtgctgtacaactccgcctctttcagcacctttaagtgctatggcgtgtctcccacaaagctgaatgatctgtgctttaccaacgtgtacgccgatagcttcgtgatcaggggagacgaagtgagacagatcgcaccaggacagacaggaaagatcgcagactacaattataagctgcctgacgatttcaccggctgcgtgatcgcctggaactccaacaatctggattctaaagtgggcggcaactacaattatctgtacaggctgtttcgcaagtccaatctgaagccattcgagcgggacatctccacagagatctaccaggccggctctaccccctgcaatggcgtggagggctttaactgttatttccctctgcagtcttacggcttccagccaacaaacggcgtgggctatcagccctacagagtggtggtgctgtcctttgagctgctgcacgcaccagcaacagtgtgcggcccaaagaagtctaccaatctggtgaagaacaagtgcgtgaacttcaacttcaacggactgaccggcacaggcgtgctgaccgagagcaataagaagttcctgccttttcagcagttcggcagggacatcgcagataccctcgacgccgtgcgcgaccctcagaccctggagatcctggacatcacaccatgcagcttcggcggcgtgtccgtgatcacaccaggcaccaatacatccaaccaggtggccgtgctgtatcaggacgtgaattgtaccgaggtgcccgtggcaatccacgcagatcagctgacccctacatggcgggtgtactctaccggcagcaacgtgttccagacaagagccggatgcctgatcggagcagagcacgtgaacaatagctatgagtgcgacatccctatcggcgccggcatctgtgccagctaccagacccagacaaactccccatctggagcaggctccgtggccagccagtccatcatcgcctataccatgagcctgggcgccgagaacagcgtggcctactccaacaattctatcgccatccctaccaacttcacaatcagcgtgaccacagagatcctgccagtgtctatgaccaagacaagcgtggactgcacaatgtatatctgtggcgatagcaccgagtgctccaacctgctgctgcagtacggctccttttgtacccagctgaatagagccctgacaggcatcgccgtggagcaggataagaacacacaggaggtgttcgcccaggtgaagcagatctacaagaccccacccatcaaggactttggcggcttcaacttcagccagatcctgcctgatccaagcaagccctccaagaggtcttttatcgaggacctgctgttcaacaaggtgaccctggccgatgccggcttcatcaagcagtatggagattgcctgggagacatcgcagcccgcgacctgatctgtgcccagaagtttaatggcctgaccgtgctgcctccactgctgacagatgagatgatcgcccagtacacatctgccctgctggccggcaccatcacaagcggatggaccttcggcgcaggagccgccctgcagatcccttttgccatgcagatggcctataggttcaacggcatcggcgtgacccagaatgtgctgtacgagaaccagaagctgatcgccaatcagtttaacagcgccatcggcaagatccaggactctctgtcctctacagccagcgccctgggcaagctgcaggatgtggtgaatcagaacgcccaggccctgaataccctggtgaagcagctgagctccaacttcggcgccatctctagcgtgctgaatgacatcctgagccggctggacccccctgaggcagaggtgcagatcgacaggctgatcacaggccgcctgcagagcctgcagacctacgtgacacagcagctgatcagggcagcagagatcagagcctccgccaatctggccgccaccaagatgagcgagtgcgtgctgggacagtccaagagggtggacttttgtggcaagggctatcacctgatgtctttcccacagagcgcccctcacggcgtggtgtttctgcacgtgacctacgtgccagcccaggagaagaacttcaccacagcaccagccatctgccacgatggaaaggcacactttcctagggagggcgtgttcgtgtctaacggcacccactggtttgtgacacagcgcaatttctacgagccacagatcatcaccacagacaatacattcgtgagcggcaactgtgatgtggtgatcggcatcgtgaacaataccgtgtatgatccactgcagcccgagctggactcctttaaggaggagctggataagtacttcaagaatcacacctctcccgacgtggatctgggcgacatctccggcatcaatgcctctgtggtgaacatccagaaggagatcgaccggctgaacgaggtggccaagaatctgaacgagagcctgatcgatctgcaggagctgggcaagtatgagcagtacatcaagggctctggcagagagaacctgtatttccagggaggaggaggcagcggatacatccctgaggcaccaagggacggacaggcctacgtgcgcaaggatggcgagtgggtgctgctgtccacctttctgggccatcatcaccaccaccaccaccactga

SEQ ID NO: 1456 - DNA, 3846 bp, Artificial Sequence
  Description of Artificial Sequence: Synthetic polynucleotide
atgggcatcctgccaagcccaggaatgcccgccctgctgtctctggtgagcctgctgtccgtgctgctgatgggatgcgtggcagagacaggcacacagtgcgtgaacctgaccacaaggacccagctgccccctgcctataccaattctttcacacggggcgtgtactatcccgacaaggtgtttagaagctccgtgctgcactccacacaggatctgtttctgcctttcttttctaacgtgacctggttccacgccatccacgtgtccggcaccaatggcacaaagcggttcgacaatcccgtgctgccttttaacgatggcgtgtacttcgccagcaccgagaagtccaacatcatcagaggctggatctttggcaccacactggactctaagacacagagcctgctgatcgtgaacaatgccaccaacgtggtgatcaaggtgtgcgagttccagttttgtaatgatccattcctgggcgtgtactatcacaagaacaataagtcctggatggagtctgagtttcgcgtgtattctagcgccaacaattgcacatttgagtacgtgagccagcccttcaatatggacctggagggcaagcagggcaatttcaagaacctgagggagttcgtgtttaagaatatcgatggctacttcaagatctacagcaagcacaccccaatcaacctggtgcgcgacctgccacagggattctccgccctggagccactggtggatctgcccatcggcatcaacatcacccggtttcagacactgctggccctgcacagatcctacctgacaccaggcgactcctctagcggatggaccgcaggagctgccgcctactatgtgggctatctgcagccccggaccttcctgctgaagtacaacgagaatggcaccatcacagacgcagtggattgcgccctggaccccctgtctgagacaaagtgtacactgaagagctttaccgtggagaagggcatctatcagacaagcaatttcagggtgcagcctaccgagtccatcgtgcgctttcccaatatcacaaacctgtgcccttttggcgaggtgttcaacgccaccagattcgccagcgtgtacgcctggaatcggaagagaatctccaactgcgtggccgactattctgtgctgtacaactccgcctctttcagcacctttaagtgctatggcgtgtctcccacaaagctgaatgatctgtgctttaccaacgtgtacgccgatagcttcgtgatcaggggagacgaagtgagacagatcgcaccaggacagacaggaaagatcgcagactacaattataagctgcctgacgatttcaccggctgcgtgatcgcctggaactccaacaatctggattctaaagtgggcggcaactacaattatctgtacaggctgtttcgcaagtccaatctgaagccattcgagcgggacatctccacagagatctaccaggccggctctaccccctgcaatggcgtggagggctttaactgttatttccctctgcagtcttacggcttccagccaacaaacggcgtgggctatcagccctacagagtggtggtgctgtcctttgagctgctgcacgcaccagcaacagtgtgcggcccaaagaagtctaccaatctggtgaagaacaagtgcgtgaacttcaacttcaacggactgaccggcacaggcgtgctgaccgagagcaataagaagttcctgccttttcagcagttcggcagggacatcgcagataccacagacgccgtgcgcgaccctcagaccctggagatcctggacatcacaccatgcagcttcggcggcgtgtccgtgatcacaccaggcaccaatacatccaaccaggtggccgtgctgtatcaggacgtgaattgtaccgaggtgcccgtggcaatccacgcagatcagctgacccctacatggcgggtgtactctaccggcagcaacgtgttccagacaagagccggatgcctgatcggagcagagcacgtgaacaatagctatgagtgcgacatccctatcggcgccggcatctgtgccagctaccagacccagacaaactccccatctggagcaggctccgtggccagccagtccatcatcgcctataccatgagcctgggcgccgagaacagcgtggcctactccaacaattctatcgccatccctaccaacttcacaatcagcgtgaccacagagatcctgccagtgtctatgaccaagacaagcgtggactgcacaatgtatatctgtggcgatagcaccgagtgctccaacctgctgctgcagtacggctccttttgtacccagctgaatagagccctgacaggcatcgccgtggagcaggataagaacacacaggaggtgttcgcccaggtgaagcagatctacaagaccccacccatcaaggactttggcggcttcaacttcagccagatcctgcctgatccaagcaagccctccaagaggtcttttatcgaggacctgctgttcaacaaggtgaccctggccgatgccggcttcatcaagcagtatggagattgcctgggagacatcgcagcccgcgacctgatctgtgcccagaagtttaatggcctgaccgtgctgcctccactgctgacagatgagatgatcgcccagtacacatctgccctgctggccggcaccatcacaagcggatggaccttcggcgcaggagccgccctgcagatcccttttgccatgcagatggcctataggttcaacggcatcggcgtgacccagaatgtgctgtacgagaaccagaagctgatcgccaatcagtttaacagcgccatcggcaagatccaggactctctgtcctctacagccagcgccctgggcaagctgcaggatgtggtgaatcagaacgcccaggccctgaataccctggtgaagcagctgagctccaacttcggcgccatctctagcgtgctgaatgacatcctgagccggctggacccccctgaggcagaggtgcagatcgacaggctgatcacaggccgcctgcagagcctgcagacctacgtgacacagcagctgatcagggcagcagagatcagagcctccgccaatctggccgccaccaagatgagcgagtgcgtgctgggacagtccaagagggtggacttttgtggcaagggctatcacctgatgtctttcccacagagcgcccctcacggcgtggtgtttctgcacgtgacctacgtgccagcccaggagaagaacttcaccacagcaccagccatctgccacgatggaaaggcacactttcctagggagggcgtgttcgtgtctaacggcacccactggtttgtgacacagcgcaatttctacgagccacagatcatcaccacagacaatacattcgtgagcggcaactgtgatgtggtgatcggcatcgtgaacaataccgtgtatgatccactgcagcccgagctggactcctttaaggaggagctggataagtacttcaagaatcacacctctcccgacgtggatctgggcgacatctccggcatcaatgcctctgtggtgaacatccagaaggagatcgaccggctgaacgaggtggccaagaatctgaacgagagcctgatcgatctgcaggagctgggcaagtatgagcagtacatcaagggctctggcagagagaacctgtatttccagggaggaggaggcagcggatacatccctgaggcaccaagggacggacaggcctacgtgcgcaaggatggcgagtgggtgctgctgtccacctttctgggccatcatcaccaccaccaccaccactga

SEQ ID NO: 1457 - DNA, 3846 bp, Artificial Sequence
  Description of Artificial Sequence: Synthetic polynucleotide
atgggcatcctgccaagcccaggaatgcccgccctgctgtctctggtgagcctgctgtccgtgctgctgatgggatgcgtggcagagacaggcacacagtgcgtgaacctgaccacaaggacccagctgccccctgcctataccaattctttcacacggggcgtgtactatcccgacaaggtgtttagaagctccgtgctgcactccacacaggatctgtttctgcctttcttttctaacgtgacctggttccacgccatccacgtgtccggcaccaatggcacaaagcggttcgacaatcccgtgctgccttttaacgatggcgtgtacttcgccagcaccgagaagtccaacatcatcagaggctggatctttggcaccacactggactctaagacacagagcctgctgatcgtgaacaatgccaccaacgtggtgatcaaggtgtgcgagttccagttttgtaatgatccattcctgggcgtgtactatcacaagaacaataagtcctggatggagtctgagtttcgcgtgtattctagcgccaacaattgcacatttgagtacgtgagccagcccttcctgatggacctggagggcaagcagggcaatttcaagaacctgagggagttcgtgtttaagaatatcgatggctacttcaagatctacagcaagcacaccccaatcaacctggtgcgcgacctgccacagggattctccgccctggagccactggtggatctgcccatcggcatcaacatcacccggtttcagacactgctggccctgcacagatcctacctgacaccaggcgactcctctagcggatggaccgcaggagctgccgcctactatgtgggctatctgcagccccggaccttcctgctgaagtacaacgagaatggcaccatcacagacgcagtggattgcgccctggaccccctgtctgagacaaagtgtacactgaagagctttaccgtggagaagggcatctatcagacaagcaatttcagggtgcagcctaccgagtccatcgtgcgctttcccaatatcacaaacctgtgcccttttggcgaggtgttcaacgccaccagattcgccagcgtgtacgcctggaatcggaagagaatctccaactgcgtggccgactattctgtgctgtacaactccgcctctttcagcacctttaagtgctatggcgtgtctcccacaaagctgaatgatctgtgctttaccaacgtgtacgccgatagcttcgtgatcaggggagacgaagtgagacagatcgcaccaggacagacaggaaagatcgcagactacaattataagctgcctgacgatttcaccggctgcgtgatcgcctggaactccaacaatctggattctaaagtgggcggcaactacaattatctgtacaggctgtttcgcaagtccaatctgaagccattcgagcgggacatctccacagagatctaccaggccggctctaccccctgcaatggcgtggagggctttaactgttatttccctctgcagtcttacggcttccagccaacaaacggcgtgggctatcagccctacagagtggtggtgctgtcctttgagctgctgcacgcaccagcaacagtgtgcggcccaaagaagtctaccaatctggtgaagaacaagtgcgtgaacttcaacttcaacggactgaccggcacaggcgtgctgaccgagagcaataagaagttcctgccttttcagcagttcggcagggacatcgcagataccacagacgccgtgcgcgaccctcagaccctggagatcctggacatcacaccatgcagcttcggcggcgtgtccgtgatcacaccaggcaccaatacatccaaccaggtggccgtgctgtatcaggacgtgaattgtaccgaggtgcccgtggcaatccacgcagatcagctgacccctacatggcgggtgtactctaccggcagcaacgtgttccagacaagagccggatgcctgatcggagcagagcacgtgaacaatagctatgagtgcgacatccctatcggcgccggcatctgtgccagctaccagacccagacaaactccccatctggagcaggctccgtggccagccagtccatcatcgcctataccatgagcctgggcgccgagaacagcgtggcctactccaacaattctatcgccatccctaccaacttcacaatcagcgtgaccacagagatcctgccagtgtctatgaccaagacaagcgtggactgcacaatgtatatctgtggcgatagcaccgagtgctccaacctgctgctgcagtacggctccttttgtacccagctgaatagagccctgacaggcatcgccgtggagcaggataagaacacacaggaggtgttcgcccaggtgaagcagatctacaagaccccacccatcaaggactttggcggcttcaacttcagccagatcctgcctgatccaagcaagccctccaagaggtcttttatcgaggacctgctgttcaacaaggtgaccctggccgatgccggcttcatcaagcagtatggagattgcctgggagacatcgcagcccgcgacctgatctgtgcccagaagtttaatggcctgaccgtgctgcctccactgctgacagatgagatgatcgcccagtacacatctgccctgctggccggcaccatcacaagcggatggaccttcggcgcaggagccgccctgcagatcccttttgccatgcagatggcctataggttcaacggcatcggcgtgacccagaatgtgctgtacgagaaccagaagctgatcgccaatcagtttaacagcgccatcggcaagatccaggactctctgtcctctacagccagcgccctgggcaagctgcaggatgtggtgaatcagaacgcccaggccctgaataccctggtgaagcagctgagctccaacttcggcgccatctctagcgtgctgaatgacatcctgagccggctggacccccctgaggcagaggtgcagatcgacaggctgatcacaggccgcctgcagagcctgcagacctacgtgacacagcagctgatcagggcagcagagatcagagcctccgccaatctggccgccaccaagatgagcgagtgcgtgctgggacagtccaagagggtggacttttgtggcaagggctatcacctgatgtctttcccacagagcgcccctcacggcgtggtgtttctgcacgtgacctacgtgccagcccaggagaagaacttcaccacagcaccagccatctgccacgatggaaaggcacactttcctagggagggcgtgttcgtgtctaacggcacccactggtttataacacagcgcaatttctacgagccacagatcatcaccacagacaatacattcgtgagcggcaactgtgatgtggtgatcggcatcgtgaacaataccgtgtatgatccactgcagcccgagctggactcctttaaggaggagctggataagtacttcaagaatcacacctctcccgacgtggatctgggcgacatctccggcatcaatgcctctgtggtgaacatccagaaggagatcgaccggctgaacgaggtggccaagaatctgaacgagagcctgatcgatctgcaggagctgggcaagtatgagcagtacatcaagggctctggcagagagaacctgtatttccagggaggaggaggcagcggatacatccctgaggcaccaagggacggacaggcctacgtgcgcaaggatggcgagtgggtgctgctgtccacctttctgggccatcatcaccaccaccaccaccactga

SEQ ID NO: 1458 - DNA, 3846 bp, Artificial Sequence
  Description of Artificial Sequence: Synthetic polynucleotide
atgggcatcctgccaagcccaggaatgcccgccctgctgtctctggtgagcctgctgtccgtgctgctgatgggatgcgtggcagagacaggcacacagtgcgtgaacctgaccacaaggacccagctgccccctgcctataccaattctgttacacggggcgtgtactatcccgacaaggtgtttagaagctccgtgctgcactccacacaggatctgtttctgcctttcttttctaacgtgacctggttccacgccatccacgtgtccggcaccaatggcacaaagcggttcgacaatcccgtgctgccttttaacgatggcgtgtacttcgccagcaccgagaagtccaacatcatcagaggctggatctttggcaccacactggactctaagacacagagcctgctgatcgtgaacaatgccaccaacgtggtgatcaaggtgtgcgagttccagttttgtaatgatccattcctgggcgtgtactatcacaagaacaataagtcctggatggagtctgagtttcgcgtgtattctagcgccaacaattgcacatttgagtacgtgagccagcccttcctgatggacctggagggcaagcagggcaatttcaagaacctgagggagttcgtgtttaagaatatcgatggctacttcaagatctacagcaagcacaccccaatcaacctggtgcgcgacctgccacagggattctccgccctggagccactggtggatctgcccatcggcatcaacatcacccggtttcagacactgctggccctgcacagatcctacctgacaccaggcgactcctctagcggatggaccgcaggagctgccgcctactatgtgggctatctgcagccccggaccttcctgctgaagtacaacgagaatggcaccatcacagacgcagtggattgcgccctggaccccctgtctgagacaaagtgtacactgaagagctttaccgtggagaagggcatctatcagacaagcaatttcagggtgcagcctaccgagtccatcgtgcgctttcccaatatcacaaacctgtgcccttttggcgaggtgttcaacgccaccagattcgccagcgtgtacgcctggaatcggaagagaatctccaactgcgtggccgactattctgtgctgtacaactccgcctctttcagcacctttaagtgctatggcgtgtctcccacaaagctgaatgatctgtgctttaccaacgtgtacgccgatagcttcgtgatcaggggagacgaagtgagacagatcgcaccaggacagacaggaaagatcgcagactacaattataagctgcctgacgatttcaccggctgcgtgatcgcctggaactccaacaatctggattctaaagtgggcggcaactacaattatctgtacaggctgtttcgcaagtccaatctgaagccattcgagcgggacatctccacagagatctaccaggccggctctaccccctgcaatggcgtggagggctttaactgttatttccctctgcagtcttacggcttccagccaacaaacggcgtgggctatcagccctacagagtggtggtgctgtcctttgagctgctgcacgcaccagcaacagtgtgcggcccaaagaagtctaccaatctggtgaagaacaagtgcgtgaacttcaacttcaacggactgaccggcacaggcgtgctgaccgagagcaataagaagttcctgccttttcagcagttcggcagggacatcgcagataccacagacgccgtgcgcgaccctcagaccctggagatcctggacatcacaccatgcagcttcggcggcgtgtccgtgatcacaccaggcaccaatacatccaaccaggtggccgtgctgtatcaggacgtgaattgtaccgaggtgcccgtggcaatccacgcagatcagctgacccctacatggcgggtgtactctaccggcagcaacgtgttccagacaagagccggatgcctgatcggagcagagcacgtgaacaatagctatgagtgcgacatccctatcggcgccggcatctgtgccagctaccagacccagacaaactccccatctggagcaggctccgtggccagccagtccatcatcgcctataccatgagcctgggcgccgagaacagcgtggcctactccaacaattctatcgccatccctaccaacttcacaatcagcgtgaccacagagatcctgccagtgtctatgaccaagacaagcgtggactgcacaatgtatatctgtggcgatagcaccgagtgctccaacctgctgctgcagtacggctccttttgtacccagctgaatagagccctgacaggcatcgccgtggagcaggataagaacacacaggaggtgttcgcccaggtgaagcagatctacaagaccccacccatcaaggactttggcggcttcaacttcagccagatcctgcctgatccaagcaagccctccaagaggtcttttatcgaggacctgctgttcaacaaggtgaccctggccgatgccggcttcatcaagcagtatggagattgcctgggagacatcgcagcccgcgacctgatctgtgcccagaagtttaatggcctgaccgtgctgcctccactgctgacagatgagatgatcgcccagtacacatctgccctgctggccggcaccatcacaagcggatggaccttcggcgcaggagccgccctgcagatcccttttgccatgcagatggcctataggttcaacggcatcggcgtgacccagaatgtgctgtacgagaaccagaagctgatcgccaatcagtttaacagcgccatcggcaagatccaggactctctgtcctctacagccagcgccctgggcaagctgcaggatgtggtgaatcagaacgcccaggccctgaataccctggtgaagcagctgagctccaacttcggcgccatctctagcgtgctgaatgacatcctgagccggctggacccccctgaggcagaggtgcagatcgacaggctgatcacaggccgcctgcagagcctgcagacctacgtgacacagcagctgatcagggcagcagagatcagagcctccgccaatctggccgccaccaagatgagcgagtgcgtgctgggacagtccaagagggtggacttttgtggcaagggctatcacctgatgtctttcccacagagcgcccctcacggcgtggtgtttctgcacgtgacctacgtgccagcccaggagaagaacttcaccacagcaccagccatctgccacgatggaaaggcacactttcctagggagggcgtgttcgtgtctaacggcacccactggtttgtgacacagcgcaatttctacgagccacagatcatcaccacagacaatacattcgtgagcggcaactgtgatgtggtgatcggcatcgtgaacaataccgtgtatgatccactgcagcccgagctggactcctttaaggaggagctggataagtacttcaagaatcacacctctcccgacgtggatctgggcgacatctccggcatcaatgcctctgtggtgaacatccagaaggagatcgaccggctgaacgaggtggccaagaatctgaacgagagcctgatcgatctgcaggagctgggcaagtatgagcagtacatcaagggctctggcagagagaacctgtatttccagggaggaggaggcagcggatacatccctgaggcaccaagggacggacaggcctacgtgcgcaaggatggcgagtgggtgctgctgtccacctttctgggccatcatcaccaccaccaccaccactga

SEQ ID NO: 1459 - DNA, 3846 bp, Artificial Sequence
  Description of Artificial Sequence: Synthetic polynucleotide
atgggcatcctgccaagcccaggaatgcccgccctgctgtctctggtgagcctgctgtccgtgctgctgatgggatgcgtggcagagacaggcacacagtgcgtgaacctgaccacaaggacccagctgccccctgcctataccaattctttcacacggggcgtgtactatcccgacaaggtgtttagaagctccgtgctgcactccacacaggatctgtttctgcctttcttttctaacgtgacctggttccacgcctggcacgtgtccggcaccaatggcacaaagcggttcgacaatcccgtgctgccttttaacgatggcgtgtacttcgccagcaccgagaagtccaacatcatcagaggctggatctttggcaccacactggactctaagacacagagcctgctgatcgtgaacaatgccaccaacgtggtgatcaaggtgtgcgagttccagttttgtaatgatccattcctgggcgtgtactatcacaagaacaataagtcctggatggagtctgagtttcgcgtgtattctagcgccaacaattgcacatttgagtacgtgagccagcccttcctgatggacctggagggcaagcagggcaatttcaagaacctgagggagttcgtgtttaagaatatcgatggctacttcaagatctacagcaagcacaccccaatcaacctggtgcgcgacctgccacagggattctccgccctggagccactggtggatctgcccatcggcatcaacatcacccggtttcagacactgctggccctgcacagatcctacctgacaccaggcgactcctctagcggatggaccgcaggagctgccgcctactatgtgggctatctgcagccccggaccttcctgctgaagtacaacgagaatggcaccatcacagacgcagtggattgcgccctggaccccctgtctgagacaaagtgtacactgaagagctttaccgtggagaagggcatctatcagacaagcaatttcagggtgcagcctaccgagtccatcgtgcgctttcccaatatcacaaacctgtgcccttttggcgaggtgttcaacgccaccagattcgccagcgtgtacgcctggaatcggaagagaatctccaactgcgtggccgactattctgtgctgtacaactccgcctctttcagcacctttaagtgctatggcgtgtctcccacaaagctgaatgatctgtgctttaccaacgtgtacgccgatagcttcgtgatcaggggagacgaagtgagacagatcgcaccaggacagacaggaaagatcgcagactacaattataagctgcctgacgatttcaccggctgcgtgatcgcctggaactccaacaatctggattctaaagtgggcggcaactacaattatctgtacaggctgtttcgcaagtccaatctgaagccattcgagcgggacatctccacagagatctaccaggccggctctaccccctgcaatggcgtggagggctttaactgttatttccctctgcagtcttacggcttccagccaacaaacggcgtgggctatcagccctacagagtggtggtgctgtcctttgagctgctgcacgcaccagcaacagtgtgcggcccaaagaagtctaccaatctggtgaagaacaagtgcgtgaacttcaacttcaacggactgaccggcacaggcgtgctgaccgagagcaataagaagttcctgccttttcagcagttcggcagggacatcgcagataccacagacgccgtgcgcgaccctcagaccctggagatcctggacatcacaccatgcagcttcggcggcgtgtccgtgatcacaccaggcaccaatacatccaaccaggtggccgtgctgtatcaggacgtgaattgtaccgaggtgcccgtggcaatccacgcagatcagctgacccctacatggcgggtgtactctaccggcagcaacgtgttccagacaagagccggatgcctgatcggagcagagcacgtgaacaatagctatgagtgcgacatccctatcggcgccggcatctgtgccagctaccagacccagacaaactccccatctggagcaggctccgtggccagccagtccatcatcgcctataccatgagcctgggcgccgagaacagcgtggcctactccaacaattctatcgccatccctaccaacttcacaatcagcgtgaccacagagatcctgccagtgtctatgaccaagacaagcgtggactgcacaatgtatatctgtggcgatagcaccgagtgctccaacctgctgctgcagtacggctccttttgtacccagctgaatagagccctgacaggcatcgccgtggagcaggataagaacacacaggaggtgttcgcccaggtgaagcagatctacaagaccccacccatcaaggactttggcggcttcaacttcagccagatcctgcctgatccaagcaagccctccaagaggtcttttatcgaggacctgctgttcaacaaggtgaccctggccgatgccggcttcatcaagcagtatggagattgcctgggagacatcgcagcccgcgacctgatctgtgcccagaagtttaatggcctgaccgtgctgcctccactgctgacagatgagatgatcgcccagtacacatctgccctgctggccggcaccatcacaagcggatggaccttcggcgcaggagccgccctgcagatcccttttgccatgcagatggcctataggttcaacggcatcggcgtgacccagaatgtgctgtacgagaaccagaagctgatcgccaatcagtttaacagcgccatcggcaagatccaggactctctgtcctctacagccagcgccctgggcaagctgcaggatgtggtgaatcagaacgcccaggccctgaataccctggtgaagcagctgagctccaacttcggcgccatctctagcgtgctgaatgacatcctgagccggctggacccccctgaggcagaggtgcagatcgacaggctgatcacaggccgcctgcagagcctgcagacctacgtgacacagcagctgatcagggcagcagagatcagagcctccgccaatctggccgccaccaagatgagcgagtgcgtgctgggacagtccaagagggtggacttttgtggcaagggctatcacctgatgtctttcccacagagcgcccctcacggcgtggtgtttctgcacgtgacctacgtgccagcccaggagaagaacttcaccacagcaccagccatctgccacgatggaaaggcacactttcctagggagggcgtgttcgtgtctaacggcacccactggtttgtgacacagcgcaatttctacgagccacagatcatcaccacagacaatacattcgtgagcggcaactgtgatgtggtgatcggcatcgtgaacaataccgtgtatgatccactgcagcccgagctggactcctttaaggaggagctggataagtacttcaagaatcacacctctcccgacgtggatctgggcgacatctccggcatcaatgcctctgtggtgaacatccagaaggagatcgaccggctgaacgaggtggccaagaatctgaacgagagcctgatcgatctgcaggagctgggcaagtatgagcagtacatcaagggctctggcagagagaacctgtatttccagggaggaggaggcagcggatacatccctgaggcaccaagggacggacaggcctacgtgcgcaaggatggcgagtgggtgctgctgtccacctttctgggccatcatcaccaccaccaccaccactga

SEQ ID NO: 1460 - DNA, 3846 bp, Artificial Sequence
  Description of Artificial Sequence: Synthetic polynucleotide
atgggcatcctgccaagcccaggaatgcccgccctgctgtctctggtgagcctgctgtccgtgctgctgatgggatgcgtggcagagacaggcacacagtgcgtgaacctgaccacaaggacccagctgccccctgcctataccaattctttcacacggggcgtgtactatcccgacaagatatttagaagcaacgtgctgcactccacacaggatctgtttctgcctttcttttctaacgtgacctggttccacgccttgcacgtgaaaggcaccaatggcacaaaggatttcgacaatcccgtgctgccttttaacgatggcgtgtacttcgccgcgattgagaagtccaacatcatcagaggctggatctttggcaccacactggactctaagacacagagcctgctgatcgtgaacaatgccaccaacgtggtgatccgagtgtgcgagttccagttttgtgaaaatccattcctgggcgtgtactatcacaagaacaataagtcctggcgcgaggaagagtggcgctggtattctagcgccaacaattgcacatttgagtacgtgagccagcccttcctgtatgacctgaatggcaagcagggcaatttccatcatctgagggagttcgtgtttaagaatatcgatggctacttcaagatctacagcaagtgggaaccaatcaacctggtgcgcgacctgccacagggattctccccgctggagccactgatggatctgcccatcggcatcaacatcacccattttcagacatttctgtcactgtcgagatcctaccggacaccaggcgactcctctagcggatggaccgcaggagctgccgcctactatgtgggctatctgcagccccggaccttcctgctgaagtacgatgagaatggctatatcacagacgcagtggattgcagtctggaccccctgtctgagacaaagtgtaaactgaagagctttaccgtggagaagggcatctatcagacaagcaatttcagggtgcagcctacctatgaaatcgtgcgctttcccaatatcacaaacgcttgcccttttgacgaggtgttcaacgccccaagattcgccagcgtgtacaattgggaacggtatagaatctccaactgcgtggccgactattctgtgctgtacaactccgcctctttcagcacctttcaatgctatggcgtgtctcccacaaagctgaatgatctgtgctttaccaacgtgtacgccgatgtattcgtgatcaggggaagtgaagtgagacagatcgcaccaggacagacaggacctatcgcagactacaattataagctgcctgacgatttcaccggctgcgtgatcgcctggaactccaacaatctggattctacggtgggcggcaactacaattatctgtacaggctgtttcgcaagtccaatatgaagccattcgagcgggacatctccacagaggcttaccaggccggctgtaccccctgcaatggcgtggagggctttaactgttatttccctctgcagtcttacggcttccagccaacaaacggcgtgggctatcagccctacagagtggtggtgctgaaatttgagctgctgcacgcaccagcaacagtgtgcggcccaaaggatccgaccaatctggtgaagaacaagtgcgtggactataacttcaacggacgtaccggcacaggcgtgctgaccgagagcaataagaagttcctgccttttcagcagttcggcagggacatcagtgataatttggacgccgtgcgcgaccctactaccggagagatcctgtgtatcacaccatgcagcttcggcggcgtgtccgtgatcacaccaggcaccaatacatccaaccaggtggccgtgctgtatcaggacgtgaattgtaccgaggtgcccgaagcaatccactcaaaccagctgcgacctacatggcgggtgtactctaccggcagcaacgtgttccagacaagagccggatgcctgatcggagcagagcacgtgaacaatagctatgagtgcgacatccctatcggcaacggcatctgtgccagctaccagacccagacaaactccccatctggatcaggctccgtgtcaagccagtccatcatcgcctataccatgagcctgggcgccgagaaccctgtgccttactccaacaataacatcgccatccctaccaacttcacaatcagcgtgcaaacagagatcctgccagtgtctatgccgaaggtaagcgtggactgcacaatgtatatctgtggcgatagcaccgagtgcctcaacctgctgagtcagtacggctccttttgttcgcagctggaaagagccctgaatggcatcgcccgcgagcaggataagaacctcctaaatgtgttcgcccaggtgaagcagatctacaagaccccacccatcaaggactttggcggcttcaacttcagccagatcctgcctgatccaagcaagccctccaagaggtcttttatcgaggacctgctgttcaacaaggtgaccctggccgatctcggcttcgttaagcagtataaagattgcctgggagatcaagcagcccgcgacctgatctgtgcccagaagtttaatggcataatggtgctgcctccactgctgacagatgagatgatcgcccagtacacagcgagtctgctggccggcaccatcacagctggatggaccttcggcgcaggagccgccctggtcatcccttttgccatgcagatggcctataggttcaacggcatcggcgtgcaacagaatgtgctgtacgagaaccagaagataatcgccaatcagtttaacaacgccatcggcaatatccaggacggtctgtccactacagccagcgccctgtctaagctgcaggatgtggtgaatcagcaagcccaggccctgaatgaactggtgaagcagctgagctccaacttcggcgccatctctagcgtgataaatgacatctacaatcggctggaccgtcctgaggcagaggctcagatcgacaggctgatcacaggccgcctgcagagcctgcagacctacgtgacacagcagctgatcagggcaacggagatcagagcctccgcccaactggccgccgaaaagatgagcgagtgcgtgaaaggacagtccaataggtacgggttttgtggcaatggctatcacctgatgtctttcccacagagcgcccctcacggcgtggtgtttctgcacgtgacctacgtgccaactcagtttaagaacttcaccacagcaccagggatctgccacgatggaaaggcatattttcctagggagggcgtgttcgtgtctaacggcacctcttggtacataacacagcgcaatttctacgagccacgacccatcaccacagacaatacattcgtgagcggcaactgtgatgtggtgatcggcatcgtgaacaataccgtgtatgatccactgcagcccgagctggactcctttaaggaggagctggataagtacttcaagaatcacacctctcccgacgtggatctgggcgacatctccggcatcaatgcctctgtggtgaacatccagaaggagatcgaccggctgaacgaggtggccaagaatctgaacgagagcctgatcgatctgcaggagctgggcaagtatgagcagtacatcaagggctctggcagagagaacctgtatttccagggaggaggaggcagcggatacatccctgaggcaccaagggacggacaggcctacgtgcgcaaggatggcgagtgggtgctgctgtccacctttctgggccatcatcaccaccaccaccaccactga

SEQ ID NO: 1461 - DNA, 3846 bp, Artificial Sequence
  Description of Artificial Sequence: Synthetic polynucleotide
atgggcatcctgccaagcccaggaatgcccgccctgctgtctctggtgagcctgctgtccgtgctgctgatgggatgcgtggcagagacaggcacacagtgcgtgaacctgaccacaaggacccagctgccccctgcctataccaattctttcacacggggcgtgtactatcccgacaaggtgtttagaagctccgtgctgcactccacacaggatctgtttctgcctttcttttctaacgtgacctggttccacgccatccacgtgtccggcaccaatggcacaaagcggttcgacaatcccgtgctgccttttaacgatggcgtgtacttcgccagcaccgagaagtccaacatcatcagaggctggatctttggcaccacactggactctaagacacagagcctgctgatcgtgaacaatgccaccaacgtggtgatcaaggtgtgcgagttccagttttgtaatgatccattcctgggcgtgtactatcacaagaacaataagtcctggatggagtctgagtttcgcgtgtattctagcgccaacaattgcacatttgagtacgtgagccagcccttcctgatggacctggagggcaagcagggcaatttcaagaacctgagggagttcgtgtttaagaatatcgatggctacttcaagatctacagcaagcacaccccaatcaacctggtgcgcgacctgccacagggattctccgccctggagccactggtggatctgcccatcggcatcaacatcacccggtttcagacactgctggccctgcacagatcctacctgacaccaggcgactcctctagcggatggaccgcaggagctgccgcctactatgtgggctatctgcagccccggaccttcctgctgaagtacaacgagaatggcaccatcacagacgcagtggattgcgccctggaccccctgtctgagacaaagtgtacactgaagagctttaccgtggagaagggcatctatcagacaagcaatttcagggtgcagcctaccgagtccatcgtgcgctttcccaatatcacaaacctgtgcccttttggcgaggtgttcaacgccaccagattcgccagcgtgtacgcctggaatcggaagagaatctccaactgcgtggccgactattctgtgctgtacaactccgcctctttcagcacctttaagtgctatggcgtgtctcccacaaagctgaatgatctgtgctttaccaacgtgtacgccgatagcttcgtgatcaggggagacgaagtgagacagatcgcaccaggacagacaggaaagatcgcagactacaattataagctgcctgacgatttcaccggctgcgtgatcgcctggaactccaacaatctggattctaaagtgggcggcaactacaattatctgtacaggctgtttcgcaagtccaatctgaagccattcgagcgggacatctccacagagatctaccaggccggctctaccccctgcaatggcgtggagggctttaactgttatttccctctgcagtcttacggcttccagccaacaaacggcgtgggctatcagccctacagagtggtggtgctgtcctttgagctgctgcacgcaccagcaacagtgtgcggcccaaagaagtctaccaatctggtgaagaacaagtgcgtgaacttcaacttcaacggactgaccggcacaggcgtgctgaccgagagcaataagaagttcctgccttttcagcagttcggcagggacatcgcagataccacagacgccgtgcgcgaccctcagaccctggagatcctggacatcacaccatgcagcttcggcggcgtgtccgtgatcacaccaggcaccaatacatccaaccaggtggccgtgctgtatcaggacgtgaattgtaccgaggtgcccgtggcaatccacgcagatcagctgacccctacatggcgggtgtactctaccggcagcaacgtgttccagacaagagccggatgcctgatcggagcagagcacgtgaacaatagctatgagtgcgacatccctatcggcgccggcatctgtgccagctaccagacccagacaaactccccatctggagcaggctccgtggccagccagtccatcatcgcctataccatgagcctgggcgccgagaacagcgtggcctactccaacaattctatcgccatccctaccaacttcacaatcagcgtgaccacagagatcctgccagtgtctatgaccaagacaagcgtggactgcacaatgtatatctgtggcgatagcaccgagtgctccaacctgctgctgcagtacggctccttttgtacccagctgaatagagccctgacaggcatcgccgtggagcaggataagaacacacaggaggtgttcgcccaggtgaagcagatctacaagaccccacccatcaaggactttggcggcttcaacttcagccagatcctgcctgatccaagcaagccctccaagaggtcttttatcgaggacctgctgttcaacaaggtgaccctggccgatgccggcttcatcaagcagtatggagattgcctgggagacatcgcagcccgcgacctgatctgtgcccagaagtttaatggcctgaccgtgctgcctccactgctgacagatgagatgatcgcccagtacacatctgccctgctggccggcaccatcacaagcggatggaccttcggcgcaggagccgccctgcagatcccttttgccatgcagatggcctataggttcaacggcatcggcgtgacccagaatgtgctgtacgagaaccagaagctgatcgccaatcagtttaacagcgccatcggcaagatccaggactctctgtcctctacagccagcgccctgggcaagctgcaggatgtggtgaatcagaacgcccaggccctgaataccctggtgaagcagctgagctccaacttcggcgccatctctagcgtgctgaatgacatcctgaatcggctggacccccctgaggcagaggtgcagatcgacaggctgatcacaggccgcctgcagagcctgcagacctacgtgacacagcagctgatcagggcagcagagatcagagcctccgccaatctggccgccaccaagatgagcgagtgcgtgctgggacagtccaagagggtggacttttgtggcaagggctatcacctgatgtctttcccacagagcgcccctcacggcgtggtgtttctgcacgtgacctacgtgccagcccaggagaagaacttcaccacagcaccagccatctgccacgatggaaaggcacactttcctagggagggcgtgttcgtgtctaacggcacccactggtttgtgacacagcgcaatttctacgagccacagatcatcaccacagacaatacattcgtgagcggcaactgtgatgtggtgatcggcatcgtgaacaataccgtgtatgatccactgcagcccgagctggactcctttaaggaggagctggataagtacttcaagaatcacacctctcccgacgtggatctgggcgacatctccggcatcaatgcctctgtggtgaacatccagaaggagatcgaccggctgaacgaggtggccaagaatctgaacgagagcctgatcgatctgcaggagctgggcaagtatgagcagtacatcaagggctctggcagagagaacctgtatttccagggaggaggaggcagcggatacatccctgaggcaccaagggacggacaggcctacgtgcgcaaggatggcgagtgggtgctgctgtccacctttctgggccatcatcaccaccaccaccaccactga

SEQ ID NO: 1462 - DNA, 3846 bp, Artificial Sequence
  Description of Artificial Sequence: Synthetic polynucleotide
atgggcatcctgccaagcccaggaatgcccgccctgctgtctctggtgagcctgctgtccgtgctgctgatgggatgcgtggcagagacaggcacacagtgcgtgaacctgaccacaaggacccagctgccccctgcctataccaattctttcacacggggcgtgtactatcccgacaaggtgtttagaagctccgtgctgcactccacacaggatctgtttctgcctttcttttctaacgtgacctggttccacgccatccacgtgtccggcaccaatggcacaaagcggttcgacaatcccgtgctgccttttaacgatggcgtgtacttcgccagcaccgagaagtccaacatcatcagaggctggatctttggcaccacactggactctaagacacagagcctgctgatcgtgaacaatgccaccaacgtggtgatcaaggtgtgcgagttccagttttgtaatgatccattcctgggcgtgtactatcacaagaacaataagtcctggatggagtctgagtttcgcgtgtattctagcgccaacaattgcacatttgagtacgtgagccagcccttcctgatggacctggagggcaagcagggcaatttcaagaacctgagggagttcgtgtttaagaatatcgatggctacttcaagatctacagcaagcacaccccaatcaacctggtgcgcgacctgccacagggattctccgccctggagccactggtggatctgcccatcggcatcaacatcacccggtttcagacactgctggccctgcacagatcctacctgacaccaggcgactcctctagcggatggaccgcaggagctgccgcctactatgtgggctatctgcagccccggaccttcctgctgaagtacaacgagaatggcaccatcacagacgcagtggattgcgccctggaccccctgtctgagacaaagtgtacactgaagagctttaccgtggagaagggcatctatcagacaagcaatttcagggtgcagcctaccgagtccatcgtgcgctttcccaatatcacaaacctgtgcccttttggcgaggtgttcaacgccaccagattcgccagcgtgtacgcctggaatcggaagagaatctccaactgcgtggccgactattctgtgctgtacaactccgcctctttcagcacctttaagtgctatggcgtgtctcccacaaagctgaatgatctgtgctttaccaacgtgtacgccgatagcttcgtgatcaggggagacgaagtgagacagatcgcaccaggacagacaggaaagatcgcagactacaattataagctgcctgacgatttcaccggctgcgtgatcgcctggaactccaacaatctggattctaaagtgggcggcaactacaattatctgtacaggctgtttcgcaagtccaatctgaagccattcgagcgggacatctccacagagatctaccaggccggctctaccccctgcaatggcgtggagggctttaactgttatttccctctgcagtcttacggcttccagccaacaaacggcgtgggctatcagccctacagagtggtggtgctgtcctttgagctgctgcacgcaccagcaacagtgtgcggcccaaagaagtctaccaatctggtgaagaacaagtgcgtgaacttcaacttcaacggactgaccggcacaggcgtgctgaccgagagcaataagaagttcctgccttttcagcagttcggcagggacatcgcagataccacagacgccgtgcgcgaccctcagaccctggagatcctggacatcacaccatgcagcttcggcggcgtgtccgtgatcacaccaggcaccaatacatccaaccaggtggccgtgctgtatcaggacgtgaattgtaccgaggtgcccgtggcaatccacgcaaaccagctgacccctacatggcgggtgtactctaccggcagcaacgtgttccagacaagagccggatgcctgatcggagcagagcacgtgaacaatagctatgagtgcgacatccctatcggcgccggcatctgtgccagctaccagacccagacaaactccccatctggagcaggctccgtggccagccagtccatcatcgcctataccatgagcctgggcgccgagaacagcgtggcctactccaacaattctatcgccatccctaccaacttcacaatcagcgtgaccacagagatcctgccagtgtctatgaccaagacaagcgtggactgcacaatgtatatctgtggcgatagcaccgagtgctccaacctgctgctgcagtacggctccttttgtacccagctgaatagagccctgacaggcatcgccgtggagcaggataagaacacacaggaggtgttcgcccaggtgaagcagatctacaagaccccacccatcaaggactttggcggcttcaacttcagccagatcctgcctgatccaagcaagccctccaagaggtcttttatcgaggacctgctgttcaacaaggtgaccctggccgatgccggcttcatcaagcagtatggagattgcctgggagacatcgcagcccgcgacctgatctgtgcccagaagtttaatggcctgaccgtgctgcctccactgctgacagatgagatgatcgcccagtacacatctgccctgctggccggcaccatcacaagcggatggaccttcggcgcaggagccgccctgcagatcccttttgccatgcagatggcctataggttcaacggcatcggcgtgacccagaatgtgctgtacgagaaccagaagctgatcgccaatcagtttaacagcgccatcggcaagatccaggactctctgtcctctacagccagcgccctgggcaagctgcaggatgtggtgaatcagaacgcccaggccctgaataccctggtgaagcagctgagctccaacttcggcgccatctctagcgtgctgaatgacatcctgagccggctggacccccctgaggcagaggtgcagatcgacaggctgatcacaggccgcctgcagagcctgcagacctacgtgacacagcagctgatcagggcagcagagatcagagcctccgccaatctggccgccaccaagatgagcgagtgcgtgctgggacagtccaagagggtggacttttgtggcaagggctatcacctgatgtctttcccacagagcgcccctcacggcgtggtgtttctgcacgtgacctacgtgccagcccaggagaagaacttcaccacagcaccagccatctgccacgatggaaaggcacactttcctagggagggcgtgttcgtgtctaacggcacccactggtttgtgacacagcgcaatttctacgagccacagatcatcaccacagacaatacattcgtgagcggcaactgtgatgtggtgatcggcatcgtgaacaataccgtgtatgatccactgcagcccgagctggactcctttaaggaggagctggataagtacttcaagaatcacacctctcccgacgtggatctgggcgacatctccggcatcaatgcctctgtggtgaacatccagaaggagatcgaccggctgaacgaggtggccaagaatctgaacgagagcctgatcgatctgcaggagctgggcaagtatgagcagtacatcaagggctctggcagagagaacctgtatttccagggaggaggaggcagcggatacatccctgaggcaccaagggacggacaggcctacgtgcgcaaggatggcgagtgggtgctgctgtccacctttctgggccatcatcaccaccaccaccaccactga

SEQ ID NO: 1463 - DNA, 3846 bp, Artificial Sequence
  Description of Artificial Sequence: Synthetic polynucleotide
atgggcatcctgccaagcccaggaatgcccgccctgctgtctctggtgagcctgctgtccgtgctgctgatgggatgcgtggcagagacaggcacacagtgcgtgaacctgaccacaaggacccagctgccccctgcctataccaattctttcacacggggcgtgtactatcccgacaaggtgtttagaagctccgtgctgcactccacacaggatctgtttctgcctttcttttctaacgtgacctggttccacgccatccacgtgtccggcaccaatggcacaaagcggttcgacaatcccgtgctgccttttaacgatggcgtgtacttcgccagcaccgagaagtccaacatcatcagaggctggatctttggcaccacactggactctaagacacagagcctgctgatcgtgaacaatgccaccaacgtggtgatcaaggtgtgcgagttccagttttgtaatgatccattcctgggcgtgtactatcacaagaacaataagtcctggatggagtctgagtttcgcgtgtattctagcgccaacaattgcacatttgagtacgtgagccagcccttcctgatggacctggagggcaagcagggcaatttcaagaacctgagggagttcgtgtttaagaatatcgatggctacttcaagatctacagcaagcacaccccaatcaacctggtgcgcgacctgccacagggattctccgccctggagccactggtggatctgcccatcggcatcaacatcacccggtttcagacactgctggccctgcacagatcctacctgacaccaggcgactcctctagcggatggaccgcaggagctgccgcctactatgtgggctatctgcagccccggaccttcctgctgaagtacaacgagaatggcaccatcacagacgcagtggattgcgccctggaccccctgtctgagacaaagtgtacactgaagagctttaccgtggagaagggcatctatcagacaagcaatttcagggtgcagcctaccgagtccatcgtgcgctttcccaatatcacaaacctgtgcccttttggcgaggtgttcaacgccaccagattcgccagcgtgtacgcctggaatcggaagagaatctccaactgcgtggccgactattctgtgctgtacaactccgcctctttcagcacctttaagtgctatggcgtgtctcccacaaagctgaatgatctgtgctttaccaacgtgtacgccgatagcttcgtgatcaggggagacgaagtgagacagatcgcaccaggacagacaggaaagatcgcagactacaattataagctgcctgacgatttcaccggctgcgtgatcgcctggaactccaacaatctggattctaaagtgggcggcaactacaattatctgtacaggctgtttcgcaagtccaatctgaagccattcgagcgggacatctccacagagatctaccaggccggctctaccccctgcaatggcgtggagggctttaactgttatttccctctgcagtcttacggcttccagccaacaaacggcgtgggctatcagccctacagagtggtggtgctgtcctttgagctgctgcacgcaccagcaacagtgtgcggcccaaagaagtctaccaatctggtgaagaacaagtgcgtgaacttcaacttcaacggactgaccggcacaggcgtgctgaccgagagcaataagaagttcctgccttttcagcagttcggcagggacatcgcagataccacagacgccgtgcgcgaccctcagaccctggagatcctggacatcacaccatgcagcttcggcggcgtgtccgtgatcacaccaggcaccaatacatccaaccaggtggccgtgctgtatcaggacgtgaattgtaccgaggtgcccgtggcaatccacgcagatcagctgacccctacatggcgggtgtactctaccggcagcaacgtgttccagacaagagccggatgcctgatcggagcagagcacgtgaacaatagctatgagtgcgacatccctatcggcgccggcatctgtgccagctaccagacccagacaaactccccatctggagcaggctccgtggccagccagtccatcatcgcctataccatgagcctgggcgccgagaacagcgtggcctactccaacaattctatcgccatccctaccaacttcacaatcagcgtgaccacagagatcctgccagtgtctatgaccaagacaagcgtggactgcacaatgtatatctgtggcgatagcaccgagtgctccaacctgctgctgcagtacggctccttttgtacccagctgaatagagccctgacaggcatcgccgtggagcaggataagaacacacaggaggtgttcgcccaggtgaagcagatctacaagaccccacccatcaaggactttggcggcttcaacttcagccagatcctgcctgatccaagcaagccctccaagaggtcttttatcgaggacctgctgttcaacaaggtgaccctggccgatgccggcttcatcaagcagtatggagattgcctgggagacatcgcagcccgcgacctgatctgtgcccagaagtttaatggcctgaccgtgctgcctccactgctgacagatgagatgatcgcccagtacacatctgccctgctggccggcaccatcacaagcggatggaccttcggcgcaggagccgccctgcagatcccttttgccatgcagatggcctataggttcaacggcatcggcgtgacccagaatgtgctgtacgagaaccagaagctgatcgccaatcagtttaacagcgccatcggcaagatccaggactctctgtcctctacagccagcgccctgggcaagctgcaggatgtggtgaatcagaacgcccaggccctgaataccctggtgaagcagctgagctccaacttcggcgccatctctagcgtgctgaatgacatcctgagccggctggacccccctgaggcagaggtgcagatcgacaggctgatcacaggccgcctgcagagcctgcagacctacgtgacacagcagctgatcagggcagcagagatcagagcctccgccaatctggccgccaccaagatgagcgagtgcgtgctgggacagtccaagagggtggacttttgtggcaagggctatcacctgatgtctttcccacaggctgcccctcacggcgtggtgtttctgcacgtgacctacgtgccagcccaggagaagaacttcaccacagcaccagccatctgccacgatggaaaggcacactttcctagggagggcgtgttcgtgtctaacggcacccactggtttgtgacacagcgcaatttctacgagccacagatcatcaccacagacaatacattcgtgagcggcaactgtgatgtggtgatcggcatcgtgaacaataccgtgtatgatccactgcagcccgagctggactcctttaaggaggagctggataagtacttcaagaatcacacctctcccgacgtggatctgggcgacatctccggcatcaatgcctctgtggtgaacatccagaaggagatcgaccggctgaacgaggtggccaagaatctgaacgagagcctgatcgatctgcaggagctgggcaagtatgagcagtacatcaagggctctggcagagagaacctgtatttccagggaggaggaggcagcggatacatccctgaggcaccaagggacggacaggcctacgtgcgcaaggatggcgagtgggtgctgctgtccacctttctgggccatcatcaccaccaccaccaccactga

SEQ ID NO: 1464 - DNA, 3846 bp, Artificial Sequence
  Description of Artificial Sequence: Synthetic polynucleotide
atgggcatcctgccaagcccaggaatgcccgccctgctgtctctggtgagcctgctgtccgtgctgctgatgggatgcgtggcagagacaggcacacagtgcgtgaacctgaccacaaggacccagctgccccctgcctataccaattctttcacacggggcgtgtactatcccgacaaggtgtttagaagctccgtgctgcactccacacaggatctgtttctgcctttcttttctaacgtgacctggttccacgccatccacgtgtccggcaccaatggcacaaagcggttcgacaatcccgtgctgccttttaacgatggcgtgtacttcgccagcaccgagaagtccaacatcatcagaggctggatctttggcaccacactggactctaagacacagagcctgctgatcgtgaacaatgccaccaacgtggtgatcaaggtgtgcgagttccagttttgtaatgatccattcctgggcgtgtactatcacaagaacaataagtcctggatggagtctgagtttcgcgtgtattctagcgccaacaattgcacatttgagtacgtgagccagcccttcctgatggacctggagggcaagcagggcaatttcaagaacctgagggagttcgtgtttaagaatatcgatggctacttcaagatctacagcaagcacaccccaatcaacctggtgcgcgacctgccacagggattctccgccctggagccactggtggatctgcccatcggcatcaacatcacccggtttcagacactgctggccctgcacagatcctacctgacaccaggcgactcctctagcggatggaccgcaggagctgccgcctactatgtgggctatctgcagccccggaccttcctgctgaagtacaacgagaatggcaccatcacagacgcagtggattgcgccctggaccccctgtctgagacaaagtgtacactgaagagctttaccgtggagaagggcatctatcagacaagcaatttcagggtgcagcctaccgagtccatcgtgcgctttcccaatatcacaaacctgtgcccttttggcgaggtgttcaacgccaccagattcgccagcgtgtacgcctggaatcggaagagaatctccaactgcgtggccgactattctgtgctgtacaactccgcctctttcagcacctttaagtgctatggcgtgtctcccacaaagctgaatgatctgtgctttaccaacgtgtacgccgatagcttcgtgatcaggggagacgaagtgagacagatcgcaccaggacagacaggaaagatcgcagactacaattataagctgcctgacgatttcaccggctgcgtgatcgcctggaactccaacaatctggattctaaagtgggcggcaactacaattatctgtacaggctgtttcgcaagtccaatctgaagccattcgagcgggacatctccacagagatctaccaggccggctctaccccctgcaatggcgtggagggctttaactgttatttccctctgcagtcttacggcttccagccaacaaacggcgtgggctatcagccctacagagtggtggtgctgtcctttgagctgctgcacgcaccagcaacagtgtgcggcccaaagaagtctaccaatctggtgaagaacaagtgcgtgaacttcaacttcaacggactgaccggcacaggcgtgctgaccgagagcaataagaagttcctgccttttcagcagttcggcagggacatcgcagataccacagacgccgtgcgcgaccctcagaccctggagatcctggacatcacaccatgcagcttcggcggcgtgtccgtgatcacaccaggcaccaatacatccaaccaggtggccgtgctgtatcaggacgtgaattgtaccgaggtgcccgtggcaatccacgcagatcagctgacccctacatggcgggtgtactctaccggcagcaacgtgttccagacaagagccggatgcctgatcggagcagagcacgtgaacaatagctatgagtgcgacatccctatcggcgccggcatctgtgccagctaccagacccagacaaactccccatctggagcaggctccgtggccagccagtccatcatcgcctataccatgagcctgggcgccgagaacagcgtggcctactccaacaattctatcgccatccctaccaacttcacaatcagcgtgaccacagagatcctgccagtgtctatgaccaagacaagcgtggactgcacaatgtatatctgtggcgatagcaccgagtgctccaacctgctgctgcagtacggctccttttgtacccagctgaatagagccctgacaggcatcgccgtggagcaggataagaacacacaggaggtgttcgcccaggtgaagcagatctacaagaccccacccatcaaggactttggcggcttcaacttcagccagatcctgcctgatccaagcaagccctccaagaggtcttttatcgaggacctgctgttcaacaaggtgaccctggccgatgccggcttcatcaagcagtatggagattgcctgggagacatcgcagcccgcgacctgatctgtgcccagaagtttaatggcctgaccgtgctgcctccactgctgacagatgagatgatcgcccagtacacatctgccctgctggccggcaccatcacaagcggatggaccttcggcgcaggagccgccctgcagatcccttttgccatgcagatggcctataggttcaacggcatcggcgtgacccagaatgtgctgtacgagaaccagaagctgatcgccaatcagtttaacgatgccatcggcaagatccaggactctctgtcctctacagccagcgccctgggcaagctgcaggatgtggtgaatcagaacgcccaggccctgaataccctggtgaagcagctgagctccaacttcggcgccatctctagcgtgctgaatgacatcctgagccggctggacccccctgaggcagaggtgcagatcgacaggctgatcacaggccgcctgcagagcctgcagacctacgtgacacagcagctgatcagggcagcagagatcagagcctccgccaatctggccgccaccaagatgagcgagtgcgtgctgggacagtccaagagggtggacttttgtggcaagggctatcacctgatgtctttcccacagagcgcccctcacggcgtggtgtttctgcacgtgacctacgtgccagcccaggagaagaacttcaccacagcaccagccatctgccacgatggaaaggcacactttcctagggagggcgtgttcgtgtctaacggcacccactggtttgtgacacagcgcaatttctacgagccacagatcatcaccacagacaatacattcgtgagcggcaactgtgatgtggtgatcggcatcgtgaacaataccgtgtatgatccactgcagcccgagctggactcctttaaggaggagctggataagtacttcaagaatcacacctctcccgacgtggatctgggcgacatctccggcatcaatgcctctgtggtgaacatccagaaggagatcgaccggctgaacgaggtggccaagaatctgaacgagagcctgatcgatctgcaggagctgggcaagtatgagcagtacatcaagggctctggcagagagaacctgtatttccagggaggaggaggcagcggatacatccctgaggcaccaagggacggacaggcctacgtgcgcaaggatggcgagtgggtgctgctgtccacctttctgggccatcatcaccaccaccaccaccactga

SEQ ID NO: 1465 - DNA, 3846 bp, Artificial Sequence
  Description of Artificial Sequence: Synthetic polynucleotide
atgggcatcctgccaagcccaggaatgcccgccctgctgtctctggtgagcctgctgtccgtgctgctgatgggatgcgtggcagagacaggcacacagtgcgtgaacctgaccacaaggacccagctgccccctgcctataccaattctttcacacggggcgtgtactatcccgacaaggtgtttagaagctccgtgctgcactccacacaggatctgtttctgcctttcttttctaacgtgacctggttccacgccatccacgtgtccggcaccaatggcacaaagcggttcgacaatcccgtgctgccttttaacgatggcgtgtacttcgccagcaccgagaagtccaacatcatcagaggctggatctttggcaccacactggactctaagacacagagcctgctgatcgtgaacaatgccaccaacgtggtgatcaaggtgtgcgagttccagttttgtaatgatccattcctgggcgtgtactatcacaagaacaataagtcctggatggagtctgagtttcgcgtgtattctagcgccaacaattgcacatttgagtacgtgagccagcccttcgacatggacctggagggcaagcagggcaatttcaagaacctgagggagttcgtgtttaagaatatcgatggctacttcaagatctacagcaagcacaccccaatcaacctggtgcgcgacctgccacagggattctccgccctggagccactggtggatctgcccatcggcatcaacatcacccggtttcagacactgctggccctgcacagatcctacctgacaccaggcgactcctctagcggatggaccgcaggagctgccgcctactatgtgggctatctgcagccccggaccttcctgctgaagtacaacgagaatggcaccatcacagacgcagtggattgcgccctggaccccctgtctgagacaaagtgtacactgaagagctttaccgtggagaagggcatctatcagacaagcaatttcagggtgcagcctaccgagtccatcgtgcgctttcccaatatcacaaacctgtgcccttttggcgaggtgttcaacgccaccagattcgccagcgtgtacgcctggaatcggaagagaatctccaactgcgtggccgactattctgtgctgtacaactccgcctctttcagcacctttaagtgctatggcgtgtctcccacaaagctgaatgatctgtgctttaccaacgtgtacgccgatagcttcgtgatcaggggagacgaagtgagacagatcgcaccaggacagacaggaaagatcgcagactacaattataagctgcctgacgatttcaccggctgcgtgatcgcctggaactccaacaatctggattctaaagtgggcggcaactacaattatctgtacaggctgtttcgcaagtccaatctgaagccattcgagcgggacatctccacagagatctaccaggccggctctaccccctgcaatggcgtggagggctttaactgttatttccctctgcagtcttacggcttccagccaacaaacggcgtgggctatcagccctacagagtggtggtgctgtcctttgagctgctgcacgcaccagcaacagtgtgcggcccaaagaagtctaccaatctggtgaagaacaagtgcgtgaacttcaacttcaacggactgaccggcacaggcgtgctgaccgagagcaataagaagttcctgccttttcagcagttcggcagggacatcgcagataccacagacgccgtgcgcgaccctcagaccctggagatcctggacatcacaccatgcagcttcggcggcgtgtccgtgatcacaccaggcaccaatacatccaaccaggtggccgtgctgtatcaggacgtgaattgtaccgaggtgcccgtggcaatccacgcagatcagctgacccctacatggcgggtgtactctaccggcagcaacgtgttccagacaagagccggatgcctgatcggagcagagcacgtgaacaatagctatgagtgcgacatccctatcggcgccggcatctgtgccagctaccagacccagacaaactccccatctggagcaggctccgtggccagccagtccatcatcgcctataccatgagcctgggcgccgagaacagcgtggcctactccaacaattctatcgccatccctaccaacttcacaatcagcgtgaccacagagatcctgccagtgtctatgaccaagacaagcgtggactgcacaatgtatatctgtggcgatagcaccgagtgctccaacctgctgctgcagtacggctccttttgtacccagctgaatagagccctgacaggcatcgccgtggagcaggataagaacacacaggaggtgttcgcccaggtgaagcagatctacaagaccccacccatcaaggactttggcggcttcaacttcagccagatcctgcctgatccaagcaagccctccaagaggtcttttatcgaggacctgctgttcaacaaggtgaccctggccgatgccggcttcatcaagcagtatggagattgcctgggagacatcgcagcccgcgacctgatctgtgcccagaagtttaatggcctgaccgtgctgcctccactgctgacagatgagatgatcgcccagtacacatctgccctgctggccggcaccatcacaagcggatggaccttcggcgcaggagccgccctgcagatcccttttgccatgcagatggcctataggttcaacggcatcggcgtgacccagaatgtgctgtacgagaaccagaagctgatcgccaatcagtttaacagcgccatcggcaagatccaggactctctgtcctctacagccagcgccctgggcaagctgcaggatgtggtgaatcagaacgcccaggccctgaataccctggtgaagcagctgagctccaacttcggcgccatctctagcgtgctgaatgacatcctgagccggctggacccccctgaggcagaggtgcagatcgacaggctgatcacaggccgcctgcagagcctgcagacctacgtgacacagcagctgatcagggcagcagagatcagagcctccgccaatctggccgccaccaagatgagcgagtgcgtgctgggacagtccaagagggtggacttttgtggcaagggctatcacctgatgtctttcccacagagcgcccctcacggcgtggtgtttctgcacgtgacctacgtgccagcccaggagaagaacttcaccacagcaccagccatctgccacgatggaaaggcacactttcctagggagggcgtgttcgtgtctaacggcacccactggtttgtgacacagcgcaatttctacgagccacagatcatcaccacagacaatacattcgtgagcggcaactgtgatgtggtgatcggcatcgtgaacaataccgtgtatgatccactgcagcccgagctggactcctttaaggaggagctggataagtacttcaagaatcacacctctcccgacgtggatctgggcgacatctccggcatcaatgcctctgtggtgaacatccagaaggagatcgaccggctgaacgaggtggccaagaatctgaacgagagcctgatcgatctgcaggagctgggcaagtatgagcagtacatcaagggctctggcagagagaacctgtatttccagggaggaggaggcagcggatacatccctgaggcaccaagggacggacaggcctacgtgcgcaaggatggcgagtgggtgctgctgtccacctttctgggccatcatcaccaccaccaccaccactga

SEQ ID NO: 1466 - DNA, 3846 bp, Artificial Sequence
  Description of Artificial Sequence: Synthetic polynucleotide
atgggcatcctgccaagcccaggaatgcccgccctgctgtctctggtgagcctgctgtccgtgctgctgatgggatgcgtggcagagacaggcacacagtgcgtgaacctgaccacaaggacccagctgccccctgcctataccaattctttcacacggggcgtgtactatcccgacaaggtgtttagaagctccgtgctgcactccacacaggatctgtttctgcctttcttttctaacgtgacctggttccacgccatccacgtgtccggcaccaatggcacaaagcggttcgacaatcccgtgctgccttttaacgatggcgtgtacttcgccagcaccgagaagtccaacatcatcagaggctggatctttggcaccacactggactctaagacacagagcctgctgatcgtgaacaatgccaccaacgtggtgatcaaggtgtgcgagttccagttttgtaatgatccattcctgggcgtgtactatcacaagaacaataagtcctggatggagtctgagtttcgcgtgtattctagcgccaacaattgcacatttgagtacgtgagccagcccttcctgatggacctggagggcaagcagggcaatttcaagaacctgagggagttcgtgtttaagaatatcgatggctacttcaagatctacagcaagcacaccccaatcaacctggtgcgcgacctgccacagggattctccgccctggagccactggtggaactgcccatcggcatcaacatcacccggtttcagacactgctggccctgcacagatcctacctgacaccaggcgactcctctagcggatggaccgcaggagctgccgcctactatgtgggctatctgcagccccggaccttcctgctgaagtacaacgagaatggcaccatcacagacgcagtggattgcgccctggaccccctgtctgagacaaagtgtacactgaagagctttaccgtggagaagggcatctatcagacaagcaatttcagggtgcagcctaccgagtccatcgtgcgctttcccaatatcacaaacctgtgcccttttggcgaggtgttcaacgccaccagattcgccagcgtgtacgcctggaatcggaagagaatctccaactgcgtggccgactattctgtgctgtacaactccgcctctttcagcacctttaagtgctatggcgtgtctcccacaaagctgaatgatctgtgctttaccaacgtgtacgccgatagcttcgtgatcaggggagacgaagtgagacagatcgcaccaggacagacaggaaagatcgcagactacaattataagctgcctgacgatttcaccggctgcgtgatcgcctggaactccaacaatctggattctaaagtgggcggcaactacaattatctgtacaggctgtttcgcaagtccaatctgaagccattcgagcgggacatctccacagagatctaccaggccggctctaccccctgcaatggcgtggagggctttaactgttatttccctctgcagtcttacggcttccagccaacaaacggcgtgggctatcagccctacagagtggtggtgctgtcctttgagctgctgcacgcaccagcaacagtgtgcggcccaaagaagtctaccaatctggtgaagaacaagtgcgtgaacttcaacttcaacggactgaccggcacaggcgtgctgaccgagagcaataagaagttcctgccttttcagcagttcggcagggacatcgcagataccacagacgccgtgcgcgaccctcagaccctggagatcctggacatcacaccatgcagcttcggcggcgtgtccgtgatcacaccaggcaccaatacatccaaccaggtggccgtgctgtatcaggacgtgaattgtaccgaggtgcccgtggcaatccacgcagatcagctgacccctacatggcgggtgtactctaccggcagcaacgtgttccagacaagagccggatgcctgatcggagcagagcacgtgaacaatagctatgagtgcgacatccctatcggcgccggcatctgtgccagctaccagacccagacaaactccccatctggagcaggctccgtggccagccagtccatcatcgcctataccatgagcctgggcgccgagaacagcgtggcctactccaacaattctatcgccatccctaccaacttcacaatcagcgtgaccacagagatcctgccagtgtctatgaccaagacaagcgtggactgcacaatgtatatctgtggcgatagcaccgagtgctccaacctgctgctgcagtacggctccttttgtacccagctgaatagagccctgacaggcatcgccgtggagcaggataagaacacacaggaggtgttcgcccaggtgaagcagatctacaagaccccacccatcaaggactttggcggcttcaacttcagccagatcctgcctgatccaagcaagccctccaagaggtcttttatcgaggacctgctgttcaacaaggtgaccctggccgatgccggcttcatcaagcagtatggagattgcctgggagacatcgcagcccgcgacctgatctgtgcccagaagtttaatggcctgaccgtgctgcctccactgctgacagatgagatgatcgcccagtacacatctgccctgctggccggcaccatcacaagcggatggaccttcggcgcaggagccgccctgcagatcccttttgccatgcagatggcctataggttcaacggcatcggcgtgacccagaatgtgctgtacgagaaccagaagctgatcgccaatcagtttaacagcgccatcggcaagatccaggactctctgtcctctacagccagcgccctgggcaagctgcaggatgtggtgaatcagaacgcccaggccctgaataccctggtgaagcagctgagctccaacttcggcgccatctctagcgtgctgaatgacatcctgagccggctggacccccctgaggcagaggtgcagatcgacaggctgatcacaggccgcctgcagagcctgcagacctacgtgacacagcagctgatcagggcagcagagatcagagcctccgccaatctggccgccaccaagatgagcgagtgcgtgctgggacagtccaagagggtggacttttgtggcaagggctatcacctgatgtctttcccacagagcgcccctcacggcgtggtgtttctgcacgtgacctacgtgccagcccaggagaagaacttcaccacagcaccagccatctgccacgatggaaaggcacactttcctagggagggcgtgttcgtgtctaacggcacccactggtttgtgacacagcgcaatttctacgagccacagatcatcaccacagacaatacattcgtgagcggcaactgtgatgtggtgatcggcatcgtgaacaataccgtgtatgatccactgcagcccgagctggactcctttaaggaggagctggataagtacttcaagaatcacacctctcccgacgtggatctgggcgacatctccggcatcaatgcctctgtggtgaacatccagaaggagatcgaccggctgaacgaggtggccaagaatctgaacgagagcctgatcgatctgcaggagctgggcaagtatgagcagtacatcaagggctctggcagagagaacctgtatttccagggaggaggaggcagcggatacatccctgaggcaccaagggacggacaggcctacgtgcgcaaggatggcgagtgggtgctgctgtccacctttctgggccatcatcaccaccaccaccaccactga

SEQ ID NO: 1467 - DNA, 3846 bp, Artificial Sequence
  Description of Artificial Sequence: Synthetic polynucleotide
atgggcatcctgccaagcccaggaatgcccgccctgctgtctctggtgagcctgctgtccgtgctgctgatgggatgcgtggcagagacaggcacacagtgcgtgaacctgaccacaaggacccagctgccccctgcctataccaattctttcacacggggcgtgtactatcccgacaaggtgtttagaagctccgtgctgcactccacacaggatctgtttctgcctttcttttctaacgtgacctggttccacgccatccacgtgtccggcaccaatggcacaaagcggttcgacaatcccgtgctgccttttaacgatggcgtgtacttcgccgcgatagagaagtccaacatcatcagaggctggatctttggcaccacactggactctaagacacagagcctgctgatcgtgaacaatgccaccaacgtggtgatcaaggtgtgcgagttccagttttgtaatgatccattcctgggcgtgtactatcacaagaacaataagtcctggatggagtctgagtttcgcgtgtattctagcgccaacaattgcacatttgagtacgtgagccagcccttcctgatggacctggagggcaagcagggcaatttcaagaacctgagggagttcgtgtttaagaatatcgatggctacttcaagatctacagcaagcacaccccaatcaacctggtgcgcgacctgccacagggattctccgccctggagccactggtggatctgcccatcggcatcaacatcacccggtttcagacactgctggccctgcacagatcctacctgacaccaggcgactcctctagcggatggaccgcaggagctgccgcctactatgtgggctatctgcagccccggaccttcctgctgaagtacaacgagaatggcaccatcacagacgcagtggattgcgccctggaccccctgtctgagacaaagtgtacactgaagagctttaccgtggagaagggcatctatcagacaagcaatttcagggtgcagcctaccgagtccatcgtgcgctttcccaatatcacaaacctgtgcccttttggcgaggtgttcaacgccaccagattcgccagcgtgtacgcctggaatcggaagagaatctccaactgcgtggccgactattctgtgctgtacaactccgcctctttcagcacctttaagtgctatggcgtgtctcccacaaagctgaatgatctgtgctttaccaacgtgtacgccgatagcttcgtgatcaggggagacgaagtgagacagatcgcaccaggacagacaggaaagatcgcagactacaattataagctgcctgacgatttcaccggctgcgtgatcgcctggaactccaacaatctggattctaaagtgggcggcaactacaattatctgtacaggctgtttcgcaagtccaatctgaagccattcgagcgggacatctccacagagatctaccaggccggctctaccccctgcaatggcgtggagggctttaactgttatttccctctgcagtcttacggcttccagccaacaaacggcgtgggctatcagccctacagagtggtggtgctgtcctttgagctgctgcacgcaccagcaacagtgtgcggcccaaagaagtctaccaatctggtgaagaacaagtgcgtgaacttcaacttcaacggactgaccggcacaggcgtgctgaccgagagcaataagaagttcctgccttttcagcagttcggcagggacatctcagataccacagacgccgtgcgcgaccctcagaccctggagatcctggacatcacaccatgcagcttcggcggcgtgtccgtgatcacaccaggcaccaatacatccaaccaggtggccgtgctgtatcaggacgtgaattgtaccgaggtgcccgtggcaatccacgcagatcagctgacccctacatggcgggtgtactctaccggcagcaacgtgttccagacaagagccggatgcctgatcggagcagagcacgtgaacaatagctatgagtgcgacatccctatcggcgccggcatctgtgccagctaccagacccagacaaactccccatctggagcaggctccgtggccagccagtccatcatcgcctataccatgagcctgggcgccgagaacagcgtggcctactccaacaattctatcgccatccctaccaacttcacaatcagcgtgaccacagagatcctgccagtgtctatgaccaagacaagcgtggactgcacaatgtatatctgtggcgatagcaccgagtgctccaacctgctgctgcagtacggctccttttgtacccagctgaatagagccctgacaggcatcgccgtggaggaagataagaacacacaggaggtgttcgcccaggtgaagcagatctacaagaccccacccatcaaggactttggcggcttcaacttcagccagatcctgcctgatccaagcaagccctccaagaggtcttttatcgaggacctgctgttcaacaaggtgaccctggccgatgccggcttcatcaagcagtatggagattgcctgggagacatcgcagcccgcgacctgatctgtgcccagaagtttaatggcctgaccgtgctgcctccactgctgacagatgagatgatcgcccagtacacatcttcgctgctggccggcaccatcacagcaggatggaccttcggcgcaggagccgccctgcagatcccttttgccatgcagatggcctataggttcaacggcatcggcgtgacccagaatgtgctgtacgagaaccagaagctgatcgccaatcagtttaacagcgccatcggcaagatccaggactctctgtcctctacagccagcgccctgggcaagctgcaggatgtggtgaatcagaacgcccaggccctgaataccctggtgaagcagctgagctccaacttcggcgccatctctagcgtgctgaatgacatcctgagccggctggacccccctgaggcagaggtgcagatcgacaggctgatcacaggccgcctgcagagcctgcagacctacgtgacacagcagctgatcagggcagcagagatcagagcctccgccaatctggccgccaccaagatgagcgagtgcgtgaaaggacagtccaagagggtggacttttgtggcaagggctatcacctgatgtctttcccacagagcgcccctcacggcatagtgtttctgcacgtgacctacgtgccagcccaggagaagaacttcaccacagcaccagccatctgccacgatggaaaggcacactttcctagggagggcgtgttcgtgtctaacggcacccactggtttgtgacacagcgcaatttctacgagccacagatcatcaccacagacaatacattcgtgagcggcaactgtgatgtggtgatcggcatcgtgaacaataccgtgtatgatccactgcagcccgagctggactcctttaaggaggagctggataagtacttcaagaatcacacctctcccgacgtggatctgggcgacatctccggcatcaatgcctctgtggtgaacatccagaaggagatcgaccggctgaacgaggtggccaagaatctgaacgagagcctgatcgatctgcaggagctgggcaagtatgagcagtacatcaagggctctggcagagagaacctgtatttccagggaggaggaggcagcggatacatccctgaggcaccaagggacggacaggcctacgtgcgcaaggatggcgagtgggtgctgctgtccacctttctgggccatcatcaccaccaccaccaccactga

SEQ ID NO: 1468 - DNA, 3846 bp, Artificial Sequence
  Description of Artificial Sequence: Synthetic polynucleotide
atgggcatcctgccaagcccaggaatgcccgccctgctgtctctggtgagcctgctgtccgtgctgctgatgggatgcgtggcagagacaggcacacagtgcgtgaacctgaccacaaggacccagctgccccctgcctataccaattctttcacacggggcgtgtactatcccgacaaggtgtttagaagctccgtgctgcactccacacaggatctgtttctgcctttcttttctaacgtgacctggttccacgccatccacgtgtccggcaccaatggcacaaagcggttcgacaatcccgtgctgccttttaacgatggcgtgtacttcgccagcaccgagaagtccaacatcatcagaggctggatctttggcaccacactggactctaagacacagagcctgctgatcgtgaacaatgccaccaacgtggtgatcaaggtgtgcgagttccagttttgtaatgatccattcctgggcgtgtactatcacaagaacaataagtcctggatggagtctgagtttcgcgtgtattctagcgccaacaattgcacatttgagtacgtgagccagcccttcctgatggacctggagggcaagcagggcaatttcaagaacctgagggagttcgtgtttaagaatatcgatggctacttcaagatctacagcaagcacaccccaatcaacctggtgcgcgacctgccacagggattctccgccctggagccactggtggatctgcccatcggcatcaacatcacccggtttcagacactgctggccctgcacagatcctacctgacaccaggcgactcctctagcggatggaccgcaggagctgccgcctactatgtgggctatctgcagccccggaccttcctgctgaagtacaacgagaatggcaccatcacagacgcagtggattgcgccctggaccccctgtctgagacaaagtgtacactgaagagctttaccgtggagaagggcatctatcagacaagcaatttcagggtgcagcctaccgagtccatcgtgcgctttcccaatatcacaaacctgtgcccttttggcgaggtgttcaacgccaccagattcgccagcgtgtacgcctggaatcggaagagaatctccaactgcgtggccgactattctgtgctgtacaactccgcctctttcagcacctttaagtgctatggcgtgtctcccacaaagctgaatgatctgtgctttaccaacgtgtacgccgatagcttcgtgatcaggggagacgaagtgagacagatcgcaccaggacagacaggaaagatcgcagactacaattataagctgcctgacgatttcaccggctgcgtgatcgcctggaactccaacaatctggattctaaagtgggcggcaactacaattatctgtacaggctgtttcgcaagtccaatctgaagccattcgagcgggacatctccacagagatctaccaggccggctctaccccctgcaatggcgtggagggctttaactgttatttccctctgcagtcttacggcttccagccaacaaacggcgtgggctatcagccctacagagtggtggtgctgtcctttgagctgctgcacgcaccagcaacagtgtgcggcccaaagaagtctaccaatctggtgaagaacaagtgcgtgaacttcaacttcaacggactgaccggcacaggcgtgctgaccgagagcaataagaagttcctgccttttcagcagttcggcagggacatcgcagataccacagacgccgtgcgcgaccctcagaccctggagatcctggacatcacaccatgcagcttcggcggcgtgtccgtgatcacaccaggcaccaatacatccaaccaggtggccgtgctgtatcaggacgtgaattgtaccgaggtgcccgtggcaatccacgcagatcagctgacccctacatggcgggtgtactctaccggcagcaacgtgttccagacaagagccggatgcctgatcggagcagagcacgtgaacaatagctatgagtgcgacatccctatcggcgccggcatctgtgccagctaccagacccagacaaactccccatctggagcaggctccgtggccagccagtccatcatcgcctataccatgagcctgggcgccgagaacagcgtggcctactccaacaattctatcgccatccctaccaacttcacaatcagcgtgaccacagagatcctgccagtgtctatgaccaagacaagcgtggactgcacaatgtatatctgtggcgatagcaccgagtgctccaacctgctgctgcagtacggctccttttgtacccagctggaaagagccctgacaggcatcgccgtggagcaggataagaacacacaggaggtgttcgcccaggtgaagcagatctacaagaccccacccatcaaggactttggcggcttcaacttcagccagatcctgcctgatccaagcaagccctccaagaggtcttttatcgaggacctgctgttcaacaaggtgaccctggccgatgccggcttcatcaagcagtatggagattgcctgggagacatcgcagcccgcgacctgatctgtgcccagaagtttaatggcctgaccgtgctgcctccactgctgacagatgagatgatcgcccagtacacatctgccctgctggccggcaccatcacaagcggatggaccttcggcgcaggagccgccctgcagatcccttttgccatgcagatggcctataggttcaacggcatcggcgtgacccagaatgtgctgtacgagaaccagaagctgatcgccaatcagtttaacagcgccatcggcaagatccaggactctctgtcctctacagccagcgccctgggcaagctgcaggatgtggtgaatcagaacgcccaggccctgaataccctggtgaagcagctgagctccaacttcggcgccatctctagcgtgctgaatgacatcctgagccggctggacccccctgaggcagaggtgcagatcgacaggctgatcacaggccgcctgcagagcctgcagacctacgtgacacagcagctgatcagggcagcagagatcagagcctccgccaatctggccgccaccaagatgagcgagtgcgtgctgggacagtccaagagggtggacttttgtggcaagggctatcacctgatgtctttcccacagagcgcccctcacggcgtggtgtttctgcacgtgacctacgtgccagcccaggagaagaacttcaccacagcaccagccatctgccacgatggaaaggcacactttcctagggagggcgtgttcgtgtctaacggcacccactggtttgtgacacagcgcaatttctacgagccacagatcatcaccacagacaatacattcgtgagcggcaactgtgatgtggtgatcggcatcgtgaacaataccgtgtatgatccactgcagcccgagctggactcctttaaggaggagctggataagtacttcaagaatcacacctctcccgacgtggatctgggcgacatctccggcatcaatgcctctgtggtgaacatccagaaggagatcgaccggctgaacgaggtggccaagaatctgaacgagagcctgatcgatctgcaggagctgggcaagtatgagcagtacatcaagggctctggcagagagaacctgtatttccagggaggaggaggcagcggatacatccctgaggcaccaagggacggacaggcctacgtgcgcaaggatggcgagtgggtgctgctgtccacctttctgggccatcatcaccaccaccaccaccactga

SEQ ID NO: 1469 - DNA, 3846 bp, Artificial Sequence
  Description of Artificial Sequence: Synthetic polynucleotide
atgggcatcctgccaagcccaggaatgcccgccctgctgtctctggtgagcctgctgtccgtgctgctgatgggatgcgtggcagagacaggcacacagtgcgtgaacctgaccacaaggacccagctgccccctgcctataccaattctttcacacggggcgtgtactatcccgacaaggtgtttagaagctccgtgctgcactccacacaggatctgtttctgcctttcttttctaacgtgacctggttccacgccatccacgtgtccggcaccaatggcacaaagcggttcgacaatcccgtgctgccttttaacgatggcgtgtacttcgccagcaccgagaagtccaacatcatcagaggctggatctttggcaccacactggactctaagacacagagcctgctgatcgtgaacaatgccaccaacgtggtgatcaaggtgtgcgagttccagttttgtaatgatccattcctgggcgtgtactatcacaagaacaataagtcctggatggagtctgagtttcgcgtgtattctagcgccaacaattgcacatttgagtacgtgagccagcccttcctgatggacctggagggcaagcagggcaatttcaagaacctgagggagttcgtgtttaagaatatcgatggctacttcaagatctacagcaagcacaccccaatcaacctggtgcgcgacctgccacagggattctccgccctggagccactggtggatctgcccatcggcatcaacatcacccggtttcagacactgctggccctgcacagatcctacctgacaccaggcgactcctctagcggatggaccgcaggagctgccgcctactatgtgggctatctgcagccccggaccttcctgctgaagtacaacgagaatggcaccatcacagacgcagtggattgcgccctggaccccctgtctgagacaaagtgtacactgaagagctttaccgtggagaagggcatctatcagacaagcaatttcagggtgcagcctaccgagtccatcgtgcgctttcccaatatcacaaacctgtgcccttttggcgaggtgttcaacgccaccagattcgccagcgtgtacgcctggaatcggaagagaatctccaactgcgtggccgactattctgtgctgtacaactccgcctctttcagcacctttaagtgctatggcgtgtctcccacaaagctgaatgatctgtgctttaccaacgtgtacgccgatagcttcgtgatcaggggagacgaagtgagacagatcgcaccaggacagacaggaaagatcgcagactacaattataagctgcctgacgatttcaccggctgcgtgatcgcctggaactccaacaatctggattctaaagtgggcggcaactacaattatctgtacaggctgtttcgcaagtccaatctgaagccattcgagcgggacatctccacagagatctaccaggccggctctaccccctgcaatggcgtggagggctttaactgttatttccctctgcagtcttacggcttccagccaacaaacggcgtgggctatcagccctacagagtggtggtgctgtcctttgagctgctgcacgcaccagcaacagtgtgcggcccaaagaagtctaccaatctggtgaagaacaagtgcgtgaacttcaacttcaacggactgaccggcacaggcgtgctgaccgagagcaataagaagttcctgccttttcagcagttcggcagggacatcgcagataccacagacgccgtgcgcgaccctcagaccctggagatcctggacatcacaccatgcagcttcggcggcgtgtccgtgatcacaccaggcaccaatacatccaaccaggtggccgtgctgtatcaggacgtgaattgtaccgaggtgcccgtggcaatccacgcagatcagctgacccctacatggcgggtgtactctaccggcagcaacgtgttccagacaagagccggatgcctgatcggagcagagcacgtgaacaatagctatgagtgcgacatccctatcggcgccggcatctgtgccagctaccagacccagacaaactccccatctggagcaggctccgtgagtagccagtccatcatcgcctataccatgagcctgggcgccgagaacagcgtggcctactccaacaattctatcgccatccctaccaacttcacaatcagcgtgaccacagagatcctgccagtgtctatgaccaagacaagcgtggactgcacaatgtatatctgtggcgatagcaccgagtgctccaacctgctgctgcagtacggctccttttgtacccagctgaatagagccctgacaggcatcgccgtggagcaggataagaacacacaggaggtgttcgcccaggtgaagcagatctacaagaccccacccatcaaggactttggcggcttcaacttcagccagatcctgcctgatccaagcaagccctccaagaggtcttttatcgaggacctgctgttcaacaaggtgaccctggccgatgccggcttcatcaagcagtatggagattgcctgggagacatcgcagcccgcgacctgatctgtgcccagaagtttaatggcctgaccgtgctgcctccactgctgacagatgagatgatcgcccagtacacatctgccctgctggccggcaccatcacaagcggatggaccttcggcgcaggagccgccctgcagatcccttttgccatgcagatggcctataggttcaacggcatcggcgtgacccagaatgtgctgtacgagaaccagaagctgatcgccaatcagtttaacagcgccatcggcaagatccaggactctctgtcctctacagccagcgccctgggcaagctgcaggatgtggtgaatcagaacgcccaggccctgaataccctggtgaagcagctgagctccaacttcggcgccatctctagcgtgctgaatgacatcctgagccggctggacccccctgaggcagaggtgcagatcgacaggctgatcacaggccgcctgcagagcctgcagacctacgtgacacagcagctgatcagggcagcagagatcagagcctccgccaatctggccgccaccaagatgagcgagtgcgtgctgggacagtccaagagggtggacttttgtggcaagggctatcacctgatgtctttcccacagagcgcccctcacggcgtggtgtttctgcacgtgacctacgtgccagcccaggagaagaacttcaccacagcaccagccatctgccacgatggaaaggcacactttcctagggagggcgtgttcgtgtctaacggcacccactggtttgtgacacagcgcaatttctacgagccacagatcatcaccacagacaatacattcgtgagcggcaactgtgatgtggtgatcggcatcgtgaacaataccgtgtatgatccactgcagcccgagctggactcctttaaggaggagctggataagtacttcaagaatcacacctctcccgacgtggatctgggcgacatctccggcatcaatgcctctgtggtgaacatccagaaggagatcgaccggctgaacgaggtggccaagaatctgaacgagagcctgatcgatctgcaggagctgggcaagtatgagcagtacatcaagggctctggcagagagaacctgtatttccagggaggaggaggcagcggatacatccctgaggcaccaagggacggacaggcctacgtgcgcaaggatggcgagtgggtgctgctgtccacctttctgggccatcatcaccaccaccaccaccactga

SEQ ID NO: 1470 - DNA, 3846 bp, Artificial Sequence
  Description of Artificial Sequence: Synthetic polynucleotide
atgggcatcctgccaagcccaggaatgcccgccctgctgtctctggtgagcctgctgtccgtgctgctgatgggatgcgtggcagagacaggcacacagtgcgtgaacctgaccacaaggacccagctgccccctgcctataccaattctttcacacggggcgtgtactatcccgacaaggtgtttagaagctccgtgctgcactccacacaggatctgtttctgcctttcttttctaacgtgacctggttccacgccatccacgtgtccggcaccaatggcacaaagcggttcgacaatcccgtgctgccttttaacgatggcgtgtacttcgccagcaccgagaagtccaacatcatcagaggctggatctttggcaccacactggactctaagacacagagcctgctgatcgtgaacaatgccaccaacgtggtgatcaaggtgtgcgagttccagttttgtaatgatccattcctgggcgtgtactatcacaagaacaataagtcctggatggagtctgagtttcgcgtgtattctagcgccaacaattgcacatttgagtacgtgagccagcccttcctgatggacctggagggcaagcagggcaatttcaagaacctgagggagttcgtgtttaagaatatcgatggctacttcaagatctacagcaagcacaccccaatcaacctggtgcgcgacctgccacagggattctccgccctggagccactggtggatctgcccatcggcatcaacatcacccggtttcagacactgctggccctgcacagatcctacctgacaccaggcgactcctctagcggatggaccgcaggagctgccgcctactatgtgggctatctgcagccccggaccttcctgctgaagtacaacgagaatggcaccatcacagacgcagtggattgcgccctggaccccctgtctgagacaaagtgtacactgaagagctttaccgtggagaagggcatctatcagacaagcaatttcagggtgcagcctaccgagtccatcgtgcgctttcccaatatcacaaacctgtgcccttttggcgaggtgttcaacgccaccagattcgccagcgtgtacgcctggaatcggaagagaatctccaactgcgtggccgactattctgtgctgtacaactccgcctctttcagcacctttaagtgctatggcgtgtctcccacaaagctgaatgatctgtgctttaccaacgtgtacgccgatagcttcgtgatcaggggagacgaagtgagacagatcgcaccaggacagacaggaaagatcgcagactacaattataagctgcctgacgatttcaccggctgcgtgatcgcctggaactccaacaatctggattctaaagtgggcggcaactacaattatctgtacaggctgtttcgcaagtccaatctgaagccattcgagcgggacatctccacagagatctaccaggccggctctaccccctgcaatggcgtggagggctttaactgttatttccctctgcagtcttacggcttccagccaacaaacggcgtgggctatcagccctacagagtggtggtgctgtcctttgagctgctgcacgcaccagcaacagtgtgcggcccaaagaagtctaccaatctggtgaagaacaagtgcgtgaacttcaacttcaacggactgaccggcacaggcgtgctgaccgagagcaataagaagttcctgccttttcagcagttcggcagggacatcgcagataccacagacgccgtgcgcgaccctcagaccctggagatcctggacatcacaccatgcagcttcggcggcgtgtccgtgatcacaccaggcaccaatacatccaaccaggtggccgtgctgtatcaggacgtgaattgtaccgaggtgcccgtggcaatccacgcagatcagctgacccctacatggcgggtgtactctaccggcagcaacgtgttccagacaagagccggatgcctgatcggagcagagcacgtgaacaatagctatgagtgcgacatccctatcggcgccggcatctgtgccagctaccagacccagacaaactccccatctggagcaggctccgtggccagccagtccatcatcgcctataccatgagcctgggcgccgagaacagcgtggcctactccaacaattctatcgccatccctaccaacttcacaatcagcgtgaccacagagatcctgccagtgtctatgaccaagacaagcgtggactgcacaatgtatatctgtggcgatagcaccgagtgctccaacctgctgctgcagtacggctccttttgtacccagctgaatagagccctgaatggcatcgccgtggagcaggataagaacacacaggaggtgttcgcccaggtgaagcagatctacaagaccccacccatcaaggactttggcggcttcaacttcagccagatcctgcctgatccaagcaagccctccaagaggtcttttatcgaggacctgctgttcaacaaggtgaccctggccgatgccggcttcatcaagcagtatggagattgcctgggagacatcgcagcccgcgacctgatctgtgcccagaagtttaatggcctgaccgtgctgcctccactgctgacagatgagatgatcgcccagtacacatctgccctgctggccggcaccatcacaagcggatggaccttcggcgcaggagccgccctgcagatcccttttgccatgcagatggcctataggttcaacggcatcggcgtgacccagaatgtgctgtacgagaaccagaagctgatcgccaatcagtttaacagcgccatcggcaagatccaggactctctgtcctctacagccagcgccctgggcaagctgcaggatgtggtgaatcagaacgcccaggccctgaataccctggtgaagcagctgagctccaacttcggcgccatctctagcgtgctgaatgacatcctgagccggctggacccccctgaggcagaggtgcagatcgacaggctgatcacaggccgcctgcagagcctgcagacctacgtgacacagcagctgatcagggcagcagagatcagagcctccgccaatctggccgccaccaagatgagcgagtgcgtgctgggacagtccaagagggtggacttttgtggcaagggctatcacctgatgtctttcccacagagcgcccctcacggcgtggtgtttctgcacgtgacctacgtgccagcccaggagaagaacttcaccacagcaccagccatctgccacgatggaaaggcacactttcctagggagggcgtgttcgtgtctaacggcacccactggtttgtgacacagcgcaatttctacgagccacagatcatcaccacagacaatacattcgtgagcggcaactgtgatgtggtgatcggcatcgtgaacaataccgtgtatgatccactgcagcccgagctggactcctttaaggaggagctggataagtacttcaagaatcacacctctcccgacgtggatctgggcgacatctccggcatcaatgcctctgtggtgaacatccagaaggagatcgaccggctgaacgaggtggccaagaatctgaacgagagcctgatcgatctgcaggagctgggcaagtatgagcagtacatcaagggctctggcagagagaacctgtatttccagggaggaggaggcagcggatacatccctgaggcaccaagggacggacaggcctacgtgcgcaaggatggcgagtgggtgctgctgtccacctttctgggccatcatcaccaccaccaccaccactga

SEQ ID NO: 1471 - DNA, 3846 bp, Artificial Sequence
  Description of Artificial Sequence: Synthetic polynucleotide
atgggcatcctgccaagcccaggaatgcccgccctgctgtctctggtgagcctgctgtccgtgctgctgatgggatgcgtggcagagacaggcacacagtgcgtgaacctgaccacaaggacccagctgccccctgcctataccaattctttcacacggggcgtgtactatcccgacaaggtgtttagaagctccgtgctgcactccacacaggatctgtttctgcctttcttttctaacgtgacctggttccacgccatccacgtgtccggcaccaatggcacaaagcaattcgacaatcccgtgctgccttttaacgatggcgtgtacttcgccagcaccgagaagtccaacatcatcagaggctggatctttggcaccacactggactctaagacacagagcctgctgatcgtgaacaatgccaccaacgtggtgatcaaggtgtgcgagttccagttttgtaatgatccattcctgggcgtgtactatcacaagaacaataagtcctggatggagtctgagtttcgcgtgtattctagcgccaacaattgcacatttgagtacgtgagccagcccttcctgatggacctggagggcaagcagggcaatttcaagaacctgagggagttcgtgtttaagaatatcgatggctacttcaagatctacagcaagcacaccccaatcaacctggtgcgcgacctgccacagggattctccgccctggagccactggtggatctgcccatcggcatcaacatcacccggtttcagacactgctggccctgcacagatcctacctgacaccaggcgactcctctagcggatggaccgcaggagctgccgcctactatgtgggctatctgcagccccggaccttcctgctgaagtacaacgagaatggcaccatcacagacgcagtggattgcgccctggaccccctgtctgagacaaagtgtacactgaagagctttaccgtggagaagggcatctatcagacaagcaatttcagggtgcagcctaccgagtccatcgtgcgctttcccaatatcacaaacctgtgcccttttggcgaggtgttcaacgccaccagattcgccagcgtgtacgcctggaatcggaagagaatctccaactgcgtggccgactattctgtgctgtacaactccgcctctttcagcacctttaagtgctatggcgtgtctcccacaaagctgaatgatctgtgctttaccaacgtgtacgccgatagcttcgtgatcaggggagacgaagtgagacagatcgcaccaggacagacaggaaagatcgcagactacaattataagctgcctgacgatttcaccggctgcgtgatcgcctggaactccaacaatctggattctaaagtgggcggcaactacaattatctgtacaggctgtttcgcaagtccaatctgaagccattcgagcgggacatctccacagagatctaccaggccggctctaccccctgcaatggcgtggagggctttaactgttatttccctctgcagtcttacggcttccagccaacaaacggcgtgggctatcagccctacagagtggtggtgctgtcctttgagctgctgcacgcaccagcaacagtgtgcggcccaaagaagtctaccaatctggtgaagaacaagtgcgtgaacttcaacttcaacggactgaccggcacaggcgtgctgaccgagagcaataagaagttcctgccttttcagcagttcggcagggacatcgcagataccacagacgccgtgcgcgaccctcagaccctggagatcctggacatcacaccatgcagcttcggcggcgtgtccgtgatcacaccaggcaccaatacatccaaccaggtggccgtgctgtatcaggacgtgaattgtaccgaggtgcccgtggcaatccacgcagatcagctgacccctacatggcgggtgtactctaccggcagcaacgtgttccagacaagagccggatgcctgatcggagcagagcacgtgaacaatagctatgagtgcgacatccctatcggcgccggcatctgtgccagctaccagacccagacaaactccccatctggagcaggctccgtggccagccagtccatcatcgcctataccatgagcctgggcgccgagaacagcgtggcctactccaacaattctatcgccatccctaccaacttcacaatcagcgtgaccacagagatcctgccagtgtctatgaccaagacaagcgtggactgcacaatgtatatctgtggcgatagcaccgagtgctccaacctgctgctgcagtacggctccttttgtacccagctgaatagagccctgacaggcatcgccgtggagcaggataagaacacacaggaggtgttcgcccaggtgaagcagatctacaagaccccacccatcaaggactttggcggcttcaacttcagccagatcctgcctgatccaagcaagccctccaagaggtcttttatcgaggacctgctgttcaacaaggtgaccctggccgatgccggcttcatcaagcagtatggagattgcctgggagacatcgcagcccgcgacctgatctgtgcccagaagtttaatggcctgaccgtgctgcctccactgctgacagatgagatgatcgcccagtacacatctgccctgctggccggcaccatcacaagcggatggaccttcggcgcaggagccgccctgcagatcccttttgccatgcagatggcctataggttcaacggcatcggcgtgacccagaatgtgctgtacgagaaccagaagctgatcgccaatcagtttaacagcgccatcggcaagatccaggactctctgtcctctacagccagcgccctgggcaagctgcaggatgtggtgaatcagaacgcccaggccctgaataccctggtgaagcagctgagctccaacttcggcgccatctctagcgtgctgaatgacatcctgagccggctggacccccctgaggcagaggtgcagatcgacaggctgatcacaggccgcctgcagagcctgcagacctacgtgacacagcagctgatcagggcagcagagatcagagcctccgccaatctggccgccaccaagatgagcgagtgcgtgctgggacagtccaagagggtggacttttgtggcaagggctatcacctgatgtctttcccacagagcgcccctcacggcgtggtgtttctgcacgtgacctacgtgccagcccaggagaagaacttcaccacagcaccagccatctgccacgatggaaaggcacactttcctagggagggcgtgttcgtgtctaacggcacccactggtttgtgacacagcgcaatttctacgagccacagatcatcaccacagacaatacattcgtgagcggcaactgtgatgtggtgatcggcatcgtgaacaataccgtgtatgatccactgcagcccgagctggactcctttaaggaggagctggataagtacttcaagaatcacacctctcccgacgtggatctgggcgacatctccggcatcaatgcctctgtggtgaacatccagaaggagatcgaccggctgaacgaggtggccaagaatctgaacgagagcctgatcgatctgcaggagctgggcaagtatgagcagtacatcaagggctctggcagagagaacctgtatttccagggaggaggaggcagcggatacatccctgaggcaccaagggacggacaggcctacgtgcgcaaggatggcgagtgggtgctgctgtccacctttctgggccatcatcaccaccaccaccaccactga

SEQ ID NO: 1472 - DNA, 3846 bp, Artificial Sequence
  Description of Artificial Sequence: Synthetic polynucleotide
atgggcatcctgccaagcccaggaatgcccgccctgctgtctctggtgagcctgctgtccgtgctgctgatgggatgcgtggcagagacaggcacacagtgcgtgaacctgaccacaaggacccagctgccccctgcctataccaattctttcacacggggcgtgtactatcccgacaaggtgtttagaagctccgtgctgcactccacacaggatctgtttctgcctttcttttctaacgtgacctggttccacgccatccacgtgtccggcaccaatggcacaaagcggttcgacaatcccgtgctgccttttaacgatggcgtgtacttcgccagcaccgagaagtccaacatcatcagaggctggatctttggcaccacactggactctaagacacagagcctgctgatcgtgaacaatgccaccaacgtggtgatcaaggtgtgcgagttccagttttgtaatgatccattcctgggcgtgtactatcacaagaacaataagtcctggatggagtctgagtttcgcgtgtattctagcgccaacaattgcacatttgagtacgtgagccagcccttcctgatggacctggagggcaagcagggcaatttcaagaacctgagggagttcgtgtttaagaatatcgatggctacttcaagatctacagcaagcacaccccaatcaacctggtgcgcgacctgccacagggattctccgccctggagccactggtggatctgcccatcggcatcaacatcacccggtttcagacactgctggccctgcacagatcctacctgacaccaggcgactcctctagcggatggaccgcaggagctgccgcctactatgtgggctatctgcagccccggaccttcctgctgaagtacaacgagaatggcaccatcacagacgcagtggattgcgccctggaccccctgtctgagacaaagtgtacactgaagagctttaccgtggagaagggcatctatcagacaagcaatttcagggtgcagcctaccgagtccatcgtgcgctttcccaatatcacaaacctgtgcccttttggcgaggtgttcaacgccaccagattcgccagcgtgtacgcctggaatcggaagagaatctccaactgcgtggccgactattctgtgctgtacaactccgcctctttcagcacctttaagtgctatggcgtgtctcccacaaagctgaatgatctgtgctttaccaacgtgtacgccgatagcttcgtgatcaggggagacgaagtgagacagatcgcaccaggacagacaggaaagatcgcagactacaattataagctgcctgacgatttcaccggctgcgtgatcgcctggaactccaacaatctggattctaaagtgggcggcaactacaattatctgtacaggctgtttcgcaagtccaatctgaagccattcgagcgggacatctccacagagatctaccaggccggctctaccccctgcaatggcgtggagggctttaactgttatttccctctgcagtcttacggcttccagccaacaaacggcgtgggctatcagccctacagagtggtggtgctgtcctttgagctgctgcacgcaccagcaacagtgtgcggcccaaagaagtctaccaatctggtgaagaacaagtgcgtgaacttcaacttcaacggactgaccggcacaggcgtgctgaccgagagcaataagaagttcctgccttttcagcagttcggcagggacatcgcagataccacagacgccgtgcgcgaccctcagaccctggagatcctggacatcacaccatgcagcttcggcggcgtgtccgtgatcacaccaggcaccaatacatccaaccaggtggccgtgctgtatcaggacgtgaattgtaccgaggtgcccgtggcaatccacgcagatcagctgacccctacatggcgggtgtactctaccggcagcaacgtgttccagacaagagccggatgcctgatcggagcagagcacgtgaacaatagctatgagtgcgacatccctatcggcgccggcatctgtgccagctaccagacccagacaaactccccatctggagcaggctccgtggccagccagtccatcatcgcctataccatgagcctgggcgccgagaacagcgtggcctactccaacaattctatcgccatccctaccaacttcacaatcagcgtgaccacagagatcctgccagtgtctatgaccaagacaagcgtggactgcacaatgtatatctgtggcgatagcaccgagtgctccaacctgctgctgcagtacggctccttttgtacccagctgaatagagccctgacaggcatcgccgtggagcaggataagaacacacaggaggtgttcgcccaggtgaagcagatctacaagaccccacccatcaaggactttggcggcttcaacttcagccagatcctgcctgatccaagcaagccctccaagaggtcttttatcgaggacctgctgttcaacaaggtgaccctggccgatgccggcttcatcaagcagtatggagattgcctgggagacatcgcagcccgcgacctgatctgtgcccagaagtttaatggcctgaccgtgctgcctccactgctgacagatgagatgatcgcccagtacacatctgccctgctggccggcaccgcaacaagcggatggaccttcggcgcaggagccgccctgcagatcccttttgccatgcagatggcctataggttcaacggcatcggcgtgacccagaatgtgctgtacgagaaccagaagctgatcgccaatcagtttaacagcgccatcggcaagatccaggactctctgtcctctacagccagcgccctgggcaagctgcaggatgtggtgaatcagaacgcccaggccctgaataccctggtgaagcagctgagctccaacttcggcgccatctctagcgtgctgaatgacatcctgagccggctggacccccctgaggcagaggtgcagatcgacaggctgatcacaggccgcctgcagagcctgcagacctacgtgacacagcagctgatcagggcagcagagatcagagcctccgccaatctggccgccaccaagatgagcgagtgcgtgctgggacagtccaagagggtggacttttgtggcaagggctatcacctgatgtctttcccacagagcgcccctcacggcgtggtgtttctgcacgtgacctacgtgccagcccaggagaagaacttcaccacagcaccagccatctgccacgatggaaaggcacactttcctagggagggcgtgttcgtgtctaacggcacccactggtttgtgacacagcgcaatttctacgagccacagatcatcaccacagacaatacattcgtgagcggcaactgtgatgtggtgatcggcatcgtgaacaataccgtgtatgatccactgcagcccgagctggactcctttaaggaggagctggataagtacttcaagaatcacacctctcccgacgtggatctgggcgacatctccggcatcaatgcctctgtggtgaacatccagaaggagatcgaccggctgaacgaggtggccaagaatctgaacgagagcctgatcgatctgcaggagctgggcaagtatgagcagtacatcaagggctctggcagagagaacctgtatttccagggaggaggaggcagcggatacatccctgaggcaccaagggacggacaggcctacgtgcgcaaggatggcgagtgggtgctgctgtccacctttctgggccatcatcaccaccaccaccaccactga

SEQ ID NO: 1473 - DNA, 3846 bp, Artificial Sequence
  Description of Artificial Sequence: Synthetic polynucleotide
atgggcatcctgccaagcccaggaatgcccgccctgctgtctctggtgagcctgctgtccgtgctgctgatgggatgcgtggcagagacaggcacacagtgcgtgaacctgaccacaaggacccagctgccccctgcctataccaattctttcacacggggcgtgtactatcccgacaagatttttagaagctccgtgctgcaccttacacaggatctgtttctgcctttcttttctaacgtgacctggttccacgccatccacgtgtccggcaccaatggcacaaagcggttcgacaatcccgtgctgccttttaacgatggcgtgtacttcgccgcgaccgagaagtccaacatcatcagaggctggatctttggcaccacactggactctaagacacagagcctgctgatcgtgaacaatgccaccaacgtggtgatcaaggtgtgcaatttccagttttgtaatgatccattcctgggcgtgtactatcacaagaacaataagtcctggatggagtctgagtttcgcgtgtattctagcgccaacaattgcacatttgagtacgtgagccagcccttcctgatggacctggagggcaagcagggcaatttcaagaacctgagggagttcgtgtttaagaatatcgatggctacttcaagatctacagcaagcacaccccaatcaacctggtgcgcgacctgccacagggattctccgccctgaaaccactggtgaaactgcccatcggcatcaacatcacccggtttcagacactgctggccctgcacagatcctacctgacaccaggcgactcctctagcggatggaccgcaggagctgccgcctactatgtgggctatctgcagccccggaccttcctgctgaagtacaacgagaatggcaccatcacagacgcagtggattgcgccctggaccccctgtctgagacaaagtgtacactgaagagctttaccgtggagaagggcatctatcagacaagcaatttcagggtgcagcctaccgagtccatcgtgcgctttcccaatatcacaaacctgtgcccttttggcgaggtgttcaacgccaccagattcgccagcgtgtacgcctggaatcggaagagaatctccaactgcgtggccgactattctgtgctgtacaactccgcctctttcagcacctttaagtgctatggcgtgtctcccacaaagctgaatgatctgtgctttaccaacgtgtacgccgatagcttcgtgatcaggggagacgaagtgagacagatcgcaccaggacagacaggaaagatcgcagactacaattataagctgcctgacgatttcaccggctgcgtgatcgcctggaactccaacaatctggattctaaagtgggcggcaactacaattatctgtacaggctgtttcgcaagtccaatctgaagccattcgagcgggacatctccacagagatctaccaggccggctctaccccctgcaatggcgtggagggctttaactgttatttccctctgcagtcttacggcttccagccaacaaacggcgtgggctatcagccctacagagtggtggtgctgtcctttgagctgctgcacgcaccagcaacagtgtgcggcccaaagaagtctaccaatctggtgaagaacaagtgcgtgaacttcaacttcaacggactgaccggcacaggcgtgctgaccgagagcaataagaagttcctgccttttcagcagttcggcagggacatcagtgataccacagacgccgtgcgcgaccctcagaccctggagatcctggacatcacaccatgcagcttcggcggcgtgtccgtgatcacaccaggcaccaatacatccaaccaggtggccgtgctgtatcaggacgtgaattgtaccgatgtgcccgtggcaatccacgcagatcagctgacccctacatggcgggtgtactctaccggcagcaacgtgttccagacacaagccggatgcctgatcggagcagagcacgtgaacaatagctatgagtgcgacatccctatcggcgccggcatctgtgccagctaccagacccagacaaactccccatctggagcaggctccgtggccagccagtccatcatcgcctataccatgagcctgggcgccgagaacagcgtggcctactccaacaattctatcgccatccctaccaacttcacaatcagcgtgaccacagagatcctgccagtgtctatgaccaagacaagcgtggactgcacaatgtatatctgtggcgatagcaccgagtgctccaacctgctgctgcagtacggctccttttgtacccagctgaatagagccctgacaggcatcgccgtggagcaggataagaacacacaggaggtgttcgcccaggtgaagcagatctacaagaccccacccatcaaggactttggcggcttcaacttcagccagatcctgcctgatccaagcaagccctccaagaggtcttttatcgaggacctgctgttcaacaaggtgaccctggccgatgccggcttcatcaagcagtatggagattgcctgggagacatcgcagcccgcgacctgatctgtgcccagaagtttaatggcctgaccgtgctgcctccactgctgacagatgagatgatcgccgcttacacagctgccctgctggccggcaccgctacagctggatggaccttcggcgcaggagccgccctgcagatcccttttgccatgcagatggcctataggttcaacggcatcggcgtgacccagaatgtgctgtacgagaaccagaagctgatcgccaatcagtttaacagcgccatcggcaagatccaggactctctgtcctctacagccagcgccctgggcaagctgcaggatgtggtgaatcagaacgcccaggccctgaataccctggtgaagcagctgagctccaacttcggcgccatctctagcgtgctgaatgacatcctgagccggctggacccccctgaggcagaggtgcagatcgacaggctgatcacaggccgcctgcagagcctgcagacctacgtgacacagcagctgatcagggcagcagagatcagagcctccgccaatctggccgccaccaagatgagcgagtgcgtgctgggacagtccaagagggtggacttttgtggcaagggctatcacctgatgtctttcccacagagcgcccctcacggcgtggtgtttctgcacgtgacctacgtgccagcccaggagaagaacttcaccacagcaccagccatctgccacgatggaaaggcacactttcctagggagggcgtgttcgtgtctaacggcacccactggtttgtgacacagcgcaatttctacgagccacagatcatcaccacagacaatacattcgtgagcggcaactgtgatgtggtgatcggcatcgtgaacaataccgtgtatgatccactgcagcccgagctggactcctttaaggaggagctggataagtacttcaagaatcacacctctcccgacgtggatctgggcgacatctccggcatcaatgcctctgtggtgaacatccagaaggagatcgaccggctgaacgaggtggccaagaatctgaacgagagcctgatcgatctgcaggagctgggcaagtatgagcagtacatcaagggctctggcagagagaacctgtatttccagggaggaggaggcagcggatacatccctgaggcaccaagggacggacaggcctacgtgcgcaaggatggcgagtgggtgctgctgtccacctttctgggccatcatcaccaccaccaccaccactga

SEQ ID NO: 1474 - DNA, 3846 bp, Artificial Sequence
  Description of Artificial Sequence: Synthetic polynucleotide
atgggcatcctgccaagcccaggaatgcccgccctgctgtctctggtgagcctgctgtccgtgctgctgatgggatgcgtggcagagacaggcacacagtgcgtgaacctgaccacaaggacccagctgccccctgcctataccaattctttcacacggggcgtgtactatcccgacaaggtgtttagaagctccgtgctgcactccacacaggatctgtttctgcctttcttttctaacgtgacctggttccacgccatccacgtgtccggcaccaatggcacaaagcggttcgacaatcccgtgctgccttttaacgatggcgtgtacttcgccagcaccgagaagtccaacatcatcagaggctggatctttggcaccacactggactctaagacacagagcctgctgatcgtgaacaatgccaccaacgtggtgatcaaggtgtgcgagttccagttttgtaatgatccattcctgggcgtgtactatcacaagaacaataagtcctggatggagtctgagtttcgcgtgtattctagcgccaacaattgcacatttgagtacgtgagccagcccttcctgatggacctggagggcaagcagggcaatttcaagaacctgagggagttcgtgtttaagaatatcgatggctacttcaagatctacagcaagcacaccccaatcaacctggtgcgcgacctgccacagggattctccgccctggagccactggtggatctgcccatcggcatcaacatcacccggtttcagacactgctggccctgcacagatcctacctgacaccaggcgactcctctagcggatggaccgcaggagctgccgcctactatgtgggctatctgcagccccggaccttcctgctgaagtacaacgagaatggcaccatcacagacgcagtggattgcgccctggaccccctgtctgagacaaagtgtacactgaagagctttaccgtggagaagggcatctatcagacaagcaatttcagggtgcagcctaccgagtccatcgtgcgctttcccaatatcacaaacctgtgcccttttggcgaggtgttcaacgccaccagattcgccagcgtgtacgcctggaatcggaagagaatctccaactgcgtggccgactattctgtgctgtacaactccgcctctttcagcacctttaagtgctatggcgtgtctcccacaaagctgaatgatctgtgctttaccaacgtgtacgccgatagcttcgtgatcaggggagacgaagtgagacagatcgcaccaggacagacaggaaagatcgcagactacaattataagctgcctgacgatttcaccggctgcgtgatcgcctggaactccaacaatctggattctaaagtgggcggcaactacaattatctgtacaggctgtttcgcaagtccaatctgaagccattcgagcgggacatctccacagagatctaccaggccggctctaccccctgcaatggcgtggagggctttaactgttatttccctctgcagtcttacggcttccagccaacaaacggcgtgggctatcagccctacagagtggtggtgctgtcctttgagctgctgcacgcaccagcaacagtgtgcggcccaaagaagtctaccaatctggtgaagaacaagtgcgtgaacttcaacttcaacggactgaccggcacaggcgtgctgaccgagagcaataagaagttcctgccttttcagcagttcggcagggacatcgcagataccacagacgccgtgcgcgaccctcagaccctggagatcctggacatcacaccatgcagcttcggcggcgtgtccgtgatcacaccaggcaccaatacatccaaccaggtggccgtgctgtatcaggacgtgaattgtaccgaggtgcccgtggcaatccacgcagatcagctgacccctacatggcgggtgtactctaccggcagcaacgtgttccagacaagagccggatgcctgatcggagcagagcacgtgaacaatagctatgagtgcgacatccctatcggcgccggcatctgtgccagctaccagacccagacaaactccccatctggagcaggctccgtggccagccagtccatcatcgcctataccatgagcctgggcgccgagaacagcgtggcctactccaacaattctatcgccatccctaccaacttcacaatcagcgtgaccacagagatcctgccagtgtctatgaccaagacaagcgtggactgcacaatgtatatctgtggcgatagcaccgagtgctccaacctgctgctgcagtacggctccttttgtacccagctgaatagagccctgacaggcatcgccgtggagcaggataagaacacacaggaggtgttcgcccaggtgaagcagatctacaagaccccacccatcaaggactttggcggcttcaacttcagccagatcctgcctgatccaagcaagccctccaagaggtcttttatcgaggacctgctgttcaacaaggtgaccctggccgatgccggcttcatcaagcagtatggagattgcctgggagacatcgcagcccgcgacctgatctgtgcccagaagtttaatggcctgaccgtgctgcctccactgctgacagatgagatgatcgcccagtacacatctgccctgctggccggcaccatcacaagcggatggaccttcggcgcaggagccgccctgcagatcccttttgccatgcagatggcctataggttcaacggcatcggcgtgacccagaatgtgctgtacgagaaccagaagctgatcgccaatcagtttaacagcgccatcggcaagatccaggactctctgtcctctacagccagcgccctgggcaagctgcaggatgtggtgaatcagaacgcccaggccctgaataccctggtgaagcagctgagctccaacttcggcgccatctctagcgtgctgaatgacatcctgagccggctggacccccctgaggcagaggtgcagatcgacaggctgatcacaggccgcctgcagagcctgcagacctacgtgacacagcagctgatcagggcagcagagatcagagcctccgccaatctggccgccaccaagatgagcgagtgcgtgctgggacagtccaagagggtggacttttgtggcaagggctatcacctgatgtctttcccacagagcgcccctcacggcgtggtgtttctgcacgtgacctacgtgccaactcaggagaagaacttcaccacagcaccagccatctgccacgatggaaaggcacactttcctagggagggcgtgttcgtgtctaacggcacccactggtttgtgacacagcgcaatttctacgagccacagatcatcaccacagacaatacattcgtgagcggcaactgtgatgtggtgatcggcatcgtgaacaataccgtgtatgatccactgcagcccgagctggactcctttaaggaggagctggataagtacttcaagaatcacacctctcccgacgtggatctgggcgacatctccggcatcaatgcctctgtggtgaacatccagaaggagatcgaccggctgaacgaggtggccaagaatctgaacgagagcctgatcgatctgcaggagctgggcaagtatgagcagtacatcaagggctctggcagagagaacctgtatttccagggaggaggaggcagcggatacatccctgaggcaccaagggacggacaggcctacgtgcgcaaggatggcgagtgggtgctgctgtccacctttctgggccatcatcaccaccaccaccaccactga

SEQ ID NO: 1475 - DNA, 3846 bp, Artificial Sequence
  Description of Artificial Sequence: Synthetic polynucleotide
atgggcatcctgccaagcccaggaatgcccgccctgctgtctctggtgagcctgctgtccgtgctgctgatgggatgcgtggcagagacaggcacacagtgcgtgaacctgaccacaaggacccagctgccccctgcctataccaattctttcacacggggcgtgtactatcccgacaaggtgtttagaagctccgtgctgcactccacacaggatctgtttctgcctttcttttctaacgtgacctggttccacgccatccacgtgtccggcaccaatggcacaaagcggttcgacaatcccgtgctgccttttaacgatggcgtgtacttcgccagcaccgagaagtccaacatcatcagaggctggatctttggcaccacactggactctaagacacagagcctgctgatcgtgaacaatgccaccaacgtggtgatcaaggtgtgcgagttccagttttgtaatgatccattcctgggcgtgtactatcacaagaacaataagtcctggatggagtctgagtttcgcgtgtattctagcgccaacaattgcacatttgagtacgtgagccagcccttcctgatggacctggagggcaagcagggcaatttcaagaacctgagggagttcgtgtttaagaatatcgatggctacttcaagatctacagcaagcacaccccaatcaacctggtgcgcgacctgccacagggattctccgccctggagccactggtggatctgcccatcggcatcaacatcacccggtttcagacactgctggccctgcacagatcctacctgacaccaggcgactcctctagcggatggaccgcaggagctgccgcctactatgtgggctatctgcagccccggaccttcctgctgaagtacaacgagaatggcaccatcacagacgcagtggattgcgccctggaccccctgtctgagacaaagtgtacactgaagagctttaccgtggagaagggcatctatcagacaagcaatttcagggtgcagcctaccgagtccatcgtgcgctttcccaatatcacaaacctgtgcccttttggcgaggtgttcaacgccaccagattcgccagcgtgtacgcctggaatcggaagagaatctccaactgcgtggccgactattctgtgctgtacaactccgcctctttcagcacctttaagtgctatggcgtgtctcccacaaagctgaatgatctgtgctttaccaacgtgtacgccgatagcttcgtgatcaggggagacgaagtgagacagatcgcaccaggacagacaggaaagatcgcagactacaattataagctgcctgacgatttcaccggctgcgtgatcgcctggaactccaacaatctggattctaaagtgggcggcaactacaattatctgtacaggctgtttcgcaagtccaatctgaagccattcgagcgggacatctccacagagatctaccaggccggctctaccccctgcaatggcgtggagggctttaactgttatttccctctgcagtcttacggcttccagccaacaaacggcgtgggctatcagccctacagagtggtggtgctgtcctttgagctgctgcacgcaccagcaacagtgtgcggcccaaagaagtctaccaatctggtgaagaacaagtgcgtgaacttcaacttcaacggactgaccggcacaggcgtgctgaccgagagcaataagaagttcctgccttttcagcagttcggcagggacatcgcagataccacagacgccgtgcgcgaccctcagaccctggagatcctggacatcacaccatgcagcttcggcggcgtgtccgtgatcacaccaggcaccaatacatccaaccaggtggccgtgctgtatcaggacgtgaattgtaccgaggtgcccaaagcaatccacgcagatcagctgacccctacatggcgggtgtactctaccggcagcaacgtgttccagacaagagccggatgcctgatcggagcagagcacgtgaacaatagctatgagtgcgacatccctatcggcgccggcatctgtgccagctaccagacccagacaaactccccatctggagcaggctccgtggccagccagtccatcatcgcctataccatgagcctgggcgccgagaacagcgtggcctactccaacaattctatcgccatccctaccaacttcacaatcagcgtgaccacagagatcctgccagtgtctatgaccaagacaagcgtggactgcacaatgtatatctgtggcgatagcaccgagtgctccaacctgctgctgcagtacggctccttttgtacccagctgaatagagccctgacaggcatcgccgtggagcaggataagaacacacaggaggtgttcgcccaggtgaagcagatctacaagaccccacccatcaaggactttggcggcttcaacttcagccagatcctgcctgatccaagcaagccctccaagaggtcttttatcgaggacctgctgttcaacaaggtgaccctggccgatgccggcttcatcaagcagtatggagattgcctgggagacatcgcagcccgcgacctgatctgtgcccagaagtttaatggcctgaccgtgctgcctccactgctgacagatgagatgatcgcccagtacacatctgccctgctggccggcaccatcacaagcggatggaccttcggcgcaggagccgccctgcagatcccttttgccatgcagatggcctataggttcaacggcatcggcgtgacccagaatgtgctgtacgagaaccagaagctgatcgccaatcagtttaacagcgccatcggcaagatccaggactctctgtcctctacagccagcgccctgggcaagctgcaggatgtggtgaatcagaacgcccaggccctgaataccctggtgaagcagctgagctccaacttcggcgccatctctagcgtgctgaatgacatcctgagccggctggacccccctgaggcagaggtgcagatcgacaggctgatcacaggccgcctgcagagcctgcagacctacgtgacacagcagctgatcagggcagcagagatcagagcctccgccaatctggccgccaccaagatgagcgagtgcgtgctgggacagtccaagagggtggacttttgtggcaagggctatcacctgatgtctttcccacagagcgcccctcacggcgtggtgtttctgcacgtgacctacgtgccagcccaggagaagaacttcaccacagcaccagccatctgccacgatggaaaggcacactttcctagggagggcgtgttcgtgtctaacggcacccactggtttgtgacacagcgcaatttctacgagccacagatcatcaccacagacaatacattcgtgagcggcaactgtgatgtggtgatcggcatcgtgaacaataccgtgtatgatccactgcagcccgagctggactcctttaaggaggagctggataagtacttcaagaatcacacctctcccgacgtggatctgggcgacatctccggcatcaatgcctctgtggtgaacatccagaaggagatcgaccggctgaacgaggtggccaagaatctgaacgagagcctgatcgatctgcaggagctgggcaagtatgagcagtacatcaagggctctggcagagagaacctgtatttccagggaggaggaggcagcggatacatccctgaggcaccaagggacggacaggcctacgtgcgcaaggatggcgagtgggtgctgctgtccacctttctgggccatcatcaccaccaccaccaccactga

SEQ ID NO: 1476 - DNA, 3846 bp, Artificial Sequence
  Description of Artificial Sequence: Synthetic polynucleotide
atgggcatcctgccaagcccaggaatgcccgccctgctgtctctggtgagcctgctgtccgtgctgctgatgggatgcgtggcagagacaggcacacagtgcgtgaacctgaccacaaggacccagctgccccctgcctataccaattctttcacacggggcgtgtactatcccgacaaggtgtttagaagctccgtgctgcactccacacaggatctgtttctgcctttcttttctaacgtgacctggttccacgccatccacgtgtccggcaccaatggcacaaagcggttcgacaatcccgtgctgccttttaacgatggcgtgtacttcgccagcaccgagaagtccaacatcatcagaggctggatctttggcaccacactggactctaagacacagagcctgctgatcgtgaacaatgccaccaacgtggtgatcaaggtgtgcgagttccagttttgtaatgatccattcctgggcgtgtactatcacaagaacaataagtcctggatggagtctgagtttcgcgtgtattctagcgccaacaattgcacatttgagtacgtgagccagcccttcctgatggacctggagggcaagcagggcaatttcaagaacctgagggagttcgtgtttaagaatatcgatggctacttcaagatctacagcaagcacaccccaatcaacctggtgcgcgacctgccacagggattctccgccctggagccactggtggatctgcccatcggcatcaacatcacccggtttcagacactgctggccctgcacagatcctacctgacaccaggcgactcctctagcggatggaccgcaggagctgccgcctactatgtgggctatctgcagccccggaccttcctgctgaagtacaacgagaatggcaccatcacagacgcagtggattgcgccctggaccccctgtctgagacaaagtgtacactgaagagctttaccgtggagaagggcatctatcagacaagcaatttcagggtgcagcctaccgagtccatcgtgcgctttcccaatatcacaaacctgtgcccttttggcgaggtgttcaacgccaccagattcgccagcgtgtacgcctggaatcggaagagaatctccaactgcgtggccgactattctgtgctgtacaactccgcctctttcagcacctttaagtgctatggcgtgtctcccacaaagctgaatgatctgtgctttaccaacgtgtacgccgatagcttcgtgatcaggggagacgaagtgagacagatcgcaccaggacagacaggaaagatcgcagactacaattataagctgcctgacgatttcaccggctgcgtgatcgcctggaactccaacaatctggattctaaagtgggcggcaactacaattatctgtacaggctgtttcgcaagtccaatctgaagccattcgagcgggacatctccacagagatctaccaggccggctctaccccctgcaatggcgtggagggctttaactgttatttccctctgcagtcttacggcttccagccaacaaacggcgtgggctatcagccctacagagtggtggtgctgtcctttgagctgctgcacgcaccagcaacagtgtgcggcccaaagaagtctaccaatctggtgaagaacaagtgcgtgaacttcaacttcaacggactgaccggcacaggcgtgctgaccgagagcaataagaagttcctgccttttcagcagttcggcagggacatcgcagataccacagacgccgtgcgcgaccctcagaccctggagatcctggacatcacaccatgcagcttcggcggcgtgtccgtgatcacaccaggcaccaatacatccaaccaggtggccgtgctgtatcaggacgtgaattgtaccgaggtgcccgtggcaatccacgcagatcagctgacccctacatggcgggtgtactctaccggcagcaacgtgttccagacaagagccggatgcctgatcggagcagagcacgtgaacaatagctatgagtgcgacatccctatcggcgccggcatctgtgccagctaccagacccagacaaactccccatctggagcaggctccgtggccagccagtccatcatcgcctataccatgagcctgggcgccgagaacagcgtggcctactccaacaattctatcgccatccctaccaacttcacaatcagcgtgaccacagagatcctgccagtgtctatgaccaagacaagcgtggactgcacaatgtatatctgtggcgatagcaccgagtgctccaacctgctgctgcagtacggctccttttgtacccagctgaatagagccctgacaggcatcgccgtggagcaggataagaacacacaggaggtgttcgcccaggtgaagcagatctacaagaccccacccatcaaggactttggcggcttcaacttcagccagatcctgcctgatccaagcaagccctccaagaggtcttttatcgaggacctgctgttcaacaaggtgaccctggccgatgccggcttcatcaagcagtatggagattgcctgggagacatcgcagcccgcgacctgatctgtgcccagaagtttaatggcattaccgtgctgcctccactgctgacagatgagatgatcgcccagtacacatctgccctgctggccggcaccatcacaagcggatggaccttcggcgcaggagccgccctgcagatcccttttgccatgcagatggcctataggttcaacggcatcggcgtgacccagaatgtgctgtacgagaaccagaagctgatcgccaatcagtttaacagcgccatcggcaagatccaggactctctgtcctctacagccagcgccctgggcaagctgcaggatgtggtgaatcagaacgcccaggccctgaataccctggtgaagcagctgagctccaacttcggcgccatctctagcgtgctgaatgacatcctgagccggctggacccccctgaggcagaggtgcagatcgacaggctgatcacaggccgcctgcagagcctgcagacctacgtgacacagcagctgatcagggcagcagagatcagagcctccgccaatctggccgccaccaagatgagcgagtgcgtgctgggacagtccaagagggtggacttttgtggcaagggctatcacctgatgtctttcccacagagcgcccctcacggcgtggtgtttctgcacgtgacctacgtgccagcccaggagaagaacttcaccacagcaccagccatctgccacgatggaaaggcacactttcctagggagggcgtgttcgtgtctaacggcacccactggtttgtgacacagcgcaatttctacgagccacagatcatcaccacagacaatacattcgtgagcggcaactgtgatgtggtgatcggcatcgtgaacaataccgtgtatgatccactgcagcccgagctggactcctttaaggaggagctggataagtacttcaagaatcacacctctcccgacgtggatctgggcgacatctccggcatcaatgcctctgtggtgaacatccagaaggagatcgaccggctgaacgaggtggccaagaatctgaacgagagcctgatcgatctgcaggagctgggcaagtatgagcagtacatcaagggctctggcagagagaacctgtatttccagggaggaggaggcagcggatacatccctgaggcaccaagggacggacaggcctacgtgcgcaaggatggcgagtgggtgctgctgtccacctttctgggccatcatcaccaccaccaccaccactga

SEQ ID NO: 1477 - DNA, 3846 bp, Artificial Sequence
  Description of Artificial Sequence: Synthetic polynucleotide
atgggcatcctgccaagcccaggaatgcccgccctgctgtctctggtgagcctgctgtccgtgctgctgatgggatgcgtggcagagacaggcacacagtgcgtgaacctgaccacaaggacccagctgccccctgcctataccaattctttcacacggggcgtgtactatcccgacaaggtgtttagaagctccgtgctgcactccacacaggatctgtttctgcctttcttttctaacgtgacctggttccacgccatccacgtgtccggcaccaatggcacaaagcggttcgacaatcccgtgctgccttttaacgatggcgtgtacttcgccagcaccgagaagtccaacatcatcagaggctggatctttggcaccacactggactctaagacacagagcctgctgatcgtgaacaatgccaccaacgtggtgatcaaggtgtgcgagttccagttttgtaatgatccattcctgggcgtgtactatcacaagaacaataagtcctggatggagtctgagtttcgcgtgtattctagcgccaacaattgcacatttgagtacgtgagccagcccttcctgatggacctggagggcaagcagggcaatttcaagaacctgagggagttcgtgtttaagaatatcgatggctacttcaagatctacagcaagcacaccccaatcaacctggtgcgcgacctgccacagggattctccgccctggagccactggtggatctgcccatcggcatcaacatcacccggtttcagacactgctggccctgcacagatcctacctgacaccaggcgactcctctagcggatggaccgcaggagctgccgcctactatgtgggctatctgcagccccggaccttcctgctgaagtacaacgagaatggcaccatcacagacgcagtggattgcgccctggaccccctgtctgagacaaagtgtacactgaagagctttaccgtggagaagggcatctatcagacaagcaatttcagggtgcagcctaccgagtccatcgtgcgctttcccaatatcacaaacctgtgcccttttggcgaggtgttcaacgccaccagattcgccagcgtgtacgcctggaatcggaagagaatctccaactgcgtggccgactattctgtgctgtacaactccgcctctttcagcacctttaagtgctatggcgtgtctcccacaaagctgaatgatctgtgctttaccaacgtgtacgccgatagcttcgtgatcaggggagacgaagtgagacagatcgcaccaggacagacaggaaagatcgcagactacaattataagctgcctgacgatttcaccggctgcgtgatcgcctggaactccaacaatctggattctaaagtgggcggcaactacaattatctgtacaggctgtttcgcaagtccaatctgaagccattcgagcgggacatctccacagagatctaccaggccggctctaccccctgcaatggcgtggagggctttaactgttatttccctctgcagtcttacggcttccagccaacaaacggcgtgggctatcagccctacagagtggtggtgctgtcctttgagctgctgcacgcaccagcaacagtgtgcggcccaaagaagtctaccaatctggtgaagaacaagtgcgtgaacttcaacttcaacggactgaccggcacaggcgtgctgaccgagagcaataagaagttcctgccttttcagcagttcggcagggacatcgcagataccacagacgccgtgcgcgaccctcagaccctggagatcctggacatcacaccatgcagcttcggcggcgtgtccgtgatcacaccaggcaccaatacatccaaccaggtggccgtgctgtatcaggacgtgaattgtaccgaggtgcccgtggcaatccacgcagatcagctgacccctacatggcgggtgtactctaccggcagcaacgtgttccagacaagagccggatgcctgatcggagcagagcacgtgaacaatagctatgagtgcgacatccctatcggcgccggcatctgtgccagctaccagacccagacaaactccccatctggagcaggctccgtggccagccagtccatcatcgcctataccatgagcctgggcgccgagaacagcgtggcctactccaacaattctatcgccatccctaccaacttcacaatcagcgtgaccacagagatcctgccagtgtctatgaccaagacaagcgtggactgcacaatgtatatctgtggcgatagcaccgagtgctccaacctgctgctgcagtacggctccttttgtacccagctgaatagagccctgacaggcatcgccgtggagcaggataagaacacacaggaggtgttcgcccaggtgaagcagatctacaagaccccacccatcaaggactttggcggcttcaacttcagccagatcctgcctgatccaagcaagccctccaagaggtcttttatcgaggacctgctgttcaacaaggtgaccctggccgatgccggcttcatcaagcagtatggagattgcctgggagacatcgcagcccgcgacctgatctgtgcccagaagtttaatggcctgaccgtgctgcctccactgctgacagatgagatgatcgcccagtacacatctgccctgctggccggcaccatcacaagcggatggaccttcggcgcaggagccgccctgcagatcccttttgccatgcagatggcctataggttcaacggcatcggcgtgacccagaatgtgctgtacgagaaccagaagctgatcgccaatcagtttaacagcgccatcggcaagatccaggactctctgtcctctacagccagcgccctgggcaagctgcaggatgtggtgaatcagaacgcccaggccctgaataccctggtgaagcagctgagctccaacttcggcgccatctctagcgtgctgaatgacatcctgagccggctggaccgacctgaggcagaggtgcagatcgacaggctgatcacaggccgcctgcagagcctgcagacctacgtgacacagcagctgatcagggcagcagagatcagagcctccgccaatctggccgccaccaagatgagcgagtgcgtgctgggacagtccaagagggtggacttttgtggcaagggctatcacctgatgtctttcccacagagcgcccctcacggcgtggtgtttctgcacgtgacctacgtgccagcccaggagaagaacttcaccacagcaccagccatctgccacgatggaaaggcacactttcctagggagggcgtgttcgtgtctaacggcacccactggtttgtgacacagcgcaatttctacgagccacagatcatcaccacagacaatacattcgtgagcggcaactgtgatgtggtgatcggcatcgtgaacaataccgtgtatgatccactgcagcccgagctggactcctttaaggaggagctggataagtacttcaagaatcacacctctcccgacgtggatctgggcgacatctccggcatcaatgcctctgtggtgaacatccagaaggagatcgaccggctgaacgaggtggccaagaatctgaacgagagcctgatcgatctgcaggagctgggcaagtatgagcagtacatcaagggctctggcagagagaacctgtatttccagggaggaggaggcagcggatacatccctgaggcaccaagggacggacaggcctacgtgcgcaaggatggcgagtgggtgctgctgtccacctttctgggccatcatcaccaccaccaccaccactga

SEQ ID NO: 1478 - DNA, 3846 bp, Artificial Sequence
  Description of Artificial Sequence: Synthetic polynucleotide
atgggcatcctgccaagcccaggaatgcccgccctgctgtctctggtgagcctgctgtccgtgctgctgatgggatgcgtggcagagacaggcacacagtgcgtgaacctgaccacaaggacccagctgccccctgcctataccaattctttcacacggggcgtgtactatcccgacaaggtgtttagaagctccgtgctgcactccacacaggatctgtttctgcctttcttttctaacgtgacctggttccacgccatccacgtgtccggcaccaatggcacaaagcggttcgacaatcccgtgctgccttttaacgatggcgtgtacttcgccagcaccgagaagtccaacatcatcagaggctggatctttggcaccacactggactctaagacacagagcctgctgatcgtgaacaatgccaccaacgtggtgatcaaggtgtgcgagttccagttttgtaatgatccattcctgggcgtgtactatcacaagaacaataagtcctggatggagtctgagtttcgcgtgtattctagcgccaacaattgcacatttgagtacgtgagccagcccttcctgatggacctggagggcaagcagggcaatttcaagaacctgagggagttcgtgtttaagaatatcgatggctacttcaagatctacagcaagcacaccccaatcaacctggtgcgcgacctgccacagggattctccgccctggagccactggtggatctgcccatcggcatcaacatcacccggtttcagacactgctggccctgcacagatcctacctgacaccaggcgactcctctagcggatggaccgcaggagctgccgcctactatgtgggctatctgcagccccggaccttcctgctgaagtacaacgagaatggcaccatcacagacgcagtggattgcgccctggaccccctgtctgagacaaagtgtacactgaagagctttaccgtggagaagggcatctatcagacaagcaatttcagggtgcagcctaccgagtccatcgtgcgctttcccaatatcacaaacctgtgcccttttggcgaggtgttcaacgccaccagattcgccagcgtgtacgcctggaatcggaagagaatctccaactgcgtggccgactattctgtgctgtacaactccgcctctttcagcacctttaagtgctatggcgtgtctcccacaaagctgaatgatctgtgctttaccaacgtgtacgccgatagcttcgtgatcaggggagacgaagtgagacagatcgcaccaggacagacaggaaagatcgcagactacaattataagctgcctgacgatttcaccggctgcgtgatcgcctggaactccaacaatctggattctaaagtgggcggcaactacaattatctgtacaggctgtttcgcaagtccaatctgaagccattcgagcgggacatctccacagagatctaccaggccggctctaccccctgcaatggcgtggagggctttaactgttatttccctctgcagtcttacggcttccagccaacaaacggcgtgggctatcagccctacagagtggtggtgctgtcctttgagctgctgcacgcaccagcaacagtgtgcggcccaaagaagtctaccaatctggtgaagaacaagtgcgtgaacttcaacttcaacggactgaccggcacaggcgtgctgaccgagagcaataagaagttcctgccttttcagcagttcggcagggacatcgcagataccacagacgccgtgcgcgaccctcagaccctggagatcctggacatcacaccatgcagcttcggcggcgtgtccgtgatcacaccaggcaccaatacatccaaccaggtggccgtgctgtatcaggacgtgaattgtaccgaggtgcccgtggcaatccacgcagatcagctgacccctacatggcgggtgtactctaccggcagcaacgtgttccagacaagagccggatgcctgatcggagcagagcacgtgaacaatagctatgagtgcgacatccctatcggcgccggcatctgtgccagctaccagacccagacaaactccccatctggagcaggctccgtggccagccagtccatcatcgcctataccatgagcctgggcgccgagaacagcgtggcctactccaacaattctatcgccatccctaccaacttcacaatcagcgtgaccacagagatcctgccagtgtctatgaccaagacaagcgtggactgcacaatgtatatctgtggcgatagcaccgagtgctccaacctgctgctgcagtacggctccttttgtacccagctgaatagagccctgacaggcatcgccgtggagcaggataagaacacacaggaggtgttcgcccaggtgaagcagatctacaagaccccacccatcaaggactttggcggcttcaacttcagccagatcctgcctgatccaagcaagccctccaagaggtcttttatcgaggacctgctgttcaacaaggtgaccctggccgatgccggcttcatcaagcagtatggagattgcctgggagacatcgcagcccgcgacctgatctgtgcccagaagtttaatggcctgaccgtgctgcctccactgctgacagatgagatgatcgcccagtacacatctgccctgctggccggcaccatcacaagcggatggaccttcggcgcaggagccgccctgcagatcccttttgccatgcagatggcctataggttcaacggcatcggcgtgacccagaatgtgctgtacgagaaccagaagctgatcgccaatcagtttaacagcgccatcggcaagatccaggactctctgtcctctacagccagcgccctgggcaagctgcaggatgtggtgaatcagaacgcccaggccctggaaaccctggtgaagcagctgagctccaacttcggcgccatctctagcgtgctgaatgacatcctgagccggctggacccccctgaggcagaggtgcagatcgacaggctgatcacaggccgcctgcagagcctgcagacctacgtgacacagcagctgatcagggcagcagagatcagagcctccgccaatctggccgccaccaagatgagcgagtgcgtgctgggacagtccaagagggtggacttttgtggcaagggctatcacctgatgtctttcccacagagcgcccctcacggcgtggtgtttctgcacgtgacctacgtgccagcccaggagaagaacttcaccacagcaccagccatctgccacgatggaaaggcacactttcctagggagggcgtgttcgtgtctaacggcacccactggtttgtgacacagcgcaatttctacgagccacagatcatcaccacagacaatacattcgtgagcggcaactgtgatgtggtgatcggcatcgtgaacaataccgtgtatgatccactgcagcccgagctggactcctttaaggaggagctggataagtacttcaagaatcacacctctcccgacgtggatctgggcgacatctccggcatcaatgcctctgtggtgaacatccagaaggagatcgaccggctgaacgaggtggccaagaatctgaacgagagcctgatcgatctgcaggagctgggcaagtatgagcagtacatcaagggctctggcagagagaacctgtatttccagggaggaggaggcagcggatacatccctgaggcaccaagggacggacaggcctacgtgcgcaaggatggcgagtgggtgctgctgtccacctttctgggccatcatcaccaccaccaccaccactga

SEQ ID NO: 1479 - DNA, 3846 bp, Artificial Sequence
  Description of Artificial Sequence: Synthetic polynucleotide
atgggcatcctgccaagcccaggaatgcccgccctgctgtctctggtgagcctgctgtccgtgctgctgatgggatgcgtggcagagacaggcacacagtgcgtgaacctgaccacaaggacccagctgccccctgcctataccaattctttcacacggggcgtgtactatcccgacaaggtgtttagaagctccgtgctgcactccacacaggatctgtttctgcctttcttttctaacgtgacctggttccacgccatccacgtgtccggcaccaatggcacaaagcggttcgacaatcccgtgctgccttttaacgatggcgtgtacttcgccagcaccgagaagtccaacatcatcagaggctggatctttggcaccacactggactctaagacacagagcctgctgatcgtgaacaatgccaccaacgtggtgatcaaggtgtgcgagttccagttttgtaatgatccattcctgggcgtgtactatcacaagaacaataagtcctggatggagtctgagtttcgcgtgtattctagcgccaacaattgcacatttgagtacgtgagccagcccttcctgatggacctggagggcaagcagggcaatttcaagaacctgagggagttcgtgtttaagaatatcgatggctacttcaagatctacagcaagcacaccccaatcaacctggtgcgcgacctgccacagggattctccgccctgaaaccactggtggatctgcccatcggcatcaacatcacccggtttcagacactgctggccctgcacagatcctacctgacaccaggcgactcctctagcggatggaccgcaggagctgccgcctactatgtgggctatctgcagccccggaccttcctgctgaagtacaacgagaatggcaccatcacagacgcagtggattgcgccctggaccccctgtctgagacaaagtgtacactgaagagctttaccgtggagaagggcatctatcagacaagcaatttcagggtgcagcctaccgagtccatcgtgcgctttcccaatatcacaaacctgtgcccttttggcgaggtgttcaacgccaccagattcgccagcgtgtacgcctggaatcggaagagaatctccaactgcgtggccgactattctgtgctgtacaactccgcctctttcagcacctttaagtgctatggcgtgtctcccacaaagctgaatgatctgtgctttaccaacgtgtacgccgatagcttcgtgatcaggggagacgaagtgagacagatcgcaccaggacagacaggaaagatcgcagactacaattataagctgcctgacgatttcaccggctgcgtgatcgcctggaactccaacaatctggattctaaagtgggcggcaactacaattatctgtacaggctgtttcgcaagtccaatctgaagccattcgagcgggacatctccacagagatctaccaggccggctctaccccctgcaatggcgtggagggctttaactgttatttccctctgcagtcttacggcttccagccaacaaacggcgtgggctatcagccctacagagtggtggtgctgtcctttgagctgctgcacgcaccagcaacagtgtgcggcccaaagaagtctaccaatctggtgaagaacaagtgcgtgaacttcaacttcaacggactgaccggcacaggcgtgctgaccgagagcaataagaagttcctgccttttcagcagttcggcagggacatcgcagataccacagacgccgtgcgcgaccctcagaccctggagatcctggacatcacaccatgcagcttcggcggcgtgtccgtgatcacaccaggcaccaatacatccaaccaggtggccgtgctgtatcaggacgtgaattgtaccgaggtgcccgtggcaatccacgcagatcagctgacccctacatggcgggtgtactctaccggcagcaacgtgttccagacaagagccggatgcctgatcggagcagagcacgtgaacaatagctatgagtgcgacatccctatcggcgccggcatctgtgccagctaccagacccagacaaactccccatctggagcaggctccgtggccagccagtccatcatcgcctataccatgagcctgggcgccgagaacagcgtggcctactccaacaattctatcgccatccctaccaacttcacaatcagcgtgaccacagagatcctgccagtgtctatgaccaagacaagcgtggactgcacaatgtatatctgtggcgatagcaccgagtgctccaacctgctgctgcagtacggctccttttgtacccagctgaatagagccctgacaggcatcgccgtggagcaggataagaacacacaggaggtgttcgcccaggtgaagcagatctacaagaccccacccatcaaggactttggcggcttcaacttcagccagatcctgcctgatccaagcaagccctccaagaggtcttttatcgaggacctgctgttcaacaaggtgaccctggccgatgccggcttcatcaagcagtatggagattgcctgggagacatcgcagcccgcgacctgatctgtgcccagaagtttaatggcctgaccgtgctgcctccactgctgacagatgagatgatcgcccagtacacatctgccctgctggccggcaccatcacaagcggatggaccttcggcgcaggagccgccctgcagatcccttttgccatgcagatggcctataggttcaacggcatcggcgtgacccagaatgtgctgtacgagaaccagaagctgatcgccaatcagtttaacagcgccatcggcaagatccaggactctctgtcctctacagccagcgccctgggcaagctgcaggatgtggtgaatcagaacgcccaggccctgaataccctggtgaagcagctgagctccaacttcggcgccatctctagcgtgctgaatgacatcctgagccggctggacccccctgaggcagaggtgcagatcgacaggctgatcacaggccgcctgcagagcctgcagacctacgtgacacagcagctgatcagggcagcagagatcagagcctccgccaatctggccgccaccaagatgagcgagtgcgtgctgggacagtccaagagggtggacttttgtggcaagggctatcacctgatgtctttcccacagagcgcccctcacggcgtggtgtttctgcacgtgacctacgtgccagcccaggagaagaacttcaccacagcaccagccatctgccacgatggaaaggcacactttcctagggagggcgtgttcgtgtctaacggcacccactggtttgtgacacagcgcaatttctacgagccacagatcatcaccacagacaatacattcgtgagcggcaactgtgatgtggtgatcggcatcgtgaacaataccgtgtatgatccactgcagcccgagctggactcctttaaggaggagctggataagtacttcaagaatcacacctctcccgacgtggatctgggcgacatctccggcatcaatgcctctgtggtgaacatccagaaggagatcgaccggctgaacgaggtggccaagaatctgaacgagagcctgatcgatctgcaggagctgggcaagtatgagcagtacatcaagggctctggcagagagaacctgtatttccagggaggaggaggcagcggatacatccctgaggcaccaagggacggacaggcctacgtgcgcaaggatggcgagtgggtgctgctgtccacctttctgggccatcatcaccaccaccaccaccactga

SEQ ID NO: 1480 - DNA, 3846 bp, Artificial Sequence
  Description of Artificial Sequence: Synthetic polynucleotide
atgggcatcctgccaagcccaggaatgcccgccctgctgtctctggtgagcctgctgtccgtgctgctgatgggatgcgtggcagagacaggcacacagtgcgtgaacctgaccacaaggacccagctgccccctgcctataccaattctttcacacggggcgtgtactatcccgacaaggtgtttagaagctccgtgctgcactccacacaggatctgtttctgcctttcttttctaacgtgacctggttccacgcccttcacgtgaaaggcaccaatggcacaaagcggttcgacaatcccgtgctgccttttaacgatggcgtgtacttcgccgcgatcgagaagtccaacatcatcagaggctggatctttggcaccacactggactctaagacacagagcctgctgatcgtgaacaatgccaccaacgtggtgatcaaggtgtgcgagttccagttttgtaatgatccattcctgggcgtgtactatcacaagaacaataagtcctggatggagtctgagtttcgcgtgtattctagcgccaacaattgcacatttgagtacgtgagccagcccttcctgtatgacctgaacggcaagcagggcaatttccatcatctgagggagttcgtgtttaagaatatcgatggctacttcaagatctacagcaagtgggaaccaatcaacctggtgcgcgacctgccacagggattctccgccctggagccactggtggatctgcccatcggcatcaacatcacccggtttcagacaatactgtcactgagtagatcctaccgtacaccaggcgactcctctagcggatggaccgcaggagctgccgcctactatgtgggctatctgcagccccggaccttcctgctgaagtacaacgagaatggcaccatcacagacgcagtggattgcgccctggaccccctgtctgagacaaagtgtacactgaagagctttaccgtggagaagggcatctatcagacaagcaatttcagggtgcagcctaccgagtccatcgtgcgctttcccaatatcacaaacctgtgcccttttggcgaggtgttcaacgccaccagattcgccagcgtgtacgcctggaatcggaagagaatctccaactgcgtggccgactattctgtgctgtacaactccgcctctttcagcacctttaagtgctatggcgtgtctcccacaaagctgaatgatctgtgctttaccaacgtgtacgccgatagcttcgtgatcaggggagacgaagtgagacagatcgcaccaggacagacaggaaagatcgcagactacaattataagctgcctgacgatttcaccggctgcgtgatcgcctggaactccaacaatctggattctaaagtgggcggcaactacaattatctgtacaggctgtttcgcaagtccaatctgaagccattcgagcgggacatctccacagagatctaccaggccggctctaccccctgcaatggcgtggagggctttaactgttatttccctctgcagtcttacggcttccagccaacaaacggcgtgggctatcagccctacagagtggtggtgctgtcctttgagctgctgcacgcaccagcaacagtgtgcggcccaaagaagtctaccaatctggtgaagaacaagtgcgtgaacttcaacttcaacggactgaccggcacaggcgtgctgaccgagagcaataagaagttcctgccttttcagcagttcggcagggacatcgcagataccacagacgccgtgcgcgaccctcagaccctggagatcctggacatcacaccatgcagcttcggcggcgtgtccgtgatcacaccaggcaccaatacatccaaccaggtggccgtgctgtatcaggacgtgaattgtaccgaggtgcccgtggcaatccacgcagatcagctgacccctacatggcgggtgtactctaccggcagcaacgtgttccagacaagagccggatgcctgatcggagcagagcacgtgaacaatagctatgagtgcgacatccctatcggcgccggcatctgtgccagctaccagacccagacaaactccccatctggagcaggctccgtggccagccagtccatcatcgcctataccatgagcctgggcgccgagaacagcgtggcctactccaacaattctatcgccatccctaccaacttcacaatcagcgtgaccacagagatcctgccagtgtctatgaccaagacaagcgtggactgcacaatgtatatctgtggcgatagcaccgagtgctccaacctgctgctgcagtacggctccttttgtacccagctgaatagagccctgacaggcatcgccgtggagcaggataagaacacacaggaggtgttcgcccaggtgaagcagatctacaagaccccacccatcaaggactttggcggcttcaacttcagccagatcctgcctgatccaagcaagccctccaagaggtcttttatcgaggacctgctgttcaacaaggtgaccctggccgatgccggcttcatcaagcagtatggagattgcctgggagacatcgcagcccgcgacctgatctgtgcccagaagtttaatggcctgaccgtgctgcctccactgctgacagatgagatgatcgcccagtacacatctgccctgctggccggcaccatcacaagcggatggaccttcggcgcaggagccgccctgcagatcccttttgccatgcagatggcctataggttcaacggcatcggcgtgacccagaatgtgctgtacgagaaccagaagctgatcgccaatcagtttaacagcgccatcggcaagatccaggactctctgtcctctacagccagcgccctgggcaagctgcaggatgtggtgaatcagaacgcccaggccctgaataccctggtgaagcagctgagctccaacttcggcgccatctctagcgtgctgaatgacatcctgagccggctggacccccctgaggcagaggtgcagatcgacaggctgatcacaggccgcctgcagagcctgcagacctacgtgacacagcagctgatcagggcagcagagatcagagcctccgccaatctggccgccaccaagatgagcgagtgcgtgctgggacagtccaagagggtggacttttgtggcaagggctatcacctgatgtctttcccacagagcgcccctcacggcgtggtgtttctgcacgtgacctacgtgccagcccaggagaagaacttcaccacagcaccagccatctgccacgatggaaaggcacactttcctagggagggcgtgttcgtgtctaacggcacccactggtttgtgacacagcgcaatttctacgagccacagatcatcaccacagacaatacattcgtgagcggcaactgtgatgtggtgatcggcatcgtgaacaataccgtgtatgatccactgcagcccgagctggactcctttaaggaggagctggataagtacttcaagaatcacacctctcccgacgtggatctgggcgacatctccggcatcaatgcctctgtggtgaacatccagaaggagatcgaccggctgaacgaggtggccaagaatctgaacgagagcctgatcgatctgcaggagctgggcaagtatgagcagtacatcaagggctctggcagagagaacctgtatttccagggaggaggaggcagcggatacatccctgaggcaccaagggacggacaggcctacgtgcgcaaggatggcgagtgggtgctgctgtccacctttctgggccatcatcaccaccaccaccaccactga

SEQ ID NO: 1481 - DNA, 3846 bp, Artificial Sequence
  Description of Artificial Sequence: Synthetic polynucleotide
atgggcatcctgccaagcccaggaatgcccgccctgctgtctctggtgagcctgctgtccgtgctgctgatgggatgcgtggcagagacaggcacacagtgcgtgaacctgaccacaaggacccagctgccccctgcctataccaattctttcacacggggcgtgtactatcccgacaaggtgtttagaagctccgtgctgcactccacacaggatctgtttctgcctttcttttctaacgtgacctggttccacgccatccacgtgtccggcaccaatggcacaaagcggttcgacaatcccgtgctgccttttaacgatggcgtgtacttcgccagcaccgagaagtccaacatcatcagaggctggatctttggcaccacactggactctaagacacagagcctgctgatcgtgaacaatgccaccaacgtggtgatcaaggtgtgcgagttccagttttgtaatgatccattcctgggcgtgtactatcacaagaacaataagtcctggatggagtctgagtttcgcgtgtattctagcgccaacaattgcacatttgagtacgtgagccagcccttcctgatggacctggagggcaagcagggcaatttcaagaacctgagggagttcgtgtttaagaatatcgatggctacttcaagatctacagcaagcacaccccaatcaacctggtgcgcgacctgccacagggattctccgccctggagccactggtggatctgcccatcggcatcaacatcacccggtttcagacactgctggccctgcacagatcctacctgacaccaggcgactcctctagcggatggaccgcaggagctgccgcctactatgtgggctatctgcagccccggaccttcctgctgaagtacaacgagaatggcaccatcacagacgcagtggattgcgccctggaccccctgtctgagacaaagtgtacactgaagagctttaccgtggagaagggcatctatcagacaagcaatttcagggtgcagcctaccgagtccatcgtgcgctttcccaatatcacaaacctgtgcccttttggcgaggtgttcaacgccaccagattcgccagcgtgtacgcctggaatcggaagagaatctccaactgcgtggccgactattctgtgctgtacaactccgcctctttcagcacctttaagtgctatggcgtgtctcccacaaagctgaatgatctgtgctttaccaacgtgtacgccgatagcttcgtgatcaggggagacgaagtgagacagatcgcaccaggacagacaggaaagatcgcagactacaattataagctgcctgacgatttcaccggctgcgtgatcgcctggaactccaacaatctggattctaaagtgggcggcaactacaattatctgtacaggctgtttcgcaagtccaatctgaagccattcgagcgggacatctccacagagatctaccaggccggctctaccccctgcaatggcgtggagggctttaactgttatttccctctgcagtcttacggcttccagccaacaaacggcgtgggctatcagccctacagagtggtggtgctgtcctttgagctgctgcacgcaccagcaacagtgtgcggcccaaagaagtctaccaatctggtgaagaacaagtgcgtgaacttcaacttcaacggactgaccggcacaggcgtgctgaccgagagcaataagaagttcctgccttttcagcagttcggcagggacatcgcagataccacagacgccgtgcgcgaccctcagaccctggagatcctggacatcacaccatgcagcttcggcggcgtgtccgtgatcacaccaggcaccaatacatccaaccaggtggccgtgctgtatcaggacgtgaattgtaccgaggtgcccgtggcaatccacgcagatcagctgacccctacatggcgggtgtactctaccggcagcaacgtgttccagacaagagccggatgcctgatcggagcagagcacgtgaacaatagctatgagtgcgacatccctatcggcgccggcatctgtgccagctaccagacccagacaaactccccatctggagcaggctccgtggccagccagtccatcatcgcctataccatgagcctgggcgccgagaacagcgtggcctactccaacaattctatcgccatccctaccaacttcacaatcagcgtgaccacagagatcctgccagtgtctatgaccaagacaagcgtggactgcacaatgtatatctgtggcgatagcaccgagtgctccaacctgctgctgcagtacggctccttttgtacccagctgaatagagccctgacaggcatcgccgtggagcaggataagaacacacaggaggtgttcgcccaggtgaagcagatctacaagaccccacccatcaaggactttggcggcttcaacttcagccagatcctgcctgatccaagcaagccctccaagaggtcttttatcgaggacctgctgttcaacaaggtgaccctggccgatgccggcttcatcaagcagtatggagattgcctgggagacatcgcagcccgcgacctgatctgtgcccagaagtttaatggcctgaccgtgctgcctccactgctgacagatgagatgatcgcccagtacacatctgccctgctggccggcaccatcacaagcggatggaccttcggcgcaggagccgccctgcagatcccttttgccatgcagatggcctataggttcaacggcatcggcgtgacccagaatgtgctgtacgagaaccagaagctgatcgccaatcagtttaacagcgccatcggcaagatccaggactctctgtcctctacagccagcgccctgggcaagctgcaggatgtggtgaatcagaacgcccaggccctgaataccctggtgaagcagctgagctccaacttcggcgccatctctagcgtgctgaatgacatcctgagccggctggacccccctgaggcagaggtgcagatcgacaggctgatcacaggccgcctgcagagcctgcagacctacgtgacacagcagctgatcagggcagcagagatcagagcctccgccaatctggccgccaccaagatgagcgagtgcgtgctgggacagtccaagagggtggacttttgtggcaagggctatcacctgatgtctttcccacagagcgcccctcacggcgtggtgtttctgcacgtgacctacgtgccagcccaggagaagaacttcaccacagcaccagccatctgccacgatggaaaggcatattttcctagggagggcgtgttcgtgtctaacggcaccgaatggtttattacacagcgcaatttctacgagccacagatcatcaccacagacaatacattcgtgagcggcaactgtgatgtggtgatcggcatcgtgaacaataccgtgtatgatccactgcagcccgagctggactcctttaaggaggagctggataagtacttcaagaatcacacctctcccgacgtggatctgggcgacatctccggcatcaatgcctctgtggtgaacatccagaaggagatcgaccggctgaacgaggtggccaagaatctgaacgagagcctgatcgatctgcaggagctgggcaagtatgagcagtacatcaagggctctggcagagagaacctgtatttccagggaggaggaggcagcggatacatccctgaggcaccaagggacggacaggcctacgtgcgcaaggatggcgagtgggtgctgctgtccacctttctgggccatcatcaccaccaccaccaccactga

SEQ ID NO: 1482 - DNA, 3846 bp, Artificial Sequence
  Description of Artificial Sequence: Synthetic polynucleotide
atgggcatcctgccaagcccaggaatgcccgccctgctgtctctggtgagcctgctgtccgtgctgctgatgggatgcgtggcagagacaggcacacagtgcgtgaacctgaccacaaggacccagctgccccctgcctataccaattctttcacacggggcgtgtactatcccgacaaggtgtttagaagcgatgtgctgcactccacacaggatctgtttctgcctttcttttctaacgtgacctggttccacgccatccacgtgtccggcaccaatggcacaaaggacttcgacaatcccgtgctgccttttaacgatggcgtgtacttcgccagcaccgagaagtccaacatcatcagaggctggatctttggcaccacactggactctaagacacagagcctgctgatcgtgaacaatgccaccaacgtggtgatcaaggtgtgcgagttccagttttgtgaaaatccattcctgggcgtgtactatcacaagaacaataagtcctggatggagaaagagtttcgcgtgtattctagcgccaacaattgcacatttgagtacgtgagccagcccttcctgatggacctggggggcaagcagggcaatttcaagaacctgagggagttcgtgtttaagaatatcgatggctacttcaagatctacagcaagcacaccccaatcaacctggtgcgcgacctgccacagggattctccgccctggagccactgatggatctgcccatcggcatcaacatcacccggtttcagacactgctggccctgcacagatcctacctgacaccaggcgactcctctagcggatggaccgcaggagctgccgcctactatgtgggctatctgcagccccggaccttcctgctgaagtacaacgagaatggcaccatcacagacgcagtggattgcgccctggaccccctgtctgagacaaagtgtacactgaagagctttaccgtggagaagggcatctatcagacaagcaatttcagggtgcagcctaccgagtccatcgtgcgctttcccaatatcacaaacctgtgcccttttggcgaggtgttcaacgccaccagattcgccagcgtgtacgcctggaatcggaagagaatctccaactgcgtggccgactattctgtgctgtacaactccgcctctttcagcacctttaagtgctatggcgtgtctcccacaaagctgaatgatctgtgctttaccaacgtgtacgccgatagcttcgtgatcaggggagacgaagtgagacagatcgcaccaggacagacaggaaagatcgcagactacaattataagctgcctgacgatttcaccggctgcgtgatcgcctggaactccaacaatctggattctaaagtgggcggcaactacaattatctgtacaggctgtttcgcaagtccaatctgaagccattcgagcgggacatctccacagagatctaccaggccggctctaccccctgcaatggcgtggagggctttaactgttatttccctctgcagtcttacggcttccagccaacaaacggcgtgggctatcagccctacagagtggtggtgctgtcctttgagctgctgcacgcaccagcaacagtgtgcggcccaaagaagtctaccaatctggtgaagaacaagtgcgtgaacttcaacttcaacggactgaccggcacaggcgtgctgaccgagagcaataagaagttcctgccttttcagcagttcggcagggacatcgcagataatacagacgccgtgcgcgaccctcagaccctggagatcctggacatcacaccatgcagcttcggcggcgtgtccgtgatcacaccaggcaccaatacatccaaccaggtggccgtgctgtatcaggacgtgaattgtaccgaggtgcccaatgcaatccacgcagatcagctgacccctacatggcgggtgtactctaccggcagcaacgtgttccagacaagagccggatgcctgatcggagcagagcacgtgaacaatagctatgagtgcgacatccctatcggcgccggcatctgtgccagctaccagacccagacaaactccccatctggagcaggctccgtggccagccagtccatcatcgcctataccatgagcctgggcgccgagaacagcgtggcctactccaacaattctatcgccatccctaccaacttcacaatcagcgtgaccacagagatcctgccagtgtctatgaccaagacaagcgtggactgcacaatgtatatctgtggcgatagcaccgagtgctccaacctgctgctgcagtacggctccttttgtacccagctgaatagagccctgcaaggcatcgcccaagagcaggataagaacacacaggaggtgttcgcccaggtgaagcagatctacaagaccccacccatcaaggactttggcggcttcaacttcagccagatcctgcctgatccaagcaagccctccaagaggtcttttatcgaggacctgctgttcaacaaggtgaccctggccgatgccggcttcatcaagcagtatggagattgcctgggagacatcgcagcccgcgacctgatctgtgcccagaagtttaatggcctgaccgtgctgcctccactgctgacagatgagatgatcgcccagtacacatctgccctgctggccggcaccatcacaagcggatggaccttcggcgcaggagccgccctgcagatcccttttgccatgcagatggcctataggttcaacggcatcggcgtgacccagaatgtgctgtacgagaaccagaagctgatcgccaatcagtttaacaaagccatcggcaagatccaggactctctgtcctctacagccagcgccctgggcaagctgcaggatgtggtgaatcagaacgcccaggccctgaataccctggtgaagcagctgagctccaacttcggcgccatctctagcgtgctgaatgacatcctgagccggctggacccccctgaggcagaggtgcagatcgacaggctgatcacaggccgcctgcagagcctgcagacctacgtgacacagcagctgatcagggcagcagagatcagagcctccgccaatctggccgccaccaagatgagcgagtgcgtgctgggacagtccaagagggtggacttttgtggcaagggctatcacctgatgtctttcccacagagcgcccctcacggcgtggtgtttctgcacgtgacctacgtgccagcccaggagaagaacttcaccacagcaccagccatctgccacgatggaaaggcattttttcctagggagggcgtgttcgtgtctaacggcacccaatggtttgtgacacagcgcaatttctacgagccacagatcatcaccacagacaatacattcgtgagcggcaactgtgatgtggtgatcggcatcgtgaacaataccgtgtatgatccactgcagcccgagctggactcctttaaggaggagctggataagtacttcaagaatcacacctctcccgacgtggatctgggcgacatctccggcatcaatgcctctgtggtgaacatccagaaggagatcgaccggctgaacgaggtggccaagaatctgaacgagagcctgatcgatctgcaggagctgggcaagtatgagcagtacatcaagggctctggcagagagaacctgtatttccagggaggaggaggcagcggatacatccctgaggcaccaagggacggacaggcctacgtgcgcaaggatggcgagtgggtgctgctgtccacctttctgggccatcatcaccaccaccaccaccactga

SEQ ID NO: 1483 - DNA, 3846 bp, Artificial Sequence
  Description of Artificial Sequence: Synthetic polynucleotide
atgggcatcctgccaagcccaggaatgcccgccctgctgtctctggtgagcctgctgtccgtgctgctgatgggatgcgtggcagagacaggcacacagtgcgtgaacctgaccacaaggacccagctgccccctgcctataccaattctttcacacggggcgtgtactatcccgacaaggtgtttagaagctccgtgctgcactccacacaggatctgtttctgcctttcttttctaacgtgacctggttccacgccatccacgtgtccggcaccaatggcacaaagcggttcgacaatcccgtgctgccttttaacgatggcgtgtacttcgccagcaccgagaagtccaacatcatcagaggctggatctttggcaccacactggactctaagacacagagcctgctgatcgtgaacaatgccaccaacgtggtgatcaaggtgtgcgagttccagttttgtaatgatccattcctgggcgtgtactatcacaagaacaataagtcctggatggagtctgagtttcgcgtgtattctagcgccaacaattgcacatttgagtacgtgagccagcccttcctgatggacctggagggcaagcagggcaatttcaagaacctgagggagttcgtgtttaagaatatcgatggctacttcaagatctacagcaagcacaccccaatcaacctggtgcgcgacctgccacagggattctccgccctggagccactggtggatctgcccatcggcatcaacatcacccggtttcagacactgctggccctgcacagatcctacctgacaccaggcgactcctctagcggatggaccgcaggagctgccgcctactatgtgggctatctgcagccccggaccttcctgctgaagtacaacgagaatggcaccatcacagacgcagtggattgcgccctggaccccctgtctgagacaaagtgtacactgaagagctttaccgtggagaagggcatctatcagacaagcaatttcagggtgcagcctaccgagtccatcgtgcgctttcccaatatcacaaacctgtgcccttttggcgaggtgttcaacgccaccagattcgccagcgtgtacgcctggaatcggaagagaatctccaactgcgtggccgactattctgtgctgtacaactccgcctctttcagcacctttaagtgctatggcgtgtctcccacaaagctgaatgatctgtgctttaccaacgtgtacgccgatagcttcgtgatcaggggagacgaagtgagacagatcgcaccaggacagacaggaaagatcgcagactacaattataagctgcctgacgatttcaccggctgcgtgatcgcctggaactccaacaatctggattctaaagtgggcggcaactacaattatctgtacaggctgtttcgcaagtccaatctgaagccattcgagcgggacatctccacagagatctaccaggccggctctaccccctgcaatggcgtggagggctttaactgttatttccctctgcagtcttacggcttccagccaacaaacggcgtgggctatcagccctacagagtggtggtgctgtcctttgagctgctgcacgcaccagcaacagtgtgcggcccaaagaagtctaccaatctggtgaagaacaagtgcgtgaacttcaacttcaacggactgaccggcacaggcgtgctgaccgagagcaataagaagttcctgccttttcagcagttcggcagggacatcgcagataccacagacgccgtgcgcgaccctcagaccctggagatcctggacatcacaccatgcagcttcggcggcgtgtccgtgatcacaccaggcaccaatacatccaaccaggtggccgtgctgtatcaggacgtgaattgtaccgaggtgcccgtggcaatccacgcagatcagctgacccctacatggcgggtgtactctaccggcagcaacgtgttccagacaagagccggatgcctgatcggagcagagcacgtgaacaatagctatgagtgcgacatccctatcggcgccggcatctgtgccagctaccagacccagacaaactccccatctggagcaggctccgtggccagccagtccatcatcgcctataccatgagcctgggcgccgagaaccccgtggcctactccaacaattctatcgccatccctaccaacttcacaatcagcgtgaccacagagatcctgccagtgtctatgaccaagacaagcgtggactgcacaatgtatatctgtggcgatagcaccgagtgctccaacctgctgctgcagtacggctccttttgtacccagctgaatagagccctgacaggcatcgccgtggagcaggataagaacacacaggaggtgttcgcccaggtgaagcagatctacaagaccccacccatcaaggactttggcggcttcaacttcagccagatcctgcctgatccaagcaagccctccaagaggtcttttatcgaggacctgctgttcaacaaggtgaccctggccgatgccggcttcatcaagcagtatggagattgcctgggagacatcgcagcccgcgacctgatctgtgcccagaagtttaatggcctgaccgtgctgcctccactgctgacagatgagatgatcgcccagtacacatctgccctgctggccggcaccatcacaagcggatggaccttcggcgcaggagccgccctgcagatcccttttgccatgcagatggcctataggttcaacggcatcggcgtgacccagaatgtgctgtacgagaaccagaagctgatcgccaatcagtttaacagcgccatcggcaagatccaggactctctgtcctctacagccagcgccctgggcaagctgcaggatgtggtgaatcagaacgcccaggccctgaataccctggtgaagcagctgagctccaacttcggcgccatctctagcgtgctgaatgacatcctgagccggctggacccccctgaggcagaggtgcagatcgacaggctgatcacaggccgcctgcagagcctgcagacctacgtgacacagcagctgatcagggcagcagagatcagagcctccgccaatctggccgccaccaagatgagcgagtgcgtgctgggacagtccaagagggtggacttttgtggcaagggctatcacctgatgtctttcccacagagcgcccctcacggcgtggtgtttctgcacgtgacctacgtgccagcccaggagaagaacttcaccacagcaccagccatctgccacgatggaaaggcacactttcctagggagggcgtgttcgtgtctaacggcacccactggtttgtgacacagcgcaatttctacgagccacagatcatcaccacagacaatacattcgtgagcggcaactgtgatgtggtgatcggcatcgtgaacaataccgtgtatgatccactgcagcccgagctggactcctttaaggaggagctggataagtacttcaagaatcacacctctcccgacgtggatctgggcgacatctccggcatcaatgcctctgtggtgaacatccagaaggagatcgaccggctgaacgaggtggccaagaatctgaacgagagcctgatcgatctgcaggagctgggcaagtatgagcagtacatcaagggctctggcagagagaacctgtatttccagggaggaggaggcagcggatacatccctgaggcaccaagggacggacaggcctacgtgcgcaaggatggcgagtgggtgctgctgtccacctttctgggccatcatcaccaccaccaccaccactga

SEQ ID NO: 1484 - DNA, 3846 bp, Artificial Sequence
  Description of Artificial Sequence: Synthetic polynucleotide
atgggcatcctgccaagcccaggaatgcccgccctgctgtctctggtgagcctgctgtccgtgctgctgatgggatgcgtggcagagacaggcacacagtgcgtgaacctgaccacaaggacccagctgccccctgcctataccaattctttcacacggggcgtgtactatcccgacaaggtgtttagaagctccgtgctgcactccacacaggatctgtttctgcctttcttttctaacgtgacctggttccacgccatccacgtgtccggcaccaatggcacaaagcggttcgacaatcccgtgctgccttttaacgatggcgtgtacttcgccagcaccgagaagtccaacatcatcagaggctggatctttggcaccacactggactctaagacacagagcctgctgatcgtgaacaatgccaccaacgtggtgatcaaggtgtgcgagttccagttttgtaatgatccattcctgggcgtgtactatcacaagaacaataagtcctggatggagtacgagtttcgcgtgtattctagcgccaacaattgcacatttgagtacgtgagccagcccttcctgatggacctggagggcaagcagggcaatttcaagaacctgagggagttcgtgtttaagaatatcgatggctacttcaagatctacagcaagcacaccccaatcaacctggtgcgcgacctgccacagggattctccgccctggagccactggtggatctgcccatcggcatcaacatcacccggtttcagacactgctggccctgcacagatcctacctgacaccaggcgactcctctagcggatggaccgcaggagctgccgcctactatgtgggctatctgcagccccggaccttcctgctgaagtacaacgagaatggcaccatcacagacgcagtggattgcgccctggaccccctgtctgagacaaagtgtacactgaagagctttaccgtggagaagggcatctatcagacaagcaatttcagggtgcagcctaccgagtccatcgtgcgctttcccaatatcacaaacctgtgcccttttggcgaggtgttcaacgccaccagattcgccagcgtgtacgcctggaatcggaagagaatctccaactgcgtggccgactattctgtgctgtacaactccgcctctttcagcacctttaagtgctatggcgtgtctcccacaaagctgaatgatctgtgctttaccaacgtgtacgccgatagcttcgtgatcaggggagacgaagtgagacagatcgcaccaggacagacaggaaagatcgcagactacaattataagctgcctgacgatttcaccggctgcgtgatcgcctggaactccaacaatctggattctaaagtgggcggcaactacaattatctgtacaggctgtttcgcaagtccaatctgaagccattcgagcgggacatctccacagagatctaccaggccggctctaccccctgcaatggcgtggagggctttaactgttatttccctctgcagtcttacggcttccagccaacaaacggcgtgggctatcagccctacagagtggtggtgctgtcctttgagctgctgcacgcaccagcaacagtgtgcggcccaaagaagtctaccaatctggtgaagaacaagtgcgtgaacttcaacttcaacggactgaccggcacaggcgtgctgaccgagagcaataagaagttcctgccttttcagcagttcggcagggacatcgcagataccacagacgccgtgcgcgaccctcagaccctggagatcctggacatcacaccatgcagcttcggcggcgtgtccgtgatcacaccaggcaccaatacatccaaccaggtggccgtgctgtatcaggacgtgaattgtaccgaggtgcccgtggcaatccacgcagatcagctgacccctacatggcgggtgtactctaccggcagcaacgtgttccagacaagagccggatgcctgatcggagcagagcacgtgaacaatagctatgagtgcgacatccctatcggcgccggcatctgtgccagctaccagacccagacaaactccccatctggagcaggctccgtggccagccagtccatcatcgcctataccatgagcctgggcgccgagaacagcgtggcctactccaacaattctatcgccatccctaccaacttcacaatcagcgtgaccacagagatcctgccagtgtctatgaccaagacaagcgtggactgcacaatgtatatctgtggcgatagcaccgagtgctccaacctgctgctgcagtacggctccttttgtacccagctgaatagagccctgacaggcatcgccgtggagcaggataagaacacacaggaggtgttcgcccaggtgaagcagatctacaagaccccacccatcaaggactttggcggcttcaacttcagccagatcctgcctgatccaagcaagccctccaagaggtcttttatcgaggacctgctgttcaacaaggtgaccctggccgatgccggcttcatcaagcagtatggagattgcctgggagacatcgcagcccgcgacctgatctgtgcccagaagtttaatggcctgaccgtgctgcctccactgctgacagatgagatgatcgcccagtacacatctgccctgctggccggcaccatcacaagcggatggaccttcggcgcaggagccgccctgcagatcccttttgccatgcagatggcctataggttcaacggcatcggcgtgacccagaatgtgctgtacgagaaccagaagctgatcgccaatcagtttaacagcgccatcggcaagatccaggactctctgtcctctacagccagcgccctgggcaagctgcaggatgtggtgaatcagaacgcccaggccctgaataccctggtgaagcagctgagctccaacttcggcgccatctctagcgtgctgaatgacatcctgagccggctggacccccctgaggcagaggtgcagatcgacaggctgatcacaggccgcctgcagagcctgcagacctacgtgacacagcagctgatcagggcagcagagatcagagcctccgccaatctggccgccaccaagatgagcgagtgcgtgctgggacagtccaagagggtggacttttgtggcaagggctatcacctgatgtctttcccacagagcgcccctcacggcgtggtgtttctgcacgtgacctacgtgccagcccaggagaagaacttcaccacagcaccagccatctgccacgatggaaaggcacactttcctagggagggcgtgttcgtgtctaacggcacccactggtttgtgacacagcgcaatttctacgagccacagatcatcaccacagacaatacattcgtgagcggcaactgtgatgtggtgatcggcatcgtgaacaataccgtgtatgatccactgcagcccgagctggactcctttaaggaggagctggataagtacttcaagaatcacacctctcccgacgtggatctgggcgacatctccggcatcaatgcctctgtggtgaacatccagaaggagatcgaccggctgaacgaggtggccaagaatctgaacgagagcctgatcgatctgcaggagctgggcaagtatgagcagtacatcaagggctctggcagagagaacctgtatttccagggaggaggaggcagcggatacatccctgaggcaccaagggacggacaggcctacgtgcgcaaggatggcgagtgggtgctgctgtccacctttctgggccatcatcaccaccaccaccaccactga

SEQ ID NO: 1485 - DNA, 3846 bp, Artificial Sequence
  Description of Artificial Sequence: Synthetic polynucleotide
atgggcatcctgccaagcccaggaatgcccgccctgctgtctctggtgagcctgctgtccgtgctgctgatgggatgcgtggcagagacaggcacacagtgcgtgaacctgaccacaaggacccagctgccccctgcctataccaattctttcacacggggcgtgtactatcccgacaaggtgtttagaagctccgtgctgcactccacacaggatctgtttctgcctttcttttctaacgtgacctggttccacgccatccacgtgtccggcaccaatggcacaaagcggttcgacaatcccgtgctgccttttaacgatggcgtgtacttcgccagcaccgagaagtccaacatcatcagaggctggatctttggcaccacactggactctaagacacagagcctgctgatcgtgaacaatgccaccaacgtggtgatcaaggtgtgcgagttccagttttgtaatgatccattcctgggcgtgtactatcacaagaacaataagtcctggatggagtctgagtttcgcgtgtattctagcgccaacaattgcacatttgagtacgtgagccagcccttcctgatggacctggagggcaagcagggcaatttcaagaacctgagggagttcgtgtttaagaatatcgatggctacttcaagatctacagcaagcacaccccaatcaacctggtgcgcgacctgccacagggattctccgccctggagccactggtggatctgcccatcggcatcaacatcacccggtttcagacactgctggccctgcacagatcctacctgacaccaggcgactcctctagcggatggaccgcaggagctgccgcctactatgtgggctatctgcagccccggaccttcctgctgaagtacaacgagaatggcaccatcacagacgcagtggattgcgccctggaccccctgtctgagacaaagtgtacactgaagagctttaccgtggagaagggcatctatcagacaagcaatttcagggtgcagcctaccgagtccatcgtgcgctttcccaatatcacaaacctgtgcccttttggcgaggtgttcaacgccaccagattcgccagcgtgtacgcctggaatcggaagagaatctccaactgcgtggccgactattctgtgctgtacaactccgcctctttcagcacctttaagtgctatggcgtgtctcccacaaagctgaatgatctgtgctttaccaacgtgtacgccgatagcttcgtgatcaggggagacgaagtgagacagatcgcaccaggacagacaggaaagatcgcagactacaattataagctgcctgacgatttcaccggctgcgtgatcgcctggaactccaacaatctggattctaaagtgggcggcaactacaattatctgtacaggctgtttcgcaagtccaatctgaagccattcgagcgggacatctccacagagatctaccaggccggctctaccccctgcaatggcgtggagggctttaactgttatttccctctgcagtcttacggcttccagccaacaaacggcgtgggctatcagccctacagagtggtggtgctgtcctttgagctgctgcacgcaccagcaacagtgtgcggcccaaagaagtctaccaatctggtgaagaacaagtgcgtgaacttcaacttcaacggactgaccggcacaggcgtgctgaccgagagcaataagaagttcctgccttttcagcagttcggcagggacatcgcagataccacagacgccgtgcgcgaccctcagaccctggagatcctggacatcacaccatgcagcttcggcggcgtgtccgtgatcacaccaggcaccaatacatccaaccaggtggccgtgctgtatcaggacgtgaattgtaccgaggtgcccgtggcaatccacgcagatcagctgacccctacatggcgggtgtactctaccggcagcaacgtgttccagacaagagccggatgcctgatcggagcagagcacgtgaacaatagctatgagtgcgacatccctatcggcgccggcatctgtgccagctaccagacccagacaaactccccatctggagcaggctccgtggccagccagtccatcatcgcctataccatgagcctgggcgccgagaacagcgtggcctactccaacaattctatcgccatccctaccaacttcacaatcagcgtgaccacagagatcctgccagtgtctatgaccaagacaagcgtggactgcacaatgtatatctgtggcgatagcaccgagtgctccaacctgctgctgcagtacggctccttttgtacccagctgaatagagccctgacaggcatcgccgtggagcaggataagaacacacaggaggtgttcgcccaggtgaagcagatctacaagaccccacccatcaaggactttggcggcttcaacttcagccagatcctgcctgatccaagcaagccctccaagaggtcttttatcgaggacctgctgttcaacaaggtgaccctggccgatgccggcttcatcaagcagtatggagattgcactggagacatcgcagcccgcgacctgatctgtgcccagaagtttaatggcctgaccgtgctgcctccactgctgacagatgagatgatcgcccagtacacatctgccctgctggccggcaccatcacaagcggatggaccttcggcgcaggagccgccctgcagatcccttttgccatgcagatggcctataggttcaacggcatcggcgtgacccagaatgtgctgtacgagaaccagaagctgatcgccaatcagtttaacagcgccatcggcaagatccaggactctctgtcctctacagccagcgccctgggcaagctgcaggatgtggtgaatcagaacgcccaggccctgaataccctggtgaagcagctgagctccaacttcggcgccatctctagcgtgctgaatgacatcctgagccggctggacccccctgaggcagaggtgcagatcgacaggctgatcacaggccgcctgcagagcctgcagacctacgtgacacagcagctgatcagggcagcagagatcagagcctccgccaatctggccgccaccaagatgagcgagtgcgtgctgggacagtccaagagggtggacttttgtggcaagggctatcacctgatgtctttcccacagagcgcccctcacggcgtggtgtttctgcacgtgacctacgtgccagcccaggagaagaacttcaccacagcaccagccatctgccacgatggaaaggcacactttcctagggagggcgtgttcgtgtctaacggcacccactggtttgtgacacagcgcaatttctacgagccacagatcatcaccacagacaatacattcgtgagcggcaactgtgatgtggtgatcggcatcgtgaacaataccgtgtatgatccactgcagcccgagctggactcctttaaggaggagctggataagtacttcaagaatcacacctctcccgacgtggatctgggcgacatctccggcatcaatgcctctgtggtgaacatccagaaggagatcgaccggctgaacgaggtggccaagaatctgaacgagagcctgatcgatctgcaggagctgggcaagtatgagcagtacatcaagggctctggcagagagaacctgtatttccagggaggaggaggcagcggatacatccctgaggcaccaagggacggacaggcctacgtgcgcaaggatggcgagtgggtgctgctgtccacctttctgggccatcatcaccaccaccaccaccactga

SEQ ID NO: 1486 - DNA, 3846 bp, Artificial Sequence
  Description of Artificial Sequence: Synthetic polynucleotide
atgggcatcctgccaagcccaggaatgcccgccctgctgtctctggtgagcctgctgtccgtgctgctgatgggatgcgtggcagagacaggcacacagtgcgtgaacctgaccacaaggacccagctgccccctgcctataccaattctttcacacggggcgtgtactatcccgacaaggtgtttagaagctccgtgctgcactccacacaggatctgtttctgcctttcttttctaacgtgacctggttccacgccatccacgtgtccggcaccaatggcacaaagcggttcgacaatcccgtgctgccttttaacgatggcgtgtacttcgccagcaccgagaagtccaacatcatcagaggctggatctttggcaccacactggactctaagacacagagcctgctgatcgtgaacaatgccaccaacgtggtgatcaaggtgtgcgagttccagttttgtaatgatccattcctgggcgtgtactatcacaagaacaataagtcctggatggagtctgagtttcgcgtgtattctagcgccaacaattgcacatttgagtacgtgagccagcccttcctgatggacctggagggcaagcagggcaatttccataacctgagggagttcgtgtttaagaatatcgatggctacttcaagatctacagcaagcacaccccaatcaacctggtgcgcgacctgccacagggattctccgccctggagccactggtggatctgcccatcggcatcaacatcacccggtttcagacactgctggccctgcacagatcctacctgacaccaggcgactcctctagcggatggaccgcaggagctgccgcctactatgtgggctatctgcagccccggaccttcctgctgaagtacaacgagaatggcaccatcacagacgcagtggattgcgccctggaccccctgtctgagacaaagtgtacactgaagagctttaccgtggagaagggcatctatcagacaagcaatttcagggtgcagcctaccgagtccatcgtgcgctttcccaatatcacaaacctgtgcccttttggcgaggtgttcaacgccaccagattcgccagcgtgtacgcctggaatcggaagagaatctccaactgcgtggccgactattctgtgctgtacaactccgcctctttcagcacctttaagtgctatggcgtgtctcccacaaagctgaatgatctgtgctttaccaacgtgtacgccgatagcttcgtgatcaggggagacgaagtgagacagatcgcaccaggacagacaggaaagatcgcagactacaattataagctgcctgacgatttcaccggctgcgtgatcgcctggaactccaacaatctggattctaaagtgggcggcaactacaattatctgtacaggctgtttcgcaagtccaatctgaagccattcgagcgggacatctccacagagatctaccaggccggctctaccccctgcaatggcgtggagggctttaactgttatttccctctgcagtcttacggcttccagccaacaaacggcgtgggctatcagccctacagagtggtggtgctgtcctttgagctgctgcacgcaccagcaacagtgtgcggcccaaagaagtctaccaatctggtgaagaacaagtgcgtgaacttcaacttcaacggactgaccggcacaggcgtgctgaccgagagcaataagaagttcctgccttttcagcagttcggcagggacatcgcagataccacagacgccgtgcgcgaccctcagaccctggagatcctggacatcacaccatgcagcttcggcggcgtgtccgtgatcacaccaggcaccaatacatccaaccaggtggccgtgctgtatcaggacgtgaattgtaccgaggtgcccgtggcaatccacgcagatcagctgacccctacatggcgggtgtactctaccggcagcaacgtgttccagacaagagccggatgcctgatcggagcagagcacgtgaacaatagctatgagtgcgacatccctatcggcgccggcatctgtgccagctaccagacccagacaaactccccatctggagcaggctccgtggccagccagtccatcatcgcctataccatgagcctgggcgccgagaacagcgtggcctactccaacaattctatcgccatccctaccaacttcacaatcagcgtgaccacagagatcctgccagtgtctatgaccaagacaagcgtggactgcacaatgtatatctgtggcgatagcaccgagtgctccaacctgctgctgcagtacggctccttttgtacccagctgaatagagccctgacaggcatcgccgtggagcaggataagaacacacaggaggtgttcgcccaggtgaagcagatctacaagaccccacccatcaaggactttggcggcttcaacttcagccagatcctgcctgatccaagcaagccctccaagaggtcttttatcgaggacctgctgttcaacaaggtgaccctggccgatgccggcttcatcaagcagtatggagattgcctgggagacatcgcagcccgcgacctgatctgtgcccagaagtttaatggcctgaccgtgctgcctccactgctgacagatgagatgatcgcccagtacacatctgccctgctggccggcaccatcacaagcggatggaccttcggcgcaggagccgccctgcagatcccttttgccatgcagatggcctataggttcaacggcatcggcgtgacccagaatgtgctgtacgagaaccagaagctgatcgccaatcagtttaacagcgccatcggcaagatccaggactctctgtcctctacagccagcgccctgggcaagctgcaggatgtggtgaatcagaacgcccaggccctgaataccctggtgaagcagctgagctccaacttcggcgccatctctagcgtgctgaatgacatcctgagccggctggacccccctgaggcagaggtgcagatcgacaggctgatcacaggccgcctgcagagcctgcagacctacgtgacacagcagctgatcagggcagcagagatcagagcctccgccaatctggccgccaccaagatgagcgagtgcgtgctgggacagtccaagagggtggacttttgtggcaagggctatcacctgatgtctttcccacagagcgcccctcacggcgtggtgtttctgcacgtgacctacgtgccagcccaggagaagaacttcaccacagcaccagccatctgccacgatggaaaggcacactttcctagggagggcgtgttcgtgtctaacggcacccactggtttgtgacacagcgcaatttctacgagccacagatcatcaccacagacaatacattcgtgagcggcaactgtgatgtggtgatcggcatcgtgaacaataccgtgtatgatccactgcagcccgagctggactcctttaaggaggagctggataagtacttcaagaatcacacctctcccgacgtggatctgggcgacatctccggcatcaatgcctctgtggtgaacatccagaaggagatcgaccggctgaacgaggtggccaagaatctgaacgagagcctgatcgatctgcaggagctgggcaagtatgagcagtacatcaagggctctggcagagagaacctgtatttccagggaggaggaggcagcggatacatccctgaggcaccaagggacggacaggcctacgtgcgcaaggatggcgagtgggtgctgctgtccacctttctgggccatcatcaccaccaccaccaccactga

SEQ ID NO: 1487 - DNA, 3846 bp, Artificial Sequence
  Description of Artificial Sequence: Synthetic polynucleotide
atgggcatcctgccaagcccaggaatgcccgccctgctgtctctggtgagcctgctgtccgtgctgctgatgggatgcgtggcagagacaggcacacagtgcgtgaacctgaccacaaggacccagctgccccctgcctataccaattctttcacacggggcgtgtactatcccgacaaggtgtttagaagctccgtgctgcactccacacaggatctgtttctgcctttcttttctaacgtgacctggttccacgccatccacgtgtccggcaccaatggcacaaagcggttcgacaatcccgtgctgccttttaacgatggcgtgtacttcgccagcaccgagaagtccaacatcatcagaggctggatctttggcaccacactggactctaagacacagagcctgctgatcgtgaacaatgccaccaacgtggtgatcaaggtgtgcgagttccagttttgtaatgatccattcctgggcgtgtactatcacaagaacaataagtcctggatggagtctgagtttcgcgtgtattctagcgccaacaattgcacatttgagtacgtgagccagcccttcctgatggacctggagggcaagcagggcaatttcaagaacctgagggagttcgtgtttaagaatatcgatggctacttcaagatctacagcaagcacaccccaatcaacctggtgcgcgacctgccacagggattctccgccctggagccactggtggatctgcccatcggcatcaacatcacccggtttcagacaatactggccctgcacagatcctacctgacaccaggcgactcctctagcggatggaccgcaggagctgccgcctactatgtgggctatctgcagccccggaccttcctgctgaagtacaacgagaatggcaccatcacagacgcagtggattgcgccctggaccccctgtctgagacaaagtgtacactgaagagctttaccgtggagaagggcatctatcagacaagcaatttcagggtgcagcctaccgagtccatcgtgcgctttcccaatatcacaaacctgtgcccttttggcgaggtgttcaacgccaccagattcgccagcgtgtacgcctggaatcggaagagaatctccaactgcgtggccgactattctgtgctgtacaactccgcctctttcagcacctttaagtgctatggcgtgtctcccacaaagctgaatgatctgtgctttaccaacgtgtacgccgatagcttcgtgatcaggggagacgaagtgagacagatcgcaccaggacagacaggaaagatcgcagactacaattataagctgcctgacgatttcaccggctgcgtgatcgcctggaactccaacaatctggattctaaagtgggcggcaactacaattatctgtacaggctgtttcgcaagtccaatctgaagccattcgagcgggacatctccacagagatctaccaggccggctctaccccctgcaatggcgtggagggctttaactgttatttccctctgcagtcttacggcttccagccaacaaacggcgtgggctatcagccctacagagtggtggtgctgtcctttgagctgctgcacgcaccagcaacagtgtgcggcccaaagaagtctaccaatctggtgaagaacaagtgcgtgaacttcaacttcaacggactgaccggcacaggcgtgctgaccgagagcaataagaagttcctgccttttcagcagttcggcagggacatcgcagataccacagacgccgtgcgcgaccctcagaccctggagatcctggacatcacaccatgcagcttcggcggcgtgtccgtgatcacaccaggcaccaatacatccaaccaggtggccgtgctgtatcaggacgtgaattgtaccgaggtgcccgtggcaatccacgcagatcagctgacccctacatggcgggtgtactctaccggcagcaacgtgttccagacaagagccggatgcctgatcggagcagagcacgtgaacaatagctatgagtgcgacatccctatcggcgccggcatctgtgccagctaccagacccagacaaactccccatctggagcaggctccgtggccagccagtccatcatcgcctataccatgagcctgggcgccgagaacagcgtggcctactccaacaattctatcgccatccctaccaacttcacaatcagcgtgaccacagagatcctgccagtgtctatgaccaagacaagcgtggactgcacaatgtatatctgtggcgatagcaccgagtgctccaacctgctgctgcagtacggctccttttgtacccagctgaatagagccctgacaggcatcgccgtggagcaggataagaacacacaggaggtgttcgcccaggtgaagcagatctacaagaccccacccatcaaggactttggcggcttcaacttcagccagatcctgcctgatccaagcaagccctccaagaggtcttttatcgaggacctgctgttcaacaaggtgaccctggccgatgccggcttcatcaagcagtatggagattgcctgggagacatcgcagcccgcgacctgatctgtgcccagaagtttaatggcctgaccgtgctgcctccactgctgacagatgagatgatcgcccagtacacatctgccctgctggccggcaccatcacaagcggatggaccttcggcgcaggagccgccctgcagatcccttttgccatgcagatggcctataggttcaacggcatcggcgtgacccagaatgtgctgtacgagaaccagaagctgatcgccaatcagtttaacagcgccatcggcaagatccaggactctctgtcctctacagccagcgccctgggcaagctgcaggatgtggtgaatcagaacgcccaggccctgaataccctggtgaagcagctgagctccaacttcggcgccatctctagcgtgctgaatgacatcctgagccggctggacccccctgaggcagaggtgcagatcgacaggctgatcacaggccgcctgcagagcctgcagacctacgtgacacagcagctgatcagggcagcagagatcagagcctccgccaatctggccgccaccaagatgagcgagtgcgtgctgggacagtccaagagggtggacttttgtggcaagggctatcacctgatgtctttcccacagagcgcccctcacggcgtggtgtttctgcacgtgacctacgtgccagcccaggagaagaacttcaccacagcaccagccatctgccacgatggaaaggcacactttcctagggagggcgtgttcgtgtctaacggcacccactggtttgtgacacagcgcaatttctacgagccacagatcatcaccacagacaatacattcgtgagcggcaactgtgatgtggtgatcggcatcgtgaacaataccgtgtatgatccactgcagcccgagctggactcctttaaggaggagctggataagtacttcaagaatcacacctctcccgacgtggatctgggcgacatctccggcatcaatgcctctgtggtgaacatccagaaggagatcgaccggctgaacgaggtggccaagaatctgaacgagagcctgatcgatctgcaggagctgggcaagtatgagcagtacatcaagggctctggcagagagaacctgtatttccagggaggaggaggcagcggatacatccctgaggcaccaagggacggacaggcctacgtgcgcaaggatggcgagtgggtgctgctgtccacctttctgggccatcatcaccaccaccaccaccactga

SEQ ID NO: 1488 - DNA, 3846 bp, Artificial Sequence
  Description of Artificial Sequence: Synthetic polynucleotide
atgggcatcctgccaagcccaggaatgcccgccctgctgtctctggtgagcctgctgtccgtgctgctgatgggatgcgtggcagagacaggcacacagtgcgtgaacctgaccacaaggacccagctgccccctgcctataccaattctttcacacggggcgtgtactatcccgacaaggtgtttagaagcgatgtgctgcactccacacaggatctgtttctgcctttcttttctaacgtgacctggttccacgccatccacgtgtccggcaccaatggcacaaagcggttcgacaatcccgtgctgccttttaacgatggcgtgtacttcgccagcaccgagaagtccaacatcatcagaggctggatctttggcaccacactggactctaagacacagagcctgctgatcgtgaacaatgccaccaacgtggtgatcaaggtgtgcgagttccagttttgtgatgatccattcctgggcgtgtactatcacaagaacaataagtcctggatggagaaagagtttcgcgtgtattctagcgccaacaattgcacatttgagtacgtgagccagcccttcctgatggacctgggtggcaagcagggcaatttcaagaacctgagggagttcgtgtttaagaatatcgatggctacttcaagatctacagcaagcacaccccaatcaacctggtgcgcgacctgccacagggattctccgccctggagccactgatggatctgcccatcggcatcaacatcacccggtttcagacactgctggccctgcacagatcctacctgacaccaggcgactcctctagcggatggaccgcaggagctgccgcctactatgtgggctatctgcagccccggaccttcctgctgaagtacaacgagaatggcaccatcacagacgcagtggattgcgccctggaccccctgtctgagacaaagtgtacactgaagagctttaccgtggagaagggcatctatcagacaagcaatttcagggtgcagcctaccgagtccatcgtgcgctttcccaatatcacaaacctgtgcccttttggcgaggtgttcaacgccaccagattcgccagcgtgtacgcctggaatcggaagagaatctccaactgcgtggccgactattctgtgctgtacaactccgcctctttcagcacctttaagtgctatggcgtgtctcccacaaagctgaatgatctgtgctttaccaacgtgtacgccgatagcttcgtgatcaggggagacgaagtgagacagatcgcaccaggacagacaggaaagatcgcagactacaattataagctgcctgacgatttcaccggctgcgtgatcgcctggaactccaacaatctggattctaaagtgggcggcaactacaattatctgtacaggctgtttcgcaagtccaatctgaagccattcgagcgggacatctccacagagatctaccaggccggctctaccccctgcaatggcgtggagggctttaactgttatttccctctgcagtcttacggcttccagccaacaaacggcgtgggctatcagccctacagagtggtggtgctgtcctttgagctgctgcacgcaccagcaacagtgtgcggcccaaagaagtctaccaatctggtgaagaacaagtgcgtgaacttcaacttcaacggactgaccggcacaggcgtgctgaccgagagcaataagaagttcctgccttttcagcagttcggcagggacatcgcagataatacagacgccgtgcgcgaccctcagaccctggagatcctggacatcacaccatgcagcttcggcggcgtgtccgtgatcacaccaggcaccaatacatccaaccaggtggccgtgctgtatcaggacgtgaattgtaccgaggtgcccaatgcaatccacgcagatcagctgacccctacatggcgggtgtactctaccggcagcaacgtgttccagacaagagccggatgcctgatcggagcagagcacgtgaacaatagctatgagtgcgacatccctatcggcgccggcatctgtgccagctaccagacccagacaaactccccatctggagcaggctccgtggccagccagtccatcatcgcctataccatgagcctgggcgccgagaacagcgtggcctactccaacaattctatcgccatccctaccaacttcacaatcagcgtgaccacagagatcctgccagtgtctatgaccaagacaagcgtggactgcacaatgtatatctgtggcgatagcaccgagtgctccaacctgctgctgcagtacggctccttttgtacccagctgaatagagccctgcaaggcatcgcccaagagcaggataagaacacacaggaggtgttcgcccaggtgaagcagatctacaagaccccacccatcaaggactttggcggcttcaacttcagccagatcctgcctgatccaagcaagccctccaagaggtcttttatcgaggacctgctgttcaacaaggtgaccctggccgatgccggcttcatcaagcagtatggagattgcctgggagacatcgcagcccgcgacctgatctgtgcccagaagtttaatggcctgaccgtgctgcctccactgctgacagatgagatgatcgcccagtacacatctgccctgctggccggcaccatcacaagcggatggaccttcggcgcaggagccgccctgcagatcccttttgccatgcagatggcctataggttcaacggcatcggcgtgacccagaatgtgctgtacgagaaccagaagctgatcgccaatcagtttaacaaagccatcggcaagatccaggactctctgtcctctacagccagcgccctgggcaagctgcaggatgtggtgaatcagaacgcccaggccctgaataccctggtgaagcagctgagctccaacttcggcgccatctctagcgtgctgaatgacatcctgagccggctggacccccctgaggcagaggtgcagatcgacaggctgatcacaggccgcctgcagagcctgcagacctacgtgacacagcagctgatcagggcagcagagatcagagcctccgccaatctggccgccaccaagatgagcgagtgcgtgctgggacagtccaagagggtggacttttgtggcaagggctatcacctgatgtctttcccacagagcgcccctcacggcgtggtgtttctgcacgtgacctacgtgccagcccaggagaagaacttcaccacagcaccagccatctgccacgatggaaaggcattctttcctagggagggcgtgttcgtgtctaacggcacccaatggtttgtgacacagcgcaatttctacgagccacagatcatcaccacagacaatacattcgtgagcggcaactgtgatgtggtgatcggcatcgtgaacaataccgtgtatgatccactgcagcccgagctggactcctttaaggaggagctggataagtacttcaagaatcacacctctcccgacgtggatctgggcgacatctccggcatcaatgcctctgtggtgaacatccagaaggagatcgaccggctgaacgaggtggccaagaatctgaacgagagcctgatcgatctgcaggagctgggcaagtatgagcagtacatcaagggctctggcagagagaacctgtatttccagggaggaggaggcagcggatacatccctgaggcaccaagggacggacaggcctacgtgcgcaaggatggcgagtgggtgctgctgtccacctttctgggccatcatcaccaccaccaccaccactga

SEQ ID NO: 1489 - DNA, 3846 bp, Artificial Sequence
  Description of Artificial Sequence: Synthetic polynucleotide
atgggcatcctgccaagcccaggaatgcccgccctgctgtctctggtgagcctgctgtccgtgctgctgatgggatgcgtggcagagacaggcacacagtgcgtgaacctgaccacaaggacccagctgccccctgcctataccaattctttcacacggggcgtgtactatcccgacaaggtgtttagaagctccgtgctgcactccacacaggatctgtttctgcctttcttttctaacgtgacctggttccacgccatccacgtgtccggcaccaatggcacaaagcggttcgacaatcccgtgctgccttttaacgatggcgtgtacttcgccagcaccgagaagtccaacatcatcagaggctggatctttggcaccacactggactctaagacacagagcctgctgatcgtgaacaatgccaccaacgtggtgatcaaggtgtgcgagttccagttttgtaatgatccattcctgggcgtgtactatcacaagaacaataagtcctggatggagtctgagtttcgcgtgtattctagcgccaacaattgcacatttgagtacgtgcaacagcccttcctgatggacctggagggcaagcagggcaatttcaagaacctgagggagttcgtgtttaagaatatcgatggctacttcaagatctacagcaagcacaccccaatcaacctggtgcgcgacctgccacagggattctccgccctggagccactggtggatctgcccatcggcatcaacatcacccggtttcagacactgctggccctgcacagatcctacctgacaccaggcgactcctctagcggatggaccgcaggagctgccgcctactatgtgggctatctgcagccccggaccttcctgctgaagtacaacgagaatggcaccatcacagacgcagtggattgcgccctggaccccctgtctgagacaaagtgtacactgaagagctttaccgtggagaagggcatctatcagacaagcaatttcagggtgcagcctaccgagtccatcgtgcgctttcccaatatcacaaacctgtgcccttttggcgaggtgttcaacgccaccagattcgccagcgtgtacgcctggaatcggaagagaatctccaactgcgtggccgactattctgtgctgtacaactccgcctctttcagcacctttaagtgctatggcgtgtctcccacaaagctgaatgatctgtgctttaccaacgtgtacgccgatagcttcgtgatcaggggagacgaagtgagacagatcgcaccaggacagacaggaaagatcgcagactacaattataagctgcctgacgatttcaccggctgcgtgatcgcctggaactccaacaatctggattctaaagtgggcggcaactacaattatctgtacaggctgtttcgcaagtccaatctgaagccattcgagcgggacatctccacagagatctaccaggccggctctaccccctgcaatggcgtggagggctttaactgttatttccctctgcagtcttacggcttccagccaacaaacggcgtgggctatcagccctacagagtggtggtgctgtcctttgagctgctgcacgcaccagcaacagtgtgcggcccaaagaagtctaccaatctggtgaagaacaagtgcgtgaacttcaacttcaacggactgaccggcacaggcgtgctgaccgagagcaataagaagttcctgccttttcagcagttcggcagggacatcgcagataccacagacgccgtgcgcgaccctcagaccctggagatcctggacatcacaccatgcagcttcggcggcgtgtccgtgatcacaccaggcaccaatacatccaaccaggtggccgtgctgtatcaggacgtgaattgtaccgaggtgcccgtggcaatccacgcagatcagctgacccctacatggcgggtgtactctaccggcagcaacgtgttccagacaagagccggatgcctgatcggagcagagcacgtgaacaatagctatgagtgcgacatccctatcggcgccggcatctgtgccagctaccagacccagacaaactccccatctggagcaggctccgtggccagccagtccatcatcgcctataccatgagcctgggcgccgagaacagcgtggcctactccaacaattctatcgccatccctaccaacttcacaatcagcgtgaccacagagatcctgccagtgtctatgaccaagacaagcgtggactgcacaatgtatatctgtggcgatagcaccgagtgctccaacctgctgctgcagtacggctccttttgtacccagctgaatagagccctgacaggcatcgccgtggagcaggataagaacacacaggaggtgttcgcccaggtgaagcagatctacaagaccccacccatcaaggactttggcggcttcaacttcagccagatcctgcctgatccaagcaagccctccaagaggtcttttatcgaggacctgctgttcaacaaggtgaccctggccgatgccggcttcatcaagcagtatggagattgcctgggagacatcgcagcccgcgacctgatctgtgcccagaagtttaatggcctgaccgtgctgcctccactgctgacagatgagatgatcgcccagtacacatctgccctgctggccggcaccatcacaagcggatggaccttcggcgcaggagccgccctgcagatcccttttgccatgcagatggcctataggttcaacggcatcggcgtgacccagaatgtgctgtacgagaaccagaagctgatcgccaatcagtttaacagcgccatcggcaagatccaggactctctgtcctctacagccagcgccctgggcaagctgcaggatgtggtgaatcagaacgcccaggccctgaataccctggtgaagcagctgagctccaacttcggcgccatctctagcgtgctgaatgacatcctgagccggctggacccccctgaggcagaggtgcagatcgacaggctgatcacaggccgcctgcagagcctgcagacctacgtgacacagcagctgatcagggcagcagagatcagagcctccgccaatctggccgccaccaagatgagcgagtgcgtgctgggacagtccaagagggtggacttttgtggcaagggctatcacctgatgtctttcccacagagcgcccctcacggcgtggtgtttctgcacgtgacctacgtgccagcccaggagaagaacttcaccacagcaccagccatctgccacgatggaaaggcacactttcctagggagggcgtgttcgtgtctaacggcacccactggtttgtgacacagcgcaatttctacgagccacagatcatcaccacagacaatacattcgtgagcggcaactgtgatgtggtgatcggcatcgtgaacaataccgtgtatgatccactgcagcccgagctggactcctttaaggaggagctggataagtacttcaagaatcacacctctcccgacgtggatctgggcgacatctccggcatcaatgcctctgtggtgaacatccagaaggagatcgaccggctgaacgaggtggccaagaatctgaacgagagcctgatcgatctgcaggagctgggcaagtatgagcagtacatcaagggctctggcagagagaacctgtatttccagggaggaggaggcagcggatacatccctgaggcaccaagggacggacaggcctacgtgcgcaaggatggcgagtgggtgctgctgtccacctttctgggccatcatcaccaccaccaccaccactga

SEQ ID NO: 1490 - DNA, 3846 bp, Artificial Sequence
  Description of Artificial Sequence: Synthetic polynucleotide
atgggcatcctgccaagcccaggaatgcccgccctgctgtctctggtgagcctgctgtccgtgctgctgatgggatgcgtggcagagacaggcacacagtgcgtgaacctgaccacaaggacccagctgccccctgcctataccaattctttcacacggggcgtgtactatcccgacaaggtgtttagaagctccgtgctgcactccacacaggatctgtttctgcctttcttttctaacgtgacctggttccacgccatccacgtgtccggcaccaatggcacaaagcggttcgacaatcccgtgctgccttttaacgatggcgtgtacttcgccagcaccgagaagtccaacgtcatcagaggctggatctttggcaccacactggactctaagacacagagcctgctgatcgtgaacaatgccaccaacgtggtgatcaaggtgtgcgagttccagttttgtaatgatccattcctgggcgtgtactatcacaagaacaataagtcctggatggagtctgagtttcgcgtgtattctagcgccaacaattgcacatttgagtacgtgagccagcccttcctgatggacctggagggcaagcagggcaatttcaagaacctgagggagttcgtgtttaagaatatcgatggctacttcaagatctacagcaagcacaccccaatcaacctggtgcgcgacctgccacagggattctccgccctggagccactggtggatctgcccatcggcatcaacatcacccggtttcagacactgctggccctgcacagatcctacctgacaccaggcgactcctctagcggatggaccgcaggagctgccgcctactatgtgggctatctgcagccccggaccttcctgctgaagtacaacgagaatggcaccatcacagacgcagtggattgcgccctggaccccctgtctgagacaaagtgtacactgaagagctttaccgtggagaagggcatctatcagacaagcaatttcagggtgcagcctaccgagtccatcgtgcgctttcccaatatcacaaacctgtgcccttttggcgaggtgttcaacgccaccagattcgccagcgtgtacgcctggaatcggaagagaatctccaactgcgtggccgactattctgtgctgtacaactccgcctctttcagcacctttaagtgctatggcgtgtctcccacaaagctgaatgatctgtgctttaccaacgtgtacgccgatagcttcgtgatcaggggagacgaagtgagacagatcgcaccaggacagacaggaaagatcgcagactacaattataagctgcctgacgatttcaccggctgcgtgatcgcctggaactccaacaatctggattctaaagtgggcggcaactacaattatctgtacaggctgtttcgcaagtccaatctgaagccattcgagcgggacatctccacagagatctaccaggccggctctaccccctgcaatggcgtggagggctttaactgttatttccctctgcagtcttacggcttccagccaacaaacggcgtgggctatcagccctacagagtggtggtgctgtcctttgagctgctgcacgcaccagcaacagtgtgcggcccaaagaagtctaccaatctggtgaagaacaagtgcgtgaacttcaacttcaacggactgaccggcacaggcgtgctgaccgagagcaataagaagttcctgccttttcagcagttcggcagggacatcgcagataccacagacgccgtgcgcgaccctcagaccctggagatcctggacatcacaccatgcagcttcggcggcgtgtccgtgatcacaccaggcaccaatacatccaaccaggtggccgtgctgtatcaggacgtgaattgtaccgaggtgcccgtggcaatccacgcagatcagctgacccctacatggcgggtgtactctaccggcagcaacgtgttccagacaagagccggatgcctgatcggagcagagcacgtgaacaatagctatgagtgcgacatccctatcggcgccggcatctgtgccagctaccagacccagacaaactccccatctggagcaggctccgtggccagccagtccatcatcgcctataccatgagcctgggcgccgagaacagcgtggcctactccaacaattctatcgccatccctaccaacttcacaatcagcgtgaccacagagatcctgccagtgtctatgaccaagacaagcgtggactgcacaatgtatatctgtggcgatagcaccgagtgctccaacctgctgctgcagtacggctccttttgtacccagctgaatagagccctgacaggcatcgccgtggagcaggataagaacacacaggaggtgttcgcccaggtgaagcagatctacaagaccccacccatcaaggactttggcggcttcaacttcagccagatcctgcctgatccaagcaagccctccaagaggtcttttatcgaggacctgctgttcaacaaggtgaccctggccgatgccggcttcatcaagcagtatggagattgcctgggagacatcgcagcccgcgacctgatctgtgcccagaagtttaatggcctgaccgtgctgcctccactgctgacagatgagatgatcgcccagtacacatctgccctgctggccggcaccatcacaagcggatggaccttcggcgcaggagccgccctgcagatcccttttgccatgcagatggcctataggttcaacggcatcggcgtgacccagaatgtgctgtacgagaaccagaagctgatcgccaatcagtttaacagcgccatcggcaagatccaggactctctgtcctctacagccagcgccctgggcaagctgcaggatgtggtgaatcagaacgcccaggccctgaataccctggtgaagcagctgagctccaacttcggcgccatctctagcgtgctgaatgacatcctgagccggctggacccccctgaggcagaggtgcagatcgacaggctgatcacaggccgcctgcagagcctgcagacctacgtgacacagcagctgatcagggcagcagagatcagagcctccgccaatctggccgccaccaagatgagcgagtgcgtgctgggacagtccaagagggtggacttttgtggcaagggctatcacctgatgtctttcccacagagcgcccctcacggcgtggtgtttctgcacgtgacctacgtgccagcccaggagaagaacttcaccacagcaccagccatctgccacgatggaaaggcacactttcctagggagggcgtgttcgtgtctaacggcacccactggtttgtgacacagcgcaatttctacgagccacagatcatcaccacagacaatacattcgtgagcggcaactgtgatgtggtgatcggcatcgtgaacaataccgtgtatgatccactgcagcccgagctggactcctttaaggaggagctggataagtacttcaagaatcacacctctcccgacgtggatctgggcgacatctccggcatcaatgcctctgtggtgaacatccagaaggagatcgaccggctgaacgaggtggccaagaatctgaacgagagcctgatcgatctgcaggagctgggcaagtatgagcagtacatcaagggctctggcagagagaacctgtatttccagggaggaggaggcagcggatacatccctgaggcaccaagggacggacaggcctacgtgcgcaaggatggcgagtgggtgctgctgtccacctttctgggccatcatcaccaccaccaccaccactga

SEQ ID NO: 1491 - DNA, 3846 bp, Artificial Sequence
  Description of Artificial Sequence: Synthetic polynucleotide
atgggcatcctgccaagcccaggaatgcccgccctgctgtctctggtgagcctgctgtccgtgctgctgatgggatgcgtggcagagacaggcacacagtgcgtgaacctgaccacaaggacccagctgccccctgcctataccaattctttcacacggggcgtgtactatcccgacaaggtgtttagaagctccgtgctgcactccacacaggatctgtttctgcctttcttttctaacgtgacctggttccacgccatccacgtgtccggcaccaatggcacaaagcggttcgacaatcccgtgctgccttttaacgatggcgtgtacttcgccagcaccgagaagtccaacatcatcagaggctggatctttggcaccacactggactctaagacacagagcctgctgatcgtgaacaatgccaccaacgtggtgatccgcgtgtgcgagttccagttttgtaatgatccattcctgggcgtgtactatcacaagaacaataagtcctggatggagtctgagtttcgcgtgtattctagcgccaacaattgcacatttgagtacgtgagccagcccttcctgatggacctggagggcaagcagggcaatttcaagaacctgagggagttcgtgtttaagaatatcgatggctacttcaagatctacagcaagcacaccccaatcaacctggtgcgcgacctgccacagggattctccgccctggagccactggtggatctgcccatcggcatcaacatcacccggtttcagacactgctggccctgcacagatcctacctgacaccaggcgactcctctagcggatggaccgcaggagctgccgcctactatgtgggctatctgcagccccggaccttcctgctgaagtacaacgagaatggcaccatcacagacgcagtggattgcgccctggaccccctgtctgagacaaagtgtacactgaagagctttaccgtggagaagggcatctatcagacaagcaatttcagggtgcagcctaccgagtccatcgtgcgctttcccaatatcacaaacctgtgcccttttggcgaggtgttcaacgccaccagattcgccagcgtgtacgcctggaatcggaagagaatctccaactgcgtggccgactattctgtgctgtacaactccgcctctttcagcacctttaagtgctatggcgtgtctcccacaaagctgaatgatctgtgctttaccaacgtgtacgccgatagcttcgtgatcaggggagacgaagtgagacagatcgcaccaggacagacaggaaagatcgcagactacaattataagctgcctgacgatttcaccggctgcgtgatcgcctggaactccaacaatctggattctaaagtgggcggcaactacaattatctgtacaggctgtttcgcaagtccaatctgaagccattcgagcgggacatctccacagagatctaccaggccggctctaccccctgcaatggcgtggagggctttaactgttatttccctctgcagtcttacggcttccagccaacaaacggcgtgggctatcagccctacagagtggtggtgctgtcctttgagctgctgcacgcaccagcaacagtgtgcggcccaaagaagtctaccaatctggtgaagaacaagtgcgtgaacttcaacttcaacggactgaccggcacaggcgtgctgaccgagagcaataagaagttcctgccttttcagcagttcggcagggacatcgcagataccacagacgccgtgcgcgaccctcagaccctggagatcctggacatcacaccatgcagcttcggcggcgtgtccgtgatcacaccaggcaccaatacatccaaccaggtggccgtgctgtatcaggacgtgaattgtaccgaggtgcccgtggcaatccacgcagatcagctgacccctacatggcgggtgtactctaccggcagcaacgtgttccagacaagagccggatgcctgatcggagcagagcacgtgaacaatagctatgagtgcgacatccctatcggcgccggcatctgtgccagctaccagacccagacaaactccccatctggagcaggctccgtggccagccagtccatcatcgcctataccatgagcctgggcgccgagaacagcgtggcctactccaacaattctatcgccatccctaccaacttcacaatcagcgtgaccacagagatcctgccagtgtctatgaccaagacaagcgtggactgcacaatgtatatctgtggcgatagcaccgagtgctccaacctgctgctgcagtacggctccttttgtacccagctgaatagagccctgacaggcatcgccgtggagcaggataagaacacacaggaggtgttcgcccaggtgaagcagatctacaagaccccacccatcaaggactttggcggcttcaacttcagccagatcctgcctgatccaagcaagccctccaagaggtcttttatcgaggacctgctgttcaacaaggtgaccctggccgatgccggcttcatcaagcagtatggagattgcctgggagacatcgcagcccgcgacctgatctgtgcccagaagtttaatggcctgaccgtgctgcctccactgctgacagatgagatgatcgcccagtacacatctgccctgctggccggcaccatcacaagcggatggaccttcggcgcaggagccgccctgcagatcccttttgccatgcagatggcctataggttcaacggcatcggcgtgacccagaatgtgctgtacgagaaccagaagctgatcgccaatcagtttaacagcgccatcggcaagatccaggactctctgtcctctacagccagcgccctgggcaagctgcaggatgtggtgaatcagaacgcccaggccctgaataccctggtgaagcagctgagctccaacttcggcgccatctctagcgtgctgaatgacatcctgagccggctggacccccctgaggcagaggtgcagatcgacaggctgatcacaggccgcctgcagagcctgcagacctacgtgacacagcagctgatcagggcagcagagatcagagcctccgccaatctggccgccaccaagatgagcgagtgcgtgctgggacagtccaagagggtggacttttgtggcaagggctatcacctgatgtctttcccacagagcgcccctcacggcgtggtgtttctgcacgtgacctacgtgccagcccaggagaagaacttcaccacagcaccagccatctgccacgatggaaaggcacactttcctagggagggcgtgttcgtgtctaacggcacccactggtttgtgacacagcgcaatttctacgagccacagatcatcaccacagacaatacattcgtgagcggcaactgtgatgtggtgatcggcatcgtgaacaataccgtgtatgatccactgcagcccgagctggactcctttaaggaggagctggataagtacttcaagaatcacacctctcccgacgtggatctgggcgacatctccggcatcaatgcctctgtggtgaacatccagaaggagatcgaccggctgaacgaggtggccaagaatctgaacgagagcctgatcgatctgcaggagctgggcaagtatgagcagtacatcaagggctctggcagagagaacctgtatttccagggaggaggaggcagcggatacatccctgaggcaccaagggacggacaggcctacgtgcgcaaggatggcgagtgggtgctgctgtccacctttctgggccatcatcaccaccaccaccaccactga

SEQ ID NO: 1492 - DNA, 3846 bp, Artificial Sequence
  Description of Artificial Sequence: Synthetic polynucleotide
atgggcatcctgccaagcccaggaatgcccgccctgctgtctctggtgagcctgctgtccgtgctgctgatgggatgcgtggcagagacaggcacacagtgcgtgaacctgaccacaaggacccagctgccccctgcctataccaattctttcacacggggcgtgtactatcccgacaaggtgtttagaagctccgtgctgcactccacacaggatctgtttctgcctttcttttctaacgtgacctggttccacgccatccacgtgtccggcaccaatggcacaaagcggttcgacaatcccgtgctgccttttaacgatggcgtgtacttcgccagcaccgagaagtccaacatcatcagaggctggatctttggcaccacactggactctaagacacagagcctgctgatcgtgaacaatgccaccaacgtggtgatcaaggtgtgcgagttccagttttgtaatgatccattcctgggcgtgtactatcacaagaacaataagtcctggatggagtctgagtttcgcgtgtattctagcgccaacaattgcacatttgagtacgtgcatcagcccttcctgatggacctggagggcaagcagggcaatttcaagaacctgagggagttcgtgtttaagaatatcgatggctacttcaagatctacagcaagcacaccccaatcaacctggtgcgcgacctgccacagggattctccgccctggagccactggtggatctgcccatcggcatcaacatcacccggtttcagacactgctggccctgcacagatcctacctgacaccaggcgactcctctagcggatggaccgcaggagctgccgcctactatgtgggctatctgcagccccggaccttcctgctgaagtacaacgagaatggcaccatcacagacgcagtggattgcgccctggaccccctgtctgagacaaagtgtacactgaagagctttaccgtggagaagggcatctatcagacaagcaatttcagggtgcagcctaccgagtccatcgtgcgctttcccaatatcacaaacctgtgcccttttggcgaggtgttcaacgccaccagattcgccagcgtgtacgcctggaatcggaagagaatctccaactgcgtggccgactattctgtgctgtacaactccgcctctttcagcacctttaagtgctatggcgtgtctcccacaaagctgaatgatctgtgctttaccaacgtgtacgccgatagcttcgtgatcaggggagacgaagtgagacagatcgcaccaggacagacaggaaagatcgcagactacaattataagctgcctgacgatttcaccggctgcgtgatcgcctggaactccaacaatctggattctaaagtgggcggcaactacaattatctgtacaggctgtttcgcaagtccaatctgaagccattcgagcgggacatctccacagagatctaccaggccggctctaccccctgcaatggcgtggagggctttaactgttatttccctctgcagtcttacggcttccagccaacaaacggcgtgggctatcagccctacagagtggtggtgctgtcctttgagctgctgcacgcaccagcaacagtgtgcggcccaaagaagtctaccaatctggtgaagaacaagtgcgtgaacttcaacttcaacggactgaccggcacaggcgtgctgaccgagagcaataagaagttcctgccttttcagcagttcggcagggacatcgcagataccacagacgccgtgcgcgaccctcagaccctggagatcctggacatcacaccatgcagcttcggcggcgtgtccgtgatcacaccaggcaccaatacatccaaccaggtggccgtgctgtatcaggacgtgaattgtaccgaggtgcccgtggcaatccacgcagatcagctgacccctacatggcgggtgtactctaccggcagcaacgtgttccagacaagagccggatgcctgatcggagcagagcacgtgaacaatagctatgagtgcgacatccctatcggcgccggcatctgtgccagctaccagacccagacaaactccccatctggagcaggctccgtggccagccagtccatcatcgcctataccatgagcctgggcgccgagaacagcgtggcctactccaacaattctatcgccatccctaccaacttcacaatcagcgtgaccacagagatcctgccagtgtctatgaccaagacaagcgtggactgcacaatgtatatctgtggcgatagcaccgagtgctccaacctgctgctgcagtacggctccttttgtacccagctgaatagagccctgacaggcatcgccgtggagcaggataagaacacacaggaggtgttcgcccaggtgaagcagatctacaagaccccacccatcaaggactttggcggcttcaacttcagccagatcctgcctgatccaagcaagccctccaagaggtcttttatcgaggacctgctgttcaacaaggtgaccctggccgatgccggcttcatcaagcagtatggagattgcctgggagacatcgcagcccgcgacctgatctgtgcccagaagtttaatggcctgaccgtgctgcctccactgctgacagatgagatgatcgcccagtacacatctgccctgctggccggcaccatcacaagcggatggaccttcggcgcaggagccgccctgcagatcccttttgccatgcagatggcctataggttcaacggcatcggcgtgacccagaatgtgctgtacgagaaccagaagctgatcgccaatcagtttaacagcgccatcggcaagatccaggactctctgtcctctacagccagcgccctgggcaagctgcaggatgtggtgaatcagaacgcccaggccctgaataccctggtgaagcagctgagctccaacttcggcgccatctctagcgtgctgaatgacatcctgagccggctggacccccctgaggcagaggtgcagatcgacaggctgatcacaggccgcctgcagagcctgcagacctacgtgacacagcagctgatcagggcagcagagatcagagcctccgccaatctggccgccaccaagatgagcgagtgcgtgctgggacagtccaagagggtggacttttgtggcaagggctatcacctgatgtctttcccacagagcgcccctcacggcgtggtgtttctgcacgtgacctacgtgccagcccaggagaagaacttcaccacagcaccagccatctgccacgatggaaaggcacactttcctagggagggcgtgttcgtgtctaacggcacccactggtttgtgacacagcgcaatttctacgagccacagatcatcaccacagacaatacattcgtgagcggcaactgtgatgtggtgatcggcatcgtgaacaataccgtgtatgatccactgcagcccgagctggactcctttaaggaggagctggataagtacttcaagaatcacacctctcccgacgtggatctgggcgacatctccggcatcaatgcctctgtggtgaacatccagaaggagatcgaccggctgaacgaggtggccaagaatctgaacgagagcctgatcgatctgcaggagctgggcaagtatgagcagtacatcaagggctctggcagagagaacctgtatttccagggaggaggaggcagcggatacatccctgaggcaccaagggacggacaggcctacgtgcgcaaggatggcgagtgggtgctgctgtccacctttctgggccatcatcaccaccaccaccaccactga

SEQ ID NO: 1493 - DNA, 3846 bp, Artificial Sequence
  Description of Artificial Sequence: Synthetic polynucleotide
atgggcatcctgccaagcccaggaatgcccgccctgctgtctctggtgagcctgctgtccgtgctgctgatgggatgcgtggcagagacaggcacacagtgcgtgaacctgaccacaaggacccagctgccccctgcctataccaattctttcacacggggcgtgtactatcccgacaaggtgtttagaagctccgtgctgcactccacacaggatctgtttctgcctttcttttctaacgtgacctggttccacgccatccacgtgtccggcaccaatggcacaaagcggttcgacaatcccgtgctgccttttaacgatggcgtgtacttcgccagcaccgagaagtccaacatcatcagaggctggatctttggcaccacactggactctaagacacagagcctgctgatcgtgaacaatgccaccaacgtggtgatcaaggtgtgcgagttccagttttgtaatgatccattcctgggcgtgtactatcacaagaacaataagtcctggatggagtctgagtttcgcgtgtattctagcgccaacaattgcacatttgagtacgtgagccagcccttcctgatggacctggagggcaagcagggcaatttcaagaacctgagggagttcgtgtttaagaatatcgatggctacttcaagatctacagcaagcacaccccaatcaacctggtgcgcgacctgccacagggattctccgccctggagccactggtggatctgcccatcggcatcaacatcacccggtttcagacactgctggccctgcacagatcctacctgacaccaggcgactcctctagcggatggaccgcaggagctgccgcctactatgtgggctatctgcagccccggaccttcctgctgaagtacaacgagaatggcaccatcacagacgcagtggattgcgccctggaccccctgtctgagacaaagtgtacactgaagagctttaccgtggagaagggcatctatcagacaagcaatttcagggtgcagcctaccgagtccatcgtgcgctttcccaatatcacaaacctgtgcccttttggcgaggtgttcaacgccaccagattcgccagcgtgtacgcctggaatcggaagagaatctccaactgcgtggccgactattctgtgctgtacaactccgcctctttcagcacctttaagtgctatggcgtgtctcccacaaagctgaatgatctgtgctttaccaacgtgtacgccgatagcttcgtgatcaggggagacgaagtgagacagatcgcaccaggacagacaggaaagatcgcagactacaattataagctgcctgacgatttcaccggctgcgtgatcgcctggaactccaacaatctggattctaaagtgggcggcaactacaattatctgtacaggctgtttcgcaagtccaatctgaagccattcgagcgggacatctccacagagatctaccaggccggctctaccccctgcaatggcgtggagggctttaactgttatttccctctgcagtcttacggcttccagccaacaaacggcgtgggctatcagccctacagagtggtggtgctgtcctttgagctgctgcacgcaccagcaacagtgtgcggcccaaagaagtctaccaatctggtgaagaacaagtgcgtgaacttcaacttcaacggactgaccggcacaggcgtgctgaccgagagcaataagaagttcctgccttttcagcagttcggcagggacatcgcagataccacagacgccgtgcgcgaccctcagaccctggagatcctggacatcacaccatgcagcttcggcggcgtgtccgtgatcacaccaggcaccaatacatccaaccaggtggccgtgctgtatcaggacgtgaattgtaccgaggtgcccgtgtcaatccacgcagatcagctgacccctacatggcgggtgtactctaccggcagcaacgtgttccagacaagagccggatgcctgatcggagcagagcacgtgaacaatagctatgagtgcgacatccctatcggcgccggcatctgtgccagctaccagacccagacaaactccccatctggagcaggctccgtggccagccagtccatcatcgcctataccatgagcctgggcgccgagaacagcgtggcctactccaacaattctatcgccatccctaccaacttcacaatcagcgtgaccacagagatcctgccagtgtctatgaccaagacaagcgtggactgcacaatgtatatctgtggcgatagcaccgagtgctccaacctgctgctgcagtacggctccttttgtacccagctgaatagagccctgacaggcatcgccgtggagcaggataagaacacacaggaggtgttcgcccaggtgaagcagatctacaagaccccacccatcaaggactttggcggcttcaacttcagccagatcctgcctgatccaagcaagccctccaagaggtcttttatcgaggacctgctgttcaacaaggtgaccctggccgatgccggcttcatcaagcagtatggagattgcctgggagacatcgcagcccgcgacctgatctgtgcccagaagtttaatggcctgaccgtgctgcctccactgctgacagatgagatgatcgcccagtacacatctgccctgctggccggcaccatcacaagcggatggaccttcggcgcaggagccgccctgcagatcccttttgccatgcagatggcctataggttcaacggcatcggcgtgacccagaatgtgctgtacgagaaccagaagctgatcgccaatcagtttaacagcgccatcggcaagatccaggactctctgtcctctacagccagcgccctgggcaagctgcaggatgtggtgaatcagaacgcccaggccctgaataccctggtgaagcagctgagctccaacttcggcgccatctctagcgtgctgaatgacatcctgagccggctggacccccctgaggcagaggtgcagatcgacaggctgatcacaggccgcctgcagagcctgcagacctacgtgacacagcagctgatcagggcagcagagatcagagcctccgccaatctggccgccaccaagatgagcgagtgcgtgctgggacagtccaagagggtggacttttgtggcaagggctatcacctgatgtctttcccacagagcgcccctcacggcgtggtgtttctgcacgtgacctacgtgccagcccaggagaagaacttcaccacagcaccagccatctgccacgatggaaaggcacactttcctagggagggcgtgttcgtgtctaacggcacccactggtttgtgacacagcgcaatttctacgagccacagatcatcaccacagacaatacattcgtgagcggcaactgtgatgtggtgatcggcatcgtgaacaataccgtgtatgatccactgcagcccgagctggactcctttaaggaggagctggataagtacttcaagaatcacacctctcccgacgtggatctgggcgacatctccggcatcaatgcctctgtggtgaacatccagaaggagatcgaccggctgaacgaggtggccaagaatctgaacgagagcctgatcgatctgcaggagctgggcaagtatgagcagtacatcaagggctctggcagagagaacctgtatttccagggaggaggaggcagcggatacatccctgaggcaccaagggacggacaggcctacgtgcgcaaggatggcgagtgggtgctgctgtccacctttctgggccatcatcaccaccaccaccaccactga

SEQ ID NO: 1494 - DNA, 3846 bp, Artificial Sequence
  Description of Artificial Sequence: Synthetic polynucleotide
atgggcatcctgccaagcccaggaatgcccgccctgctgtctctggtgagcctgctgtccgtgctgctgatgggatgcgtggcagagacaggcacacagtgcgtgaacctgaccacaaggacccagctgccccctgcctataccaattctttcacacggggcgtgtactatcccgacaagatttttagaagctccgtgctgcaccttacacaggatctgtttctgcctttcttttctaacgtgacctggttccacgccatccacgtgtccggcaccaatggcacaaagcggttcgacaatcccgtgctgccttttaacgatggcgtgtacttcgccgcaaccgagaagtccaacatcatcagaggctggatctttggcaccacactggactctaagacacagagcctgctgatcgtgaacaatgccaccaacgtggtgatcaaggtgtgcgagttccagttttgtaatgatccattcctgggcgtgtactatcacaagaacaataagtcctggatggagtctgagtttcgcgtgtattctagcgccaacaattgcacatttgagtacgtgagccagcccttcctgatggacctggagggcaagcagggcaatttcaagaacctgagggagttcgtgtttaagaatatcgatggctacttcaagatctacagcaagcacaccccaatcaacctggtgcgcgacctgccacagggattctccgccctggagccactggtgaaactgcccatcggcatcaacatcacccggtttcagacactgctggccctgcacagatcctacctgacaccaggcgactcctctagcggatggaccgcaggagctgccgcctactatgtgggctatctgcagccccggaccttcctgctgaagtacaacgagaatggcaccatcacagacgcagtggattgcgccctggaccccctgtctgagacaaagtgtacactgaagagctttaccgtggagaagggcatctatcagacaagcaatttcagggtgcagcctaccgagtccatcgtgcgctttcccaatatcacaaacctgtgcccttttggcgaggtgttcaacgccaccagattcgccagcgtgtacgcctggaatcggaagagaatctccaactgcgtggccgactattctgtgctgtacaactccgcctctttcagcacctttaagtgctatggcgtgtctcccacaaagctgaatgatctgtgctttaccaacgtgtacgccgatagcttcgtgatcaggggagacgaagtgagacagatcgcaccaggacagacaggaaagatcgcagactacaattataagctgcctgacgatttcaccggctgcgtgatcgcctggaactccaacaatctggattctaaagtgggcggcaactacaattatctgtacaggctgtttcgcaagtccaatctgaagccattcgagcgggacatctccacagagatctaccaggccggctctaccccctgcaatggcgtggagggctttaactgttatttccctctgcagtcttacggcttccagccaacaaacggcgtgggctatcagccctacagagtggtggtgctgtcctttgagctgctgcacgcaccagcaacagtgtgcggcccaaagaagtctaccaatctggtgaagaacaagtgcgtgaacttcaacttcaacggactgaccggcacaggcgtgctgaccgagagcaataagaagttcctgccttttcagcagttcggcagggacatcagtgataccacagacgccgtgcgcgaccctcagaccctggagatcctggacatcacaccatgcagcttcggcggcgtgtccgtgatcacaccaggcaccaatacatccaacgaagtggccgtgctgtatcaggacgtgaattgtaccgatgtgcccgtggcaatccacgcagatcagctgacccctacatggcgggtgtactctaccggcagcaacgtgttccagacacaagccggatgcctgatcggagcagagcacgtgaacaatagctatgagtgcgacatccctatcggcgccggcatctgtgccagctaccagacccagacaaactccccatctggagcaggctccgtggccagccagtccatcatcgcctataccatgagcctgggcgccgagaacagcgtggcctactccaacaattctatcgccatccctaccaacttcacaatcagcgtgaccacagagatcctgccagtgtctatgaccaagacaagcgtggactgcacaatgtatatctgtggcgatagcaccgagtgctccaacctgctgctgcagtacggctccttttgtacccagctgaatagagccctgacaggcatcgccgtggagcaggataagaacacacaggaggtgttcgcccaggtgaagcagatctacaagaccccacccatcaaggactttggcggcttcaacttcagccagatcctgcctgatccaagcaagccctccaagaggtcttttatcgaggacctgctgttcaacaaggtgaccctggccgatgccggcttcatcaagcagtatggagattgcctgggagacatcgcagcccgcgacctgatctgtgcccagaagtttaatggcctgaccgtgctgcctccactgctgacagatgagatgatcgccgcttacacagctgccctgctggccggcaccgcgacagcgggatggaccttcggcgcaggagccgccctgcagatcccttttgccatgcagatggcctataggttcaacggcatcggcgtgacccagaatgtgctgtacgagaaccagaagctgatcgccaatcagtttaacagcgccatcggcaagatccaggactctctgtcctctacagccagcgccctgggcaagctgcaggatgtggtgaatcagaacgcccaggccctgaataccctggtgaagcagctgagctccaacttcggcgccatctctagcgtgctgaatgacatcctgagccggctggacccccctgaggcagaggtgcagatcgacaggctgatcacaggccgcctgcagagcctgcagacctacgtgacacagcagctgatcagggcagcagagatcagagcctccgccaatctggccgccaccaagatgagcgagtgcgtgctgggacagtccaagagggtggacttttgtggcaagggctatcacctgatgtctttcccacagagcgcccctcacggcgtggtgtttctgcacgtgacctacgtgccagcccaggagaagaacttcaccacagcaccagccatctgccacgatggaaaggcacactttcctagggagggcgtgttcgtgtctaacggcacccactggtttgtgacacagcgcaatttctacgagccacagatcatcaccacagacaatacattcgtgagcggcaactgtgatgtggtgatcggcatcgtgaacaataccgtgtatgatccactgcagcccgagctggactcctttaaggaggagctggataagtacttcaagaatcacacctctcccgacgtggatctgggcgacatctccggcatcaatgcctctgtggtgaacatccagaaggagatcgaccggctgaacgaggtggccaagaatctgaacgagagcctgatcgatctgcaggagctgggcaagtatgagcagtacatcaagggctctggcagagagaacctgtatttccagggaggaggaggcagcggatacatccctgaggcaccaagggacggacaggcctacgtgcgcaaggatggcgagtgggtgctgctgtccacctttctgggccatcatcaccaccaccaccaccactga

SEQ ID NO: 1495 - DNA, 3846 bp, Artificial Sequence
  Description of Artificial Sequence: Synthetic polynucleotide
atgggcatcctgccaagcccaggaatgcccgccctgctgtctctggtgagcctgctgtccgtgctgctgatgggatgcgtggcagagacaggcacacagtgcgtgaacctgaccacaaggacccagctgccccctgcctataccaattctttcacacggggcgtgtactatcccgacaaggtgtttagaagctccgtgctgcactccacacaggatctgtttctgcctttcttttctaacgtgacctggttccacgccatccacgtgtccggcaccaatggcacaaagcggttcgacaatcccgtgctgccttttaacgatggcgtgtacttcgccagcaccgagaagtccaacatcatcagaggctggatctttggcaccacactggactctaagacacagagcctgctgatcgtgaacaatgccaccaacgtggtgatcaaggtgtgcgagttccagttttgtaatgatccattcctgggcgtgtactatcacaagaacaataagtcctggatggagtctgagtttcgcgtgtattctagcgccaacaattgcacatttgagtacgtgagccagcccttcctgatggacctggagggcaagcagggcaatttcaagaacctgagggagttcgtgtttaagaatatcgatggctacttcaagatctacagcaagcacaccccaatcaacctggtgcgcgacctgccacagggattctccgccctggagccactggtggatctgcccatcggcatcaacatcacccggtttcagacactgctggccctgcacagatcctacctgacaccaggcgactcctctagcggatggaccgcaggagctgccgcctactatgtgggctatctgcagccccggaccttcctgctgaagtacaacgagaatggcaccatcacagacgcagtggattgcgccctggaccccctgtctgagacaaagtgtacactgaagagctttaccgtggagaagggcatctatcagacaagcaatttcagggtgcagcctaccgagtccatcgtgcgctttcccaatatcacaaacctgtgcccttttggcgaggtgttcaacgccaccagattcgccagcgtgtacgcctggaatcggaagagaatctccaactgcgtggccgactattctgtgctgtacaactccgcctctttcagcacctttaagtgctatggcgtgtctcccacaaagctgaatgatctgtgctttaccaacgtgtacgccgatagcttcgtgatcaggggagacgaagtgagacagatcgcaccaggacagacaggaaagatcgcagactacaattataagctgcctgacgatttcaccggctgcgtgatcgcctggaactccaacaatctggattctaaagtgggcggcaactacaattatctgtacaggctgtttcgcaagtccaatctgaagccattcgagcgggacatctccacagagatctaccaggccggctctaccccctgcaatggcgtggagggctttaactgttatttccctctgcagtcttacggcttccagccaacaaacggcgtgggctatcagccctacagagtggtggtgctgtcctttgagctgctgcacgcaccagcaacagtgtgcggcccaaagaagtctaccaatctggtgaagaacaagtgcgtgaacttcaacttcaacggactgaccggcacaggcgtgctgaccgagagcaataagaagttcctgccttttcagcagttcggcagggacatcgcagataccacagacgccgtgcgcgaccctcagaccctggagatcctggacatcacaccatgcagcttcggcggcgtgtccgtgatcacaccaggcaccaatacatccaaccaggtggccgtgctgtatcaggacgtgaattgtaccgaggtgcccgtggcaatccacgcagatcagctgacccctacatggcgggtgtactctaccggcagcaacgtgttccagacaagagccggatgcctgatcggagcagagcacgtgaacaatagctatgagtgcgacatccctatcggcgccggcatctgtgccagctaccagacccagacaaactccccatctggagcaggctccgtggccagccagtccatcatcgcctataccatgagcctgggcgccgagaacagcgtggcctactccaacaattctatcgccatccctaccaacttcacaatcagcgtgaccacagagatcctgccagtgtctatgaccaagacaagcgtggactgcacaatgtatatctgtggcgatagcaccgagtgctccaacctgctgctgcagtacggctccttttgtacccagctgaatagagccctgacaggcatcgcccttgagcaggataagaacacacaggaggtgttcgcccaggtgaagcagatctacaagaccccacccatcaaggactttggcggcttcaacttcagccagatcctgcctgatccaagcaagccctccaagaggtcttttatcgaggacctgctgttcaacaaggtgaccctggccgatgccggcttcatcaagcagtatggagattgcctgggagacatcgcagcccgcgacctgatctgtgcccagaagtttaatggcctgaccgtgctgcctccactgctgacagatgagatgatcgcccagtacacatctgccctgctggccggcaccatcacaagcggatggaccttcggcgcaggagccgccctgcagatcccttttgccatgcagatggcctataggttcaacggcatcggcgtgacccagaatgtgctgtacgagaaccagaagctgatcgccaatcagtttaacagcgccatcggcaagatccaggactctctgtcctctacagccagcgccctgggcaagctgcaggatgtggtgaatcagaacgcccaggccctgaataccctggtgaagcagctgagctccaacttcggcgccatctctagcgtgctgaatgacatcctgagccggctggacccccctgaggcagaggtgcagatcgacaggctgatcacaggccgcctgcagagcctgcagacctacgtgacacagcagctgatcagggcagcagagatcagagcctccgccaatctggccgccaccaagatgagcgagtgcgtgctgggacagtccaagagggtggacttttgtggcaagggctatcacctgatgtctttcccacagagcgcccctcacggcgtggtgtttctgcacgtgacctacgtgccagcccaggagaagaacttcaccacagcaccagccatctgccacgatggaaaggcacactttcctagggagggcgtgttcgtgtctaacggcacccactggtttgtgacacagcgcaatttctacgagccacagatcatcaccacagacaatacattcgtgagcggcaactgtgatgtggtgatcggcatcgtgaacaataccgtgtatgatccactgcagcccgagctggactcctttaaggaggagctggataagtacttcaagaatcacacctctcccgacgtggatctgggcgacatctccggcatcaatgcctctgtggtgaacatccagaaggagatcgaccggctgaacgaggtggccaagaatctgaacgagagcctgatcgatctgcaggagctgggcaagtatgagcagtacatcaagggctctggcagagagaacctgtatttccagggaggaggaggcagcggatacatccctgaggcaccaagggacggacaggcctacgtgcgcaaggatggcgagtgggtgctgctgtccacctttctgggccatcatcaccaccaccaccaccactga

SEQ ID NO: 1496 - DNA, 3846 bp, Artificial Sequence
  Description of Artificial Sequence: Synthetic polynucleotide
atgggcatcctgccaagcccaggaatgcccgccctgctgtctctggtgagcctgctgtccgtgctgctgatgggatgcgtggcagagacaggcacacagtgcgtgaacctgaccacaaggacccagctgccccctgcctataccaattctttcacacggggcgtgtactatcccgacaaggtgtttagaagctccgtgctgcacaacacacaggatctgtttctgcctttcttttctaacgtgacctggttccacgccatccacgtgtccggcaccaatggcacaaagcggttcgacaatcccgtgctgccttttaacgatggcgtgtacttcgccagcaccgagaagtccaacatcatcagaggctggatctttggcaccacactggactctaagacacagagcctgctgatcgtgaacaatgccaccaacgtggtgatcaaggtgtgcgagttccagttttgtaatgatccattcctgggcgtgtactatcacaagaacaataagtcctggatggagtctgagtttcgcgtgtattctagcgccaacaattgcacatttgagtacgtgagccagcccttcctgatggacctggagggcaagcagggcaatttcaagaacctgagggagttcgtgtttaagaatatcgatggctacttcaagatctacagcaagcacaccccaatcaacctggtgcgcgacctgccacagggattctccgccctggagccactggtggatctgcccatcggcatcaacatcacccggtttcagacactgctggccctgcacagatcctacctgacaccaggcgactcctctagcggatggaccgcaggagctgccgcctactatgtgggctatctgcagccccggaccttcctgctgaagtacaacgagaatggcaccatcacagacgcagtggattgcgccctggaccccctgtctgagacaaagtgtacactgaagagctttaccgtggagaagggcatctatcagacaagcaatttcagggtgcagcctaccgagtccatcgtgcgctttcccaatatcacaaacctgtgcccttttggcgaggtgttcaacgccaccagattcgccagcgtgtacgcctggaatcggaagagaatctccaactgcgtggccgactattctgtgctgtacaactccgcctctttcagcacctttaagtgctatggcgtgtctcccacaaagctgaatgatctgtgctttaccaacgtgtacgccgatagcttcgtgatcaggggagacgaagtgagacagatcgcaccaggacagacaggaaagatcgcagactacaattataagctgcctgacgatttcaccggctgcgtgatcgcctggaactccaacaatctggattctaaagtgggcggcaactacaattatctgtacaggctgtttcgcaagtccaatctgaagccattcgagcgggacatctccacagagatctaccaggccggctctaccccctgcaatggcgtggagggctttaactgttatttccctctgcagtcttacggcttccagccaacaaacggcgtgggctatcagccctacagagtggtggtgctgtcctttgagctgctgcacgcaccagcaacagtgtgcggcccaaagaagtctaccaatctggtgaagaacaagtgcgtgaacttcaacttcaacggactgaccggcacaggcgtgctgaccgagagcaataagaagttcctgccttttcagcagttcggcagggacatcgcagataccacagacgccgtgcgcgaccctcagaccctggagatcctggacatcacaccatgcagcttcggcggcgtgtccgtgatcacaccaggcaccaatacatccaaccaggtggccgtgctgtatcaggacgtgaattgtaccgaggtgcccgtggcaatccacgcagatcagctgacccctacatggcgggtgtactctaccggcagcaacgtgttccagacaagagccggatgcctgatcggagcagagcacgtgaacaatagctatgagtgcgacatccctatcggcgccggcatctgtgccagctaccagacccagacaaactccccatctggagcaggctccgtggccagccagtccatcatcgcctataccatgagcctgggcgccgagaacagcgtggcctactccaacaattctatcgccatccctaccaacttcacaatcagcgtgaccacagagatcctgccagtgtctatgaccaagacaagcgtggactgcacaatgtatatctgtggcgatagcaccgagtgctccaacctgctgctgcagtacggctccttttgtacccagctgaatagagccctgacaggcatcgccgtggagcaggataagaacacacaggaggtgttcgcccaggtgaagcagatctacaagaccccacccatcaaggactttggcggcttcaacttcagccagatcctgcctgatccaagcaagccctccaagaggtcttttatcgaggacctgctgttcaacaaggtgaccctggccgatgccggcttcatcaagcagtatggagattgcctgggagacatcgcagcccgcgacctgatctgtgcccagaagtttaatggcctgaccgtgctgcctccactgctgacagatgagatgatcgcccagtacacatctgccctgctggccggcaccatcacaagcggatggaccttcggcgcaggagccgccctgcagatcccttttgccatgcagatggcctataggttcaacggcatcggcgtgacccagaatgtgctgtacgagaaccagaagctgatcgccaatcagtttaacagcgccatcggcaagatccaggactctctgtcctctacagccagcgccctgggcaagctgcaggatgtggtgaatcagaacgcccaggccctgaataccctggtgaagcagctgagctccaacttcggcgccatctctagcgtgctgaatgacatcctgagccggctggacccccctgaggcagaggtgcagatcgacaggctgatcacaggccgcctgcagagcctgcagacctacgtgacacagcagctgatcagggcagcagagatcagagcctccgccaatctggccgccaccaagatgagcgagtgcgtgctgggacagtccaagagggtggacttttgtggcaagggctatcacctgatgtctttcccacagagcgcccctcacggcgtggtgtttctgcacgtgacctacgtgccagcccaggagaagaacttcaccacagcaccagccatctgccacgatggaaaggcacactttcctagggagggcgtgttcgtgtctaacggcacccactggtttgtgacacagcgcaatttctacgagccacagatcatcaccacagacaatacattcgtgagcggcaactgtgatgtggtgatcggcatcgtgaacaataccgtgtatgatccactgcagcccgagctggactcctttaaggaggagctggataagtacttcaagaatcacacctctcccgacgtggatctgggcgacatctccggcatcaatgcctctgtggtgaacatccagaaggagatcgaccggctgaacgaggtggccaagaatctgaacgagagcctgatcgatctgcaggagctgggcaagtatgagcagtacatcaagggctctggcagagagaacctgtatttccagggaggaggaggcagcggatacatccctgaggcaccaagggacggacaggcctacgtgcgcaaggatggcgagtgggtgctgctgtccacctttctgggccatcatcaccaccaccaccaccactga

SEQ ID NO: 1497 - DNA, 3846 bp, Artificial Sequence
  Description of Artificial Sequence: Synthetic polynucleotide
atgggcatcctgccaagcccaggaatgcccgccctgctgtctctggtgagcctgctgtccgtgctgctgatgggatgcgtggcagagacaggcacacagtgcgtgaacctgaccacaaggacccagctgccccctgcctataccaattctttcacacggggcgtgtactatcccgacaaggtgtttagaagctccgtgctgcactccacacaggatctgtttctgcctttcttttctaacgtgacctggttccacgccatccacgtgtccggcaccaatggcacaaagcggttcgacaatcccgtgctgccttttaacgatggcgtgtacttcgccagcaccgagaagtccaacatcatcagaggctggatctttggcaccacactggactctaagacacagagcctgctgatcgtgaacaatgccaccaacgtggtgatcaaggtgtgcgagttccagttttgtaatgatccattcctgggcgtgtactatcacaagaacaataagtcctggatggagtctgagtttcgcgtgtattctagcgccaacaattgcacatttgagtacgtgagccagcccttcctgatggacctggagggcaagcagggcaatttcaagaacctgagggagttcgtgtttaagaatatcgatggctacttcaagatctacagcaagcacaccccaatcaacctggtgcgcgacctgccacagggattctccgccctggagccactggtggatctgcccatcggcatcaacatcacccggtttcagacactgctggccctgcacagatcctacctgacaccaggcgactcctctagcggatggaccgcaggagctgccgcctactatgtgggctatctgcagccccggaccttcctgctgaagtacaacgagaatggcaccatcacagacgcagtggattgcgccctggaccccctgtctgagacaaagtgtacactgaagagctttaccgtggagaagggcatctatcagacaagcaatttcagggtgcagcctaccgagtccatcgtgcgctttcccaatatcacaaacctgtgcccttttggcgaggtgttcaacgccaccagattcgccagcgtgtacgcctggaatcggaagagaatctccaactgcgtggccgactattctgtgctgtacaactccgcctctttcagcacctttaagtgctatggcgtgtctcccacaaagctgaatgatctgtgctttaccaacgtgtacgccgatagcttcgtgatcaggggagacgaagtgagacagatcgcaccaggacagacaggaaagatcgcagactacaattataagctgcctgacgatttcaccggctgcgtgatcgcctggaactccaacaatctggattctaaagtgggcggcaactacaattatctgtacaggctgtttcgcaagtccaatctgaagccattcgagcgggacatctccacagagatctaccaggccggctctaccccctgcaatggcgtggagggctttaactgttatttccctctgcagtcttacggcttccagccaacaaacggcgtgggctatcagccctacagagtggtggtgctgtcctttgagctgctgcacgcaccagcaacagtgtgcggcccaaagaagtctaccaatctggtgaagaacaagtgcgtgaacttcaacttcaacggactgaccggcacaggcgtgctgaccgagagcaataagaagttcctgccttttcagcagttcggcagggacatcgcagataccacagacgccgtgcgcgaccctcagaccctggagatcctggacatcacaccatgcagcttcggcggcgtgtccgtgatcacaccaggcaccaatacatccaaccaggtggccgtgctgtatcaggacgtgaattgtaccgaggtgcccgtggcaatccacgcagatcagctgacccctacatggcgggtgtactctaccggcagcaacgtgttccagacaagagccggatgcctgatcggagcagagcacgtgaacaatagctatgagtgcgacatccctatcggcgccggcatctgtgccagctaccagacccagacaaactccccatctggagcaggctccgtggccagccagtccatcatcgcctataccatgagcctgggcgccgagaacagcgtggcctactccaacaattctatcgccatccctaccaacttcacaatcagcgtgaccacagagatcctgccagtgtctatgaccaagacaagcgtggactgcacaatgtatatctgtggcgatagcaccgagtgctccaacctgctgctgcagtacggctccttttgtacccagctgaatagagccctgacaggcatcgccgtggagcaggataagaacacacaggaggtgttcgcccaggtgaagcagatctacaagaccccacccatcaaggactttggcggcttcaacttcagccagatcctgcctgatccaagcaagccctccaagaggtcttttatcgaggacctgctgttcaacaaggtgaccctggccgatgccggcttcatcaagcagtataaagattgcctgggagacatcgcagcccgcgacctgatctgtgcccagaagtttaatggcctgaccgtgctgcctccactgctgacagatgagatgatcgcccagtacacatctgccctgctggccggcaccatcacaagcggatggaccttcggcgcaggagccgccctgcagatcccttttgccatgcagatggcctataggttcaacggcatcggcgtgacccagaatgtgctgtacgagaaccagaagctgatcgccaatcagtttaacagcgccatcggcaagatccaggactctctgtcctctacagccagcgccctgggcaagctgcaggatgtggtgaatcagaacgcccaggccctgaataccctggtgaagcagctgagctccaacttcggcgccatctctagcgtgctgaatgacatcctgagccggctggacccccctgaggcagaggtgcagatcgacaggctgatcacaggccgcctgcagagcctgcagacctacgtgacacagcagctgatcagggcagcagagatcagagcctccgccaatctggccgccaccaagatgagcgagtgcgtgctgggacagtccaagagggtggacttttgtggcaagggctatcacctgatgtctttcccacagagcgcccctcacggcgtggtgtttctgcacgtgacctacgtgccagcccaggagaagaacttcaccacagcaccagccatctgccacgatggaaaggcacactttcctagggagggcgtgttcgtgtctaacggcacccactggtttgtgacacagcgcaatttctacgagccacagatcatcaccacagacaatacattcgtgagcggcaactgtgatgtggtgatcggcatcgtgaacaataccgtgtatgatccactgcagcccgagctggactcctttaaggaggagctggataagtacttcaagaatcacacctctcccgacgtggatctgggcgacatctccggcatcaatgcctctgtggtgaacatccagaaggagatcgaccggctgaacgaggtggccaagaatctgaacgagagcctgatcgatctgcaggagctgggcaagtatgagcagtacatcaagggctctggcagagagaacctgtatttccagggaggaggaggcagcggatacatccctgaggcaccaagggacggacaggcctacgtgcgcaaggatggcgagtgggtgctgctgtccacctttctgggccatcatcaccaccaccaccaccactga

SEQ ID NO: 1498 - DNA, 3846 bp, Artificial Sequence
  Description of Artificial Sequence: Synthetic polynucleotide
atgggcatcctgccaagcccaggaatgcccgccctgctgtctctggtgagcctgctgtccgtgctgctgatgggatgcgtggcagagacaggcacacagtgcgtgaacctgaccacaaggacccagctgccccctgcctataccaattctttcacacggggcgtgtactatcccgacaaggtgtttagaagcgatgtgctgcactccacacaggatctgtttctgcctttcttttctaacgtgacctggttccacgccatccacgtgtccggcaccaatggcacaaagcggttcgacaatcccgtgctgccttttaacgatggcgtgtacttcgccagcaccgagaagtccaacatcatcagaggctggatctttggcaccacactggactctaagacacagagcctgctgatcgtgaacaatgccaccaacgtggtgatcaaggtgtgcgagttccagttttgtgaaaatccattcctgggcgtgtactatcacaagaacaataagtcctggatggagaaagagtttcgcgtgtattctagcgccaacaattgcacatttgagtacgtgagccagcccttcctgatggacctgggaggcaagcagggcaatttcaagtggctgagggagttcgtgtttaagaatatcgatggctacttcaagatctacagcaagcacaccccaatcaacctggtgcgcgacctgccacagggattctccgccctggagccactgatggatctgcccatcggcatcaacatcacccggtttcagacactgctggccctgcacagatcctacctgacaccaggcgactcctctagcggatggaccgcaggagctgccgcctactatgtgggctatctgcagccccggaccttcctgctgaagtacaacgagaatggcaccatcacagacgcagtggattgcgccctggaccccctgtctgagacaaagtgtacactgaagagctttaccgtggagaagggcatctatcagacaagcaatttcagggtgcagcctaccgagtccatcgtgcgctttcccaatatcacaaacctgtgcccttttggcgaggtgttcaacgccaccagattcgccagcgtgtacgcctggaatcggaagagaatctccaactgcgtggccgactattctgtgctgtacaactccgcctctttcagcacctttaagtgctatggcgtgtctcccacaaagctgaatgatctgtgctttaccaacgtgtacgccgatagcttcgtgatcaggggagacgaagtgagacagatcgcaccaggacagacaggaaagatcgcagactacaattataagctgcctgacgatttcaccggctgcgtgatcgcctggaactccaacaatctggattctaaagtgggcggcaactacaattatctgtacaggctgtttcgcaagtccaatctgaagccattcgagcgggacatctccacagagatctaccaggccggctctaccccctgcaatggcgtggagggctttaactgttatttccctctgcagtcttacggcttccagccaacaaacggcgtgggctatcagccctacagagtggtggtgctgtcctttgagctgctgcacgcaccagcaacagtgtgcggcccaaagaagtctaccaatctggtgaagaacaagtgcgtgaacttcaacttcaacggactgaccggcacaggcgtgctgaccgagagcaataagaagttcctgccttttcagcagttcggcagggacatcgcagataacacagacgccgtgcgcgaccctcagaccctggagatcctggacatcacaccatgcagcttcggcggcgtgtccgtgatcacaccaggcaccaatacatccaaccaggtggccgtgctgtatcaggacgtgaattgtaccgaggtgcccaatgcaatccacgcagatcagctgacccctacatggcgggtgtactctaccggcagcaacgtgttccagacaagagccggatgcctgatcggagcagagcacgtgaacaatagctatgagtgcgacatccctatcggcgccggcatctgtgccagctaccagacccagacaaactccccatctggagcaggctccgtggccagccagtccatcatcgcctataccatgagcctgggcgccgagaacagcgtggcctactccaacaattctatcgccatccctaccaacttcacaatcagcgtgaccacagagatcctgccagtgtctatgaccaagacaagcgtggactgcacaatgtatatctgtggcgatagcaccgagtgctccaacctgctgctgcagtacggctccttttgtacccagctgaatagagccctgcaaggcatcgcccaagagcaggataagaacacacaggaggtgttcgcccaggtgaagcagatctacaagaccccacccatcaaggactttggcggcttcaacttcagccagatcctgcctgatccaagcaagccctccaagaggtcttttatcgaggacctgctgttcaacaaggtgaccctggccgatgccggcttcatcaagcagtatggagattgcctgggagacatcagtgcccgcgacctgatctgtgcccagaagtttaatggcctgaccgtgctgcctccactgctgacagatgagatgatcgcccagtacacatctgccctgctggccggcaccatcacaagcggatggaccttcggcgcaggagccgccctgcagatcccttttgccatgcagatggcctataggttcaacggcatcggcgtgacccagaatgtgctgtacgagaaccagaagctgatcgccaatcagtttaacaaagccatcggcaagatccaggactctctgtcctctacagccagcgccctgggcaagctgcaggatgtggtgaatcagaacgcccaggccctgaataccctggtgaagcagctgagctccaacttcggcgccatctctagcgtgctgaatgacatcctgagccggctggacccccctgaggcagaggtgcagatcgacaggctgatcacaggccgcctgcagagcctgcagacctacgtgacacagcagctgatcagggcagcagagatcagagcctccgccaatctggccgccaccaagatgagcgagtgcgtgctgggacagtccaagagggtggacttttgtggcaagggctatcacctgatgtctttcccacagagcgcccctcacggcgtggtgtttctgcacgtgacctacgtgccagcccaggagaagaacttcaccacagcaccagccatctgccacgatggaaaggcattttttcctagggagggcgtgttcgtgtctaacggcacccaatggtttgtgacacagcgcaatttctacgagccacagatcatcaccacagacaatacattcgtgagcggcaactgtgatgtggtgatcggcatcgtgaacaataccgtgtatgatccactgcagcccgagctggactcctttaaggaggagctggataagtacttcaagaatcacacctctcccgacgtggatctgggcgacatctccggcatcaatgcctctgtggtgaacatccagaaggagatcgaccggctgaacgaggtggccaagaatctgaacgagagcctgatcgatctgcaggagctgggcaagtatgagcagtacatcaagggctctggcagagagaacctgtatttccagggaggaggaggcagcggatacatccctgaggcaccaagggacggacaggcctacgtgcgcaaggatggcgagtgggtgctgctgtccacctttctgggccatcatcaccaccaccaccaccactga

SEQ ID NO: 1499 - DNA, 3846 bp, Artificial Sequence
  Description of Artificial Sequence: Synthetic polynucleotide
atgggcatcctgccaagcccaggaatgcccgccctgctgtctctggtgagcctgctgtccgtgctgctgatgggatgcgtggcagagacaggcacacagtgcgtgaacctgaccacaaggacccagctgccccctgcctataccaattctttccgccggggcgtgtactatcccgacaaggtgtttagaagctccgtgctgcactccacacaggatctgtttctgcctttcttttctaacgtgacctggttccacgccatccacgtgtccggcaccaatggcacaaagcggttcgacaatcccgtgctgccttttaacgatggcgtgtacttcgccagcaccgagaagtccaacatcatcagaggctggatctttggcaccacactggactctaagacacagagcctgctgatcgtgaacaatgccaccaacgtggtgatcaaggtgtgcgagttccagttttgtaatgatccattcctgggcgtgtactatcacaagaacaataagtcctggatggagtctgagtttcgcgtgtattctagcgccaacaattgcacatttgagtacgtgagccagcccttcctgatggacctggagggcaagcagggcaatttcaagaacctgagggagttcgtgtttaagaatatcgatggctacttcaagatctacagcaagcacaccccaatcaacctggtgcgcgacctgccacagggattctccgccctggagccactggtggatctgcccatcggcatcaacatcacccggtttcagacactgctggccctgcacagatcctacctgacaccaggcgactcctctagcggatggaccgcaggagctgccgcctactatgtgggctatctgcagccccggaccttcctgctgaagtacaacgagaatggcaccatcacagacgcagtggattgcgccctggaccccctgtctgagacaaagtgtacactgaagagctttaccgtggagaagggcatctatcagacaagcaatttcagggtgcagcctaccgagtccatcgtgcgctttcccaatatcacaaacctgtgcccttttggcgaggtgttcaacgccaccagattcgccagcgtgtacgcctggaatcggaagagaatctccaactgcgtggccgactattctgtgctgtacaactccgcctctttcagcacctttaagtgctatggcgtgtctcccacaaagctgaatgatctgtgctttaccaacgtgtacgccgatagcttcgtgatcaggggagacgaagtgagacagatcgcaccaggacagacaggaaagatcgcagactacaattataagctgcctgacgatttcaccggctgcgtgatcgcctggaactccaacaatctggattctaaagtgggcggcaactacaattatctgtacaggctgtttcgcaagtccaatctgaagccattcgagcgggacatctccacagagatctaccaggccggctctaccccctgcaatggcgtggagggctttaactgttatttccctctgcagtcttacggcttccagccaacaaacggcgtgggctatcagccctacagagtggtggtgctgtcctttgagctgctgcacgcaccagcaacagtgtgcggcccaaagaagtctaccaatctggtgaagaacaagtgcgtgaacttcaacttcaacggactgaccggcacaggcgtgctgaccgagagcaataagaagttcctgccttttcagcagttcggcagggacatcgcagataccacagacgccgtgcgcgaccctcagaccctggagatcctggacatcacaccatgcagcttcggcggcgtgtccgtgatcacaccaggcaccaatacatccaaccaggtggccgtgctgtatcaggacgtgaattgtaccgaggtgcccgtggcaatccacgcagatcagctgacccctacatggcgggtgtactctaccggcagcaacgtgttccagacaagagccggatgcctgatcggagcagagcacgtgaacaatagctatgagtgcgacatccctatcggcgccggcatctgtgccagctaccagacccagacaaactccccatctggagcaggctccgtggccagccagtccatcatcgcctataccatgagcctgggcgccgagaacagcgtggcctactccaacaattctatcgccatccctaccaacttcacaatcagcgtgaccacagagatcctgccagtgtctatgaccaagacaagcgtggactgcacaatgtatatctgtggcgatagcaccgagtgctccaacctgctgctgcagtacggctccttttgtacccagctgaatagagccctgacaggcatcgccgtggagcaggataagaacacacaggaggtgttcgcccaggtgaagcagatctacaagaccccacccatcaaggactttggcggcttcaacttcagccagatcctgcctgatccaagcaagccctccaagaggtcttttatcgaggacctgctgttcaacaaggtgaccctggccgatgccggcttcatcaagcagtatggagattgcctgggagacatcgcagcccgcgacctgatctgtgcccagaagtttaatggcctgaccgtgctgcctccactgctgacagatgagatgatcgcccagtacacatctgccctgctggccggcaccatcacaagcggatggaccttcggcgcaggagccgccctgcagatcccttttgccatgcagatggcctataggttcaacggcatcggcgtgacccagaatgtgctgtacgagaaccagaagctgatcgccaatcagtttaacagcgccatcggcaagatccaggactctctgtcctctacagccagcgccctgggcaagctgcaggatgtggtgaatcagaacgcccaggccctgaataccctggtgaagcagctgagctccaacttcggcgccatctctagcgtgctgaatgacatcctgagccggctggacccccctgaggcagaggtgcagatcgacaggctgatcacaggccgcctgcagagcctgcagacctacgtgacacagcagctgatcagggcagcagagatcagagcctccgccaatctggccgccaccaagatgagcgagtgcgtgctgggacagtccaagagggtggacttttgtggcaagggctatcacctgatgtctttcccacagagcgcccctcacggcgtggtgtttctgcacgtgacctacgtgccagcccaggagaagaacttcaccacagcaccagccatctgccacgatggaaaggcacactttcctagggagggcgtgttcgtgtctaacggcacccactggtttgtgacacagcgcaatttctacgagccacagatcatcaccacagacaatacattcgtgagcggcaactgtgatgtggtgatcggcatcgtgaacaataccgtgtatgatccactgcagcccgagctggactcctttaaggaggagctggataagtacttcaagaatcacacctctcccgacgtggatctgggcgacatctccggcatcaatgcctctgtggtgaacatccagaaggagatcgaccggctgaacgaggtggccaagaatctgaacgagagcctgatcgatctgcaggagctgggcaagtatgagcagtacatcaagggctctggcagagagaacctgtatttccagggaggaggaggcagcggatacatccctgaggcaccaagggacggacaggcctacgtgcgcaaggatggcgagtgggtgctgctgtccacctttctgggccatcatcaccaccaccaccaccactga

SEQ ID NO: 1500 - DNA, 3846 bp, Artificial Sequence
  Description of Artificial Sequence: Synthetic polynucleotide
atgggcatcctgccaagcccaggaatgcccgccctgctgtctctggtgagcctgctgtccgtgctgctgatgggatgcgtggcagagacaggcacacagtgcgtgaacctgaccacaaggacccagctgccccctgcctataccaattctttcacacggggcgtgtactatcccgacaaggtgtttagaagctccgtgctgcactccacacaggatctgtttctgcctttcttttctaacgtgacctggttccacgccatccacgtgtccggcaccaatggcacaaagcggttcgacaatcccgtgctgccttttaacgatggcgtgtacttcgccagcaccgagaagtccaacatcatcagaggctggatctttggcaccacactggactctaagacacagagcctgctgatcgtgaacaatgccaccaacgtggtgatcaaggtgtgcgagttccagttttgtaatgatccattcctgggcgtgtactatcacaagaacaataagtcctggatggagtctgagtttcgcgtgtattctagcgccaacaattgcacatttgagtacgtgagccagcccttcctgatggacctggagggcaagcagggcaatttcaagaacctgagggagttcgtgtttaagaatatcgatggctacttcaagatctacagcaagcacaccccaatcaacctggtgcgcgacctgccacagggattctccgccctggagccactggtggatctgcccatcggcatcaacatcacccggtttcagacactgctggccctgcacagatcctacctgacaccaggcgactcctctagcggatggaccgcaggagctgccgcctactatgtgggctatctgcagccccggaccttcctgctgaagtacaacgagaatggcaccatcacagacgcagtggattgcgccctggaccccctgtctgagacaaagtgtacactgaagagctttaccgtggagaagggcatctatcagacaagcaatttcagggtgcagcctaccgagtccatcgtgcgctttcccaatatcacaaacctgtgcccttttggcgaggtgttcaacgccaccagattcgccagcgtgtacgcctggaatcggaagagaatctccaactgcgtggccgactattctgtgctgtacaactccgcctctttcagcacctttaagtgctatggcgtgtctcccacaaagctgaatgatctgtgctttaccaacgtgtacgccgatagcttcgtgatcaggggagacgaagtgagacagatcgcaccaggacagacaggaaagatcgcagactacaattataagctgcctgacgatttcaccggctgcgtgatcgcctggaactccaacaatctggattctaaagtgggcggcaactacaattatctgtacaggctgtttcgcaagtccaatctgaagccattcgagcgggacatctccacagagatctaccaggccggctctaccccctgcaatggcgtggagggctttaactgttatttccctctgcagtcttacggcttccagccaacaaacggcgtgggctatcagccctacagagtggtggtgctgtcctttgagctgctgcacgcaccagcaacagtgtgcggcccaaagaagtctaccaatctggtgaagaacaagtgcgtgaacttcaacttcaacggactgaccggcacaggcgtgctgaccgagagcaataagaagttcctgccttttcagcagttcggcagggacatcgcagataccacagacgccgtgcgcgaccctcagaccctggagatcctggacatcacaccatgcagcttcggcggcgtgtccgtgatcacaccaggcaccaatacatccaaccaggtggccgtgctgtatcaggacgtgaattgtaccgaggtgcccgtggcaatccacgcagatcagctgacccctacatggcgggtgtactctaccggcagcaacgtgttccagacaagagccggatgcctgatcggagcagagcacgtgaacaatagctatgagtgcgacatccctatcggcgccggcatctgtgccagctaccagacccagacaaactccccatctggagcaggctccgtggccagccagtccatcatcgcctataccatgagcctgggcgccgagaacagcgtggcctactccaacaattctatcgccatccctaccaacttccaaatcagcgtgaccacagagatcctgccagtgtctatgaccaagacaagcgtggactgcacaatgtatatctgtggcgatagcaccgagtgctccaacctgctgctgcagtacggctccttttgtacccagctgaatagagccctgacaggcatcgccgtggagcaggataagaacacacaggaggtgttcgcccaggtgaagcagatctacaagaccccacccatcaaggactttggcggcttcaacttcagccagatcctgcctgatccaagcaagccctccaagaggtcttttatcgaggacctgctgttcaacaaggtgaccctggccgatgccggcttcatcaagcagtatggagattgcctgggagacatcgcagcccgcgacctgatctgtgcccagaagtttaatggcctgaccgtgctgcctccactgctgacagatgagatgatcgcccagtacacatctgccctgctggccggcaccatcacaagcggatggaccttcggcgcaggagccgccctgcagatcccttttgccatgcagatggcctataggttcaacggcatcggcgtgacccagaatgtgctgtacgagaaccagaagctgatcgccaatcagtttaacagcgccatcggcaagatccaggactctctgtcctctacagccagcgccctgggcaagctgcaggatgtggtgaatcagaacgcccaggccctgaataccctggtgaagcagctgagctccaacttcggcgccatctctagcgtgctgaatgacatcctgagccggctggacccccctgaggcagaggtgcagatcgacaggctgatcacaggccgcctgcagagcctgcagacctacgtgacacagcagctgatcagggcagcagagatcagagcctccgccaatctggccgccaccaagatgagcgagtgcgtgctgggacagtccaagagggtggacttttgtggcaagggctatcacctgatgtctttcccacagagcgcccctcacggcgtggtgtttctgcacgtgacctacgtgccagcccaggagaagaacttcaccacagcaccagccatctgccacgatggaaaggcacactttcctagggagggcgtgttcgtgtctaacggcacccactggtttgtgacacagcgcaatttctacgagccacagatcatcaccacagacaatacattcgtgagcggcaactgtgatgtggtgatcggcatcgtgaacaataccgtgtatgatccactgcagcccgagctggactcctttaaggaggagctggataagtacttcaagaatcacacctctcccgacgtggatctgggcgacatctccggcatcaatgcctctgtggtgaacatccagaaggagatcgaccggctgaacgaggtggccaagaatctgaacgagagcctgatcgatctgcaggagctgggcaagtatgagcagtacatcaagggctctggcagagagaacctgtatttccagggaggaggaggcagcggatacatccctgaggcaccaagggacggacaggcctacgtgcgcaaggatggcgagtgggtgctgctgtccacctttctgggccatcatcaccaccaccaccaccactga

SEQ ID NO: 1501 - DNA, 3846 bp, Artificial Sequence
  Description of Artificial Sequence: Synthetic polynucleotide
atgggcatcctgccaagcccaggaatgcccgccctgctgtctctggtgagcctgctgtccgtgctgctgatgggatgcgtggcagagacaggcacacagtgcgtgaacctgaccacaaggacccagctgccccctgcctataccaattctttcacacggggcgtgtactatcccgacaaggtgtttagaagctccgtgctgcactccacacaggatctgtttctgcctttcttttctaacgtgacctggttccacgccatccacgtgtccggcaccaatggcacaaagcggttcgacaatcccgtgctgccttttaacgatggcgtgtacttcgccagcaccgagaagtccaacatcatcagaggctggatctttggcaccacactggactctaagacacagagcctgctgatcgtgaacaatgccaccaacgtggtgatcaaggtgtgcgagttccagttttgtaatgatccattcctgggcgtgtactatcacaagaacaataagtcctggatggagtctgagtttcgcgtgtattctagcgccaacaattgcacatttgagtacgtgagccagcccttcctgatggacctggagggcaagcagggcaatttcaagaacctgagggagttcgtgtttaagaatatcgatggctacttcaagatctacagcaagcacaccccaatcaacctggtgcgcgacctgccacagggattctccgccctggagccactggtggatctgcccatcggcatcaacatcacccggtttcagacactgctggccctgcacagatcctacctgacaccaggcgactcctctagcggatggaccgcaggagctgccgcctactatgtgggctatctgcagccccggaccttcctgctgaagtacaacgagaatggcaccatcacagacgcagtggattgcgccctggaccccctgtctgagacaaagtgtacactgaagagctttaccgtggagaagggcatctatcagacaagcaatttcagggtgcagcctaccgagtccatcgtgcgctttcccaatatcacaaacctgtgcccttttggcgaggtgttcaacgccaccagattcgccagcgtgtacgcctggaatcggaagagaatctccaactgcgtggccgactattctgtgctgtacaactccgcctctttcagcacctttaagtgctatggcgtgtctcccacaaagctgaatgatctgtgctttaccaacgtgtacgccgatagcttcgtgatcaggggagacgaagtgagacagatcgcaccaggacagacaggaaagatcgcagactacaattataagctgcctgacgatttcaccggctgcgtgatcgcctggaactccaacaatctggattctaaagtgggcggcaactacaattatctgtacaggctgtttcgcaagtccaatctgaagccattcgagcgggacatctccacagagatctaccaggccggctctaccccctgcaatggcgtggagggctttaactgttatttccctctgcagtcttacggcttccagccaacaaacggcgtgggctatcagccctacagagtggtggtgctgtcctttgagctgctgcacgcaccagcaacagtgtgcggcccaaagaagtctaccaatctggtgaagaacaagtgcgtgaacttcaacttcaacggactgaccggcacaggcgtgctgaccgagagcaataagaagttcctgccttttcagcagttcggcagggacatcgcagataccacagacgccgtgcgcgaccctcagaccctggagatcctggacatcacaccatgcagcttcggcggcgtgtccgtgatcacaccaggcaccaatacatccaaccaggtggccgtgctgtatcaggacgtgaattgtaccgaggtgcccgtggcaatccacgcagatcagctgacccctacatggcgggtgtactctaccggcagcaacgtgttccagacaagagccggatgcctgatcggagcagagcacgtgaacaatagctatgagtgcgacatccctatcggcgccggcatctgtgccagctaccagacccagacaaactccccatctggagcaggctccgtggccagccagtccatcatcgcctataccatgagcctgggcgccgagaacagcgtggcctactccaacaattctatcgccatccctaccaacttcacaatcagcgtgaccacagagatcctgccagtgtctatgaccaagacaagcgtggactgcacaatgtatatctgtggcgatagcaccgagtgctccaacctgctgctgcagtacggctccttttgtacccagctgaatagagccctgacaggcatcgccgtggagcaggataagaacacacaggaggtgttcgcccaggtgaagcagatctacaagaccccacccatcaaggactttggcggcttcaacttcagccagatcctgcctgatccaagcaagccctccaagaggtcttttatcgaggacctgctgttcaacaaggtgaccctggccgatgccggcttcatcaagcagtatggagattgcctgggagacatcgcagcccgcgacctgatctgtgcccagaagtttaatggcctgaccgtgctgcctccactgctgacagatgagatgatcgcccagtacacatctgccctgctggccggcaccatcacaagcggatggaccttcggcgcaggagccgccctgcagatcccttttgccatgcagatggcctataggttcaacggcatcggcgtgacccagaatgtgctgtacgagaaccagaagataatcgccaatcagtttaacagcgccatcggcaagatccaggactctctgtcctctacagccagcgccctgggcaagctgcaggatgtggtgaatcagaacgcccaggccctgaataccctggtgaagcagctgagctccaacttcggcgccatctctagcgtgctgaatgacatcctgagccggctggacccccctgaggcagaggtgcagatcgacaggctgatcacaggccgcctgcagagcctgcagacctacgtgacacagcagctgatcagggcagcagagatcagagcctccgccaatctggccgccaccaagatgagcgagtgcgtgctgggacagtccaagagggtggacttttgtggcaagggctatcacctgatgtctttcccacagagcgcccctcacggcgtggtgtttctgcacgtgacctacgtgccagcccaggagaagaacttcaccacagcaccagccatctgccacgatggaaaggcacactttcctagggagggcgtgttcgtgtctaacggcacccactggtttgtgacacagcgcaatttctacgagccacagatcatcaccacagacaatacattcgtgagcggcaactgtgatgtggtgatcggcatcgtgaacaataccgtgtatgatccactgcagcccgagctggactcctttaaggaggagctggataagtacttcaagaatcacacctctcccgacgtggatctgggcgacatctccggcatcaatgcctctgtggtgaacatccagaaggagatcgaccggctgaacgaggtggccaagaatctgaacgagagcctgatcgatctgcaggagctgggcaagtatgagcagtacatcaagggctctggcagagagaacctgtatttccagggaggaggaggcagcggatacatccctgaggcaccaagggacggacaggcctacgtgcgcaaggatggcgagtgggtgctgctgtccacctttctgggccatcatcaccaccaccaccaccactga

SEQ ID NO: 1502 - DNA, 3846 bp, Artificial Sequence
  Description of Artificial Sequence: Synthetic polynucleotide
atgggcatcctgccaagcccaggaatgcccgccctgctgtctctggtgagcctgctgtccgtgctgctgatgggatgcgtggcagagacaggcacacagtgcgtgaacctgaccacaaggacccagctgccccctgcctataccaattctttcacacggggcgtgtactatcccgacgatatctttagaagctccgtgctgcactccacacaggatctgtttctgcctttcttttctaacgtgacctggttccacgccatccacgtgtccggcaccaatggcacaaagcggttcgacaatcccgtgctgccttttggggatggcgtgtacttcgccagcaccgagaagtccaacatcatcagaggctggatctttggcaccacactggactctaagacacagagcctgctgatcgtgaacaatgccaccaacgtggtgatcaaggtgtgcgagttccagttttgtaatgatccattcctgggcgtgtactatcacaagaacaataagtcctggatggagtctgagtttcgcgtgtattctagcgccaacaattgcacatttgagtacgtgagccagcccttcctgatggacctggagggcaagcagggcaatttcaagaacctgagggagttcgtgtttaagaatatcgatggctacttcaagatctacagcaagcacaccccaatcaacctggtgcgcgacctgccacagggattctccgccctgaaaccactggtgaaactgcccatcggcatcaacatcacccggtttcagacactgctggccctgcacagatcctacctgacaccaggcgactcctctagcggatggaccgcaggagctgccgcctactatgtgggctatctgaaaccccggaccttcctgctgaagtacaacgagaatggcaccatcacagacgcagtggattgcgccctggaccccctgtctgagacaaagtgtacactgaagagctttaccgtggagaagggcatctatcagacaagcaatttcagggtgcagcctaccgagtccatcgtgcgctttcccaatatcacaaacctgtgcccttttggcgaggtgttcaacgccaccagattcgccagcgtgtacgcctggaatcggaagagaatctccaactgcgtggccgactattctgtgctgtacaactccgcctctttcagcacctttaagtgctatggcgtgtctcccacaaagctgaatgatctgtgctttaccaacgtgtacgccgatagcttcgtgatcaggggagacgaagtgagacagatcgcaccaggacagacaggaaagatcgcagactacaattataagctgcctgacgatttcaccggctgcgtgatcgcctggaactccaacaatctggattctaaagtgggcggcaactacaattatctgtacaggctgtttcgcaagtccaatctgaagccattcgagcgggacatctccacagagatctaccaggccggctctaccccctgcaatggcgtggagggctttaactgttatttccctctgcagtcttacggcttccagccaacaaacggcgtgggctatcagccctacagagtggtggtgctgtcctttgagctgctgcacgcaccagcaacagtgtgcggcccaaagaagtctaccaatctggtgaagaacaagtgcgtgaacttcaacttcaacggactgaccggcacaggcgtgctgaccgagagcaataagaagttcctgccttttcagcagttcggcagggacatcgcagataccacagacgccgtgcgcgaccctcagaccctggagatcctggacatcacaccatgcagcttcggcggcgtgtccgtgatcacaccaggcaccaatacatccaaccaggtggccgtgctgtatcaggacgtgaattgtaccgaggtgcccgtggcaatccacgcagatcagctgacccctacatggcgggtgtactctaccggcagcaacgtgttccagacaagagccggatgcctgatcggagcagagcacgtgaacaatagctatgagtgcgacatccctatcggcgccggcatctgtgccagctaccagacccagacaaactccccatctggagcaggctccgtggccagccagtccatcatcgcctataccatgagcctgggcgccgagaacagcgtggcctactccaacaattctatcgccatccctaccaacttcacaatcagcgtgaccacagagatcctgccagtgtctatgaccaagacaagcgtggactgcacaatgtatatctgtggcgatagcaccgagtgctccaacctgctgctgcagtacggctccttttgtacccagctgaatagagccctgacaggcatcgccgtggagcaggataagaacacacaggaggtgttcgcccaggtgaagcagatctacaagaccccacccatcaaggactttggcggcttcaacttcagccagatcctgcctgatccaagcaagccctccaagaggtcttttatcgaggacctgctgttcaacaaggtgaccctggccgatgccggcttcatcaagcagtatggagattgcctgggagacatcgcagcccgcgacctgatctgtgcccagaagtttaatggcctgaccgtgctgcctccactgctgacagatgagatgatcgcccagtacacatctgccctgctggccggcaccatcacaagcggatggaccttcggcgcaggagccgccctgcagatcccttttgccatgcagatggcctataggttcaacggcatcggcgtgacccagaatgtgctgtacgagaaccagaagctgatcgccaatcagtttaacagcgccatcggcaagatccaggactctctgtcctctacagccagcgccctgggcaagctgcaggatgtggtgaatcagaacgcccaggccctgaataccctggtgaagcagctgagctccaacttcggcgccatctctagcgtgctgaatgacatcctgagccggctggacccccctgaggcagaggtgcagatcgacaggctgatcacaggccgcctgcagagcctgcagacctacgtgacacagcagctgatcagggcagcagagatcagagcctccgccaatctggccgccaccaagatgagcgagtgcgtgctgggacagtccaagagggtggacttttgtggcaagggctatcacctgatgtctttcccacagagcgcccctcacggcgtggtgtttctgcacgtgacctacgtgccagcccaggagaagaacttcaccacagcaccagccatctgccacgatggaaaggcacactttcctagggagggcgtgttcgtgtctaacggcacccactggtttgtgacacagcgcaatttctacgagccacagatcatcaccacagacaatacattcgtgagcggcaactgtgatgtggtgatcggcatcgtgaacaataccgtgtatgatccactgcagcccgagctggactcctttaaggaggagctggataagtacttcaagaatcacacctctcccgacgtggatctgggcgacatctccggcatcaatgcctctgtggtgaacatccagaaggagatcgaccggctgaacgaggtggccaagaatctgaacgagagcctgatcgatctgcaggagctgggcaagtatgagcagtacatcaagggctctggcagagagaacctgtatttccagggaggaggaggcagcggatacatccctgaggcaccaagggacggacaggcctacgtgcgcaaggatggcgagtgggtgctgctgtccacctttctgggccatcatcaccaccaccaccaccactga

SEQ ID NO: 1503 - DNA, 3846 bp, Artificial Sequence
  Description of Artificial Sequence: Synthetic polynucleotide
atgggcatcctgccaagcccaggaatgcccgccctgctgtctctggtgagcctgctgtccgtgctgctgatgggatgcgtggcagagacaggcacacagtgcgtgaacctgaccacaaggacccagctgccccctgcctataccaattctttcacacggggcgtgtactatcccgacaaggtgtttagaagcgatgtgctgcactccacacaggatctgtttctgcctttcttttctaacgtgacctggttccacgccatccacgtgtccggcaccaatggcacaaagcggttcgacaatcccgtgctgccttttaacgatggcgtgtacttcgccagcaccgagaagtccaacatcatcagaggctggatctttggcaccacactggactctaagacacagagcctgctgatcgtgaacaatgccaccaacgtggtgatcaaggtgtgcgagttccagttttgtgaaaatccattcctgggcgtgtactatcacaagaacaataagtcctggatggagaaagagtttcgcgtgtattctagcgccaacaattgcacatttgagtacgtgagccagcccttcctgatggacctggggggcaagcagggcaatttcaagtggctgagggagttcgtgtttaagaatatcgatggctacttcaagatctacagcaagcacaccccaatcaacctggtgcgcgacctgccacagggattctccgccctggagccactgatggatctgcccatcggcatcaacatcacccggtttcagacactgctggccctgcacagatcctacctgacaccaggcgactcctctagcggatggaccgcaggagctgccgcctactatgtgggctatctgcagccccggaccttcctgctgaagtacaacgagaatggcaccatcacagacgcagtggattgcgccctggaccccctgtctgagacaaagtgtacactgaagagctttaccgtggagaagggcatctatcagacaagcaatttcagggtgcagcctaccgagtccatcgtgcgctttcccaatatcacaaacctgtgcccttttggcgaggtgttcaacgccaccagattcgccagcgtgtacgcctggaatcggaagagaatctccaactgcgtggccgactattctgtgctgtacaactccgcctctttcagcacctttaagtgctatggcgtgtctcccacaaagctgaatgatctgtgctttaccaacgtgtacgccgatagcttcgtgatcaggggagacgaagtgagacagatcgcaccaggacagacaggaaagatcgcagactacaattataagctgcctgacgatttcaccggctgcgtgatcgcctggaactccaacaatctggattctaaagtgggcggcaactacaattatctgtacaggctgtttcgcaagtccaatctgaagccattcgagcgggacatctccacagagatctaccaggccggctctaccccctgcaatggcgtggagggctttaactgttatttccctctgcagtcttacggcttccagccaacaaacggcgtgggctatcagccctacagagtggtggtgctgtcctttgagctgctgcacgcaccagcaacagtgtgcggcccaaagaagtctaccaatctggtgaagaacaagtgcgtgaacttcaacttcaacggactgaccggcacaggcgtgctgaccgagagcaataagaagttcctgccttttcagcagttcggcagggacatcgcagataacacagacgccgtgcgcgaccctcagaccctggagatcctggacatcacaccatgcagcttcggcggcgtgtccgtgatcacaccaggcaccaatacatccaaccaggtggccgtgctgtatcaggacgtgaattgtaccgaggtgcccaatgcaatccacgcagatcagctgacccctacatggcgggtgtactctaccggcagcaacgtgttccagacaagagccggatgcctgatcggagcagagcacgtgaacaatagctatgagtgcgacatccctatcggcgccggcatctgtgccagctaccagacccagacaaactccccatctggagcaggctccgtggccagccagtccatcatcgcctataccatgagcctgggcgccgagaacagcgtggcctactccaacaattctatcgccatccctaccaacttcacaatcagcgtgaccacagagatcctgccagtgtctatgaccaagacaagcgtggactgcacaatgtatatctgtggcgatagcaccgagtgctccaacctgctgctgcagtacggctccttttgtacccagctgaatagagccctgcaaggcatcgcccgagagcaggataagaacacacaggaggtgttcgcccaggtgaagcagatctacaagaccccacccatcaaggactttggcggcttcaacttcagccagatcctgcctgatccaagcaagccctccaagaggtcttttatcgaggacctgctgttcaacaaggtgaccctggccgatgccggcttcatcaagcagtatggagattgcctgggagacatcgcagcccgcgacctgatctgtgcccagaagtttaatggcctgaccgtgctgcctccactgctgacagatgagatgatcgcccagtacacatctgccctgctggccggcaccatcacaagcggatggaccttcggcgcaggagccgccctgcagatcccttttgccatgcagatggcctataggttcaacggcatcggcgtgacccagaatgtgctgtacgagaaccagaagctgatcgccaatcagtttaaccaagccatcggcaagatccaggactctctgtcctctacagccagcgccctgggcaagctgcaggatgtggtgaatcagaacgcccaggccctgaataccctggtgaagcagctgagctccaacttcggcgccatctctagcgtgctgaatgacatcctgagccggctggacccccctgaggcagaggtgcagatcgacaggctgatcacaggccgcctgcagagcctgcagacctacgtgacacagcagctgatcagggcagcagagatcagagcctccgccaatctggccgccaccaagatgagcgagtgcgtgctgggacagtccaagagggtggacttttgtggcaagggctatcacctgatgtctttcccacagagcgcccctcacggcgtggtgtttctgcacgtgacctacgtgccagcccaggagaagaacttcaccacagcaccagccatctgccacgatggaaaggcattttttcctagggagggcgtgttcgtgtctaacggcacccaatggtttgtgacacagcgcaatttctacgagccacagatcatcaccacagacaatacattcgtgagcggcaactgtgatgtggtgatcggcatcgtgaacaataccgtgtatgatccactgcagcccgagctggactcctttaaggaggagctggataagtacttcaagaatcacacctctcccgacgtggatctgggcgacatctccggcatcaatgcctctgtggtgaacatccagaaggagatcgaccggctgaacgaggtggccaagaatctgaacgagagcctgatcgatctgcaggagctgggcaagtatgagcagtacatcaagggctctggcagagagaacctgtatttccagggaggaggaggcagcggatacatccctgaggcaccaagggacggacaggcctacgtgcgcaaggatggcgagtgggtgctgctgtccacctttctgggccatcatcaccaccaccaccaccactga

SEQ ID NO: 1504 - DNA, 3846 bp, Artificial Sequence
  Description of Artificial Sequence: Synthetic polynucleotide
atgggcatcctgccaagcccaggaatgcccgccctgctgtctctggtgagcctgctgtccgtgctgctgatgggatgcgtggcagagacaggcacacagtgcgtgaacctgaccacaaggacccagctgccccctgcctataccaattctttcacacggggcgtgtactatcccgacaaggtgtttagaagcgatgtgctgcactccacacaggatctgtttctgcctttcttttctaacgtgacctggttccacgccatccacgtgtccggcaccaatggcacaaagcggttcgacaatcccgtgctgccttttaacgatggcgtgtacttcgccagcaccgagaagtccaacatcatcagaggctggatctttggcaccacactggactctaagacacagagcctgctgatcgtgaacaatgccaccaacgtggtgatcaaggtgtgcgagttccagttttgtgaagatccattcctgggcgtgtactatcacaagaacaataagtcctggatggagaaagagtttcgcgtgtattctagcgccaacaattgcacatttgagtacgtgagccagcccttcctgatggacctgggaggcaagcagggcaatttcaagtggctgagggagttcgtgtttaagaatatcgatggctacttcaagatctacagcaagcacaccccaatcaacctggtgcgcgacctgccacagggattctccgccctggagccactgatggatctgcccatcggcatcaacatcacccggtttcagacactgctggccctgcacagatcctacctgacaccaggcgactcctctagcggatggaccgcaggagctgccgcctactatgtgggctatctgcagccccggaccttcctgctgaagtacaacgagaatggcaccatcacagacgcagtggattgcgccctggaccccctgtctgagacaaagtgtacactgaagagctttaccgtggagaagggcatctatcagacaagcaatttcagggtgcagcctaccgagtccatcgtgcgctttcccaatatcacaaacctgtgcccttttggcgaggtgttcaacgccaccagattcgccagcgtgtacgcctggaatcggaagagaatctccaactgcgtggccgactattctgtgctgtacaactccgcctctttcagcacctttaagtgctatggcgtgtctcccacaaagctgaatgatctgtgctttaccaacgtgtacgccgatagcttcgtgatcaggggagacgaagtgagacagatcgcaccaggacagacaggaaagatcgcagactacaattataagctgcctgacgatttcaccggctgcgtgatcgcctggaactccaacaatctggattctaaagtgggcggcaactacaattatctgtacaggctgtttcgcaagtccaatctgaagccattcgagcgggacatctccacagagatctaccaggccggctctaccccctgcaatggcgtggagggctttaactgttatttccctctgcagtcttacggcttccagccaacaaacggcgtgggctatcagccctacagagtggtggtgctgtcctttgagctgctgcacgcaccagcaacagtgtgcggcccaaagaagtctaccaatctggtgaagaacaagtgcgtgaacttcaacttcaacggactgaccggcacaggcgtgctgaccgagagcaataagaagttcctgccttttcagcagttcggcagggacatcgcagataatacagacgccgtgcgcgaccctcagaccctggagatcctggacatcacaccatgcagcttcggcggcgtgtccgtgatcacaccaggcaccaatacatccaaccaggtggccgtgctgtatcaggacgtgaattgtaccgaggtgcccaatgcaatccacgcagatcagctgacccctacatggcgggtgtactctaccggcagcaacgtgttccagacaagagccggatgcctgatcggagcagagcacgtgaacaatagctatgagtgcgacatccctatcggcgccggcatctgtgccagctaccagacccagacaaactccccatctggagcaggctccgtggccagccagtccatcatcgcctataccatgagcctgggcgccgagaacagcgtggcctactccaacaattctatcgccatccctaccaacttcacaatcagcgtgaccacagagatcctgccagtgtctatgaccaagacaagcgtggactgcacaatgtatatctgtggcgatagcaccgagtgctccaacctgctgctgcagtacggctccttttgtacccagctgaatagagccctgcaaggcatcgcccaagagcaggataagaacacacaggaggtgttcgcccaggtgaagcagatctacaagaccccacccatcaaggactttggcggcttcaacttcagccagatcctgcctgatccaagcaagccctccaagaggtcttttatcgaggacctgctgttcaacaaggtgaccctggccgatgccggcttcatcaagcagtatggagattgcctgggagacatcgcagcccgcgacctgatctgtgcccagaagtttaatggcctgaccgtgctgcctccactgctgacagatgagatgatcgcccagtacacatctgccctgctggccggcaccatcacaagcggatggaccttcggcgcaggagccgccctgcagatcccttttgccatgcagatggcctataggttcaacggcatcggcgtgacccagaatgtgctgtacgagaaccagaagctgatcgccaatcagtttaacaaagccatcggcaagatccaggactctctgtcctctacagccagcgccctgggcaagctgcaggatgtggtgaatcagaacgcccaggccctgaataccctggtgaagcagctgagctccaacttcggcgccatctctagcgtgctgaatgacatcctgagccggctggacccccctgaggcagaggtgcagatcgacaggctgatcacaggccgcctgcagagcctgcagacctacgtgacacagcagctgatcagggcagcagagatcagagcctccgccaatctggccgccaccaagatgagcgagtgcgtgctgggacagtccaagagggtggacttttgtggcaagggctatcacctgatgtctttcccacagagcgcccctcacggcgtggtgtttctgcacgtgacctacgtgccagcccaggagaagaacttcaccacagcaccagccatctgccacgatggaaaggcattttttcctagggagggcgtgttcgtgtctaacggcacccaatggtttgtgacacagcgcaatttctacgagccacagatcatcaccacagacaatacattcgtgagcggcaactgtgatgtggtgatcggcatcgtgaacaataccgtgtatgatccactgcagcccgagctggactcctttaaggaggagctggataagtacttcaagaatcacacctctcccgacgtggatctgggcgacatctccggcatcaatgcctctgtggtgaacatccagaaggagatcgaccggctgaacgaggtggccaagaatctgaacgagagcctgatcgatctgcaggagctgggcaagtatgagcagtacatcaagggctctggcagagagaacctgtatttccagggaggaggaggcagcggatacatccctgaggcaccaagggacggacaggcctacgtgcgcaaggatggcgagtgggtgctgctgtccacctttctgggccatcatcaccaccaccaccaccactga

SEQ ID NO: 1505 - DNA, 3846 bp, Artificial Sequence
  Description of Artificial Sequence: Synthetic polynucleotide
atgggcatcctgccaagcccaggaatgcccgccctgctgtctctggtgagcctgctgtccgtgctgctgatgggatgcgtggcagagacaggcacacagtgcgtgaacctgaccacaaggacccagctgccccctgcctataccaattctttcacacggggcgtgtactatcccgacaaggtgtttagaagctccgtgctgcactccacacaggatctgtttctgcctttcttttctaacgtgacctggttccacgccatccacgtgtccggcaccaatggcacaaagcggttcgacaatcccgtgctgccttttaacgatggcgtgtacttcgccagcaccgagaagtccaacatcatcagaggctggatctttggcaccacactggactctaagacacagagcctgctgatcgtgaacaatgccaccaacgtggtgatcaaggtgtgcgagttccagttttgtaatgatccattcctgggcgtgtactatcacaagaacaataagtcctggatggagtctgagtttcgcgtgtattctagcgccaacaattgcacatttgagtacgtgagccagcccttcctgatggacctggagggcaagcagggcaatttcaagaacctgagggagttcgtgtttaagaatatcgatggctacttcaagatctacagcaagcacaccccaatcaacctggtgcgcgacctgccacagggattctccgccctggagccactggtggatctgcccatcggcatcaacatcacccggtttcagacactgctggccctgcacagatcctacctgacaccaggcgactcctctagcggatggaccgcaggagctgccgcctactttgtgggctatctgcagccccggaccttcctgctgaagtacaacgagaatggcaccatcacagacgcagtggattgcgccctggaccccctgtctgagacaaagtgtacactgaagagctttaccgtggagaagggcatctatcagacaagcaatttcagggtgcagcctaccgagtccatcgtgcgctttcccaatatcacaaacctgtgcccttttggcgaggtgttcaacgccaccagattcgccagcgtgtacgcctggaatcggaagagaatctccaactgcgtggccgactattctgtgctgtacaactccgcctctttcagcacctttaagtgctatggcgtgtctcccacaaagctgaatgatctgtgctttaccaacgtgtacgccgatagcttcgtgatcaggggagacgaagtgagacagatcgcaccaggacagacaggaaagatcgcagactacaattataagctgcctgacgatttcaccggctgcgtgatcgcctggaactccaacaatctggattctaaagtgggcggcaactacaattatctgtacaggctgtttcgcaagtccaatctgaagccattcgagcgggacatctccacagagatctaccaggccggctctaccccctgcaatggcgtggagggctttaactgttatttccctctgcagtcttacggcttccagccaacaaacggcgtgggctatcagccctacagagtggtggtgctgtcctttgagctgctgcacgcaccagcaacagtgtgcggcccaaagaagtctaccaatctggtgaagaacaagtgcgtgaacttcaacttcaacggactgaccggcacaggcgtgctgaccgagagcaataagaagttcctgccttttcagcagttcggcagggacatcgcagataccacagacgccgtgcgcgaccctcagaccctggagatcctggacatcacaccatgcagcttcggcggcgtgtccgtgatcacaccaggcaccaatacatccaaccaggtggccgtgctgtatcaggacgtgaattgtaccgaggtgcccgtggcaatccacgcagatcagctgacccctacatggcgggtgtactctaccggcagcaacgtgttccagacaagagccggatgcctgatcggagcagagcacgtgaacaatagctatgagtgcgacatccctatcggcgccggcatctgtgccagctaccagacccagacaaactccccatctggagcaggctccgtggccagccagtccatcatcgcctataccatgagcctgggcgccgagaacagcgtggcctactccaacaattctatcgccatccctaccaacttcacaatcagcgtgaccacagagatcctgccagtgtctatgaccaagacaagcgtggactgcacaatgtatatctgtggcgatagcaccgagtgctccaacctgctgctgcagtacggctccttttgtacccagctgaatagagccctgacaggcatcgccgtggagcaggataagaacacacaggaggtgttcgcccaggtgaagcagatctacaagaccccacccatcaaggactttggcggcttcaacttcagccagatcctgcctgatccaagcaagccctccaagaggtcttttatcgaggacctgctgttcaacaaggtgaccctggccgatgccggcttcatcaagcagtatggagattgcctgggagacatcgcagcccgcgacctgatctgtgcccagaagtttaatggcctgaccgtgctgcctccactgctgacagatgagatgatcgcccagtacacatctgccctgctggccggcaccatcacaagcggatggaccttcggcgcaggagccgccctgcagatcccttttgccatgcagatggcctataggttcaacggcatcggcgtgacccagaatgtgctgtacgagaaccagaagctgatcgccaatcagtttaacagcgccatcggcaagatccaggactctctgtcctctacagccagcgccctgggcaagctgcaggatgtggtgaatcagaacgcccaggccctgaataccctggtgaagcagctgagctccaacttcggcgccatctctagcgtgctgaatgacatcctgagccggctggacccccctgaggcagaggtgcagatcgacaggctgatcacaggccgcctgcagagcctgcagacctacgtgacacagcagctgatcagggcagcagagatcagagcctccgccaatctggccgccaccaagatgagcgagtgcgtgctgggacagtccaagagggtggacttttgtggcaagggctatcacctgatgtctttcccacagagcgcccctcacggcgtggtgtttctgcacgtgacctacgtgccagcccaggagaagaacttcaccacagcaccagccatctgccacgatggaaaggcacactttcctagggagggcgtgttcgtgtctaacggcacccactggtttgtgacacagcgcaatttctacgagccacagatcatcaccacagacaatacattcgtgagcggcaactgtgatgtggtgatcggcatcgtgaacaataccgtgtatgatccactgcagcccgagctggactcctttaaggaggagctggataagtacttcaagaatcacacctctcccgacgtggatctgggcgacatctccggcatcaatgcctctgtggtgaacatccagaaggagatcgaccggctgaacgaggtggccaagaatctgaacgagagcctgatcgatctgcaggagctgggcaagtatgagcagtacatcaagggctctggcagagagaacctgtatttccagggaggaggaggcagcggatacatccctgaggcaccaagggacggacaggcctacgtgcgcaaggatggcgagtgggtgctgctgtccacctttctgggccatcatcaccaccaccaccaccactga

SEQ ID NO: 1506 - DNA, 3846 bp, Artificial Sequence
  Description of Artificial Sequence: Synthetic polynucleotide
atgggcatcctgccaagcccaggaatgcccgccctgctgtctctggtgagcctgctgtccgtgctgctgatgggatgcgtggcagagacaggcacacagtgcgtgaacctgaccacaaggacccagctgccccctgcctataccaattctttcacacggggcgtgtactatcccgacaaggtgtttagaagctccgtgctgcactccacacaggatctgtttctgcctttcttttctaacgtgacctggttccacgccatccacgtgtccggcaccaatggcacaaagcggttcgacaatcccgtgctgccttttaacgatggcgtgtacttcgccagcaccgagaagtccaacatcatcagaggctggatctttggcaccacactggactctaagacacagagcctgctgatcgtgaacaatgccaccaacgtggtgatcaaggtgtgcgagttccagttttgtaatgatccattcctgggcgtgtactatcacaagaacaataagtcctggatggagtctgagtttcgcgtgtattctagcgccaacaattgcacatttgagtacgtgagccagcccttcctgatggacctggagggcaagcagggcaatttcaagaacctgagggagttcgtgtttaagaatatcgatggctacttcaagatctacagcaagcacaccccaatcaacctggtgcgcgacctgccacagggattctccgccctggagccactggtggatctgcccatcggcatcaacatcacccggtttcagacactgctggccctgcacagatcctacctgacaccaggcgactcctctagcggatggaccgcaggagctgccgcctactatgtgggctatctgcagccccggaccttcctgctgaagtacaacgagaatggcaccatcacagacgcagtggattgcgccctggaccccctgtctgagacaaagtgtacactgaagagctttaccgtggagaagggcatctatcagacaagcaatttcagggtgcagcctaccgagtccatcgtgcgctttcccaatatcacaaacctgtgcccttttggcgaggtgttcaacgccaccagattcgccagcgtgtacgcctggaatcggaagagaatctccaactgcgtggccgactattctgtgctgtacaactccgcctctttcagcacctttaagtgctatggcgtgtctcccacaaagctgaatgatctgtgctttaccaacgtgtacgccgatagcttcgtgatcaggggagacgaagtgagacagatcgcaccaggacagacaggaaagatcgcagactacaattataagctgcctgacgatttcaccggctgcgtgatcgcctggaactccaacaatctggattctaaagtgggcggcaactacaattatctgtacaggctgtttcgcaagtccaatctgaagccattcgagcgggacatctccacagagatctaccaggccggctctaccccctgcaatggcgtggagggctttaactgttatttccctctgcagtcttacggcttccagccaacaaacggcgtgggctatcagccctacagagtggtggtgctgtcctttgagctgctgcacgcaccagcaacagtgtgcggcccaaagaagtctaccaatctggtgaagaacaagtgcgtgaacttcaacttcaacggactgaccggcacaggcgtgctgaccgagagcaataagaagttcctgccttttcagcagttcggcagggacatcgcagataccacagacgccgtgcgcgaccctcagaccctggagatcctggacatcacaccatgcagcttcggcggcgtgtccgtgatcacaccaggcaccaatacatccaaccaggtggccgtgctgtatcaggacgtgaattgtaccgaggtgcccgtggcaatccacgcagatcagctgacccctacatggcgggtgtactctaccggcagcaacgtgttccagacaagagccggatgcctgatcggagcagagcacgtgaacaatagctatgagtgcgacatccctatcggcgccggcatctgtgccagctaccagacccagacaaactccccatctggagcaggctccgtggccagccagtccatcatcgcctataccatgagcctgggcgccgagaacagcgtggcctactccaacaattctatcgccatccctaccaacttcacaatcagcgtgaccacagagatcctgccagtgtctatgaccaagacaagcgtggactgcacaatgtatatctgtggcgatagcaccgagtgctccaacctgctgctgcagtacggctccttttgtacccagctgaatagagccctgacaggcatcgccgtggagcaggataagaacacacaggaggtgttcgcccaggtgaagcagatctacaagaccccacccatcaaggactttggcggcttcaacttcagccagatcctgcctgatccaagcaagccctccaagaggtcttttatcgaggacctgctgttcaacaaggtgaccctggccgatgccggcttcatcaagcagtatggagaatgcctgggagacatcgcagcccgcgacctgatctgtgcccagaagtttaatggcctgaccgtgctgcctccactgctgacagatgagatgatcgcccagtacacatctgccctgctggccggcaccatcacaagcggatggaccttcggcgcaggagccgccctgcagatcccttttgccatgcagatggcctataggttcaacggcatcggcgtgacccagaatgtgctgtacgagaaccagaagctgatcgccaatcagtttaacagcgccatcggcaagatccaggactctctgtcctctacagccagcgccctgggcaagctgcaggatgtggtgaatcagaacgcccaggccctgaataccctggtgaagcagctgagctccaacttcggcgccatctctagcgtgctgaatgacatcctgagccggctggacccccctgaggcagaggtgcagatcgacaggctgatcacaggccgcctgcagagcctgcagacctacgtgacacagcagctgatcagggcagcagagatcagagcctccgccaatctggccgccaccaagatgagcgagtgcgtgctgggacagtccaagagggtggacttttgtggcaagggctatcacctgatgtctttcccacagagcgcccctcacggcgtggtgtttctgcacgtgacctacgtgccagcccaggagaagaacttcaccacagcaccagccatctgccacgatggaaaggcacactttcctagggagggcgtgttcgtgtctaacggcacccactggtttgtgacacagcgcaatttctacgagccacagatcatcaccacagacaatacattcgtgagcggcaactgtgatgtggtgatcggcatcgtgaacaataccgtgtatgatccactgcagcccgagctggactcctttaaggaggagctggataagtacttcaagaatcacacctctcccgacgtggatctgggcgacatctccggcatcaatgcctctgtggtgaacatccagaaggagatcgaccggctgaacgaggtggccaagaatctgaacgagagcctgatcgatctgcaggagctgggcaagtatgagcagtacatcaagggctctggcagagagaacctgtatttccagggaggaggaggcagcggatacatccctgaggcaccaagggacggacaggcctacgtgcgcaaggatggcgagtgggtgctgctgtccacctttctgggccatcatcaccaccaccaccaccactga

SEQ ID NO: 1507 - DNA, 3846 bp, Artificial Sequence
  Description of Artificial Sequence: Synthetic polynucleotide
atgggcatcctgccaagcccaggaatgcccgccctgctgtctctggtgagcctgctgtccgtgctgctgatgggatgcgtggcagagacaggcacacagtgcgtgaacctgaccacaaggacccagctgccccctgcctataccaattctttcacacggggcgtgtactatcccgacaaggtgtttagaagctccgtgctgcactccacacaggatctgtttctgcctttcttttctaacgtgacctggttccacgccatccacgtgtccggcaccaatggcacaaagcggttcgacaatcccgtgctgccttttaacgatggcgtgtacttcgccagcaccgagaagtccaacatcatcagaggctggatctttggcaccacactggactctaagacacagagcctgctgatcgtgaacaatgccaccaacgtggtgatcaaggtgtgcgagttccagttttgtaatgatccattcctgggcgtgtactatcacaagaacaataagtcctggatggagtctgagtttcgcgtgtattctagcgccaacaattgcacatttgagtacgtgagccagcccttcctgatggacctggagggcaagcagggcaatttcaagaacctgagggagttcgtgtttaagaatatcgatggctacttcaagatctacagcaagcacaccccaatcaacctggtgcgcgacctgccacagggattctccgccctggagccactggtggatctgcccatcggcatcaacatcacccggtttcagacactgctggccctgcacagatcctacctgacaccaggcgactcctctagcggatggaccgcaggagctgccgcctactatgtgggctatctgcagccccggaccttcctgctgaagtacaacgagaatggcaccatcacagacgcagtggattgcgccctggaccccctgtctgagacaaagtgtacactgaagagctttaccgtggagaagggcatctatcagacaagcaatttcagggtgcagcctaccgagtccatcgtgcgctttcccaatatcacaaacctgtgcccttttggcgaggtgttcaacgccaccagattcgccagcgtgtacgcctggaatcggaagagaatctccaactgcgtggccgactattctgtgctgtacaactccgcctctttcagcacctttaagtgctatggcgtgtctcccacaaagctgaatgatctgtgctttaccaacgtgtacgccgatagcttcgtgatcaggggagacgaagtgagacagatcgcaccaggacagacaggaaagatcgcagactacaattataagctgcctgacgatttcaccggctgcgtgatcgcctggaactccaacaatctggattctaaagtgggcggcaactacaattatctgtacaggctgtttcgcaagtccaatctgaagccattcgagcgggacatctccacagagatctaccaggccggctctaccccctgcaatggcgtggagggctttaactgttatttccctctgcagtcttacggcttccagccaacaaacggcgtgggctatcagccctacagagtggtggtgctgtcctttgagctgctgcacgcaccagcaacagtgtgcggcccaaagaagtctaccaatctggtgaagaacaagtgcgtgaacttcaacttcaacggactgaccggcacaggcgtgctgaccgagagcaataagaagttcctgccttttcagcagttcggcagggacatcgcagataccacagacgccgtgcgcgaccctcagaccctggagatcctggacatcacaccatgcagcttcggcggcgtgtccgtgatcacaccaggcaccaatacatccaaccaggtggccgtgctgtatcaggacgtgaattgtaccgaggtgcccgtggcaatccacgcagatcagctgacccctacatggcgggtgtactctaccggcagcaacgtgttccagacaagagccggatgcctgatcggagcagagcacgtgaacaatagctatgagtgcgacatccctatcggcgccggcatctgtgccagctaccagacccagacaaactccccatctggagcaggctccgtggccagccagtccatcatcgcctataccatgagcctgggcgccgagaacagcgtggcctactccaacaattctatcgccatccctaccaacttcacaatcagcgtgaccacagagatcctgccagtgtctatggataagacaagcgtggactgcacaatgtatatctgtggcgatagcaccgagtgctccaacctgctgctgcagtacggctccttttgtacccagctgaatagagccctgacaggcatcgccgtggagcaggataagaacacacaggaggtgttcgcccaggtgaagcagatctacaagaccccacccatcaaggactttggcggcttcaacttcagccagatcctgcctgatccaagcaagccctccaagaggtcttttatcgaggacctgctgttcaacaaggtgaccctggccgatgccggcttcatcaagcagtatggagattgcctgggagacatcgcagcccgcgacctgatctgtgcccagaagtttaatggcctgaccgtgctgcctccactgctgacagatgagatgatcgcccagtacacatctgccctgctggccggcaccatcacaagcggatggaccttcggcgcaggagccgccctgcagatcccttttgccatgcagatggcctataggttcaacggcatcggcgtgacccagaatgtgctgtacgagaaccagaagctgatcgccaatcagtttaacagcgccatcggcaagatccaggactctctgtcctctacagccagcgccctgggcaagctgcaggatgtggtgaatcagaacgcccaggccctgaataccctggtgaagcagctgagctccaacttcggcgccatctctagcgtgctgaatgacatcctgagccggctggacccccctgaggcagaggtgcagatcgacaggctgatcacaggccgcctgcagagcctgcagacctacgtgacacagcagctgatcagggcagcagagatcagagcctccgccaatctggccgccaccaagatgagcgagtgcgtgctgggacagtccaagagggtggacttttgtggcaagggctatcacctgatgtctttcccacagagcgcccctcacggcgtggtgtttctgcacgtgacctacgtgccagcccaggagaagaacttcaccacagcaccagccatctgccacgatggaaaggcacactttcctagggagggcgtgttcgtgtctaacggcacccactggtttgtgacacagcgcaatttctacgagccacagatcatcaccacagacaatacattcgtgagcggcaactgtgatgtggtgatcggcatcgtgaacaataccgtgtatgatccactgcagcccgagctggactcctttaaggaggagctggataagtacttcaagaatcacacctctcccgacgtggatctgggcgacatctccggcatcaatgcctctgtggtgaacatccagaaggagatcgaccggctgaacgaggtggccaagaatctgaacgagagcctgatcgatctgcaggagctgggcaagtatgagcagtacatcaagggctctggcagagagaacctgtatttccagggaggaggaggcagcggatacatccctgaggcaccaagggacggacaggcctacgtgcgcaaggatggcgagtgggtgctgctgtccacctttctgggccatcatcaccaccaccaccaccactga

SEQ ID NO: 1508 - DNA, 3846 bp, Artificial Sequence
  Description of Artificial Sequence: Synthetic polynucleotide
atgggcatcctgccaagcccaggaatgcccgccctgctgtctctggtgagcctgctgtccgtgctgctgatgggatgcgtggcagagacaggcacacagtgcgtgaacctgaccacaaggacccagctgccccctgcctataccaattctttcacacggggcgtgtactatcccgacaaggtgtttagaagctccgtgctgcactccacacaggatctgtttctgcctttcttttctaacgtgacctggttccacgccatccacgtgtccggcaccaatggcacaaagcggttcgacaatcccgtgctgccttttaacgatggcgtgtacttcgccagcaccgagaagtccaacatcatcagaggctggatctttggcaccacactggactctaagacacagagcctgctgatcgtgaacaatgccaccaacgtggtgatcaaggtgtgcgagttccagttttgtaatgatccattcctgggcgtgtactatcacaagaacaataagtcctggatggagtctgagtttcgcgtgtattctagcgccaacaattgcacatttgagtacgtgagccagcccttcctgatggacctggagggcaagcagggcaatttcaagaacctgagggagttcgtgtttaagaatatcgatggctacttcaagatctacagcaagcacaccccaatcaacctggtgcgcgacctgccacagggattctccgccctggagccactggtggatctgcccatcggcatcaacatcacccggtttcagacactgctggccctgcacagatcctacctgacaccaggcgactcctctagcggatggaccgcaggagctgccgcctactatgtgggctatctgcagccccggaccttcctgctgaagtacaacgagaatggcaccatcacagacgcagtggattgcgccctggaccccctgtctgagacaaagtgtacactgaagagctttaccgtggagaagggcatctatcagacaagcaatttcagggtgcagcctaccgagtccatcgtgcgctttcccaatatcacaaacctgtgcccttttggcgaggtgttcaacgccaccagattcgccagcgtgtacgcctggaatcggaagagaatctccaactgcgtggccgactattctgtgctgtacaactccgcctctttcagcacctttaagtgctatggcgtgtctcccacaaagctgaatgatctgtgctttaccaacgtgtacgccgatagcttcgtgatcaggggagacgaagtgagacagatcgcaccaggacagacaggaaagatcgcagactacaattataagctgcctgacgatttcaccggctgcgtgatcgcctggaactccaacaatctggattctaaagtgggcggcaactacaattatctgtacaggctgtttcgcaagtccaatctgaagccattcgagcgggacatctccacagagatctaccaggccggctctaccccctgcaatggcgtggagggctttaactgttatttccctctgcagtcttacggcttccagccaacaaacggcgtgggctatcagccctacagagtggtggtgctgtcctttgagctgctgcacgcaccagcaacagtgtgcggcccaaagaagtctaccaatctggtgaagaacaagtgcgtgaacttcaacttcaacggactgaccggcacaggcgtgctgaccgagagcaataagaagttcctgccttttcagcagttcggcagggacatcgcagataccacagacgccgtgcgcgaccctcagaccctggagatcctggacatcacaccatgcagcttcggcggcgtgtccgtgatcacaccaggcaccaatacatccaaccaggtggccgtgctgtatcaggacgtgaattgtaccgaggtgcccgtggcaatccacgcagatcagctgacccctacatggcgggtgtactctaccggcagcaacgtgttccagacaagagccggatgcctgatcggagcagagcacgtgaacaatagctatgagtgcgacatccctatcggcgccggcatctgtgccagctaccagacccagacaaactccccatctggagcaggctccgtggccagccagtccatcatcgcctataccatgagcctgggcgccgagaacagcgtggcctactccaacaattctatcgccatccctaccaacttcacaatcagcgtgaccacagagatcctgccagtgtctatgaccaagacaagcgtggactgcacaatgtatatctgtggcgatagcaccgagtgctccaacctgctgctgcagtacggctccttttgtacccagctgaatagagccctgacaggcatcgccgtggagcaggataagaacacacaggaggtgttcgcccaggtgaagcagatctacaagaccccacccatcaaggactttggcggcttcaacttcagccagatcctgcctgatccaagcaagccctccaagaggtcttttatcgaggacctgctgttcaacaaggtgaccctggccgatgccggcttcatcaagcagtatggagattgcctgggagacatcgcagcccgcgacctgatctgtgcccagaagtttaatggcctgaccgtgctgcctccactgctgacagatgagatgatcgcccagtacacatctgccctgatagccggcaccatcacaagcggatggaccttcggcgcaggagccgccctgcagatcccttttgccatgcagatggcctataggttcaacggcatcggcgtgacccagaatgtgctgtacgagaaccagaagctgatcgccaatcagtttaacagcgccatcggcaagatccaggactctctgtcctctacagccagcgccctgggcaagctgcaggatgtggtgaatcagaacgcccaggccctgaataccctggtgaagcagctgagctccaacttcggcgccatctctagcgtgctgaatgacatcctgagccggctggacccccctgaggcagaggtgcagatcgacaggctgatcacaggccgcctgcagagcctgcagacctacgtgacacagcagctgatcagggcagcagagatcagagcctccgccaatctggccgccaccaagatgagcgagtgcgtgctgggacagtccaagagggtggacttttgtggcaagggctatcacctgatgtctttcccacagagcgcccctcacggcgtggtgtttctgcacgtgacctacgtgccagcccaggagaagaacttcaccacagcaccagccatctgccacgatggaaaggcacactttcctagggagggcgtgttcgtgtctaacggcacccactggtttgtgacacagcgcaatttctacgagccacagatcatcaccacagacaatacattcgtgagcggcaactgtgatgtggtgatcggcatcgtgaacaataccgtgtatgatccactgcagcccgagctggactcctttaaggaggagctggataagtacttcaagaatcacacctctcccgacgtggatctgggcgacatctccggcatcaatgcctctgtggtgaacatccagaaggagatcgaccggctgaacgaggtggccaagaatctgaacgagagcctgatcgatctgcaggagctgggcaagtatgagcagtacatcaagggctctggcagagagaacctgtatttccagggaggaggaggcagcggatacatccctgaggcaccaagggacggacaggcctacgtgcgcaaggatggcgagtgggtgctgctgtccacctttctgggccatcatcaccaccaccaccaccactga

SEQ ID NO: 1509 - DNA, 3846 bp, Artificial Sequence
  Description of Artificial Sequence: Synthetic polynucleotide
atgggcatcctgccaagcccaggaatgcccgccctgctgtctctggtgagcctgctgtccgtgctgctgatgggatgcgtggcagagacaggcacacagtgcgtgaacctgaccacaaggacccagctgccccctgcctataccaattctttcacacggggcgtgtactatcccgacaaggtgtttagaagctccgtgctgcactccacacaggatctgtttctgcctttcttttctaacgtgacctggttccacgccatccacgtgtccggcaccaatggcacaaagcggttcgacaatcccgtgctgccttttaacgatggcgtgtacttcgccgctaccgagaagtccaacatcatcagaggctggatctttggcaccacactggactctaagacacagagcctgctgatcgtgaacaatgccaccaacgtggtgatcaaggtgtgcgagttccagttttgtaatgatccattcctgggcgtgtactatcacaagaacaataagtcctggatggagtctgagtttcgcgtgtattctagcgccaacaattgcacatttgagtacgtgagccagcccttcctgatggacctggagggcaagcagggcaatttcaagaacctgagggagttcgtgtttaagaatatcgatggctacttcaagatctacagcaagcacaccccaatcaacctggtgcgcgacctgccacagggattctccgccctggagccactggtggatctgcccatcggcatcaacatcacccggtttcagacactgctggccctgcacagatcctacctgacaccaggcgactcctctagcggatggaccgcaggagctgccgcctactttgtgggctatctgcagccccggaccttcctgctgaagtacaacgagaatggcaccatcacagacgcagtggattgcgccctggaccccctgtctgagacaaagtgtacactgaagagctttaccgtggagaagggcatctatcagacaagcaatttcagggtgcagcctaccgagtccatcgtgcgctttcccaatatcacaaacctgtgcccttttggcgaggtgttcaacgccaccagattcgccagcgtgtacgcctggaatcggaagagaatctccaactgcgtggccgactattctgtgctgtacaactccgcctctttcagcacctttaagtgctatggcgtgtctcccacaaagctgaatgatctgtgctttaccaacgtgtacgccgatagcttcgtgatcaggggagacgaagtgagacagatcgcaccaggacagacaggaaagatcgcagactacaattataagctgcctgacgatttcaccggctgcgtgatcgcctggaactccaacaatctggattctaaagtgggcggcaactacaattatctgtacaggctgtttcgcaagtccaatctgaagccattcgagcgggacatctccacagagatctaccaggccggctctaccccctgcaatggcgtggagggctttaactgttatttccctctgcagtcttacggcttccagccaacaaacggcgtgggctatcagccctacagagtggtggtgctgtcctttgagctgctgcacgcaccagcaacagtgtgcggcccaaagaagtctaccaatctggtgaagaacaagtgcgtgaacttcaacttcaacggactgaccggcacaggcgtgctgaccgagagcaataagaagttcctgccttttcagcagttcggcagggacatcagtgataccacagacgccgtgcgcgaccctcagaccctggagatcctggacatcacaccatgcagcttcggcggcgtgtccgtgatcacaccaggcaccaatacatccaaccaggtggccgtgctgtatcaggacgtgaattgtaccgaggtgcccgtggcaatccacgcagatcagctgacccctacatggcgggtgtactctaccggcagcaacgtgttccagacaagagccggatgcctgatcggagcagagcacgtgaacaatagctatgagtgcgacatccctatcggcgccggcatctgtgccagctaccagacccagacaaactccccatctggagcaggctccgtggccagccagtccatcgttgcctataccatgagcctgggcgccgagaacagcgtggcctactccaacaattctatcgccatccctaccaacttcacaatcagcgtgaccacagagatcctgccagtgtctatgaccaagacaagcgtggactgcacaatgtatatctgtggcgatagcaccgagtgctccaacctgctgctgcagtacggctccttttgtacccagctgaatagagccctgacaggcatcgccgtggagcaggataagaacacacaggaggtgttcgcccaggtgaagcagatctacaagaccccacccatcaaggactttggcggcttcaacttcagccagatcctgcctgatccaagcaagccctccaagaggtcttttatcgaggacctgctgttcaacaaggtgaccctggccgatgccggcttcatcaagcagtatggagattgcctgggagacatcgcagcccgcgacctgatctgtgcccagaagtttaatggcctgaccgtgctgcctccactgctgacagatgagatgatcgcccagtacacatctgccctgctggccggcaccatcacagctggatggaccttcggcgcaggagccgccctgcagatcccttttgccatgcagatggcctataggttcaacggcatcggcgtgacccagaatgtgctgtacgagaaccagaagctgatcgccaatcagtttaacagcgccatcggcaagatccaggactctctgtcctctacagccagcgccctgggcaagctgcaggatgtggtgaatcagaacgcccaggccctgaataccctggtgaagcagctgagctccaacttcggcgccatctctagcgtgctgaatgacatcctgagccggctggacccccctgaggcagaggtgcagatcgacaggctgatcacaggccgcctgcagagcctgcagacctacgtgacacagcagctgatcagggcagcagagatcagagcctccgccaatctggccgccaccaagatgagcgagtgcgtgctgggacagtccaagagggtggacttttgtggcaagggctatcacctgatgtctttcccacaggctgcccctcacggcgtggtgtttctgcacgtgacctacgtgccagcccaggagaagaacttcaccacagcaccagccatctgccacgatggaaaggcacactttcctagggagggcgtgttcgtgtctaacggcacccactggtttgtgacacagcgcaatttctacgagccacagatcatcaccacagacaatacattcgtgagcggcaactgtgatgtggtgatcggcatcgtgaacaataccgtgtatgatccactgcagcccgagctggactcctttaaggaggagctggataagtacttcaagaatcacacctctcccgacgtggatctgggcgacatctccggcatcaatgcctctgtggtgaacatccagaaggagatcgaccggctgaacgaggtggccaagaatctgaacgagagcctgatcgatctgcaggagctgggcaagtatgagcagtacatcaagggctctggcagagagaacctgtatttccagggaggaggaggcagcggatacatccctgaggcaccaagggacggacaggcctacgtgcgcaaggatggcgagtgggtgctgctgtccacctttctgggccatcatcaccaccaccaccaccactga

SEQ ID NO: 1510 - DNA, 3846 bp, Artificial Sequence
  Description of Artificial Sequence: Synthetic polynucleotide
atgggcatcctgccaagcccaggaatgcccgccctgctgtctctggtgagcctgctgtccgtgctgctgatgggatgcgtggcagagacaggcacacagtgcgtgaacctgaccacaaggacccagctgccccctgcctataccaattctttcacacggggcgtgtactatcccgacaaggtgtttagaagctccgtgctgcactccacacaggatctgtttctgcctttcttttctaacgtgacctggttccacgccatccacgtgtccggcaccaatggcacaaagcggttcgacaatcccgtgctgccttttaacgatggcgtgtacttcgccgctaccgagaagtccaacatcatcagaggctggatctttggcaccacactggactctaagacacagagcctgctgatcgtgaacaatgccaccaacgtggtgatcaaggtgtgcgagttccagttttgtaatgatccattcctgggcgtgtactatcacaagaacaataagtcctggatggagtctgagtttcgcgtgtattctagcgccaacaattgcacatttgagtacgtgagccagcccttcctgatggacctggagggcaagcagggcaatttcaagaacctgagggagttcgtgtttaagaatatcgatggctacttcaagatctacagcaagcacaccccaatcaacctggtgcgcgacctgccacagggattctccgccctggagccactggtggatctgcccatcggcatcaacatcacccggtttcagacactgctggccctgcacagatcctacctgacaccaggcgactcctctagcggatggaccgcaggagctgccgcctactttgtgggctatctgcagccccggaccttcctgctgaagtacaacgagaatggcaccatcacagacgcagtggattgcgccctggaccccctgtctgagacaaagtgtacactgaagagctttaccgtggagaagggcatctatcagacaagcaatttcagggtgcagcctaccgagtccatcgtgcgctttcccaatatcacaaacctgtgcccttttggcgaggtgttcaacgccaccagattcgccagcgtgtacgcctggaatcggaagagaatctccaactgcgtggccgactattctgtgctgtacaactccgcctctttcagcacctttaagtgctatggcgtgtctcccacaaagctgaatgatctgtgctttaccaacgtgtacgccgatagcttcgtgatcaggggagacgaagtgagacagatcgcaccaggacagacaggaaagatcgcagactacaattataagctgcctgacgatttcaccggctgcgtgatcgcctggaactccaacaatctggattctaaagtgggcggcaactacaattatctgtacaggctgtttcgcaagtccaatctgaagccattcgagcgggacatctccacagagatctaccaggccggctctaccccctgcaatggcgtggagggctttaactgttatttccctctgcagtcttacggcttccagccaacaaacggcgtgggctatcagccctacagagtggtggtgctgtcctttgagctgctgcacgcaccagcaacagtgtgcggcccaaagaagtctaccaatctggtgaagaacaagtgcgtgaacttcaacttcaacggactgaccggcacaggcgtgctgaccgagagcaataagaagttcctgccttttcagcagttcggcagggacatctcagataccacagacgccgtgcgcgaccctcagaccctggagatcctggacatcacaccatgcagcttcggcggcgtgtccgtgatcacaccaggcaccaatacatccaaccaggtggccgtgctgtatcaggacgtgaattgtaccgaggtgcccgtggcaatccacgcagatcagctgacccctacatggcgggtgtactctaccggcagcaacgtgttccagacaagagccggatgcctgatcggagcagagcacgtgaacaatagctatgagtgcgacatccctatcggcgccggcatctgtgccagctaccagacccagacaaactccccatctggagcaggctccgtggccagccagtccatcatcgcctataccatgagcctgggcgccgagaacagcgtggcctactccaacaattctatcgccatccctaccaacttcacaatcagcgtgaccacagagatcctgccagtgtctatgaccaagacaagcgtggactgcacaatgtatatctgtggcgatagcaccgagtgctccaacctgctgctgcagtacggctccttttgtacccagctgaatagagccctgacaggcatcgccgtggagcaggataagaacacacaggaggtgttcgcccaggtgaagcagatctacaagaccccacccatcaaggactttggcggcttcaacttcagccagatcctgcctgatccaagcaagccctccaagaggtcttttatcgaggacctgctgttcaacaaggtgaccctggccgatgccggcttcatcaagcagtatggagattgcctgggagacatcgcagcccgcgacctgatctgtgcccagaagtttaatggcctgaccgtgctgcctccactgctgacagatgagatgatcgcccagtacacatctgccctgctggccggcaccgcgacagcgggatggaccttcggcgcaggagccgccctgcagatcccttttgccatgcagatggcctataggttcaacggcatcggcgtgacccagaatgtgctgtacgagaaccagaagctgatcgccaatcagtttaacagcgccatcggcaagatccaggactctctgtcctctacagccagcgccctgggcaagctgcaggatgtggtgaatcagaacgcccaggccctgaataccctggtgaagcagctgagctccaacttcggcgccatctctagcgtgctgaatgacatcctgagccggctggacccccctgaggcagaggtgcagatcgacaggctgatcacaggccgcctgcagagcctgcagacctacgtgacacagcagctgatcagggcagcagagatcagagcctccgccaatctggccgccaccaagatgagcgagtgcgtgctgggacagtccaagagggtggacttttgtggcaagggctatcacctgatgtctttcccacaggctgcccctcacggcgtggtgtttctgcacgtgacctacgtgccagcccaggagaagaacttcaccacagcaccagccatctgccacgatggaaaggcacactttcctagggagggcgtgttcgtgtctaacggcacccactggtttgtgacacagcgcaatttctacgagccacagatcatcaccacagacaatacattcgtgagcggcaactgtgatgtggtgatcggcatcgtgaacaataccgtgtatgatccactgcagcccgagctggactcctttaaggaggagctggataagtacttcaagaatcacacctctcccgacgtggatctgggcgacatctccggcatcaatgcctctgtggtgaacatccagaaggagatcgaccggctgaacgaggtggccaagaatctgaacgagagcctgatcgatctgcaggagctgggcaagtatgagcagtacatcaagggctctggcagagagaacctgtatttccagggaggaggaggcagcggatacatccctgaggcaccaagggacggacaggcctacgtgcgcaaggatggcgagtgggtgctgctgtccacctttctgggccatcatcaccaccaccaccaccactga

SEQ ID NO: 1511 - DNA, 3846 bp, Artificial Sequence
  Description of Artificial Sequence: Synthetic polynucleotide
atgggcatcctgccaagcccaggaatgcccgccctgctgtctctggtgagcctgctgtccgtgctgctgatgggatgcgtggcagagacaggcacacagtgcgtgaacctgaccacaaggacccagctgccccctgcctataccaattctttcacacggggcgtgtactatcccgacaaggtgtttagaagctccgtgctgcactccacacaggatctgtttctgcctttcttttctaacgtgacctggttccacgccatccacgtgtccggcaccaatggcacaaagcggttcgacaatcccgtgctgccttttaacgatggcgtgtacttcgccagcaccgagaagtccaacatcatcagaggctggatctttggcaccacactggactctaagacacagagcctgctgatcgtgaacaatgccaccaacgtggtgatcaaggtgtgcgagttccagttttgtaatgatccattcctgggcgtgtactatcacaagaacaataagtcctggatggagtctgagtttcgcgtgtattctagcgccaacaattgcacatttgagtacgtgagccagcccttcctgatggacctggagggcaagcagggcaatttcaagaacctgagggagttcgtgtttaagaatatcgatggctacttcaagatctacagcaagcacaccccaatcaacctggtgcgcgacctgccacagggattctccgccctggagccactggtggatctgcccatcggcatcaacatcacccggtttcagacactgctggccctgcacagatcctacctgacaccaggcgactcctctagcggatggaccgcaggagctgccgcctactatgtgggctatctgcagccccggaccttcctgctgaagtacaacgagaatggcaccatcacagacgcagtggattgcgccctggaccccctgtctgagacaaagtgtacactgaagagctttaccgtggagaagggcatctatcagacaagcaatttcagggtgcagcctaccgagtccatcgtgcgctttcccaatatcacaaacctgtgcccttttggcgaggtgttcaacgccaccagattcgccagcgtgtacgcctggaatcggaagagaatctccaactgcgtggccgactattctgtgctgtacaactccgcctctttcagcacctttaagtgctatggcgtgtctcccacaaagctgaatgatctgtgctttaccaacgtgtacgccgatagcttcgtgatcaggggagacgaagtgagacagatcgcaccaggacagacaggaaagatcgcagactacaattataagctgcctgacgatttcaccggctgcgtgatcgcctggaactccaacaatctggattctaaagtgggcggcaactacaattatctgtacaggctgtttcgcaagtccaatctgaagccattcgagcgggacatctccacagagatctaccaggccggctctaccccctgcaatggcgtggagggctttaactgttatttccctctgcagtcttacggcttccagccaacaaacggcgtgggctatcagccctacagagtggtggtgctgtcctttgagctgctgcacgcaccagcaacagtgtgcggcccaaagaagtctaccaatctggtgaagaacaagtgcgtgaacttcaacttcaacggactgaccggcacaggcgtgctgaccgagagcaataagaagttcctgccttttcagcagttcggcagggacatcgcagataccacagacgccgtgcgcgaccctcagaccctggagatcctggacatcacaccatgcagcttcggcggcgtgtccgtgatcacaccaggcaccaatacatccaaccaggtggccgtgctgtatcaggacgtgaattgtaccgaggtgcccgtggcaatccacgcagatcagctgacccctacatggcgggtgtactctaccggcagcaacgtgttccagacaagagccggatgcctgatcggagcagagcacgtgaacaatagctatgagtgcgacatccctatcggcgccggcatctgtgccagctaccagacccagacaaactccccatctggagcaggctccgtggccagccagtccatcatcgcctataccatgagcctgggcgccgagaacagcgtggcctactccaacaattctatcgccatccctaccaacttcacaatcagcgtgaccacagagatcctgccagtgtctatgaccaagacaagcgtggactgcacaatgtatatctgtggcgatagcaccgagtgctccaacctgctgctgcagtacggctccttttgtacccagctgaatagagccctgacaggcatcgccgtggagcaggataagaacacacaggaggtgttcgcccaggtgaagcagatctacaagaccccacccatcaaggactttggcggcttcaacttcagccagatcctgcctgatccaagcaagccctccaagaggtcttttatcgaggacctgctgttcaacaaggtgaccctggccgatgccggcttcatcaagcagtatggagattgcctgggagacatcgcagcccgcgacctgatctgtgcccagaagtttaatggcctgaccgtgctgcctccactgctgacagatgagatgatcgcccagtacacatctgccctgctggccggcaccatcacaagcggatggaccttcggcgcaggagccgccctgcagatcccttttgccatgcagatggcctataggttcaacggcatcggcgtgacccagaatgtgctgtacgagaaccagaagctgatcgccaatcagtttaacagcgccatcggcaagatccaggactctctgtcctctacagccagcgccctgggcaagctgcaggatgtggtgaatcagaacgcccaggccctgaataccctggtgaagcagctgagctccaacttcggcgccatctctagcgtgctgaatgacatcctgagccggctggacccccctgaggcagaggtgcagatcgacaggctgatcacaggccgcctgcagagcctgcagacctacgtgacacagcagctgatcagggcagcagagatcagagcctccgccaatctggccgccaccaagatgagcgagtgcgtgctgggacagtccaagagggtggacttttgtggcaagggctatcacctgatgtctttcccacagagcgcccctcacggcgtggtgtttctgcacgtgacctacgtgccagcccaggagaagaacttcaccacagcaccagccatctgccacgaaggaaaggcacactttcctagggagggcgtgttcgtgtctaacggcacccactggtttgtgacacagcgcaatttctacgagccacagatcatcaccacagacaatacattcgtgagcggcaactgtgatgtggtgatcggcatcgtgaacaataccgtgtatgatccactgcagcccgagctggactcctttaaggaggagctggataagtacttcaagaatcacacctctcccgacgtggatctgggcgacatctccggcatcaatgcctctgtggtgaacatccagaaggagatcgaccggctgaacgaggtggccaagaatctgaacgagagcctgatcgatctgcaggagctgggcaagtatgagcagtacatcaagggctctggcagagagaacctgtatttccagggaggaggaggcagcggatacatccctgaggcaccaagggacggacaggcctacgtgcgcaaggatggcgagtgggtgctgctgtccacctttctgggccatcatcaccaccaccaccaccactga

SEQ ID NO: 1512 - DNA, 3846 bp, Artificial Sequence
  Description of Artificial Sequence: Synthetic polynucleotide
atgggcatcctgccaagcccaggaatgcccgccctgctgtctctggtgagcctgctgtccgtgctgctgatgggatgcgtggcagagacaggcacacagtgcgtgaacctgaccacaaggacccagctgccccctgcctataccaattctttcacacggggcgtgtactatcccgacaaggtgtttagaagctccgtgctgcactccacacaggatctgtttctgcctttcttttctaacgtgacctggttccacgccatccacgtgtccggcaccaatggcacaaagcggttcgacaatcccgtgctgccttttaacgatggcgtgtacttcgccagcaccgagaagtccaacatcatcagaggctggatctttggcaccacactggactctaagacacagagcctgctgatcgtgaacaatgccaccaacgtggtgatcaaggtgtgcgagttccagttttgtaatgatccattcctgggcgtgtactatcacaagaacaataagtcctggatggagtctgagtttcgcgtgtattctagcgccaacaattgcacatttgagtacgtgagccagcccttcctgatggacctggagggcaagcagggcaatttcaagaacctgagggagttcgtgtttaagaatatcgatggctacttcaagatctacagcaagcacaccccaatcaacctggtgcgcgacctgccacagggattctccgccctgcaaccactggtggatctgcccatcggcatcaacatcacccggtttcagacactgctggccctgcacagatcctacctgacaccaggcgactcctctagcggatggaccgcaggagctgccgcctactatgtgggctatctgcagccccggaccttcctgctgaagtacaacgagaatggcaccatcacagacgcagtggattgcgccctggaccccctgtctgagacaaagtgtacactgaagagctttaccgtggagaagggcatctatcagacaagcaatttcagggtgcagcctaccgagtccatcgtgcgctttcccaatatcacaaacctgtgcccttttggcgaggtgttcaacgccaccagattcgccagcgtgtacgcctggaatcggaagagaatctccaactgcgtggccgactattctgtgctgtacaactccgcctctttcagcacctttaagtgctatggcgtgtctcccacaaagctgaatgatctgtgctttaccaacgtgtacgccgatagcttcgtgatcaggggagacgaagtgagacagatcgcaccaggacagacaggaaagatcgcagactacaattataagctgcctgacgatttcaccggctgcgtgatcgcctggaactccaacaatctggattctaaagtgggcggcaactacaattatctgtacaggctgtttcgcaagtccaatctgaagccattcgagcgggacatctccacagagatctaccaggccggctctaccccctgcaatggcgtggagggctttaactgttatttccctctgcagtcttacggcttccagccaacaaacggcgtgggctatcagccctacagagtggtggtgctgtcctttgagctgctgcacgcaccagcaacagtgtgcggcccaaagaagtctaccaatctggtgaagaacaagtgcgtgaacttcaacttcaacggactgaccggcacaggcgtgctgaccgagagcaataagaagttcctgccttttcagcagttcggcagggacatcgcagataccacagacgccgtgcgcgaccctcagaccctggagatcctggacatcacaccatgcagcttcggcggcgtgtccgtgatcacaccaggcaccaatacatccaaccaggtggccgtgctgtatcaggacgtgaattgtaccgaggtgcccgtggcaatccacgcagatcagctgacccctacatggcgggtgtactctaccggcagcaacgtgttccagacaagagccggatgcctgatcggagcagagcacgtgaacaatagctatgagtgcgacatccctatcggcgccggcatctgtgccagctaccagacccagacaaactccccatctggagcaggctccgtggccagccagtccatcatcgcctataccatgagcctgggcgccgagaacagcgtggcctactccaacaattctatcgccatccctaccaacttcacaatcagcgtgaccacagagatcctgccagtgtctatgaccaagacaagcgtggactgcacaatgtatatctgtggcgatagcaccgagtgctccaacctgctgctgcagtacggctccttttgtacccagctgaatagagccctgacaggcatcgccgtggagcaggataagaacacacaggaggtgttcgcccaggtgaagcagatctacaagaccccacccatcaaggactttggcggcttcaacttcagccagatcctgcctgatccaagcaagccctccaagaggtcttttatcgaggacctgctgttcaacaaggtgaccctggccgatgccggcttcatcaagcagtatggagattgcctgggagacatcgcagcccgcgacctgatctgtgcccagaagtttaatggcctgaccgtgctgcctccactgctgacagatgagatgatcgcccagtacacatctgccctgctggccggcaccatcacaagcggatggaccttcggcgcaggagccgccctgcagatcccttttgccatgcagatggcctataggttcaacggcatcggcgtgacccagaatgtgctgtacgagaaccagaagctgatcgccaatcagtttaacagcgccatcggcaagatccaggactctctgtcctctacagccagcgccctgggcaagctgcaggatgtggtgaatcagaacgcccaggccctgaataccctggtgaagcagctgagctccaacttcggcgccatctctagcgtgctgaatgacatcctgagccggctggacccccctgaggcagaggtgcagatcgacaggctgatcacaggccgcctgcagagcctgcagacctacgtgacacagcagctgatcagggcagcagagatcagagcctccgccaatctggccgccaccaagatgagcgagtgcgtgctgggacagtccaagagggtggacttttgtggcaagggctatcacctgatgtctttcccacagagcgcccctcacggcgtggtgtttctgcacgtgacctacgtgccagcccaggagaagaacttcaccacagcaccagccatctgccacgatggaaaggcacactttcctagggagggcgtgttcgtgtctaacggcacccactggtttgtgacacagcgcaatttctacgagccacagatcatcaccacagacaatacattcgtgagcggcaactgtgatgtggtgatcggcatcgtgaacaataccgtgtatgatccactgcagcccgagctggactcctttaaggaggagctggataagtacttcaagaatcacacctctcccgacgtggatctgggcgacatctccggcatcaatgcctctgtggtgaacatccagaaggagatcgaccggctgaacgaggtggccaagaatctgaacgagagcctgatcgatctgcaggagctgggcaagtatgagcagtacatcaagggctctggcagagagaacctgtatttccagggaggaggaggcagcggatacatccctgaggcaccaagggacggacaggcctacgtgcgcaaggatggcgagtgggtgctgctgtccacctttctgggccatcatcaccaccaccaccaccactga

SEQ ID NO: 1513 - DNA, 3846 bp, Artificial Sequence
  Description of Artificial Sequence: Synthetic polynucleotide
atgggcatcctgccaagcccaggaatgcccgccctgctgtctctggtgagcctgctgtccgtgctgctgatgggatgcgtggcagagacaggcacacagtgcgtgaacctgaccacaaggacccagctgccccctgcctataccaattctttcacacggggcgtgtactatcccgacaaggtgtttagaagctccgtgctgcactccacacaggatctgtttctgcctttcttttctaacgtgacctggttccacgccatccacgtgtccggcaccaatggcacaaagcggttcgacaatcccgtgctgccttttaacgatggcgtgtacttcgccagcaccgagaagtccaacatcatcagaggctggatctttggcaccacactggactctaagacacagagcctgctgatcgtgaacaatgccaccaacgtggtgatcaaggtgtgcgagttccagttttgtaatgatccattcctgggcgtgtactatcacaagaacaataagtcctggatggagtctgagtttcgcgtgtattctagcgccaacaattgcacatttgagtacgtgagccagcccttcctgatggacctggagggcaagcagggcaatttcaagaacctgagggagttcgtgtttaagaatatcgatggctacttcaagatctacagcaagcacaccccaatcaacctggtgcgcgacctgccacagggattctccgccctggagccactggtggatctgcccatcggcatcaacatcacccggtttcagacactgctggccctgcacagatcctacctgacaccaggcgactcctctagcggatggaccgcaggagctgccgcctactatgtgggctatctgcagccccggaccttcctgctgaagtacaacgagaatggcaccatcacagacgcagtggattgcgccctggaccccctgtctgagacaaagtgtacactgaagagctttaccgtggagaagggcatctatcagacaagcaatttcagggtgcagcctaccgagtccatcgtgcgctttcccaatatcacaaacctgtgcccttttggcgaggtgttcaacgccaccagattcgccagcgtgtacgcctggaatcggaagagaatctccaactgcgtggccgactattctgtgctgtacaactccgcctctttcagcacctttaagtgctatggcgtgtctcccacaaagctgaatgatctgtgctttaccaacgtgtacgccgatagcttcgtgatcaggggagacgaagtgagacagatcgcaccaggacagacaggaaagatcgcagactacaattataagctgcctgacgatttcaccggctgcgtgatcgcctggaactccaacaatctggattctaaagtgggcggcaactacaattatctgtacaggctgtttcgcaagtccaatctgaagccattcgagcgggacatctccacagagatctaccaggccggctctaccccctgcaatggcgtggagggctttaactgttatttccctctgcagtcttacggcttccagccaacaaacggcgtgggctatcagccctacagagtggtggtgctgtcctttgagctgctgcacgcaccagcaacagtgtgcggcccaaagaagtctaccaatctggtgaagaacaagtgcgtgaacttcaacttcaacggactgaccggcacaggcgtgctgaccgagagcaataagaagttcctgccttttcagcagttcggcagggacatcgcagataccacagacgccgtgcgcgaccctcagaccctggagatcctggacatcacaccatgcagcttcggcggcgtgtccgtgatcacaccaggcaccaatacatccaaccaggtggccgtgctgtatcaggacgtgaattgtaccgaggtgcccgtggcaatccacgcagatcagctgacccctacatggcgggtgtactctaccggcagcaacgtgttccagacaagagccggatgcctgatcggagcagagcacgtgaacaatagctatgagtgcgacatccctatcggcgccggcatctgtgccagctaccagacccagacaaactccccatctggagcaggctccgtggccagccagtccatcatcgcctataccatgagcctgggcgccgagaacagcgtggcctactccaacaattctatcgccatccctaccaacttcacaatcagcgtgaccacagagatcctgccagtgtctatgaccaagacaagcgtggactgcacaatgtatatctgtggcgatagcaccgagtgctccaacctgctgctgcagtacggctccttttgtacccagctgaatagagccctgacaggcatcgccgtggagcaggataagaacacacaggaggtgttcgcccaggtgaagcagatctacaagaccccacccatcaaggactttggcggcttcaacttcagccagatcctgcctgatccaagcaagccctccaagaggtcttttatcgaggacctgctgttcaacaaggtgaccctggccgatgccggcttcatcaagcagtatggagattgcctgggagacatcgcagcccgcgacctgatctgtgcccagaagtttaatggcctgaccgtgctgcctccactgctgacagatgagatgatcgcccagtacacatctgccctgctggccggcaccatcacaagcggatggaccttcggcgcaggagccgccctgcagatcccttttgccatgcagatggcctataggttcaacggcatcggcgtgacccagaatgtgctgtacgagaaccagaagctgatcgccaatcagtttaacagcgccatcggcaagatccaggactctctgtcctctacagccagcgccctgggcaagctgcaggatgtggtgaatcagaacgcccaggccctgaataccctggtgaagcagctgagctccaacttcggcgccatctctagcgtgctgaatgacatcctgagccggctggacccccctgaggcagaggtgcagatcgacaggctgatcacaggccgcctgcagagcctgcagacctacgtgacacagcagctgatcagggcagcagagatcagagcctccgccaatctggccgccaccaagatgagcgagtgcgtgctgggacagtccaagagggtggacttttgtggcaagggctatcacctgatgtctttcccacagagcgcccctcacggcgtggtgtttctgcacgtgacctacgtgccagcccaggagaagaacttcaccacagcaccagccatctgccacgatggaaaggcacactttcctagggagggcgtgttcgtgtctaacggcacccactggtatgtgacacagcgcaatttctacgagccacagatcatcaccacagacaatacattcgtgagcggcaactgtgatgtggtgatcggcatcgtgaacaataccgtgtatgatccactgcagcccgagctggactcctttaaggaggagctggataagtacttcaagaatcacacctctcccgacgtggatctgggcgacatctccggcatcaatgcctctgtggtgaacatccagaaggagatcgaccggctgaacgaggtggccaagaatctgaacgagagcctgatcgatctgcaggagctgggcaagtatgagcagtacatcaagggctctggcagagagaacctgtatttccagggaggaggaggcagcggatacatccctgaggcaccaagggacggacaggcctacgtgcgcaaggatggcgagtgggtgctgctgtccacctttctgggccatcatcaccaccaccaccaccactga

SEQ ID NO: 1514 - DNA, 3846 bp, Artificial Sequence
  Description of Artificial Sequence: Synthetic polynucleotide
atgggcatcctgccaagcccaggaatgcccgccctgctgtctctggtgagcctgctgtccgtgctgctgatgggatgcgtggcagagacaggcacacagtgcgtgaacctgaccacaaggacccagctgccccctgcctataccaattctttcacacggggcgtgtactatcccgacaaggtgtttagaagctccgtgctgcactccacacaggatctgtttctgcctttcttttctaacgtgacctggttccacgccatccacgtgtccggcaccaatggcacaaagcggttcgacaatcccgtgctgccttttaacgatggcgtgtacttcgccagcaccgagaagtccaacatcatcagaggctggatctttggcaccacactggactctaagacacagagcctgctgatcgtgaacaatgccaccaacgtggtgatcaaggtgtgcgagttccagttttgtaatgatccattcctgggcgtgtactatcacaagaacaataagtcctggatggagtctgagtttcgcgtgtattctagcgccaacaattgcacatttgagtacgtgagccagcccttcctgatggacctggagggcaagcagggcaatttcaagcatctgagggagttcgtgtttaagaatatcgatggctacttcaagatctacagcaagcacaccccaatcaacctggtgcgcgacctgccacagggattctccgccctggagccactggtggatctgcccatcggcatcaacatcacccggtttcagacactgctggccctgcacagatcctacctgacaccaggcgactcctctagcggatggaccgcaggagctgccgcctactatgtgggctatctgcagccccggaccttcctgctgaagtacaacgagaatggcaccatcacagacgcagtggattgcgccctggaccccctgtctgagacaaagtgtacactgaagagctttaccgtggagaagggcatctatcagacaagcaatttcagggtgcagcctaccgagtccatcgtgcgctttcccaatatcacaaacctgtgcccttttggcgaggtgttcaacgccaccagattcgccagcgtgtacgcctggaatcggaagagaatctccaactgcgtggccgactattctgtgctgtacaactccgcctctttcagcacctttaagtgctatggcgtgtctcccacaaagctgaatgatctgtgctttaccaacgtgtacgccgatagcttcgtgatcaggggagacgaagtgagacagatcgcaccaggacagacaggaaagatcgcagactacaattataagctgcctgacgatttcaccggctgcgtgatcgcctggaactccaacaatctggattctaaagtgggcggcaactacaattatctgtacaggctgtttcgcaagtccaatctgaagccattcgagcgggacatctccacagagatctaccaggccggctctaccccctgcaatggcgtggagggctttaactgttatttccctctgcagtcttacggcttccagccaacaaacggcgtgggctatcagccctacagagtggtggtgctgtcctttgagctgctgcacgcaccagcaacagtgtgcggcccaaagaagtctaccaatctggtgaagaacaagtgcgtgaacttcaacttcaacggactgaccggcacaggcgtgctgaccgagagcaataagaagttcctgccttttcagcagttcggcagggacatcgcagataccacagacgccgtgcgcgaccctcagaccctggagatcctggacatcacaccatgcagcttcggcggcgtgtccgtgatcacaccaggcaccaatacatccaaccaggtggccgtgctgtatcaggacgtgaattgtaccgaggtgcccgtggcaatccacgcagatcagctgacccctacatggcgggtgtactctaccggcagcaacgtgttccagacaagagccggatgcctgatcggagcagagcacgtgaacaatagctatgagtgcgacatccctatcggcgccggcatctgtgccagctaccagacccagacaaactccccatctggagcaggctccgtggccagccagtccatcatcgcctataccatgagcctgggcgccgagaacagcgtggcctactccaacaattctatcgccatccctaccaacttcacaatcagcgtgaccacagagatcctgccagtgtctatgaccaagacaagcgtggactgcacaatgtatatctgtggcgatagcaccgagtgctccaacctgctgctgcagtacggctccttttgtacccagctgaatagagccctgacaggcatcgccgtggagcaggataagaacacacaggaggtgttcgcccaggtgaagcagatctacaagaccccacccatcaaggactttggcggcttcaacttcagccagatcctgcctgatccaagcaagccctccaagaggtcttttatcgaggacctgctgttcaacaaggtgaccctggccgatgccggcttcatcaagcagtatggagattgcctgggagacatcgcagcccgcgacctgatctgtgcccagaagtttaatggcctgaccgtgctgcctccactgctgacagatgagatgatcgcccagtacacatctgccctgctggccggcaccatcacaagcggatggaccttcggcgcaggagccgccctgcagatcccttttgccatgcagatggcctataggttcaacggcatcggcgtgacccagaatgtgctgtacgagaaccagaagctgatcgccaatcagtttaacagcgccatcggcaagatccaggactctctgtcctctacagccagcgccctgggcaagctgcaggatgtggtgaatcagaacgcccaggccctgaataccctggtgaagcagctgagctccaacttcggcgccatctctagcgtgctgaatgacatcctgagccggctggacccccctgaggcagaggtgcagatcgacaggctgatcacaggccgcctgcagagcctgcagacctacgtgacacagcagctgatcagggcagcagagatcagagcctccgccaatctggccgccaccaagatgagcgagtgcgtgctgggacagtccaagagggtggacttttgtggcaagggctatcacctgatgtctttcccacagagcgcccctcacggcgtggtgtttctgcacgtgacctacgtgccagcccaggagaagaacttcaccacagcaccagccatctgccacgatggaaaggcacactttcctagggagggcgtgttcgtgtctaacggcacccactggtttgtgacacagcgcaatttctacgagccacagatcatcaccacagacaatacattcgtgagcggcaactgtgatgtggtgatcggcatcgtgaacaataccgtgtatgatccactgcagcccgagctggactcctttaaggaggagctggataagtacttcaagaatcacacctctcccgacgtggatctgggcgacatctccggcatcaatgcctctgtggtgaacatccagaaggagatcgaccggctgaacgaggtggccaagaatctgaacgagagcctgatcgatctgcaggagctgggcaagtatgagcagtacatcaagggctctggcagagagaacctgtatttccagggaggaggaggcagcggatacatccctgaggcaccaagggacggacaggcctacgtgcgcaaggatggcgagtgggtgctgctgtccacctttctgggccatcatcaccaccaccaccaccactga

SEQ ID NO: 1515 - DNA, 3846 bp, Artificial Sequence
  Description of Artificial Sequence: Synthetic polynucleotide
atgggcatcctgccaagcccaggaatgcccgccctgctgtctctggtgagcctgctgtccgtgctgctgatgggatgcgtggcagagacaggcacacagtgcgtgaacctgaccacaaggacccagctgccccctgcctataccaattctttcacacggggcgtgtactatcccgacaaggtgtttagaagctccgtgctgcactccacacaggatctgtttctgcctttcttttctaacgtgacctggttccacgccatccacgtgtccggcaccaatggcacaaagcggttcgacaatcccgtgctgccttttaacgatggcgtgtacttcgccagcaccgagaagtccaacatcatcagaggctggatctttggcaccacactggactctaagacacagagcctgctgatcgtgaacaatgccaccaacgtggtgatcaaggtgtgcgagttccagttttgtaatgatccattcctgggcgtgtactatcacaagaacaataagtcctggatggagtctgagtttcgcgtgtattctagcgccaacaattgcacatttgagtacgtgagccagcccttcctgatggacctggagggcaagcagggcaatttcaagaacctgagggagttcgtgtttaagaatatcgatggctacttcaagatctacagcaagcacaccccaatcaacctggtgcgcgacctgccacagggattctccgccctggagccactggtggatctgcccatcggcatcaacatcacccggtttcagacactgctggccctgcacagatcctacctgacaccaggcgactcctctagcggatggaccgcaggagctgccgcctactatgtgggctatctgcagccccggaccttcctgctgaagtacaacgagaatggcaccatcacagacgcagtggattgcgccctggaccccctgtctgagacaaagtgtacactgaagagctttaccgtggagaagggcatctatcagacaagcaatttcagggtgcagcctaccgagtccatcgtgcgctttcccaatatcacaaacctgtgcccttttggcgaggtgttcaacgccaccagattcgccagcgtgtacgcctggaatcggaagagaatctccaactgcgtggccgactattctgtgctgtacaactccgcctctttcagcacctttaagtgctatggcgtgtctcccacaaagctgaatgatctgtgctttaccaacgtgtacgccgatagcttcgtgatcaggggagacgaagtgagacagatcgcaccaggacagacaggaaagatcgcagactacaattataagctgcctgacgatttcaccggctgcgtgatcgcctggaactccaacaatctggattctaaagtgggcggcaactacaattatctgtacaggctgtttcgcaagtccaatctgaagccattcgagcgggacatctccacagagatctaccaggccggctctaccccctgcaatggcgtggagggctttaactgttatttccctctgcagtcttacggcttccagccaacaaacggcgtgggctatcagccctacagagtggtggtgctgtcctttgagctgctgcacgcaccagcaacagtgtgcggcccaaagaagtctaccaatctggtgaagaacaagtgcgtgaacttcaacttcaacggactgaccggcacaggcgtgctgaccgagagcaataagaagttcctgccttttcagcagttcggcagggacatcgcagataccacagacgccgtgcgcgaccctcagaccctggagatcctggacatcacaccatgcagcttcggcggcgtgtccgtgatcacaccaggcaccaatacatccaaccaggtggccgtgctgtatcaggacgtgaattgtaccgaggtgcccgtggcaatccacgcagatcagctgacccctacatggcgggtgtactctaccggcagcaacgtgttccagacaagagccggatgcctgatcggagcagagcacgtgaacaatagctatgagtgcgacatccctatcggcgccggcatctgtgccagctaccagacccagacaaactccccatctggagcaggctccgtggccagccagtccatcatcgcctataccatgagcctgggcgccgagaacagcgtggcctactccaacaattctatcgccatccctaccaacttcacaatcagcgtgaccacagagatcctgccagtgtctatgaccaagacaagcgtggactgcacaatgtatatctgtggcgatagcaccgagtgctccaacctgctgctgcagtacggctccttttgtacccagctgaatagagccctgacaggcatcgccgtggagcaggataagaacacacaggaggtgttcgcccaggtgaagcagatctacaagaccccacccatcaaggactttggcggcttcaacttcagccagatcctgcctgatccaagcaagccctccaagaggtcttttatcgaggacctgctgttcaacaaggtgaccctggccgatgccggcttcatcaagcagtatggagattgcctgggagacatcgcagcccgcgacctgatctgtgcccagaagtttaatggcctgaccgtgctgcctccactgctgacagatgagatgatcgcccagtacacatctgccctgctggccggcaccatcacaagcggatggaccttcggcgcaggagccgccctgcagatcccttttgccatgcagatggcctataggttcaacggcatcggcgtgacccagaatgtgctgtacgagaaccagaagctgatcgccaatcagtttaacagcgccatcggcaagatccaggactctctgtcctctacagccagcgccctgggcaagctgcaggatgtggtgaatcagaacgcccaggccctgatgaccctggtgaagcagctgagctccaacttcggcgccatctctagcgtgctgaatgacatcctgagccggctggacccccctgaggcagaggtgcagatcgacaggctgatcacaggccgcctgcagagcctgcagacctacgtgacacagcagctgatcagggcagcagagatcagagcctccgccaatctggccgccaccaagatgagcgagtgcgtgctgggacagtccaagagggtggacttttgtggcaagggctatcacctgatgtctttcccacagagcgcccctcacggcgtggtgtttctgcacgtgacctacgtgccagcccaggagaagaacttcaccacagcaccagccatctgccacgatggaaaggcacactttcctagggagggcgtgttcgtgtctaacggcacccactggtttgtgacacagcgcaatttctacgagccacagatcatcaccacagacaatacattcgtgagcggcaactgtgatgtggtgatcggcatcgtgaacaataccgtgtatgatccactgcagcccgagctggactcctttaaggaggagctggataagtacttcaagaatcacacctctcccgacgtggatctgggcgacatctccggcatcaatgcctctgtggtgaacatccagaaggagatcgaccggctgaacgaggtggccaagaatctgaacgagagcctgatcgatctgcaggagctgggcaagtatgagcagtacatcaagggctctggcagagagaacctgtatttccagggaggaggaggcagcggatacatccctgaggcaccaagggacggacaggcctacgtgcgcaaggatggcgagtgggtgctgctgtccacctttctgggccatcatcaccaccaccaccaccactga

SEQ ID NO: 1516 - DNA, 3846 bp, Artificial Sequence
  Description of Artificial Sequence: Synthetic polynucleotide
atgggcatcctgccaagcccaggaatgcccgccctgctgtctctggtgagcctgctgtccgtgctgctgatgggatgcgtggcagagacaggcacacagtgcgtgaacctgaccacaaggacccagctgccccctgcctataccaattctttcacacggggcgtgtactatcccgacaagatctttagaagctccgtgctgcaccttacacaggatctgtttctgcctttcttttctaacgtgacctggttccacgccatccacgtgtccggcaccaatggcacaaagcggttcgacaatcccgtgctgccttttaacgatggcgtgtacttcgccgcaaccgagaagtccaacatcatcagaggctggatctttggcaccacactggactctaagacacagagcctgctgatcgtgaacaatgccaccaacgtggtgatcaaggtgtgcgagttccagttttgtaatgatccattcctgggcgtgtactatcacaagaacaataagtcctggatggagtctgagtttcgcgtgtattctagcgccaacaattgcacatttgagtacgtgagccagcccttcctgatggacctggagggcaagcagggcaatttcaagaacctgagggagttcgtgtttaagaatatcgatggctacttcaagatctacagcaagcacaccccaatcaacctggtgcgcgacctgccacagggattctccgccctggagccactggtgaaactgcccatcggcatcaacatcacccggtttcagacactgctggccctgcacagatcctacctgacaccaggcgactcctctagcggatggaccgcaggagctgccgcctactatgtgggctatctgcagccccggaccttcctgctgaagtacaacgagaatggcaccatcacagacgcagtggattgcgccctggaccccctgtctgagacaaagtgtacactgaagagctttaccgtggagaagggcatctatcagacaagcaatttcagggtgcagcctaccgagtccatcgtgcgctttcccaatatcacaaacctgtgcccttttggcgaggtgttcaacgccaccagattcgccagcgtgtacgcctggaatcggaagagaatctccaactgcgtggccgactattctgtgctgtacaactccgcctctttcagcacctttaagtgctatggcgtgtctcccacaaagctgaatgatctgtgctttaccaacgtgtacgccgatagcttcgtgatcaggggagacgaagtgagacagatcgcaccaggacagacaggaaagatcgcagactacaattataagctgcctgacgatttcaccggctgcgtgatcgcctggaactccaacaatctggattctaaagtgggcggcaactacaattatctgtacaggctgtttcgcaagtccaatctgaagccattcgagcgggacatctccacagagatctaccaggccggctctaccccctgcaatggcgtggagggctttaactgttatttccctctgcagtcttacggcttccagccaacaaacggcgtgggctatcagccctacagagtggtggtgctgtcctttgagctgctgcacgcaccagcaacagtgtgcggcccaaagaagtctaccaatctggtgaagaacaagtgcgtgaacttcaacttcaacggactgaccggcacaggcgtgctgaccgagagcaataagaagttcctgccttttcagcagttcggcagggacatcagtgataccacagacgccgtgcgcgaccctcagaccctggagatcctggacatcacaccatgcagcttcggcggcgtgtccgtgatcacaccaggcaccaatacatccaaccaggtggccgtgctgtatcaggacgtgaattgtaccgatgtgcccgtggcaatccacgcagatcagctgacccctacatggcgggtgtactctaccggcagcaacgtgttccagacacaagccggatgcctgatcggagcagagcacgtgaacaatagctatgagtgcgacatccctatcggcgccggcatctgtgccagctaccagacccagacaaactccccatctggagcaggctccgtggccagccagtccatcgtcgcctataccatgagcctgggcgccgagaacagcgtggcctactccaacaattctatcgccatccctaccaacttcacaatcagcgtgaccacagagatcctgccagtgtctatgaccaagacaagcgtggactgcacaatgtatatctgtggcgatagcaccgagtgctccaacctgctgctgcagtacggctccttttgtacccagctgaatagagccctgacaggcatcgccgtggagcaggataagaacacacaggaggtgttcgcccaggtgaagcagatctacaagaccccacccatcaaggactttggcggcttcaacttcagccagatcctgcctgatccaagcaagccctccaagaggtcttttatcgaggacctgctgttcaacaaggtgaccctggccgatgccggcttcatcaagcagtatggagattgcctgggagacatcgcagcccgcgacctgatctgtgcccagaagtttaatggcctgaccgtgctgcctccactgctgacagatgagatgatcgccgcgtacacagcggccctgctggccggcaccgctacagcgggatggaccttcggcgcaggagccgccctgcagatcccttttgccatgcagatggcctataggttcaacggcatcggcgtgacccagaatgtgctgtacgagaaccagaagctgatcgccaatcagtttaacagcgccatcggcaagatccaggactctctgtcctctacagccagcgccctgggcaagctgcaggatgtggtgaatcagaacgcccaggccctgaataccctggtgaagcagctgagctccaacttcggcgccatctctagcgtgctgaatgacatcctgagccggctggacccccctgaggcagaggtgcagatcgacaggctgatcacaggccgcctgcagagcctgcagacctacgtgacacagcagctgatcagggcagcagagatcagagcctccgccaatctggccgccaccaagatgagcgagtgcgtgctgggacagtccaagagggtggacttttgtggcaagggctatcacctgatgtctttcccacagagcgcccctcacggcgtggtgtttctgcacgtgacctacgtgccagcccaggagaagaacttcaccacagcaccagccatctgccacgatggaaaggcacactttcctagggagggcgtgttcgtgtctaacggcacccactggtttgtgacacagcgcaatttctacgagccacagatcatcaccacagacaatacattcgtgagcggcaactgtgatgtggtgatcggcatcgtgaacaataccgtgtatgatccactgcagcccgagctggactcctttaaggaggagctggataagtacttcaagaatcacacctctcccgacgtggatctgggcgacatctccggcatcaatgcctctgtggtgaacatccagaaggagatcgaccggctgaacgaggtggccaagaatctgaacgagagcctgatcgatctgcaggagctgggcaagtatgagcagtacatcaagggctctggcagagagaacctgtatttccagggaggaggaggcagcggatacatccctgaggcaccaagggacggacaggcctacgtgcgcaaggatggcgagtgggtgctgctgtccacctttctgggccatcatcaccaccaccaccaccactga

SEQ ID NO: 1517 - DNA, 3846 bp, Artificial Sequence
  Description of Artificial Sequence: Synthetic polynucleotide
atgggcatcctgccaagcccaggaatgcccgccctgctgtctctggtgagcctgctgtccgtgctgctgatgggatgcgtggcagagacaggcacacagtgcgtgaacctgaccacaaggacccagctgccccctgcctataccaattctttcacacggggcgtgtactatcccgacaaggtgtttagaagctccgtgctgcactccacacaggatctgtttctgcctttcttttctaacgtgacctggttccacgccatccacgtgtccggcaccaatggcacaaagcggttcgacaatcccgtgctgccttttaacgatggcgtgtacttcgccagcaccgagaagtccaacatcatcagaggctggatctttggcaccacactggactctaagacacagagcctgctgatcgtgaacaatgccaccaacgtggtgatcaaggtgtgcgagttccagttttgtaatgatccattcctgggcgtgtactatcacaagaacaataagtcctggatggagtctgagtttcgcgtgtattctagcgccaacaattgcacatttgagtacgtgagccagcccttcctgatggacctggagggcaagcagggcaatttcaagaacctgagggagttcgtgtttaagaatatcgatggctacttcaagatctacagcaagcacaccccaatcaacctggtgcgcgacctgccacagggattctccgccctggagccactggtggatctgcccatcggcatcaacatcacccggtttcagacactgctggccctgcacagatcctacctgacaccaggcgactcctctagcggatggaccgcaggagctgccgcctactatgtgggctatctgcagccccggaccttcctgctgaagtacaacgagaatggcaccatcacagacgcagtggattgcgccctggaccccctgtctgagacaaagtgtacactgaagagctttaccgtggagaagggcatctatcagacaagcaatttcagggtgcagcctaccgagtccatcgtgcgctttcccaatatcacaaacctgtgcccttttggcgaggtgttcaacgccaccagattcgccagcgtgtacgcctggaatcggaagagaatctccaactgcgtggccgactattctgtgctgtacaactccgcctctttcagcacctttaagtgctatggcgtgtctcccacaaagctgaatgatctgtgctttaccaacgtgtacgccgatagcttcgtgatcaggggagacgaagtgagacagatcgcaccaggacagacaggaaagatcgcagactacaattataagctgcctgacgatttcaccggctgcgtgatcgcctggaactccaacaatctggattctaaagtgggcggcaactacaattatctgtacaggctgtttcgcaagtccaatctgaagccattcgagcgggacatctccacagagatctaccaggccggctctaccccctgcaatggcgtggagggctttaactgttatttccctctgcagtcttacggcttccagccaacaaacggcgtgggctatcagccctacagagtggtggtgctgtcctttgagctgctgcacgcaccagcaacagtgtgcggcccaaagaagtctaccaatctggtgaagaacaagtgcgtgaacttcaacttcaacggactgaccggcacaggcgtgctgaccgagagcaataagaagttcctgccttttcagcagttcggcagggacatcgcagataccacagacgccgtgcgcgaccctcagaccctggagatcctggacatcacaccatgcagcttcggcggcgtgtccgtgatcacaccaggcaccaatacatccaaccaggtggccgtgctgtatcaggacgtgaattgtaccgaggtgcccgtggcaatccacgcagatcagctgacccctacatggcgggtgtactctaccggcagcaacgtgttccagacaagagccggatgcctgatcggagcagagcacgtgaacaatagctatgagtgcgacatccctatcggcgccggcatctgtgccagctaccagacccagacaaactccccatctggagcaggctccgtggccagccagtccatcatcgcctataccatgagcctgggcgccgagaacagcgtggcctactccaacaattctatcgccatccctaccaacttcacaatcagcgtgaccacagagatcctgccagtgtctatgaccaagacaagcgtggactgcacaatgtatatctgtggcgatagcaccgagtgctccaacctgctgctgcagtacggctccttttgtacccagctgaatagagccctgacaggcatcgccgtggagcaggataagaacacacaggaggtgttcgcccaggtgaagcagatctacaagaccccacccatcaaggactttggcggcttcaacttcagccagatcctgcctgatccaagcaagccctccaagaggtcttttatcgaggacctgctgttcaacaagactaccctggccgatgccggcttcatcaagcagtatggagattgcctgggagacatcgcagcccgcgacctgatctgtgcccagaagtttaatggcctgaccgtgctgcctccactgctgacagatgagatgatcgcccagtacacatctgccctgctggccggcaccatcacaagcggatggaccttcggcgcaggagccgccctgcagatcccttttgccatgcagatggcctataggttcaacggcatcggcgtgacccagaatgtgctgtacgagaaccagaagctgatcgccaatcagtttaacagcgccatcggcaagatccaggactctctgtcctctacagccagcgccctgggcaagctgcaggatgtggtgaatcagaacgcccaggccctgaataccctggtgaagcagctgagctccaacttcggcgccatctctagcgtgctgaatgacatcctgagccggctggacccccctgaggcagaggtgcagatcgacaggctgatcacaggccgcctgcagagcctgcagacctacgtgacacagcagctgatcagggcagcagagatcagagcctccgccaatctggccgccaccaagatgagcgagtgcgtgctgggacagtccaagagggtggacttttgtggcaagggctatcacctgatgtctttcccacagagcgcccctcacggcgtggtgtttctgcacgtgacctacgtgccagcccaggagaagaacttcaccacagcaccagccatctgccacgatggaaaggcacactttcctagggagggcgtgttcgtgtctaacggcacccactggtttgtgacacagcgcaatttctacgagccacagatcatcaccacagacaatacattcgtgagcggcaactgtgatgtggtgatcggcatcgtgaacaataccgtgtatgatccactgcagcccgagctggactcctttaaggaggagctggataagtacttcaagaatcacacctctcccgacgtggatctgggcgacatctccggcatcaatgcctctgtggtgaacatccagaaggagatcgaccggctgaacgaggtggccaagaatctgaacgagagcctgatcgatctgcaggagctgggcaagtatgagcagtacatcaagggctctggcagagagaacctgtatttccagggaggaggaggcagcggatacatccctgaggcaccaagggacggacaggcctacgtgcgcaaggatggcgagtgggtgctgctgtccacctttctgggccatcatcaccaccaccaccaccactga

SEQ ID NO: 1518 - DNA, 3846 bp, Artificial Sequence
  Description of Artificial Sequence: Synthetic polynucleotide
atgggcatcctgccaagcccaggaatgcccgccctgctgtctctggtgagcctgctgtccgtgctgctgatgggatgcgtggcagagacaggcacacagtgcgtgaacctgaccacaaggacccagctgccccctgcctataccaattctttcacacggggcgtgtactatcccgacaaggtgtttagaagctccgtgctgcactccacacaggatctgtttctgcctttcttttctaacgtgacctggttccacgccatccacgtgtccggcaccaatggcacaaagcggttcgacaatcccgtgctgccttttaacgatggcgtgtacttcgccagcaccgagaagtccaacatcatcagaggctggatctttggcaccacactggactctaagacacagagcctgctgatcgtgaacaatgccaccaacgtggtgatcaaggtgtgcgagttccagttttgtaatgatccattcctgggcgtgtactatcacaagaacaataagtcctggatggagtctgagtttcgcgtgtattctagcgccaacaattgcacatttgagtacgtgagccagcccttcctgatggacctggagggcaagcagggcaatttcaagaacctgagggagttcgtgtttaagaatatcgatggctacttcaagatctacagcaagcacaccccaatcaacctggtgcgcgacctgccacagggattctccgccctggagccactggtggatctgcccatcggcatcaacatcacccggtttcagacactgctggccctgcacagatcctacctgacaccaggcgactcctctagcggatggaccgcaggagctgccgcctactatgtgggctatctgcagccccggaccttcctgctgaagtacaacgagaatggcaccatcacagacgcagtggattgcgccctggaccccctgtctgagacaaagtgtacactgaagagctttaccgtggagaagggcatctatcagacaagcaatttcagggtgcagcctacctattccatcgtgcgctttcccaatatcacaaacctgtgcccttttggcgaggtgttcaacgccaccagattcgccagcgtgtacgcctggaatcggaagagaatctccaactgcgtggccgactattctgtgctgtacaactccgcctctttcagcacctttaagtgctatggcgtgtctcccacaaagctgaatgatctgtgctttaccaacgtgtacgccgatagcttcgtgatcaggggagacgaagtgagacagatcgcaccaggacagacaggaaagatcgcagactacaattataagctgcctgacgatttcaccggctgcgtgatcgcctggaactccaacaatctggattctaaagtgggcggcaactacaattatctgtacaggctgtttcgcaagtccaatctgaagccattcgagcgggacatctccacagagatctaccaggccggctctaccccctgcaatggcgtggagggctttaactgttatttccctctgcagtcttacggcttccagccaacaaacggcgtgggctatcagccctacagagtggtggtgctgtcctttgagctgctgcacgcaccagcaacagtgtgcggcccaaagaagtctaccaatctggtgaagaacaagtgcgtgaacttcaacttcaacggactgaccggcacaggcgtgctgaccgagagcaataagaagttcctgccttttcagcagttcggcagggacatcgcagataccacagacgccgtgcgcgaccctcagaccctggagatcctggacatcacaccatgcagcttcggcggcgtgtccgtgatcacaccaggcaccaatacatccaaccaggtggccgtgctgtatcaggacgtgaattgtaccgaggtgcccgtggcaatccacgcagatcagctgacccctacatggcgggtgtactctaccggcagcaacgtgttccagacaagagccggatgcctgatcggagcagagcacgtgaacaatagctatgagtgcgacatccctatcggcgccggcatctgtgccagctaccagacccagacaaactccccatctggagcaggctccgtggccagccagtccatcatcgcctataccatgagcctgggcgccgagaacagcgtggcctactccaacaattctatcgccatccctaccaacttcacaatcagcgtgaccacagagatcctgccagtgtctatgaccaagacaagcgtggactgcacaatgtatatctgtggcgatagcaccgagtgctccaacctgctgctgcagtacggctccttttgtacccagctgaatagagccctgacaggcatcgccgtggagcaggataagaacacacaggaggtgttcgcccaggtgaagcagatctacaagaccccacccatcaaggactttggcggcttcaacttcagccagatcctgcctgatccaagcaagccctccaagaggtcttttatcgaggacctgctgttcaacaaggtgaccctggccgatgccggcttcatcaagcagtatggagattgcctgggagacatcgcagcccgcgacctgatctgtgcccagaagtttaatggcctgaccgtgctgcctccactgctgacagatgagatgatcgcccagtacacatctgccctgctggccggcaccatcacaagcggatggaccttcggcgcaggagccgccctgcagatcccttttgccatgcagatggcctataggttcaacggcatcggcgtgacccagaatgtgctgtacgagaaccagaagctgatcgccaatcagtttaacagcgccatcggcaagatccaggactctctgtcctctacagccagcgccctgggcaagctgcaggatgtggtgaatcagaacgcccaggccctgaataccctggtgaagcagctgagctccaacttcggcgccatctctagcgtgctgaatgacatcctgagccggctggacccccctgaggcagaggtgcagatcgacaggctgatcacaggccgcctgcagagcctgcagacctacgtgacacagcagctgatcagggcagcagagatcagagcctccgccaatctggccgccaccaagatgagcgagtgcgtgctgggacagtccaagagggtggacttttgtggcaagggctatcacctgatgtctttcccacagagcgcccctcacggcgtggtgtttctgcacgtgacctacgtgccagcccaggagaagaacttcaccacagcaccagccatctgccacgatggaaaggcacactttcctagggagggcgtgttcgtgtctaacggcacccactggtttgtgacacagcgcaatttctacgagccacagatcatcaccacagacaatacattcgtgagcggcaactgtgatgtggtgatcggcatcgtgaacaataccgtgtatgatccactgcagcccgagctggactcctttaaggaggagctggataagtacttcaagaatcacacctctcccgacgtggatctgggcgacatctccggcatcaatgcctctgtggtgaacatccagaaggagatcgaccggctgaacgaggtggccaagaatctgaacgagagcctgatcgatctgcaggagctgggcaagtatgagcagtacatcaagggctctggcagagagaacctgtatttccagggaggaggaggcagcggatacatccctgaggcaccaagggacggacaggcctacgtgcgcaaggatggcgagtgggtgctgctgtccacctttctgggccatcatcaccaccaccaccaccactga

SEQ ID NO: 1519 - DNA, 3846 bp, Artificial Sequence
  Description of Artificial Sequence: Synthetic polynucleotide
atgggcatcctgccaagcccaggaatgcccgccctgctgtctctggtgagcctgctgtccgtgctgctgatgggatgcgtggcagagacaggcacacagtgcgtgaacctgaccacaaggacccagctgccccctgcctataccaattctttcacacggggcgtgtactatcccgacaaggtgtttagaagctccgtgctgcactccacacaggatctgtttctgcctttcttttctaacgtgacctggttccacgccatccacgtgtccggcaccaatggcacaaagcggttcgacaatcccgtgctgccttttaacgatggcgtgtacttcgccgcgattgagaagtccaacatcatcagaggctggatctttggcaccacactggactctaagacacagagcctgctgatcgtgaacaatgccaccaacgtggtgatcaaggtgtgcgagttccagttttgtaatgatccattcctgggcgtgtactatcacaagaacaataagtcctggatggagtctgagtttcgcgtgtattctagcgccaacaattgcacatttgagtacgtgagccagcccttcctgatggacctggagggcaagcagggcaatttcaagaacctgagggagttcgtgtttaagaatatcgatggctacttcaagatctacagcaagcacaccccaatcaacctggtgcgcgacctgccacagggattctccgccctggagccactggtggatctgcccatcggcatcaacatcacccggtttcagacactgctggccctgcacagatcctacctgacaccaggcgactcctctagcggatggaccgcaggagctgccgcctactatgtgggctatctgcagccccggaccttcctgctgaagtacaacgagaatggcaccatcacagacgcagtggattgcgccctggaccccctgtctgagacaaagtgtacactgaagagctttaccgtggagaagggcatctatcagacaagcaatttcagggtgcagcctaccgagtccatcgtgcgctttcccaatatcacaaacctgtgcccttttggcgaggtgttcaacgccaccagattcgccagcgtgtacgcctggaatcggaagagaatctccaactgcgtggccgactattctgtgctgtacaactccgcctctttcagcacctttaagtgctatggcgtgtctcccacaaagctgaatgatctgtgctttaccaacgtgtacgccgatagcttcgtgatcaggggagacgaagtgagacagatcgcaccaggacagacaggaaagatcgcagactacaattataagctgcctgacgatttcaccggctgcgtgatcgcctggaactccaacaatctggattctaaagtgggcggcaactacaattatctgtacaggctgtttcgcaagtccaatctgaagccattcgagcgggacatctccacagagatctaccaggccggctctaccccctgcaatggcgtggagggctttaactgttatttccctctgcagtcttacggcttccagccaacaaacggcgtgggctatcagccctacagagtggtggtgctgtcctttgagctgctgcacgcaccagcaacagtgtgcggcccaaagaagtctaccaatctggtgaagaacaagtgcgtgaacttcaacttcaacggactgaccggcacaggcgtgctgaccgagagcaataagaagttcctgccttttcagcagttcggcagggacatcagtgataccacagacgccgtgcgcgaccctcagaccctggagatcctggacatcacaccatgcagcttcggcggcgtgtccgtggtaacaccaggcaccaatacatccaaccaggtggccgtgctgtatcaggacgtgaattgtaccgaggtgcccgtggcaatccacgcagatcagctgacccctacatggcgggtgtactctaccggcagcaacgtgttccagacaagagccggatgcctgatcggagcagagcacgtgaacaatagctatgagtgcgacatccctatcggcgccggcatctgtgccagctaccagacccagacaaactccccatctggagcaggctccgtggccagccagtccatcatcgcctataccatgagcctgggcgccgagaacagcgtggcctactccaacaattctatcgccatccctaccaacttcacaatcagcgtgaccacagagatcctgccagtgtctatgaccaagacaagcgtggactgcacaatgtatatctgtggcgatagcaccgagtgctccaacctgctgctgcagtacggctccttttgtacccagctgaatagagccctgacaggcatcgccgtggaggaagataagaacacacaggaggtgttcgcccaggtgaagcagatctacaagaccccacccatcaaggactttggcggcttcaacttcagccagatcctgcctgatccaagcaagccctccaagaggtcttttatcgaggacctgctgttcaacaaggtgaccctggccgatgccggcttcatcaagcagtatggagattgcctgggagacatcgcagcccgcgacctgatctgtgcccagaagtttaatggcctgaccgtgctgcctccactgctgacagatgagatgatcgcccagtacacatcttcactgctggccggcaccatcacagctggatggaccttcggcgcaggagccgccctgcagatcccttttgccatgcagatggcctataggttcaacggcatcggcgtgacccagaatgtgctgtacgagaaccagaagctgatcgccaatcagtttaacagcgccatcggcaagatccaggactctctgtcctctacagccagcgccctgggcaagctgcaggatgtggtgaatcagaacgcccaggccctgaataccctggtgaagcagctgagctccaacttcggcgccatctctagcgtgctgaatgacatcctgagccggctggacccccctgaggcagaggtgcaggtagacaggctgatcacaggccgcctgcagagcctgcagacctacgtgacacagcagctgatcagggcagcagagatcagagcctccgccaatctggccgccaccaagatgagcgagtgcgtgaaaggacagtccaagagggtggacttttgtggcaagggctatcacctgatgtctttcccacagagcgcccctcacggcattgtgtttctgcacgtgacctacgtgccagcccaggagaagaacttcaccacagcaccagccatctgccacgatggaaaggcacactttcctagggagggcgtgttcgtgtctaacggcacccactggtttgtgacacagcgcaatttctacgagccacagatcatcaccacagacaatacattcgtgagcggcaactgtgatgtggtgatcggcatcgtgaacaataccgtgtatgatccactgcagcccgagctggactcctttaaggaggagctggataagtacttcaagaatcacacctctcccgacgtggatctgggcgacatctccggcatcaatgcctctgtggtgaacatccagaaggagatcgaccggctgaacgaggtggccaagaatctgaacgagagcctgatcgatctgcaggagctgggcaagtatgagcagtacatcaagggctctggcagagagaacctgtatttccagggaggaggaggcagcggatacatccctgaggcaccaagggacggacaggcctacgtgcgcaaggatggcgagtgggtgctgctgtccacctttctgggccatcatcaccaccaccaccaccactga

SEQ ID NO: 1520 - DNA, 3846 bp, Artificial Sequence
  Description of Artificial Sequence: Synthetic polynucleotide
atgggcatcctgccaagcccaggaatgcccgccctgctgtctctggtgagcctgctgtccgtgctgctgatgggatgcgtggcagagacaggcacacagtgcgtgaacctgaccacaaggacccagctgccccctgcctataccaattctttcacacggggcgtgtactatcccgacaaggtgtttagaagctccgtgctgcactccacacaggatctgtttctgcctttcttttctaacgtgacctggttccacgccatccacgtgtccggcaccaatggcacaaagcggttcgacaatcccgtgctgccttttaacgatggcgtgtacttcgccagcaccgagaagtccaacatcatcagaggctggatctttggcaccacactggactctaagacacagagcctgctgatcgtgaacaatgccaccaacgtggtgatcaaggtgtgcgagttccagttttgtaatgatccattcctgggcgtgtactatcacaagaacaataagtcctggatggagtctgagtttcgcgtgtattctagcgccaacaattgcacatttgagtacgtgagccagcccttcctgatggacctggagggcaagcagggcaatttcaagaacctgagggagttcgtgtttaagaatatcgatggctacttcaagatctacagcaagcacaccccaatcaacctggtgcgcgacctgccacagggattctccgccctggagccactggtggatctgcccatcggcatcaacatcacccggtttcagacactgctggccctgcacagatcctacctgacaccaggcgactcctctagcggatggaccgcaggagctgccgcctactatgtgggctatctgcagccccggaccttcctgctgaagtacaacgagaatggcaccatcacagacgcagtggattgcgccctggaccccctgtctgagacaaagtgtacactgaagagctttaccgtggagaagggcatctatcagacaagcaatttcagggtgcagcctaccgagtccatcgtgcgctttcccaatatcacaaacctgtgcccttttggcgaggtgttcaacgccaccagattcgccagcgtgtacgcctggaatcggaagagaatctccaactgcgtggccgactattctgtgctgtacaactccgcctctttcagcacctttaagtgctatggcgtgtctcccacaaagctgaatgatctgtgctttaccaacgtgtacgccgatagcttcgtgatcaggggagacgaagtgagacagatcgcaccaggacagacaggaaagatcgcagactacaattataagctgcctgacgatttcaccggctgcgtgatcgcctggaactccaacaatctggattctaaagtgggcggcaactacaattatctgtacaggctgtttcgcaagtccaatctgaagccattcgagcgggacatctccacagagatctaccaggccggctctaccccctgcaatggcgtggagggctttaactgttatttccctctgcagtcttacggcttccagccaacaaacggcgtgggctatcagccctacagagtggtggtgctgtcctttgagctgctgcacgcaccagcaacagtgtgcggcccaaagaagtctaccaatctggtgaagaacaagtgcgtgaacttcaacttcaacggactgaccggcacaggcgtgctgaccgagagcaataagaagttcctgccttttcagcagttcggcagggacatcgcagataccacagacgccgtgcgcgaccctcagaccctggagatcctggacatcacaccatgcagcttcggcggcgtgtccgtgatcacaccaggcaccaatacatccaaccaggtggccgtgctgtatcaggacgtgaattgtaccgaggtgcccgtggcaatccacgcagatcagctgacccctacatggcgggtgtactctaccggcagcaacgtgttccagacaagagccggatgcctgatcggagcagagcacgtgaacaatagctatgagtgcgacatccctatcggcgccggcatctgtgccagctaccagacccagacaaactccccatctggagcaggctccgtggccagccagtccatcatcgcctataccatgagcctgggcgccgagaacagcgtggcctactccaacaattctatcgccatccctaccaacttcacaatcagcgtgaccacagagatcctgccagtgtctatgaccaagacaagcgtggactgcacaatgtatatctgtggcgatagcaccgagtgctccaacctgctgctgcagtacggctccttttgtacccagctgaatagagccctgacaggcatcgccgtggagcaggataagaacacacaggaggtgttcgcccaggtgaagcagatctacaagaccccacccatcaaggactttggcggcttcaacttcagccagatcctgcctgatccaagcaagccctccaagaggtcttttatcgaggacctgctgttcaacaaggtgaccctggccgatgccggcttcatcaagcagtatggagattgcctgggagacatcgcagcccgcgacctgatctgtgcccagaagtttaatggcctgaccgtgctgcctccactgctgacagatgagatgatcgcccagtacacatctgccctgctggccggcaccatcacaagcggatggaccttcggcgcaggagccgccctgcagatcccttttgccatgcagatggcctataggttcaacggcatcggcgtgacccagaatgtgctgtacgagaaccagaagctgatcgccaatcagtttaacagcgccatcggcaagatccaggactctctgtcctctacagccagcgccctgggcaagctgcaggatgtggtgaatcagaacgcccaggccctgaataccctggtgaagcagctgagctccaacttcggcgccatctctagcgtgctgaatgacatcctgagccggctggacccccctgaggcagaggtgcagatcgacaggctgatcacaggccgcctgcagagcctgcagacctacgtgacacagcagctgatcagggcagcagagatcagagcctccgccaatctggccgccgaaaagatgagcgagtgcgtgctgggacagtccaagagggtggacttttgtggcaagggctatcacctgatgtctttcccacagagcgcccctcacggcgtggtgtttctgcacgtgacctacgtgccagcccaggagaagaacttcaccacagcaccagccatctgccacgatggaaaggcacactttcctagggagggcgtgttcgtgtctaacggcacccactggtttgtgacacagcgcaatttctacgagccacagatcatcaccacagacaatacattcgtgagcggcaactgtgatgtggtgatcggcatcgtgaacaataccgtgtatgatccactgcagcccgagctggactcctttaaggaggagctggataagtacttcaagaatcacacctctcccgacgtggatctgggcgacatctccggcatcaatgcctctgtggtgaacatccagaaggagatcgaccggctgaacgaggtggccaagaatctgaacgagagcctgatcgatctgcaggagctgggcaagtatgagcagtacatcaagggctctggcagagagaacctgtatttccagggaggaggaggcagcggatacatccctgaggcaccaagggacggacaggcctacgtgcgcaaggatggcgagtgggtgctgctgtccacctttctgggccatcatcaccaccaccaccaccactga

SEQ ID NO: 1521 - DNA, 3846 bp, Artificial Sequence
  Description of Artificial Sequence: Synthetic polynucleotide
atgggcatcctgccaagcccaggaatgcccgccctgctgtctctggtgagcctgctgtccgtgctgctgatgggatgcgtggcagagacaggcacacagtgcgtgaacctgaccacaaggacccagctgccccctgcctataccaattctttcacacggggcgtgtactatcccgacaaggtgtttagaagctccgtgctgcactccacacaggatctgtttctgcctttcttttctaacgtgacctggttccacgccatccacgtgtccggcaccaatggcacaaagcggttcgacaatcccgtgctgccttttaacgatggcgtgtacttcgccagcaccgagaagtccaacatcatcagaggctggatctttggcaccacactggactctaagacacagagcctgctgatcgtgaacaatgccaccaacgtggtgatcaaggtgtgcgagttccagttttgtaatgatccattcctgggcgtgtactatcacaagaacaataagtcctggatggagtctgagtttcgcgtgtattctagcgccaacaattgcacatttgagtacgtgagccagcccttcctgatggacctggagggcaagcagggcaatttcaagaacctgagggagttcgtgtttaagaatatcgatggctacttcaagatctacagcaagcacaccccaatcaacctggtgcgcgacctgccacagggattctccgccctggagccactggtggatctgcccatcggcatcaacatcacccggtttcagacactgctggccctgcacagatcctacctgacaccaggcgactcctctagcggatggaccgcaggagctgccgcctactatgtgggctatctgcagccccggaccttcctgctgaagtacaacgagaatggcaccatcacagacgcagtggattgcgccctggaccccctgtctgagacaaagtgtacactgaagagctttaccgtggagaagggcatctatcagacaagcaatttcagggtgcagcctaccgagtccatcgtgcgctttcccaatatcacaaacctgtgcccttttggcgaggtgttcaacgccaccagattcgccagcgtgtacgcctggaatcggaagagaatctccaactgcgtggccgactattctgtgctgtacaactccgcctctttcagcacctttaagtgctatggcgtgtctcccacaaagctgaatgatctgtgctttaccaacgtgtacgccgatagcttcgtgatcaggggagacgaagtgagacagatcgcaccaggacagacaggaaagatcgcagactacaattataagctgcctgacgatttcaccggctgcgtgatcgcctggaactccaacaatctggattctaaagtgggcggcaactacaattatctgtacaggctgtttcgcaagtccaatctgaagccattcgagcgggacatctccacagagatctaccaggccggctctaccccctgcaatggcgtggagggctttaactgttatttccctctgcagtcttacggcttccagccaacaaacggcgtgggctatcagccctacagagtggtggtgctgtcctttgagctgctgcacgcaccagcaacagtgtgcggcccaaagaagtctaccaatctggtgaagaacaagtgcgtgaacttcaacttcaacggactgaccggcacaggcgtgctgaccgagagcaataagaagttcctgccttttcagcagttcggcagggacatcgcagataccacagacgccgtgcgcgaccctcagaccctggagatcctggacatcacaccatgcagcttcggcggcgtgtccgtgatcacaccaggcaccaatacatccaaccaggtggccgtgctgtatcaggacgtgaattgtaccgaggtgcccgtggcaatccacgcagatcagctgacccctacatggcgggtgtactctaccggcagcaacgtgttccagacaagagccggatgcctgatcggagcagagcacgtgaacaatagctatgagtgcgacatccctatcggcgccggcatctgtgccagctaccagacccagacaaactccccatctggagcaggctccgtggccagccagtccatcatcgcctataccatgagcctgggcgccgagaacagcgtggcctactccaacaattctatcgccatccctaccaacttcacaatcagcgtgaccacagagatcctgccagtgtctatgaccaagacaagcgtggactgcacaatgtatatctgtggcgatagcaccgagtgctccaacctgctgctgcagtacggctccttttgtacccagctgaatagagccctgacaggcatcgccgtggagcaggataagaacacacaggaggtgttcgcccaggtgaagcagatctacaagaccccacccatcaaggactttggcggcttcaacttcagccagatcctgcctgatccaagcaagccctccaagaggtcttttatcgaggacctgctgttcaacaaggtgaccctggccgatgccggcttcatcaagcagtatggagattgcctgggagacatcgcagcccgcgacctgatctgtgcccagaagtttaatggcctgaccgtgctgcctccactgctgacagatgagatgatcgcccagtacacatctgccctgctggccggcaccatcacaagcggatggaccttcggcgcaggagccgccctgcagatcccttttgccatgcagatggcctataggttcaacggcatcggcgtgacccagaatgtgctgtacgagaaccagaagctgatcgccaatcagtttaacagcgccatcggcaagatccaggactctctgtcctctacagccagcgccctgggcaagctgcaggatgtggtgaatcagaacgcccaggccctgaataccctggtgaagcagctgagctccaacttcggcgccatctctagcgtgctgaatgacatcctgagccggctggacccccctgaggcagaggtgcagatcgacaggctgatcacaggccgcctgcagagcctgcagacctacgtgacacagcagctgatcagggcagcagagatcagagcctccgccaatctggccgccaccaagatgagcgagtgcgtgctgggacagtccaagagggtggacttttgtggcaagggctatcacctgatgtctttcccacagagcgcccctcacggcgtggtgtttctgcacgtgacctacgtgccagcccaggagaagaacttcaccacagcaccaggtatctgccacgatggaaaggcacactttcctagggagggcgtgttcgtgtctaacggcacccactggtttgtgacacagcgcaatttctacgagccacagatcatcaccacagacaatacattcgtgagcggcaactgtgatgtggtgatcggcatcgtgaacaataccgtgtatgatccactgcagcccgagctggactcctttaaggaggagctggataagtacttcaagaatcacacctctcccgacgtggatctgggcgacatctccggcatcaatgcctctgtggtgaacatccagaaggagatcgaccggctgaacgaggtggccaagaatctgaacgagagcctgatcgatctgcaggagctgggcaagtatgagcagtacatcaagggctctggcagagagaacctgtatttccagggaggaggaggcagcggatacatccctgaggcaccaagggacggacaggcctacgtgcgcaaggatggcgagtgggtgctgctgtccacctttctgggccatcatcaccaccaccaccaccactga

SEQ ID NO: 1522 - DNA, 3846 bp, Artificial Sequence
  Description of Artificial Sequence: Synthetic polynucleotide
atgggcatcctgccaagcccaggaatgcccgccctgctgtctctggtgagcctgctgtccgtgctgctgatgggatgcgtggcagagacaggcacacagtgcgtgaacctgaccacaaggacccagctgccccctgcctataccaattctttcacacggggcgtgtactatcccgacaaggtgtttagaagctccgtgctgcactccacacaggatctgtttctgcctttcttttctaacgtgacctggttccacgccatccacgtgtccggcaccaatggcacaaagcggttcgacaatcccgtgctgccttttaacgatggcgtgtacttcgccagcaccgagaagtccaacatcatcagaggctggatctttggcaccacactggactctaagacacagagcctgctgatcgtgaacaatgccaccaacgtggtgatcaaggtgtgcgagttccagttttgtaatgatccattcctgggcgtgtactatcacaagaacaataagtcctggatggagtctgagtttcgcgtgtattctagcgccaacaattgcacatttgagtacgtgagccagcccttcctgatggacctggagggcaagcagggcaatttcaagaacctgagggagttcgtgtttaagaatatcgatggctacttcaagatctacagcaagcacaccccaatcaacctggtgcgcgacctgccacagggattctccgccctggagccactggtggatctgcccatcggcatcaacatcacccggtttcagacactgctggccctgcacagatcctacctgacaccaggcgactcctctagcggatggaccgcaggagctgccgcctactatgtgggctatctgcagccccggaccttcctgctgaagtacaacgagaatggcaccatcacagacgcagtggattgcgccctggaccccctgtctgagacaaagtgtacactgaagagctttaccgtggagaagggcatctatcagacaagcaatttcagggtgcagcctaccgagtccatcgtgcgctttcccaatatcacaaacctgtgcccttttggcgaggtgttcaacgccaccagattcgccagcgtgtacgcctggaatcggaagagaatctccaactgcgtggccgactattctgtgctgtacaactccgcctctttcagcacctttaagtgctatggcgtgtctcccacaaagctgaatgatctgtgctttaccaacgtgtacgccgatagcttcgtgatcaggggagacgaagtgagacagatcgcaccaggacagacaggaaagatcgcagactacaattataagctgcctgacgatttcaccggctgcgtgatcgcctggaactccaacaatctggattctaaagtgggcggcaactacaattatctgtacaggctgtttcgcaagtccaatctgaagccattcgagcgggacatctccacagagatctaccaggccggctctaccccctgcaatggcgtggagggctttaactgttatttccctctgcagtcttacggcttccagccaacaaacggcgtgggctatcagccctacagagtggtggtgctgtcctttgagctgctgcacgcaccagcaacagtgtgcggcccaaagaagtctaccaatctggtgaagaacaagtgcgtgaacttcaacttcaacggactgaccggcacaggcgtgctgaccgagagcaataagaagttcctgccttttcagcagttcggcagggacatcgcagataccacagacgccgtgcgcgaccctcagaccctggagatcctggacatcacaccatgcagcttcggcggcgtgtccgtgatcacaccaggcaccaatacatccaaccaggtggccgtgctgtatcaggacgtgaattgtaccgaggtgcccgtggcaatccacgcagatcagctgacccctacatggcgggtgtactctaccggcagcaacgtgttccagacaagagccggatgcctgatcggagcagagcacgtgaacaatagctatgagtgcgacatccctatcggcgccggcatctgtgccagctaccagacccagacaaactccccatctggagcaggctccgtggccagccagtccatcatcgcctataccatgagcctgggcgccgagaacagcgtggcctactccaacaattctatcgccatccctaccaacttcacaatcagcgtgaccacagagatcctgccagtgtctatgaccaagacaagcgtggactgcacaatgtatatctgtggcgatagcaccgagtgctccaacctgctgctgcagtacggctccttttgtacccagctgaatagagccctgacaggcatcgccgtggagcaggataagaacacacaggaggtgttcgcccaggtgaagcagatctacaagaccccacccatcaaggactttggcggcttcaacttcagccagatcctgcctgatccaagcaagccctccaagaggtcttttatcgaggacctgctgttcaacaaggtgaccctggccgatgccggcttcatcaagcagtatggagattgcctgggagacatcgcagcccgcgacctgatctgtgcccagaagtttaatggcctgaccgtgctgcctccactgctgacagatgagatgatcgcccagtacacatctgccctgctggccggcaccatcacaagcggatggaccttcggcgcaggagccgccctgcagatcccttttgccatgcagatggcctataggttcaacggcatcggcgtgacccagaatgtgctgtacgagaaccagaagctgatcgccaatcagtttaacagcgccatcggcaagatccaggactctctgtcctctacagccagcgccctgggcaagctgcaggatgtggtgaatcagaacgcccaggccctgaataccctggtgaagcagctgagctccaacttcggcgccatctctagcgtgctgaatgacatcctgagccggctggacccccctgaggcagaggtgcagatcgacaggctgatcacaggccgcctgcagagcctgcagacctacgtgacacagcagctgatcagggcagcagagatcagagcctccgccaatctggccgccaccaagatgagcgagtgcgtgctgggacagtccaagagggtggacttttgtggcaagggctatcacctgatgtctttcccacagagcgcccctcacggcgtggtgtttctgcacgtgacctacgtgccagcccaggagaagaacttcaccacagcaccagccatctgccacgatggaaaggcacactttcctagggagggcgtgttcgtgtctaacggcacccactggtttgtgacacagcgcaatttctacgagccacagaatatcaccacagacaatacattcgtgagcggcaactgtgatgtggtgatcggcatcgtgaacaataccgtgtatgatccactgcagcccgagctggactcctttaaggaggagctggataagtacttcaagaatcacacctctcccgacgtggatctgggcgacatctccggcatcaatgcctctgtggtgaacatccagaaggagatcgaccggctgaacgaggtggccaagaatctgaacgagagcctgatcgatctgcaggagctgggcaagtatgagcagtacatcaagggctctggcagagagaacctgtatttccagggaggaggaggcagcggatacatccctgaggcaccaagggacggacaggcctacgtgcgcaaggatggcgagtgggtgctgctgtccacctttctgggccatcatcaccaccaccaccaccactga

SEQ ID NO: 1523 - DNA, 3846 bp, Artificial Sequence
  Description of Artificial Sequence: Synthetic polynucleotide
atgggcatcctgccaagcccaggaatgcccgccctgctgtctctggtgagcctgctgtccgtgctgctgatgggatgcgtggcagagacaggcacacagtgcgtgaacctgaccacaaggacccagctgccccctgcctataccaattctttcacacggggcgtgtactatcccgacaaggtgtttagaagctccgtgctgcactccacacaggatctgtttctgcctttcttttctaacgtgacctggttccacgccatccacgtgtccggcaccaatggcacaaagcggttcgacaatcccgtgctgccttttaacgatggcgtgtacttcgccagcaccgagaagtccaacatcatcagaggctggatctttggcaccacactggactctaagacacagagcctgctgatcgtgaacaatgccaccaacgtggtgatcaaggtgtgcgagttccagttttgtaatgatccattcctgggcgtgtactatcacaagaacaataagtcctggatggagtctgagtttcgctggtattctagcgccaacaattgcacatttgagtacgtgagccagcccttcctgatggacctggagggcaagcagggcaatttcaagaacctgagggagttcgtgtttaagaatatcgatggctacttcaagatctacagcaagcacaccccaatcaacctggtgcgcgacctgccacagggattctccgccctggagccactggtggatctgcccatcggcatcaacatcacccggtttcagacactgctggccctgcacagatcctacctgacaccaggcgactcctctagcggatggaccgcaggagctgccgcctactatgtgggctatctgcagccccggaccttcctgctgaagtacaacgagaatggcaccatcacagacgcagtggattgcgccctggaccccctgtctgagacaaagtgtacactgaagagctttaccgtggagaagggcatctatcagacaagcaatttcagggtgcagcctaccgagtccatcgtgcgctttcccaatatcacaaacctgtgcccttttggcgaggtgttcaacgccaccagattcgccagcgtgtacgcctggaatcggaagagaatctccaactgcgtggccgactattctgtgctgtacaactccgcctctttcagcacctttaagtgctatggcgtgtctcccacaaagctgaatgatctgtgctttaccaacgtgtacgccgatagcttcgtgatcaggggagacgaagtgagacagatcgcaccaggacagacaggaaagatcgcagactacaattataagctgcctgacgatttcaccggctgcgtgatcgcctggaactccaacaatctggattctaaagtgggcggcaactacaattatctgtacaggctgtttcgcaagtccaatctgaagccattcgagcgggacatctccacagagatctaccaggccggctctaccccctgcaatggcgtggagggctttaactgttatttccctctgcagtcttacggcttccagccaacaaacggcgtgggctatcagccctacagagtggtggtgctgtcctttgagctgctgcacgcaccagcaacagtgtgcggcccaaagaagtctaccaatctggtgaagaacaagtgcgtgaacttcaacttcaacggactgaccggcacaggcgtgctgaccgagagcaataagaagttcctgccttttcagcagttcggcagggacatcgcagataccacagacgccgtgcgcgaccctcagaccctggagatcctggacatcacaccatgcagcttcggcggcgtgtccgtgatcacaccaggcaccaatacatccaaccaggtggccgtgctgtatcaggacgtgaattgtaccgaggtgcccgtggcaatccacgcagatcagctgacccctacatggcgggtgtactctaccggcagcaacgtgttccagacaagagccggatgcctgatcggagcagagcacgtgaacaatagctatgagtgcgacatccctatcggcgccggcatctgtgccagctaccagacccagacaaactccccatctggagcaggctccgtggccagccagtccatcatcgcctataccatgagcctgggcgccgagaacagcgtggcctactccaacaattctatcgccatccctaccaacttcacaatcagcgtgaccacagagatcctgccagtgtctatgaccaagacaagcgtggactgcacaatgtatatctgtggcgatagcaccgagtgctccaacctgctgctgcagtacggctccttttgtacccagctgaatagagccctgacaggcatcgccgtggagcaggataagaacacacaggaggtgttcgcccaggtgaagcagatctacaagaccccacccatcaaggactttggcggcttcaacttcagccagatcctgcctgatccaagcaagccctccaagaggtcttttatcgaggacctgctgttcaacaaggtgaccctggccgatgccggcttcatcaagcagtatggagattgcctgggagacatcgcagcccgcgacctgatctgtgcccagaagtttaatggcctgaccgtgctgcctccactgctgacagatgagatgatcgcccagtacacatctgccctgctggccggcaccatcacaagcggatggaccttcggcgcaggagccgccctgcagatcccttttgccatgcagatggcctataggttcaacggcatcggcgtgacccagaatgtgctgtacgagaaccagaagctgatcgccaatcagtttaacagcgccatcggcaagatccaggactctctgtcctctacagccagcgccctgggcaagctgcaggatgtggtgaatcagaacgcccaggccctgaataccctggtgaagcagctgagctccaacttcggcgccatctctagcgtgctgaatgacatcctgagccggctggacccccctgaggcagaggtgcagatcgacaggctgatcacaggccgcctgcagagcctgcagacctacgtgacacagcagctgatcagggcagcagagatcagagcctccgccaatctggccgccaccaagatgagcgagtgcgtgctgggacagtccaagagggtggacttttgtggcaagggctatcacctgatgtctttcccacagagcgcccctcacggcgtggtgtttctgcacgtgacctacgtgccagcccaggagaagaacttcaccacagcaccagccatctgccacgatggaaaggcacactttcctagggagggcgtgttcgtgtctaacggcacccactggtttgtgacacagcgcaatttctacgagccacagatcatcaccacagacaatacattcgtgagcggcaactgtgatgtggtgatcggcatcgtgaacaataccgtgtatgatccactgcagcccgagctggactcctttaaggaggagctggataagtacttcaagaatcacacctctcccgacgtggatctgggcgacatctccggcatcaatgcctctgtggtgaacatccagaaggagatcgaccggctgaacgaggtggccaagaatctgaacgagagcctgatcgatctgcaggagctgggcaagtatgagcagtacatcaagggctctggcagagagaacctgtatttccagggaggaggaggcagcggatacatccctgaggcaccaagggacggacaggcctacgtgcgcaaggatggcgagtgggtgctgctgtccacctttctgggccatcatcaccaccaccaccaccactga

SEQ ID NO: 1524 - DNA, 3846 bp, Artificial Sequence
  Description of Artificial Sequence: Synthetic polynucleotide
atgggcatcctgccaagcccaggaatgcccgccctgctgtctctggtgagcctgctgtccgtgctgctgatgggatgcgtggcagagacaggcacacagtgcgtgaacctgaccacaaggacccagctgccccctgcctataccaattctttcacacggggcgtgtactatcccgacaaggtgtttagaagcgatgtgctgcactccacacaggatctgtttctgcctttcttttctaacgtgacctggttccacgccatccacgtgtccggcaccaatggcacaaagcggttcgacaatcccgtgctgccttttaacgatggcgtgtacttcgccagcaccgagaagtccaacatcatcagaggctggatctttggcaccacactggactctaagacacagagcctgctgatcgtgaacaatgccaccaacgtggtgatcaaggtgtgcgagttccagttttgtgaaaatccattcctgggcgtgtactatcacaagaacaataagtcctggatggagaaagagtttcgcgtgtattctagcgccaacaattgcacatttgagtacgtgagccagcccttcctgatggacctggggggcaagcagggcaatttcaagaacctgagggagttcgtgtttaagaatatcgatggctacttcaagatctacagcaagcacaccccaatcaacctggtgcgcgacctgccacagggattctccgccctggagccactgatggatctgcccatcggcatcaacatcacccggtttcagacactgctggccctgcacagatcctacctgacaccaggcgactcctctagcggatggaccgcaggagctgccgcctactatgtgggctatctgcagccccggaccttcctgctgaagtacaacgagaatggcaccatcacagacgcagtggattgcgcctatgaccccctgtctgagacaaagtgtacactgaagagctttaccgtggagaagggcatctatcagacaagcaatttcagggtgcagcctaccgagtccatcgtgcgctttcccaatatcacaaacctgtgcccttttggcgaggtgttcaacgccaccagattcgccagcgtgtacgcctggaatcggaagagaatctccaactgcgtggccgactattctgtgctgtacaactccgcctctttcagcacctttaagtgctatggcgtgtctcccacaaagctgaatgatctgtgctttaccaacgtgtacgccgatagcttcgtgatcaggggagacgaagtgagacagatcgcaccaggacagacaggaaagatcgcagactacaattataagctgcctgacgatttcaccggctgcgtgatcgcctggaactccaacaatctggattctaaagtgggcggcaactacaattatctgtacaggctgtttcgcaagtccaatctgaagccattcgagcgggacatctccacagagatctaccaggccggctctaccccctgcaatggcgtggagggctttaactgttatttccctctgcagtcttacggcttccagccaacaaacggcgtgggctatcagccctacagagtggtggtgctgtcctttgagctgctgcacgcaccagcaacagtgtgcggcccaaagaagtctaccaatctggtgaagaacaagtgcgtgaacttcaacttcaacggactgaccggcacaggcgtgctgaccgagagcaataagaagttcctgccttttcagcagttcggcagggacatcgcagataacacagacgccgtgcgcgaccctcagaccctggagatcctggacatcacaccatgcagcttcggcggcgtgtccgtgatcacaccaggcaccaatacatccaaccaggtggccgtgctgtatcaggacgtgaattgtaccgaggtgcccaacgcaatccacgcagatcagctgacccctacatggcgggtgtactctaccggcagcaacgtgttccagacaagagccggatgcctgatcggagcagagcacgtgaacaatagctatgagtgcgacatccctatcggcgccggcatctgtgccagctaccagacccagacaaactccccatctggagcaggctccgtggccagccagtccatcatcgcctataccatgagcctgggcgccgagaacagcgtggcctactccaacaattctatcgccatccctaccaacttcacaatcagcgtgaccacagagatcctgccagtgtctatgaccaagacaagcgtggactgcacaatgtatatctgtggcgatagcaccgagtgctccaacctgctgctgcagtacggctccttttgtacccagctgaatagagccctgcaaggcatcgcccaagagcaggataagaacacacaggaggtgttcgcccaggtgaagcagatctacaagaccccacccatcaaggactttggcggcttcaacttcagccagatcctgcctgatccaagcaagccctccaagaggtcttttatcgaggacctgctgttcaacaaggtgaccctggccgatgccggcttcatcaagcagtatggagattgcctgggagacatcgcagcccgcgacctgatctgtgcccagaagtttaatggcctgaccgtgctgcctccactgctgacagatgagatgatcgcccagtacacatctgccctgctggccggcaccatcacaagcggatggaccttcggcgcaggagccgccctgcagatcccttttgccatgcagatggcctataggttcaacggcatcggcgtgacccagaatgtgctgtacgagaaccagaagctgatcgccaatcagtttaaccaagccatcggcaagatccaggactctctgtcctctacagccagcgccctgggcaagctgcaggatgtggtgaatcagaacgcccaggccctgaataccctggtgaagcagctgagctccaacttcggcgccatctctagcgtgctgaatgacatcctgagccggctggacccccctgaggcagaggtgcagatcgacaggctgatcacaggccgcctgcagagcctgcagacctacgtgacacagcagctgatcagggcagcagagatcagagcctccgccaatctggccgccaccaagatgagcgagtgcgtgctgggacagtccaagagggtggacttttgtggcaagggctatcacctgatgtctttcccacagagcgcccctcacggcgtggtgtttctgcacgtgacctacgtgccagcccaggagaagaacttcaccacagcaccagccatctgccacgatggaaaggcattttttcctagggagggcgtgttcgtgtctaacggcacccaatggtttgtgacacagcgcaatttctacgagccacagatcatcaccacagacaatacattcgtgagcggcaactgtgatgtggtgatcggcatcgtgaacaataccgtgtatgatccactgcagcccgagctggactcctttaaggaggagctggataagtacttcaagaatcacacctctcccgacgtggatctgggcgacatctccggcatcaatgcctctgtggtgaacatccagaaggagatcgaccggctgaacgaggtggccaagaatctgaacgagagcctgatcgatctgcaggagctgggcaagtatgagcagtacatcaagggctctggcagagagaacctgtatttccagggaggaggaggcagcggatacatccctgaggcaccaagggacggacaggcctacgtgcgcaaggatggcgagtgggtgctgctgtccacctttctgggccatcatcaccaccaccaccaccactga

SEQ ID NO: 1525 - DNA, 3846 bp, Artificial Sequence
  Description of Artificial Sequence: Synthetic polynucleotide
atgggcatcctgccaagcccaggaatgcccgccctgctgtctctggtgagcctgctgtccgtgctgctgatgggatgcgtggcagagacaggcacacagtgcgtgaacctgaccacaaggacccagctgccccctgcctataccaattctttcacacggggcgtgtactatcccgacaaggtgtttagaagctccgtgctgcactccacacaggatctgtttctgcctttcttttctaacgtgacctggttccacgccatccacgtgtccggcaccaatggcacaaagcggttcgacaatcccgtgctgccttttaacgatggcgtgtacttcgccagcaccgagaagtccaacatcatcagaggctggatctttggcaccacactggactctaagacacagagcctgctgatcgtgaacaatgccaccaacgtggtgatcaaggtgtgcgagttccagttttgtaatgatccattcctgggcgtgtactatcacaagaacaataagtcctggatggagcaagagtttcgcgtgtattctagcgccaacaattgcacatttgagtacgtgagccagcccttcctgatggacctggagggcaagcagggcaatttcaagaacctgagggagttcgtgtttaagaatatcgatggctacttcaagatctacagcaagcacaccccaatcaacctggtgcgcgacctgccacagggattctccgccctggagccactggtggatctgcccatcggcatcaacatcacccggtttcagacactgctggccctgcacagatcctacctgacaccaggcgactcctctagcggatggaccgcaggagctgccgcctactatgtgggctatctgcagccccggaccttcctgctgaagtacaacgagaatggcaccatcacagacgcagtggattgcgccctggaccccctgtctgagacaaagtgtacactgaagagctttaccgtggagaagggcatctatcagacaagcaatttcagggtgcagcctaccgagtccatcgtgcgctttcccaatatcacaaacctgtgcccttttggcgaggtgttcaacgccaccagattcgccagcgtgtacgcctggaatcggaagagaatctccaactgcgtggccgactattctgtgctgtacaactccgcctctttcagcacctttaagtgctatggcgtgtctcccacaaagctgaatgatctgtgctttaccaacgtgtacgccgatagcttcgtgatcaggggagacgaagtgagacagatcgcaccaggacagacaggaaagatcgcagactacaattataagctgcctgacgatttcaccggctgcgtgatcgcctggaactccaacaatctggattctaaagtgggcggcaactacaattatctgtacaggctgtttcgcaagtccaatctgaagccattcgagcgggacatctccacagagatctaccaggccggctctaccccctgcaatggcgtggagggctttaactgttatttccctctgcagtcttacggcttccagccaacaaacggcgtgggctatcagccctacagagtggtggtgctgtcctttgagctgctgcacgcaccagcaacagtgtgcggcccaaagaagtctaccaatctggtgaagaacaagtgcgtgaacttcaacttcaacggactgaccggcacaggcgtgctgaccgagagcaataagaagttcctgccttttcagcagttcggcagggacatcgcagataccacagacgccgtgcgcgaccctcagaccctggagatcctggacatcacaccatgcagcttcggcggcgtgtccgtgatcacaccaggcaccaatacatccaaccaggtggccgtgctgtatcaggacgtgaattgtaccgaggtgcccgtggcaatccacgcagatcagctgacccctacatggcgggtgtactctaccggcagcaacgtgttccagacaagagccggatgcctgatcggagcagagcacgtgaacaatagctatgagtgcgacatccctatcggcgccggcatctgtgccagctaccagacccagacaaactccccatctggagcaggctccgtggccagccagtccatcatcgcctataccatgagcctgggcgccgagaacagcgtggcctactccaacaattctatcgccatccctaccaacttcacaatcagcgtgaccacagagatcctgccagtgtctatgaccaagacaagcgtggactgcacaatgtatatctgtggcgatagcaccgagtgctccaacctgctgctgcagtacggctccttttgtacccagctgaatagagccctgacaggcatcgccgtggagcaggataagaacacacaggaggtgttcgcccaggtgaagcagatctacaagaccccacccatcaaggactttggcggcttcaacttcagccagatcctgcctgatccaagcaagccctccaagaggtcttttatcgaggacctgctgttcaacaaggtgaccctggccgatgccggcttcatcaagcagtatggagattgcctgggagacatcgcagcccgcgacctgatctgtgcccagaagtttaatggcctgaccgtgctgcctccactgctgacagatgagatgatcgcccagtacacatctgccctgctggccggcaccatcacaagcggatggaccttcggcgcaggagccgccctgcagatcccttttgccatgcagatggcctataggttcaacggcatcggcgtgacccagaatgtgctgtacgagaaccagaagctgatcgccaatcagtttaacagcgccatcggcaagatccaggactctctgtcctctacagccagcgccctgggcaagctgcaggatgtggtgaatcagaacgcccaggccctgaataccctggtgaagcagctgagctccaacttcggcgccatctctagcgtgctgaatgacatcctgagccggctggacccccctgaggcagaggtgcagatcgacaggctgatcacaggccgcctgcagagcctgcagacctacgtgacacagcagctgatcagggcagcagagatcagagcctccgccaatctggccgccaccaagatgagcgagtgcgtgctgggacagtccaagagggtggacttttgtggcaagggctatcacctgatgtctttcccacagagcgcccctcacggcgtggtgtttctgcacgtgacctacgtgccagcccaggagaagaacttcaccacagcaccagccatctgccacgatggaaaggcacactttcctagggagggcgtgttcgtgtctaacggcacccactggtttgtgacacagcgcaatttctacgagccacagatcatcaccacagacaatacattcgtgagcggcaactgtgatgtggtgatcggcatcgtgaacaataccgtgtatgatccactgcagcccgagctggactcctttaaggaggagctggataagtacttcaagaatcacacctctcccgacgtggatctgggcgacatctccggcatcaatgcctctgtggtgaacatccagaaggagatcgaccggctgaacgaggtggccaagaatctgaacgagagcctgatcgatctgcaggagctgggcaagtatgagcagtacatcaagggctctggcagagagaacctgtatttccagggaggaggaggcagcggatacatccctgaggcaccaagggacggacaggcctacgtgcgcaaggatggcgagtgggtgctgctgtccacctttctgggccatcatcaccaccaccaccaccactga

SEQ ID NO: 1526 - DNA, 3846 bp, Artificial Sequence
  Description of Artificial Sequence: Synthetic polynucleotide
atgggcatcctgccaagcccaggaatgcccgccctgctgtctctggtgagcctgctgtccgtgctgctgatgggatgcgtggcagagacaggcacacagtgcgtgaacctgaccacaaggacccagctgccccctgcctataccaattctttcacacggggcgtgtactatcccgacaagatctttagaagctccgtgctgcaccttacacaggatctgtttctgcctttcttttctaacgtgacctggttccacgccatccacgtgtccggcaccaatggcacaaagcggttcgacaatcccgtgctgccttttaacgatggcgtgtacttcgccgcaaccgagaagtccaacatcatcagaggctggatctttggcaccacactggactctaagacacagagcctgctgatcgtgaacaatgccaccaacgtggtgatcaaggtgtgcgagttccagttttgtaatgatccattcctgggcgtgtactatcacaagaacaataagtcctggatggagtctgagtttcgcgtgtattctagcgccaacaattgcacatttgagtacgtgagccagcccttcctgatggacctggagggcaagcagggcaatttcaagaacctgagggagttcgtgtttaagaatatcgatggctacttcaagatctacagcaagtataccccaatcaacctggtgcgcgacctgccacagggattctccgccctgaaaccactggtgaaactgcccatcggcatcaacatcacccggtttcagacactgctggccctgcacagatcctacctgacaccaggcgactcctctagcggatggaccgcaggagctgccgcctactatgtgggctatctgcagccccggaccttcctgctgaagtacaacgagaatggcaccatcacagacgcagtggattgcgccctggaccccctgtctgagacaaagtgtacactgaagagctttaccgtggagaagggcatctatcagacaagcaatttcagggtgcagcctaccgagtccatcgtgcgctttcccaatatcacaaacctgtgcccttttggcgaggtgttcaacgccaccagattcgccagcgtgtacgcctggaatcggaagagaatctccaactgcgtggccgactattctgtgctgtacaactccgcctctttcagcacctttaagtgctatggcgtgtctcccacaaagctgaatgatctgtgctttaccaacgtgtacgccgatagcttcgtgatcaggggagacgaagtgagacagatcgcaccaggacagacaggaaagatcgcagactacaattataagctgcctgacgatttcaccggctgcgtgatcgcctggaactccaacaatctggattctaaagtgggcggcaactacaattatctgtacaggctgtttcgcaagtccaatctgaagccattcgagcgggacatctccacagagatctaccaggccggctctaccccctgcaatggcgtggagggctttaactgttatttccctctgcagtcttacggcttccagccaacaaacggcgtgggctatcagccctacagagtggtggtgctgtcctttgagctgctgcacgcaccagcaacagtgtgcggcccaaagaagtctaccaatctggtgaagaacaagtgcgtgaacttcaacttcaacggactgaccggcacaggcgtgctgaccgagagcaataagaagttcctgccttttcagcagttcggcagggacatcagtgataccacagacgccgtgcgcgaccctcagaccctggagatcctggacatcacaccatgcagcttcggcggcgtgtccgtgatcacaccaggcaccaatacatccaaccaggtggccgtgctgtatcaggacgtgaattgtaccgatgtgcccgtggcaatccacgcagatcagctgacccctacatggcgggtgtactctaccggcagcaacgtgttccagacacaagccggatgcctgatcggagcagagcacgtgaacaatagctatgagtgcgacatccctatcggcgccggcatctgtgccagctaccagacccagacaaactccccatctggagcaggctccgtggccagcaaatccatcatcgcctataccatgagcctgggcgccgagaacagcgtggcctactccaacaattctatcgccatccctaccaacttcacaatcagcgtgaccacagagatcctgccagtgtctatgaccaagacaagcgtggactgcacaatgtatatctgtggcgatagcaccgagtgctccaacctgctgctgcagtacggctccttttgtacccagctgaatagagccctgacaggcatcgccgtggagcaggataagaacacacaggaggtgttcgcccaggtgaagcagatctacaagaccccacccatcaaggactttggcggcttcaacttcagccagatcctgcctgatccaagcaagccctccaagaggtcttttatcgaggacctgctgttcaacaaggtgaccctggccgatgccggcttcatcaagcagtatggagattgcctgggagacatcgcagcccgcgacctgatctgtgcccagaagtttaatggcctgaccgtgctgcctccactgctgacagatgagatgatcgccgcttacacagctgccctgctggccggcaccgctacagctggatggaccttcggcgcaggagccgccctgcagatcccttttgccatgcagatggcctataggttcaacggcatcggcgtgacccagaatgtgctgtacgagaaccagaagctgatcgccaatcagtttaacagcgccatcggcaagatccaggactctctgtcctctacagccagcgccctgggcaagctgcaggatgtggtgaatcagaacgcccaggccctgaataccctggtgaagcagctgagctccaacttcggcgccatctctagcgtgctgaatgacatcctgagccggctggacccccctgaggcagaggtgcagatcgacaggctgatcacaggccgcctgcagagcctgcagacctacgtgacacagcagctgatcagggcagcagagatcagagcctccgccaatctggccgccaccaagatgagcgagtgcgtgctgggacagtccaagagggtggacttttgtggcaagggctatcacctgatgtctttcccacagagcgcccctcacggcgtggtgtttctgcacgtgacctacgtgccagcccaggagaagaacttcaccacagcaccagccatctgccacgatggaaaggcacactttcctagggagggcgtgttcgtgtctaacggcacccactggtttgtgacacagcgcaatttctacgagccacagatcatcaccacagacaatacattcgtgagcggcaactgtgatgtggtgatcggcatcgtgaacaataccgtgtatgatccactgcagcccgagctggactcctttaaggaggagctggataagtacttcaagaatcacacctctcccgacgtggatctgggcgacatctccggcatcaatgcctctgtggtgaacatccagaaggagatcgaccggctgaacgaggtggccaagaatctgaacgagagcctgatcgatctgcaggagctgggcaagtatgagcagtacatcaagggctctggcagagagaacctgtatttccagggaggaggaggcagcggatacatccctgaggcaccaagggacggacaggcctacgtgcgcaaggatggcgagtgggtgctgctgtccacctttctgggccatcatcaccaccaccaccaccactga

SEQ ID NO: 1527 - DNA, 3846 bp, Artificial Sequence
  Description of Artificial Sequence: Synthetic polynucleotide
atgggcatcctgccaagcccaggaatgcccgccctgctgtctctggtgagcctgctgtccgtgctgctgatgggatgcgtggcagagacaggcacacagtgcgtgaacctgaccacaaggacccagctgccccctgcctataccaattctttcacacggggcgtgtactatcccgacaaggtgtttagaagctccgtgctgcactccacacaggatctgtttctgcctttcttttctaacgtgacctggttccacgccatccacgtgtccggcaccaatggcacaaagcggttcgacaatcccgtgctgccttttaacgatggcgtgtacttcgccagcaccgagaagtccaacatcatcagaggctggatctttggcaccacactggactctaagacacagagcctgctgatcgtgaacaatgccaccaacgtggtgatcaaggtgtgcgagttccagttttgtaatgatccattcctgggcgtgtactatcacaagaacaataagtcctggatggagtctgagtttcgcgtgtattctagcgccaacaattgcacatttgagtacgtgagccagcccttcctgatggacctggagggcaagcagggcaatttcaagaacctgagggagttcgtgtttaagaatatcgatggctacttcaagatctacagcaagcacaccccaatcaacctggtgcgcgacctgccacagggattctccgccctggagccactggtggatctgcccatcggcatcaacatcacccggtttcagacactgctggccctgcacagatcctacctgacaccaggcgactcctctagcggatggaccgcaggagctgccgcctactatgtgggctatctgaaaccccggaccttcctgctgaagtacaacgagaatggcaccatcacagacgcagtggattgcgccctggaccccctgtctgagacaaagtgtacactgaagagctttaccgtggagaagggcatctatcagacaagcaatttcagggtgcagcctaccgagtccatcgtgcgctttcccaatatcacaaacctgtgcccttttggcgaggtgttcaacgccaccagattcgccagcgtgtacgcctggaatcggaagagaatctccaactgcgtggccgactattctgtgctgtacaactccgcctctttcagcacctttaagtgctatggcgtgtctcccacaaagctgaatgatctgtgctttaccaacgtgtacgccgatagcttcgtgatcaggggagacgaagtgagacagatcgcaccaggacagacaggaaagatcgcagactacaattataagctgcctgacgatttcaccggctgcgtgatcgcctggaactccaacaatctggattctaaagtgggcggcaactacaattatctgtacaggctgtttcgcaagtccaatctgaagccattcgagcgggacatctccacagagatctaccaggccggctctaccccctgcaatggcgtggagggctttaactgttatttccctctgcagtcttacggcttccagccaacaaacggcgtgggctatcagccctacagagtggtggtgctgtcctttgagctgctgcacgcaccagcaacagtgtgcggcccaaagaagtctaccaatctggtgaagaacaagtgcgtgaacttcaacttcaacggactgaccggcacaggcgtgctgaccgagagcaataagaagttcctgccttttcagcagttcggcagggacatcgcagataccacagacgccgtgcgcgaccctcagaccctggagatcctggacatcacaccatgcagcttcggcggcgtgtccgtgatcacaccaggcaccaatacatccaaccaggtggccgtgctgtatcaggacgtgaattgtaccgaggtgcccgtggcaatccacgcagatcagctgacccctacatggcgggtgtactctaccggcagcaacgtgttccagacaagagccggatgcctgatcggagcagagcacgtgaacaatagctatgagtgcgacatccctatcggcgccggcatctgtgccagctaccagacccagacaaactccccatctggagcaggctccgtggccagccagtccatcatcgcctataccatgagcctgggcgccgagaacagcgtggcctactccaacaattctatcgccatccctaccaacttcacaatcagcgtgaccacagagatcctgccagtgtctatgaccaagacaagcgtggactgcacaatgtatatctgtggcgatagcaccgagtgctccaacctgctgctgcagtacggctccttttgtacccagctgaatagagccctgacaggcatcgccgtggagcaggataagaacacacaggaggtgttcgcccaggtgaagcagatctacaagaccccacccatcaaggactttggcggcttcaacttcagccagatcctgcctgatccaagcaagccctccaagaggtcttttatcgaggacctgctgttcaacaaggtgaccctggccgatgccggcttcatcaagcagtatggagattgcctgggagacatcgcagcccgcgacctgatctgtgcccagaagtttaatggcctgaccgtgctgcctccactgctgacagatgagatgatcgcccagtacacatctgccctgctggccggcaccatcacaagcggatggaccttcggcgcaggagccgccctgcagatcccttttgccatgcagatggcctataggttcaacggcatcggcgtgacccagaatgtgctgtacgagaaccagaagctgatcgccaatcagtttaacagcgccatcggcaagatccaggactctctgtcctctacagccagcgccctgggcaagctgcaggatgtggtgaatcagaacgcccaggccctgaataccctggtgaagcagctgagctccaacttcggcgccatctctagcgtgctgaatgacatcctgagccggctggacccccctgaggcagaggtgcagatcgacaggctgatcacaggccgcctgcagagcctgcagacctacgtgacacagcagctgatcagggcagcagagatcagagcctccgccaatctggccgccaccaagatgagcgagtgcgtgctgggacagtccaagagggtggacttttgtggcaagggctatcacctgatgtctttcccacagagcgcccctcacggcgtggtgtttctgcacgtgacctacgtgccagcccaggagaagaacttcaccacagcaccagccatctgccacgatggaaaggcacactttcctagggagggcgtgttcgtgtctaacggcacccactggtttgtgacacagcgcaatttctacgagccacagatcatcaccacagacaatacattcgtgagcggcaactgtgatgtggtgatcggcatcgtgaacaataccgtgtatgatccactgcagcccgagctggactcctttaaggaggagctggataagtacttcaagaatcacacctctcccgacgtggatctgggcgacatctccggcatcaatgcctctgtggtgaacatccagaaggagatcgaccggctgaacgaggtggccaagaatctgaacgagagcctgatcgatctgcaggagctgggcaagtatgagcagtacatcaagggctctggcagagagaacctgtatttccagggaggaggaggcagcggatacatccctgaggcaccaagggacggacaggcctacgtgcgcaaggatggcgagtgggtgctgctgtccacctttctgggccatcatcaccaccaccaccaccactga

SEQ ID NO: 1528 - DNA, 3846 bp, Artificial Sequence
  Description of Artificial Sequence: Synthetic polynucleotide
atgggcatcctgccaagcccaggaatgcccgccctgctgtctctggtgagcctgctgtccgtgctgctgatgggatgcgtggcagagacaggcacacagtgcgtgaacctgaccacaaggacccagctgccccctgcctataccaattctttcacacggggcgtgtactatcccgacaagatctttagaagctccgtgctgcaccttacacaggatctgtttctgcctttcttttctaacgtgacctggttccacgccatccacgtgtccggcaccaatggcacaaagcggttcgacaatcccgtgctgccttttaacgatggcgtgtacttcgccgcgaccgagaagtccaacatcatcagaggctggatctttggcaccacactggactctaagacacagagcctgctgatcgtgaacaatgccaccaacgtggtgatcaaggtgtgcgagttccagttttgtaatgatccattcctgggcgtgtactatcacaagaacaataagtcctggatggagtctgagtttcgcgtgtattctagcgccaacaattgcacatttgagtacgtgagccagcccttcctgatggacctggagggcaagcagggcaatttcaagaacctgagggagttcgtgtttaagaatatcgatggctacttcaagatctacagcaagcacaccccaatcaacctggtgcgcgacctgccacagggattctccgccctggagccactggtgaaactgcccatcggcatcaacatcacccggtttcagacactgctggccctgcacagatcctacctgacaccaggcgactcctctagcggatggaccgcaggagctgccgcctactatgtgggctatctgcagccccggaccttcctgctgaagtacaacgagaatggcaccatcacagacgcagtggattgcgccctggaccccctgtctgagacaaagtgtacactgaagagctttaccgtggagaagggcatctatcagacaagcaatttcagggtgcagcctaccgagtccatcgtgcgctttcccaatatcacaaacctgtgcccttttggcgaggtgttcaacgccaccagattcgccagcgtgtacgcctggaatcggaagagaatctccaactgcgtggccgactattctgtgctgtacaactccgcctctttcagcacctttaagtgctatggcgtgtctcccacaaagctgaatgatctgtgctttaccaacgtgtacgccgatagcttcgtgatcaggggagacgaagtgagacagatcgcaccaggacagacaggaaagatcgcagactacaattataagctgcctgacgatttcaccggctgcgtgatcgcctggaactccaacaatctggattctaaagtgggcggcaactacaattatctgtacaggctgtttcgcaagtccaatctgaagccattcgagcgggacatctccacagagatctaccaggccggctctaccccctgcaatggcgtggagggctttaactgttatttccctctgcagtcttacggcttccagccaacaaacggcgtgggctatcagccctacagagtggtggtgctgtcctttgagctgctgcacgcaccagcaacagtgtgcggcccaaagaagtctaccaatctggtgaagaacaagtgcgtgaacttcaacttcaacggactgaccggcacaggcgtgctgaccgagagcaataagaagttcctgccttttcagcagttcggcagggacatctcggataccacagacgccgtgcgcgaccctcagaccctggagatcctggacatcacaccatgcagcttcggcggcgtgtccgtgatcacaccaggcaccaatacatccaaccaggtggccgtgctgtatcaggacgtgaattgtaccgatgtgcccgtggcaatccacgcagatcagctgacccctacatggcgggtgtactctaccggcagcaacgtgttccagacacaagccggatgcctgatcggagcagagcacgtgaacaatagctatgagtgcgacatccctatcggcgccggcatctgtgccagctaccagacccagacaaactccccatctggagcaggctccgtggccagcaaatccatcatcgcctataccatgagcctgggcgccgagaacagcgtggcctactccaacaattctatcgccatccctaccaacttcacaatcagcgtgaccacagagatcctgccagtgtctatgaccaagacaagcgtggactgcacaatgtatatctgtggcgatagcaccgagtgctccaacctgctgctgcagtacggctccttttgtacccagctgaatagagccctgacaggcatcgccgtggagcaggataagaacacacaggaggtgttcgcccaggtgaagcagatctacaagaccccacccatcaaggactttggcggcttcaacttcagccagatcctgcctgatccaagcaagccctccaagaggtcttttatcgaggacctgctgttcaacaaggtgaccctggccgatgccggcttcatcaagcagtatggagattgcctgggagacatcgcagcccgcgacctgatctgtgcccagaagtttaatggcctgaccgtgctgcctccactgctgacagatgagatgatcgccgcttacacagctgccctgctggccggcaccgcgacagcgggatggaccttcggcgcaggagccgccctgcagatcccttttgccatgcagatggcctataggttcaacggcatcggcgtgacccagaatgtgctgtacgagaaccagaagctgatcgccaatcagtttaacagcgccatcggcaagatccaggactctctgtcctctacagccagcgccctgggcaagctgcaggatgtggtgaatcagaacgcccaggccctgaataccctggtgaagcagctgagctccaacttcggcgccatctctagcgtgctgaatgacatcctgagccggctggacccccctgaggcagaggtgcagatcgacaggctgatcacaggccgcctgcagagcctgcagacctacgtgacacagcagctgatcagggcagcagagatcagagcctccgccaatctggccgccaccaagatgagcgagtgcgtgctgggacagtccaagagggtggacttttgtggcaagggctatcacctgatgtctttcccacagagcgcccctcacggcgtggtgtttctgcacgtgacctacgtgccagcccaggagaagaacttcaccacagcaccagccatctgccacgatggaaaggcacactttcctagggagggcgtgttcgtgtctaacggcacccactggtttgtgacacagcgcaatttctacgagccacagatcatcaccacagacaatacattcgtgagcggcaactgtgatgtggtgatcggcatcgtgaacaataccgtgtatgatccactgcagcccgagctggactcctttaaggaggagctggataagtacttcaagaatcacacctctcccgacgtggatctgggcgacatctccggcatcaatgcctctgtggtgaacatccagaaggagatcgaccggctgaacgaggtggccaagaatctgaacgagagcctgatcgatctgcaggagctgggcaagtatgagcagtacatcaagggctctggcagagagaacctgtatttccagggaggaggaggcagcggatacatccctgaggcaccaagggacggacaggcctacgtgcgcaaggatggcgagtgggtgctgctgtccacctttctgggccatcatcaccaccaccaccaccactga

SEQ ID NO: 1529 - DNA, 3846 bp, Artificial Sequence
  Description of Artificial Sequence: Synthetic polynucleotide
atgggcatcctgccaagcccaggaatgcccgccctgctgtctctggtgagcctgctgtccgtgctgctgatgggatgcgtggcagagacaggcacacagtgcgtgaacctgaccacaaggacccagctgccccctgcctataccaattctttcacacggggcgtgtactatcccgacaaggtgtttagaagctccgtgctgcactccacacaggatctgtttctgcctttcttttctaacgtgacctggttccacgccatccacgtgtccggcaccaatggcacaaagcggttcgacaatcccgtgctgccttttaacgatggcgtgtacttcgccagcaccgagaagtccaacatcatcagaggctggatctttggcaccacactggactctaagacacagagcctgctgatcgtgaacaatgccaccaacgtggtgatcaaggtgtgcgagttccagttttgtaatgatccattcctgggcgtgtactatcacaagaacaataagtcctggatggagtctgagtttcgcgtgtattctagcgccaacaattgcacatttgagtacgtgagccagcccttcctgatggacctggagggcaagcagggcaatttcaagaacctgagggagttcgtgtttaagaatatcgatggctacttcaagatctacagcaagcacaccccaatcaacctggtgcgcgacctgccacagggattctccgccctggagccactggtggatctgcccatcggcatcaacatcacccggtttcagacactgctggccctgcacagatcctacctgacaccaggcgactcctctagcggatggaccgcaggagctgccgcctactatgtgggctatctgcagccccggaccttcctgctgaagtacaacgagaatggcaccatcacagacgcagtggattgcgccctggaccccctgtctgagacaaagtgtacactgaagagctttaccgtggagaagggcatctatcagacaagcaatttcagggtgcagcctaccgagtccatcgtgcgctttcccaatatcacaaacctgtgcccttttggcgaggtgttcaacgccaccagattcgccagcgtgtacgcctggaatcggaagagaatctccaactgcgtggccgactattctgtgctgtacaactccgcctctttcagcacctttaagtgctatggcgtgtctcccacaaagctgaatgatctgtgctttaccaacgtgtacgccgatagcttcgtgatcaggggagacgaagtgagacagatcgcaccaggacagacaggaaagatcgcagactacaattataagctgcctgacgatttcaccggctgcgtgatcgcctggaactccaacaatctggattctaaagtgggcggcaactacaattatctgtacaggctgtttcgcaagtccaatctgaagccattcgagcgggacatctccacagagatctaccaggccggctctaccccctgcaatggcgtggagggctttaactgttatttccctctgcagtcttacggcttccagccaacaaacggcgtgggctatcagccctacagagtggtggtgctgtcctttgagctgctgcacgcaccagcaacagtgtgcggcccaaagaagtctaccaatctggtgaagaacaagtgcgtgaacttcaacttcaacggactgaccggcacaggcgtgctgaccgagagcaataagaagttcctgccttttcagcagttcggcagggacatcgcagataccacagacgccgtgcgcgaccctcagaccctggagatcctggacatcacaccatgcagcttcggcggcgtgtccgtgatcacaccaggcaccaatacatccaaccaggtggccgtgctgtatcaggacgtgaattgtaccgaggtgcccgtggcaatccacgcagatcagctgacccctacatggcgggtgtactctaccggcagcaacgtgttccagacaagagccggatgcctgatcggagcagagcacgtgaacaatagctatgagtgcgacatccctatcggcgccggcatctgtgccagctaccagacccagacaaactccccatctggagcaggctccgtggccagccagtccatcatcgcctataccatgagcctgggcgccgagaacagcgtggcctactccaacaattctatcgccatccctaccaacttcacaatcagcgtgaccacagagatcctgccagtgtctatgaccaagacaagcgtggactgcacaatgtatatctgtggcgatagcaccgagtgctccaacctgctgctgcagtacggctccttttgtacccagctgaatagagccctgacaggcatcgccgtggagcaggataagaacacacaggaggtgttcgcccaggtgaagcagatctacaagaccccacccatcaaggactttggcggcttcaacttcagccagatcctgcctgatccaagcaagccctccaagaggtcttttatcgaggacctgctgttcaacaaggtgaccctggccgatgccggcttcatcaagcagtatggagattgcctgggagacatcgcagcccgcgacctgatctgtgcccagaagtttaatggcctgaccgtgctgcctccactgctgacagatgagatgatcgcccagtacacatctgccctgctggccggcaccatcacaagcggatggaccttcggcgcaggagccgccctgcagatcccttttgccatgcagatggcctataggttcaacggcatcggcgtgacccagaatgtgctgtacgagaaccagaagctgatcgccaatcagtttaacagcgccatcggcaagatccaggactctctgtcctctacagccagcgccctgggcaagctgcaggatgtggtgaatcagaacgcccaggccctgaaaaccctggtgaagcagctgagctccaacttcggcgccatctctagcgtgctgaatgacatcctgagccggctggacccccctgaggcagaggtgcagatcgacaggctgatcacaggccgcctgcagagcctgcagacctacgtgacacagcagctgatcagggcagcagagatcagagcctccgccaatctggccgccaccaagatgagcgagtgcgtgctgggacagtccaagagggtggacttttgtggcaagggctatcacctgatgtctttcccacagagcgcccctcacggcgtggtgtttctgcacgtgacctacgtgccagcccaggagaagaacttcaccacagcaccagccatctgccacgatggaaaggcacactttcctagggagggcgtgttcgtgtctaacggcacccactggtttgtgacacagcgcaatttctacgagccacagatcatcaccacagacaatacattcgtgagcggcaactgtgatgtggtgatcggcatcgtgaacaataccgtgtatgatccactgcagcccgagctggactcctttaaggaggagctggataagtacttcaagaatcacacctctcccgacgtggatctgggcgacatctccggcatcaatgcctctgtggtgaacatccagaaggagatcgaccggctgaacgaggtggccaagaatctgaacgagagcctgatcgatctgcaggagctgggcaagtatgagcagtacatcaagggctctggcagagagaacctgtatttccagggaggaggaggcagcggatacatccctgaggcaccaagggacggacaggcctacgtgcgcaaggatggcgagtgggtgctgctgtccacctttctgggccatcatcaccaccaccaccaccactga

SEQ ID NO: 1530 - DNA, 3846 bp, Artificial Sequence
  Description of Artificial Sequence: Synthetic polynucleotide
atgggcatcctgccaagcccaggaatgcccgccctgctgtctctggtgagcctgctgtccgtgctgctgatgggatgcgtggcagagacaggcacacagtgcgtgaacctgaccacaaggacccagctgccccctgcctataccaattctttcacacggggcgtgtactatcccgacaaggtgtttagaagctccgtgctgcactccacacaggatctgtttctgcctttcttttctaacgtgacctggttccacgccatccacgtgtccggcaccaatggcacaaagcggttcgacaatcccgtgctgccttttaacgatggcgtgtacttcgccgcaaccgagaagtccaacatcatcagaggctggatctttggcaccacactggactctaagacacagagcctgctgatcgtgaacaatgccaccaacgtggtgatcaaggtgtgcgagttccagttttgtaatgatccattcctgggcgtgtactatcacaagaacaataagtcctggatggagtctgagtttcgcgtgtattctagcgccaacaattgcacatttgagtacgtgagccagcccttcctgtatgacctgaacggcaagcagggcaatttcaagcatctgagggagttcgtgtttaagaatatcgatggctacttcaagatctacagcaagtggaccccaatcaacctggtgcgcgacctgccacagggattctccgccctggagccactggtggatctgcccatcggcatcaacatcacccggtttcagacactgctggccctgcacagatcctacctgacaccaggcgactcctctagcggatggaccgcaggagctgccgcctactatgtgggctatctgcagccccggaccttcctgctgaagtacaacgagaatggcaccatcacagacgcagtggattgcgccctggaccccctgtctgagacaaagtgtacactgaagagctttaccgtggagaagggcatctatcagacaagcaatttcagggtgcagcctaccgagtccatcgtgcgctttcccaatatcacaaacctgtgcccttttggcgaggtgttcaacgccaccagattcgccagcgtgtacgcctggaatcggaagagaatctccaactgcgtggccgactattctgtgctgtacaactccgcctctttcagcacctttaagtgctatggcgtgtctcccacaaagctgaatgatctgtgctttaccaacgtgtacgccgatagcttcgtgatcaggggagacgaagtgagacagatcgcaccaggacagacaggaaagatcgcagactacaattataagctgcctgacgatttcaccggctgcgtgatcgcctggaactccaacaatctggattctaaagtgggcggcaactacaattatctgtacaggctgtttcgcaagtccaatctgaagccattcgagcgggacatctccacagagatctaccaggccggctctaccccctgcaatggcgtggagggctttaactgttatttccctctgcagtcttacggcttccagccaacaaacggcgtgggctatcagccctacagagtggtggtgctgtcctttgagctgctgcacgcaccagcaacagtgtgcggcccaaagaagtctaccaatctggtgaagaacaagtgcgtgaacttcaacttcaacggactgaccggcacaggcgtgctgaccgagagcaataagaagttcctgccttttcagcagttcggcagggacatcgcagataccacagacgccgtgcgcgaccctcagaccctggagatcctggacatcacaccatgcagcttcggcggcgtgtccgtgatcacaccaggcaccaatacatccaaccaggtggccgtgctgtatcaggacgtgaattgtaccgaggtgcccgtggcaatccacgcagatcagctgacccctacatggcgggtgtactctaccggcagcaacgtgttccagacaagagccggatgcctgatcggagcagagcacgtgaacaatagctatgagtgcgacatccctatcggcgccggcatctgtgccagctaccagacccagacaaactccccatctggagcaggctccgtggccagccagtccatcatcgcctataccatgagcctgggcgccgagaacagcgtggcctactccaacaattctatcgccatccctaccaacttcacaatcagcgtgaccacagagatcctgccagtgtctatgaccaagacaagcgtggactgcacaatgtatatctgtggcgatagcaccgagtgctccaacctgctgctgcagtacggctccttttgtacccagctgaatagagccctgacaggcatcgccgtggagcaggataagaacacacaggaggtgttcgcccaggtgaagcagatctacaagaccccacccatcaaggactttggcggcttcaacttcagccagatcctgcctgatccaagcaagccctccaagaggtcttttatcgaggacctgctgttcaacaaggtgaccctggccgatgccggcttcatcaagcagtatggagattgcctgggagacatcgcagcccgcgacctgatctgtgcccagaagtttaatggcctgaccgtgctgcctccactgctgacagatgagatgatcgcccagtacacatctgccctgctggccggcaccatcacaagcggatggaccttcggcgcaggagccgccctgcagatcccttttgccatgcagatggcctataggttcaacggcatcggcgtgacccagaatgtgctgtacgagaaccagaagctgatcgccaatcagtttaacagcgccatcggcaagatccaggactctctgtcctctacagccagcgccctgggcaagctgcaggatgtggtgaatcagaacgcccaggccctgaataccctggtgaagcagctgagctccaacttcggcgccatctctagcgtgctgaatgacatcctgagccggctggacccccctgaggcagaggtgcagatcgacaggctgatcacaggccgcctgcagagcctgcagacctacgtgacacagcagctgatcagggcagcagagatcagagcctccgccaatctggccgccaccaagatgagcgagtgcgtgctgggacagtccaagagggtggacttttgtggcaagggctatcacctgatgtctttcccacagagcgcccctcacggcgtggtgtttctgcacgtgacctacgtgccagcccaggagaagaacttcaccacagcaccagccatctgccacgatggaaaggcacactttcctagggagggcgtgttcgtgtctaacggcacccactggtttgtgacacagcgcaatttctacgagccacagatcatcaccacagacaatacattcgtgagcggcaactgtgatgtggtgatcggcatcgtgaacaataccgtgtatgatccactgcagcccgagctggactcctttaaggaggagctggataagtacttcaagaatcacacctctcccgacgtggatctgggcgacatctccggcatcaatgcctctgtggtgaacatccagaaggagatcgaccggctgaacgaggtggccaagaatctgaacgagagcctgatcgatctgcaggagctgggcaagtatgagcagtacatcaagggctctggcagagagaacctgtatttccagggaggaggaggcagcggatacatccctgaggcaccaagggacggacaggcctacgtgcgcaaggatggcgagtgggtgctgctgtccacctttctgggccatcatcaccaccaccaccaccactga

SEQ ID NO: 1531 - DNA, 3846 bp, Artificial Sequence
  Description of Artificial Sequence: Synthetic polynucleotide
atgggcatcctgccaagcccaggaatgcccgccctgctgtctctggtgagcctgctgtccgtgctgctgatgggatgcgtggcagagacaggcacacagtgcgtgaacctgaccacaaggacccagctgccccctgcctataccaattctttcacacggggcgtgtactatcccgacaaggtgtttagaagctccgtgctgcactccacacaggatctgtttctgcctttcttttctaacgtgacctggttccacgccatccacgtgtccggcaccaatggcacaaagcggttcgacaatcccgtgctgccttttaacgatggcgtgtacttcgccgctaccgagaagtccaacgtaatcagaggctggatctttggcaccacactggactctaagacacagagcctgctgatcgtgaacaatgccaccaacgtggtgatcaaggtgtgcgagttccagttttgtaatgatccattcctgggcgtgtactatcacaagaacaataagtcctggatggagtctgagtttcgcgtgtattctagcgccaacaattgcacatttgagtacgtgagcaaacccttccaaatggacctgtcgggcaagcagggcaatttcaagcatctgagggagttcgtgtttaagaatatcgatggctacttcaagatctacagcaagcacaccccaatcaacctggtgcgcgacctgccacagggattctccgccctggagccactggtggatctgcccatcggcatcaacatcacccggtttcagacactgctggccctgcacagatcctacctgacaccaggcgactcctctagcggatggaccgcattcgctgccgcctacttcgtgggctatctgcagccccggaccttcctgctgaagtacaacgagaatggcaccatcacagacgcagtggattgcgccctggaccccctgtctgagacaaagtgtacactgaagagctttaccgtggagaagggcatctatcagacaagcaatttcagggtgcagcctaccgagtccatcgtgcgctttcccaatatcacaaacctgtgcccttttggcgaggtgttcaacgccaccagattcgccagcgtgtacgcctggaatcggaagagaatctccaactgcgtggccgactattctgtgctgtacaactccgcctctttcagcacctttaagtgctatggcgtgtctcccacaaagctgaatgatctgtgctttaccaacgtgtacgccgatagcttcgtgatcaggggagacgaagtgagacagatcgcaccaggacagacaggaaagatcgcagactacaattataagctgcctgacgatttcaccggctgcgtgatcgcctggaactccaacaatctggattctaaagtgggcggcaactacaattatctgtacaggctgtttcgcaagtccaatctgaagccattcgagcgggacatctccacagagatctaccaggccggctctaccccctgcaatggcgtggagggctttaactgttatttccctctgcagtcttacggcttccagccaacaaacggcgtgggctatcagccctacagagtggtggtgctgtcctttgagctgctgcacgcaccagcaacagtgtgcggcccaaagaagtctaccaatctggtgaagaacaagtgcgtgaacttcaacttcaacggactgaccggcacaggcgtgctgaccgagagcaataagaagttcctgccttttcagcagttcggcagggacatcgcagataccacagacgccgtgcgcgaccctcagaccctggagatcctggacatcacaccatgcagcttcggcggcgtgtccgtgatcacaccaggcaccaatacatccaaccaggtggccgtgctgtatcaggacgtgaattgtaccgaggtgcccgtggcaatccacgcagatcagctgacccctacatggcgggtgtactctaccggcagcaacgtgttccagacaagagccggatgcctgatcggagcagagcacgtgaacaatagctatgagtgcgacatccctatcggcgccggcatctgtgccagctaccagacccagacaaactccccatctggagcaggctccgtggccagccagtccatcatcgcctataccatgagcctgggcgccgagaacagcgtggcctactccaacaattctatcgccatccctaccaacttcacaatcagcgtgaccacagagatcctgccagtgtctatgaccaagacaagcgtggactgcacaatgtatatctgtggcgatagcaccgagtgctccaacctgctgctgcagtacggctccttttgtacccagctgaatagagccctgacaggcatcgccgtggagcaggataagaacacacaggaggtgttcgcccaggtgaagcagatctacaagaccccacccatcaaggactttggcggcttcaacttcagccagatcctgcctgatccaagcaagccctccaagaggtcttttatcgaggacctgctgttcaacaaggtgaccctggccgatgccggcttcatcaagcagtatggagattgcctgggagacatcgcagcccgcgacctgatctgtgcccagaagtttaatggcctgaccgtgctgcctccactgctgacagatgagatgatcgcccagtacacatctgccctgctggccggcaccatcacaagcggatggaccttcggcgcaggagccgccctgcagatcccttttgccatgcagatggcctataggttcaacggcatcggcgtgacccagaatgtgctgtacgagaaccagaagctgatcgccaatcagtttaacagcgccatcggcaagatccaggactctctgtcctctacagccagcgccctgggcaagctgcaggatgtggtgaatcagaacgcccaggccctgaataccctggtgaagcagctgagctccaacttcggcgccatctctagcgtgctgaatgacatcctgagccggctggacccccctgaggcagaggtgcagatcgacaggctgatcacaggccgcctgcagagcctgcagacctacgtgacacagcagctgatcagggcagcagagatcagagcctccgccaatctggccgccaccaagatgagcgagtgcgtgctgggacagtccaagagggtggacttttgtggcaagggctatcacctgatgtctttcccacagagcgcccctcacggcgtggtgtttctgcacgtgacctacgtgccagcccaggagaagaacttcaccacagcaccagccatctgccacgatggaaaggcacactttcctagggagggcgtgttcgtgtctaacggcacccactggtttgtgacacagcgcaatttctacgagccacagatcatcaccacagacaatacattcgtgagcggcaactgtgatgtggtgatcggcatcgtgaacaataccgtgtatgatccactgcagcccgagctggactcctttaaggaggagctggataagtacttcaagaatcacacctctcccgacgtggatctgggcgacatctccggcatcaatgcctctgtggtgaacatccagaaggagatcgaccggctgaacgaggtggccaagaatctgaacgagagcctgatcgatctgcaggagctgggcaagtatgagcagtacatcaagggctctggcagagagaacctgtatttccagggaggaggaggcagcggatacatccctgaggcaccaagggacggacaggcctacgtgcgcaaggatggcgagtgggtgctgctgtccacctttctgggccatcatcaccaccaccaccaccactga

SEQ ID NO: 1532 - DNA, 3846 bp, Artificial Sequence
  Description of Artificial Sequence: Synthetic polynucleotide
atgggcatcctgccaagcccaggaatgcccgccctgctgtctctggtgagcctgctgtccgtgctgctgatgggatgcgtggcagagacaggcacacagtgcgtgaacctgaccacaaggacccagctgccccctgcctataccaattctttcacacggggcgtgtactatcccgacaaggtgtttagaagctccgtgctgcactccacacaggatctgtttctgcctttcttttctaacgtgacctggttccacgccatccacgtgtccggcaccaatggcacaaagcggttcgacaatcccgtgctgccttttaacgatggcgtgtacttcgccagcaccgagaagtccaacatcatcagaggctggatctttggcaccacactggactctaagacacagagcctgctgatcgtgaacaatgccaccaacgtggtgatcaaggtgtgcgagttccagttttgtaatgatccattcctgggcgtgtactatcacaagaacaataagtcctggatggagtctgagtttcgcgtgtattctagcgccaacaattgcacatttgagtacgtgagccagcccttcacgatggacctggagggcaagcagggcaatttcaagaacctgagggagttcgtgtttaagaatatcgatggctacttcaagatctacagcaagcacaccccaatcaacctggtgcgcgacctgccacagggattctccgccctggagccactggtggatctgcccatcggcatcaacatcacccggtttcagacactgctggccctgcacagatcctacctgacaccaggcgactcctctagcggatggaccgcaggagctgccgcctactatgtgggctatctgcagccccggaccttcctgctgaagtacaacgagaatggcaccatcacagacgcagtggattgcgccctggaccccctgtctgagacaaagtgtacactgaagagctttaccgtggagaagggcatctatcagacaagcaatttcagggtgcagcctaccgagtccatcgtgcgctttcccaatatcacaaacctgtgcccttttggcgaggtgttcaacgccaccagattcgccagcgtgtacgcctggaatcggaagagaatctccaactgcgtggccgactattctgtgctgtacaactccgcctctttcagcacctttaagtgctatggcgtgtctcccacaaagctgaatgatctgtgctttaccaacgtgtacgccgatagcttcgtgatcaggggagacgaagtgagacagatcgcaccaggacagacaggaaagatcgcagactacaattataagctgcctgacgatttcaccggctgcgtgatcgcctggaactccaacaatctggattctaaagtgggcggcaactacaattatctgtacaggctgtttcgcaagtccaatctgaagccattcgagcgggacatctccacagagatctaccaggccggctctaccccctgcaatggcgtggagggctttaactgttatttccctctgcagtcttacggcttccagccaacaaacggcgtgggctatcagccctacagagtggtggtgctgtcctttgagctgctgcacgcaccagcaacagtgtgcggcccaaagaagtctaccaatctggtgaagaacaagtgcgtgaacttcaacttcaacggactgaccggcacaggcgtgctgaccgagagcaataagaagttcctgccttttcagcagttcggcagggacatcgcagataccacagacgccgtgcgcgaccctcagaccctggagatcctggacatcacaccatgcagcttcggcggcgtgtccgtgatcacaccaggcaccaatacatccaaccaggtggccgtgctgtatcaggacgtgaattgtaccgaggtgcccgtggcaatccacgcagatcagctgacccctacatggcgggtgtactctaccggcagcaacgtgttccagacaagagccggatgcctgatcggagcagagcacgtgaacaatagctatgagtgcgacatccctatcggcgccggcatctgtgccagctaccagacccagacaaactccccatctggagcaggctccgtggccagccagtccatcatcgcctataccatgagcctgggcgccgagaacagcgtggcctactccaacaattctatcgccatccctaccaacttcacaatcagcgtgaccacagagatcctgccagtgtctatgaccaagacaagcgtggactgcacaatgtatatctgtggcgatagcaccgagtgctccaacctgctgctgcagtacggctccttttgtacccagctgaatagagccctgacaggcatcgccgtggagcaggataagaacacacaggaggtgttcgcccaggtgaagcagatctacaagaccccacccatcaaggactttggcggcttcaacttcagccagatcctgcctgatccaagcaagccctccaagaggtcttttatcgaggacctgctgttcaacaaggtgaccctggccgatgccggcttcatcaagcagtatggagattgcctgggagacatcgcagcccgcgacctgatctgtgcccagaagtttaatggcctgaccgtgctgcctccactgctgacagatgagatgatcgcccagtacacatctgccctgctggccggcaccatcacaagcggatggaccttcggcgcaggagccgccctgcagatcccttttgccatgcagatggcctataggttcaacggcatcggcgtgacccagaatgtgctgtacgagaaccagaagctgatcgccaatcagtttaacagcgccatcggcaagatccaggactctctgtcctctacagccagcgccctgggcaagctgcaggatgtggtgaatcagaacgcccaggccctgaataccctggtgaagcagctgagctccaacttcggcgccatctctagcgtgctgaatgacatcctgagccggctggacccccctgaggcagaggtgcagatcgacaggctgatcacaggccgcctgcagagcctgcagacctacgtgacacagcagctgatcagggcagcagagatcagagcctccgccaatctggccgccaccaagatgagcgagtgcgtgctgggacagtccaagagggtggacttttgtggcaagggctatcacctgatgtctttcccacagagcgcccctcacggcgtggtgtttctgcacgtgacctacgtgccagcccaggagaagaacttcaccacagcaccagccatctgccacgatggaaaggcacactttcctagggagggcgtgttcgtgtctaacggcacccactggtttgtgacacagcgcaatttctacgagccacagatcatcaccacagacaatacattcgtgagcggcaactgtgatgtggtgatcggcatcgtgaacaataccgtgtatgatccactgcagcccgagctggactcctttaaggaggagctggataagtacttcaagaatcacacctctcccgacgtggatctgggcgacatctccggcatcaatgcctctgtggtgaacatccagaaggagatcgaccggctgaacgaggtggccaagaatctgaacgagagcctgatcgatctgcaggagctgggcaagtatgagcagtacatcaagggctctggcagagagaacctgtatttccagggaggaggaggcagcggatacatccctgaggcaccaagggacggacaggcctacgtgcgcaaggatggcgagtgggtgctgctgtccacctttctgggccatcatcaccaccaccaccaccactga

SEQ ID NO: 1533 - DNA, 3846 bp, Artificial Sequence
  Description of Artificial Sequence: Synthetic polynucleotide
atgggcatcctgccaagcccaggaatgcccgccctgctgtctctggtgagcctgctgtccgtgctgctgatgggatgcgtggcagagacaggcacacagtgcgtgaacctgaccacaaggacccagctgccccctgcctataccaattctttcacacggggcgtgtactatcccgacaaggtgtttagaagctccgtgctgcactccacacaggatctgtttctgcctttcttttctaacgtgacctggttccacgccatccacgtgtccggcaccaatggcacaaagcggttcgacaatcccgtgctgccttttaacgatggcgtgtacttcgccagcaccgagaagtccaacatcatcagaggctggatctttggcaccacactggactctaagacacagagcctgctgatcgtgaacaatgccaccaacgtggtgatcaaggtgtgcgagttccagttttgtaatgatccattcctgggcgtgtactatcacaagaacaataagtcctggatggagtctgagtttcgcgtgtattctagcgccaacaattgcacatttgagtacgtgagccagcccttcctgatggacctggagggcaagcagggcaatttcaagaacctgagggagttcgtgtttaagaatatcgatggctacttcaagatctacagcaagcacaccccaatcaacctggtgcgcgacctgccacagggattctccgccctggagccactggtggatctgcccatcggcatcaacatcacccggtttcagacactgctggccctgcacagatcctacctgacaccaggcgactcctctagcggatggaccgcaggagctgccgcctactatgtgggctatctgcagccccggaccttcctgctgaagtacaacgagaatggcaccatcacagacgcagtggattgcgccctggaccccctgtctgagacaaagtgtacactgaagagctttaccgtggagaagggcatctatcagacaagcaatttcagggtgcagcctaccgagtccatcgtgcgctttcccaatatcacaaacctgtgcccttttggcgaggtgttcaacgccaccagattcgccagcgtgtacgcctggaatcggaagagaatctccaactgcgtggccgactattctgtgctgtacaactccgcctctttcagcacctttaagtgctatggcgtgtctcccacaaagctgaatgatctgtgctttaccaacgtgtacgccgatagcttcgtgatcaggggagacgaagtgagacagatcgcaccaggacagacaggaaagatcgcagactacaattataagctgcctgacgatttcaccggctgcgtgatcgcctggaactccaacaatctggattctaaagtgggcggcaactacaattatctgtacaggctgtttcgcaagtccaatctgaagccattcgagcgggacatctccacagagatctaccaggccggctctaccccctgcaatggcgtggagggctttaactgttatttccctctgcagtcttacggcttccagccaacaaacggcgtgggctatcagccctacagagtggtggtgctgtcctttgagctgctgcacgcaccagcaacagtgtgcggcccaaagaagtctaccaatctggtgaagaacaagtgcgtgaacttcaacttcaacggactgaccggcacaggcgtgctgaccgagagcaataagaagttcctgccttttcagcagttcggcagggacatcgcagataccacagacgccgtgcgcgaccctcagaccctggagatcctggacatcacaccatgcagcttcggcggcgtgtccgtgatcacaccaggcaccaatacatccaaccaggtggccgtgctgtatcaggacgtgaattgtaccgaggtgcccgtggcaatccacgcagatcagctgacccctacatggcgggtgtactctaccggcagcaacgtgttccagacaagagccggatgcctgatcggagcagagcacgtgaacaatagctatgagtgcgacatccctatcggcgccggcatctgtgccagctaccagacccagacaaactccccatctggagcaggctccgtggccagccagtccatcatcgcctataccatgagcctgggcgccgagaacagcgtggcctactccaacaattctatcgccatccctaccaacttcacaatcagcgtgaccacagagatcctgccagtgtctatgaccaagacaagcgtggactgcacaatgtatatctgtggcgatagcaccgagtgctccaacctgctgctgcagtacggctccttttgtacccagctgaatagagccctgacaggcatcgccgtggagcaggataagaacacacaggaggtgttcgcccaggtgaagcagatctacaagaccccacccatcaaggactttggcggcttcaacttcagccagatcctgcctgatccaagcaagccctccaagaggtcttttatcgaggacctgctgttcaacaaggtgaccctggccgatgccggcttcatcaagcagtatggagattgcctgggagacatcgcagcccgcgacctgatctgtgcccagaagtttaatggcctgaccgtgctgcctccactgctgacagatgagatgatcgcccagtacacatctgccctgctggccggcaccatcacaagcggatggaccttcggcgcaggagccgccctgcagatcccttttgccatgcagatggcctataggttcaacggcatcggcgtgacccagaatgtgctgtacgagaaccagaagctgatcgccaatcagtttaacagcgccatcggcaagatccaggactctctgtcctctacagccagcgccctgggcaagctgcaggatgtggtgaatcagaacgcccaggccctgaataccctggtgaagcagctgagctccaacttcggcgccatctctagcgtgctgaatgacatcctgagccggctggacccccctgaggcagaggtgcagatcgacaggctgatcacaggccgcctgcagagcctgcagacctacgtgacacagcagctgatcagggcagcagagatcagagcctccgccaatctggccgccaccaagatgagcgagtgcgtgctgggacagtccaagagggtggacttttgtggcaagggctatcacctgatgtctttcccacagagcgcccctcacggcgtggtgtttctgcacgtgacctacgtgccagcccaggagaagaacttcaccacagcaccagccatctgccacgatggaaaggcacactttcctagggagggcgtgttcgtgtctaacggcacccactggtttgtgacacagcgcaatttctacgagccacagccgatcaccacagacaatacattcgtgagcggcaactgtgatgtggtgatcggcatcgtgaacaataccgtgtatgatccactgcagcccgagctggactcctttaaggaggagctggataagtacttcaagaatcacacctctcccgacgtggatctgggcgacatctccggcatcaatgcctctgtggtgaacatccagaaggagatcgaccggctgaacgaggtggccaagaatctgaacgagagcctgatcgatctgcaggagctgggcaagtatgagcagtacatcaagggctctggcagagagaacctgtatttccagggaggaggaggcagcggatacatccctgaggcaccaagggacggacaggcctacgtgcgcaaggatggcgagtgggtgctgctgtccacctttctgggccatcatcaccaccaccaccaccactga

SEQ ID NO: 1534 - DNA, 3846 bp, Artificial Sequence
  Description of Artificial Sequence: Synthetic polynucleotide
atgggcatcctgccaagcccaggaatgcccgccctgctgtctctggtgagcctgctgtccgtgctgctgatgggatgcgtggcagagacaggcacacagtgcgtgaacctgaccacaaggacccagctgccccctgcctataccaattctttcacacggggcgtgtactatcccgacaaggtgtttagaagctccgtgctgcactccacacaggatctgtttctgcctttcttttctaacgtgacctggttccacgccatccacgtgtccggcaccaatggcacaaagcggttcgacaatcccgtgctgccttttaacgatggcgtgtacttcgccagcaccgagaagtccaacatcatcagaggctggatctttggcaccacactggactctaagacacagagcctgctgatcgtgaacaatgccaccaacgtggtgatcaaggtgtgcgagttccagttttgtaatgatccattcctgggcgtgtactatcacaagaacaataagtcctggatggagtctgagtttcgcgtgtattctagcgccaacaattgcacatttgagtacgtgagccagcccttcctgatggacctggagggcaagcagggcaatttcaagaacctgagggagttcgtgtttaagaatatcgatggctacttcaagatctacagcaagcacaccccaatcaacctggtgcgcgacctgccacagggattctccgccctggagccactggtggatctgcccatcggcatcaacatcacccggtttcagacactgctggccctgcacagatcctacctgacaccaggcgactcctctagcggatggaccgcaggagctgccgcctactatgtgggctatctgcagccccggaccttcctgctgaagtacaacgagaatggcaccatcacagacgcagtggattgcgccctggaccccctgtctgagacaaagtgtacactgaagagctttaccgtggagaagggcatctatcagacaagcaatttcagggtgcagcctaccgagtccatcgtgcgctttcccaatatcacaaacctgtgcccttttggcgaggtgttcaacgccaccagattcgccagcgtgtacgcctggaatcggaagagaatctccaactgcgtggccgactattctgtgctgtacaactccgcctctttcagcacctttaagtgctatggcgtgtctcccacaaagctgaatgatctgtgctttaccaacgtgtacgccgatagcttcgtgatcaggggagacgaagtgagacagatcgcaccaggacagacaggaaagatcgcagactacaattataagctgcctgacgatttcaccggctgcgtgatcgcctggaactccaacaatctggattctaaagtgggcggcaactacaattatctgtacaggctgtttcgcaagtccaatctgaagccattcgagcgggacatctccacagagatctaccaggccggctctaccccctgcaatggcgtggagggctttaactgttatttccctctgcagtcttacggcttccagccaacaaacggcgtgggctatcagccctacagagtggtggtgctgtcctttgagctgctgcacgcaccagcaacagtgtgcggcccaaagaagtctaccaatctggtgaagaacaagtgcgtgaacttcaacttcaacggactgaccggcacaggcgtgctgaccgagagcaataagaagttcctgccttttcagcagttcggcagggacatcgcagataccacagacgccgtgcgcgaccctacgaccctggagatcctggacatcacaccatgcagcttcggcggcgtgtccgtgatcacaccaggcaccaatacatccaaccaggtggccgtgctgtatcaggacgtgaattgtaccgaggtgcccgtggcaatccacgcagatcagctgacccctacatggcgggtgtactctaccggcagcaacgtgttccagacaagagccggatgcctgatcggagcagagcacgtgaacaatagctatgagtgcgacatccctatcggcgccggcatctgtgccagctaccagacccagacaaactccccatctggagcaggctccgtggccagccagtccatcatcgcctataccatgagcctgggcgccgagaacagcgtggcctactccaacaattctatcgccatccctaccaacttcacaatcagcgtgaccacagagatcctgccagtgtctatgaccaagacaagcgtggactgcacaatgtatatctgtggcgatagcaccgagtgctccaacctgctgctgcagtacggctccttttgtacccagctgaatagagccctgacaggcatcgccgtggagcaggataagaacacacaggaggtgttcgcccaggtgaagcagatctacaagaccccacccatcaaggactttggcggcttcaacttcagccagatcctgcctgatccaagcaagccctccaagaggtcttttatcgaggacctgctgttcaacaaggtgaccctggccgatgccggcttcatcaagcagtatggagattgcctgggagacatcgcagcccgcgacctgatctgtgcccagaagtttaatggcctgaccgtgctgcctccactgctgacagatgagatgatcgcccagtacacatctgccctgctggccggcaccatcacaagcggatggaccttcggcgcaggagccgccctgcagatcccttttgccatgcagatggcctataggttcaacggcatcggcgtgacccagaatgtgctgtacgagaaccagaagctgatcgccaatcagtttaacagcgccatcggcaagatccaggactctctgtcctctacagccagcgccctgggcaagctgcaggatgtggtgaatcagaacgcccaggccctgaataccctggtgaagcagctgagctccaacttcggcgccatctctagcgtgctgaatgacatcctgagccggctggacccccctgaggcagaggtgcagatcgacaggctgatcacaggccgcctgcagagcctgcagacctacgtgacacagcagctgatcagggcagcagagatcagagcctccgccaatctggccgccaccaagatgagcgagtgcgtgctgggacagtccaagagggtggacttttgtggcaagggctatcacctgatgtctttcccacagagcgcccctcacggcgtggtgtttctgcacgtgacctacgtgccagcccaggagaagaacttcaccacagcaccagccatctgccacgatggaaaggcacactttcctagggagggcgtgttcgtgtctaacggcacccactggtttgtgacacagcgcaatttctacgagccacagatcatcaccacagacaatacattcgtgagcggcaactgtgatgtggtgatcggcatcgtgaacaataccgtgtatgatccactgcagcccgagctggactcctttaaggaggagctggataagtacttcaagaatcacacctctcccgacgtggatctgggcgacatctccggcatcaatgcctctgtggtgaacatccagaaggagatcgaccggctgaacgaggtggccaagaatctgaacgagagcctgatcgatctgcaggagctgggcaagtatgagcagtacatcaagggctctggcagagagaacctgtatttccagggaggaggaggcagcggatacatccctgaggcaccaagggacggacaggcctacgtgcgcaaggatggcgagtgggtgctgctgtccacctttctgggccatcatcaccaccaccaccaccactga

SEQ ID NO: 1535 - DNA, 3846 bp, Artificial Sequence
  Description of Artificial Sequence: Synthetic polynucleotide
atgggcatcctgccaagcccaggaatgcccgccctgctgtctctggtgagcctgctgtccgtgctgctgatgggatgcgtggcagagacaggcacacagtgcgtgaacctgaccacaaggacccagctgccccctgcctataccaattctttcacacggggcgtgtactatcccgacaagatttttagaagctccgtgctgcacctcacacaggatctgtttctgcctttcttttctaacgtgacctggttccacgccatccacgtgtccggcaccaatggcacaaagcggttcgacaatcccgtgctgccttttaacgatggcgtgtacttcgccgcgaccgagaagtccaacatcatcagaggctggatctttggcaccacactggactctaagacacagagcctgctgatcgtgaacaatgccaccaacgtggtgatcaaggtgtgcgagttccagttttgtaatgatccattcctgggcgtgtactatcacaagaacaataagtcctggatggagtctgagtttcgcgtgtattctagcgccaacaattgcacatttgagtacgtgagccagcccttcctgatggacctggagggcaagcagggcaatttcaagaacctgagggagttcgtgtttaagaatatcgatggctacttcaagatctacagcaagtataccccaatcaacctggtgcgcgacctgccacagggattctccgccctggagccactggtgaaactgcccatcggcatcaacatcacccggtttcagacactgctggccctgcacagatcctacctgacaccaggcgactcctctagcggatggaccgcaggagctgccgcctactatgtgggctatctgcagccccggaccttcctgctgaagtacaacgagaatggcaccatcacagacgcagtggattgcgccctggaccccctgtctgagacaaagtgtacactgaagagctttaccgtggagaagggcatctatcagacaagcaatttcagggtgcagcctaccgagtccatcgtgcgctttcccaatatcacaaacctgtgcccttttggcgaggtgttcaacgccaccagattcgccagcgtgtacgcctggaatcggaagagaatctccaactgcgtggccgactattctgtgctgtacaactccgcctctttcagcacctttaagtgctatggcgtgtctcccacaaagctgaatgatctgtgctttaccaacgtgtacgccgatagcttcgtgatcaggggagacgaagtgagacagatcgcaccaggacagacaggaaagatcgcagactacaattataagctgcctgacgatttcaccggctgcgtgatcgcctggaactccaacaatctggattctaaagtgggcggcaactacaattatctgtacaggctgtttcgcaagtccaatctgaagccattcgagcgggacatctccacagagatctaccaggccggctctaccccctgcaatggcgtggagggctttaactgttatttccctctgcagtcttacggcttccagccaacaaacggcgtgggctatcagccctacagagtggtggtgctgtcctttgagctgctgcacgcaccagcaacagtgtgcggcccaaagaagtctaccaatctggtgaagaacaagtgcgtgaacttcaacttcaacggactgaccggcacaggcgtgctgaccgagagcaataagaagttcctgccttttcagcagttcggcagggacatcagtgataccacagacgccgtgcgcgaccctcagaccctggagatcctggacatcacaccatgcagcttcggcggcgtgtccgtgatcacaccaggcaccaatacatccaaccaggtggccgtgctgtatcaggacgtgaattgtaccgatgtgcccgtggcaatccacgcagatcagctgacccctacatggcgggtgtactctaccggcagcaacgtgttccagacacaagccggatgcctgatcggagcagagcacgtgaacaatagctatgagtgcgacatccctatcggcgccggcatctgtgccagctaccagacccagacaaactccccatctggagcaggctccgtggccagccagtccatcatcgcctataccatgagcctgggcgccgagaacagcgtggcctactccaacaattctatcgccatccctaccaacttcacaatcagcgtgaccacagagatcctgccagtgtctatgaccaagacaagcgtggactgcacaatgtatatctgtggcgatagcaccgagtgctccaacctgctgctgcagtacggctccttttgtacccagctgaatagagccctgacaggcatcgccgtggagcaggataagaacacacaggaggtgttcgcccaggtgaagcagatctacaagaccccacccatcaaggactttggcggcttcaacttcagccagatcctgcctgatccaagcaagccctccaagaggtcttttatcgaggacctgctgttcaacaaggtgaccctggccgatgccggcttcatcaagcagtatggagattgcctgggagacatcgcagcccgcgacctgatctgtgcccagaagtttaatggcctgaccgtgctgcctccactgctgacagatgagatgatcgccgcgtacacagctgccctgctggccggcaccatcacagcgggatggaccttcggcgcaggagccgccctgcagatcccttttgccatgcagatggcctataggttcaacggcatcggcgtgacccagaatgtgctgtacgagaaccagaagctgatcgccaatcagtttaacagcgccatcggcaagatccaggactctctgtcctctacagccagcgccctgggcaagctgcaggatgtggtgaatcagaacgcccaggccctgaataccctggtgaagcagctgagctccaacttcggcgccatctctagcgtgctgaatgacatcctgagccggctggacccccctgaggcagaggtgcagatcgacaggctgatcacaggccgcctgcagagcctgcagacctacgtgacacagcagctgatcagggcagcagagatcagagcctccgccaatctggccgccaccaagatgagcgagtgcgtgctgggacagtccaagagggtggacttttgtggcaagggctatcacctgatgtctttcccacagagcgcccctcacggcgtggtgtttctgcacgtgacctacgtgccagcccaggagaagaacttcaccacagcaccagccatctgccacgatggaaaggcacactttcctagggagggcgtgttcgtgtctaacggcacccactggtttgtgacacagcgcaatttctacgagccacagatcatcaccacagacaatacattcgtgagcggcaactgtgatgtggtgatcggcatcgtgaacaataccgtgtatgatccactgcagcccgagctggactcctttaaggaggagctggataagtacttcaagaatcacacctctcccgacgtggatctgggcgacatctccggcatcaatgcctctgtggtgaacatccagaaggagatcgaccggctgaacgaggtggccaagaatctgaacgagagcctgatcgatctgcaggagctgggcaagtatgagcagtacatcaagggctctggcagagagaacctgtatttccagggaggaggaggcagcggatacatccctgaggcaccaagggacggacaggcctacgtgcgcaaggatggcgagtgggtgctgctgtccacctttctgggccatcatcaccaccaccaccaccactga

SEQ ID NO: 1536 - DNA, 3846 bp, Artificial Sequence
  Description of Artificial Sequence: Synthetic polynucleotide
atgggcatcctgccaagcccaggaatgcccgccctgctgtctctggtgagcctgctgtccgtgctgctgatgggatgcgtggcagagacaggcacacagtgcgtgaacctgaccacaaggacccagctgccccctgcctataccaattctttcacacggggcgtgtactatcccgacaaggtgtttagaagctccgtgctgcactccacacaggatctgtttctgcctttcttttctaacgtgacctggttccacgccatccacgtgtccggcaccaatggcacaaagcggttcgacaatcccgtgctgccttttaacgatggcgtgtacttcgccagcaccgagaagtccaacatcatcagaggctggatctttggcaccacactggactctaagacacagagcctgctgatcgtgaacaatgccaccaacgtggtgatcaaggtgtgcgagttccagttttgtaatgatccattcctgggcgtgtactatcacaagaacaataagtcctggatggagtctgagtttcgcgtgtattctagcgccaacaattgcacatttgagtacgtgagcaaacccttcctgatggacctggagggcaagcagggcaatttcaagaacctgagggagttcgtgtttaagaatatcgatggctacttcaagatctacagcaagcacaccccaatcaacctggtgcgcgacctgccacagggattctccgccctggagccactggtggatctgcccatcggcatcaacatcacccggtttcagacactgctggccctgcacagatcctacctgacaccaggcgactcctctagcggatggaccgcaggagctgccgcctactatgtgggctatctgcagccccggaccttcctgctgaagtacaacgagaatggcaccatcacagacgcagtggattgcgccctggaccccctgtctgagacaaagtgtacactgaagagctttaccgtggagaagggcatctatcagacaagcaatttcagggtgcagcctaccgagtccatcgtgcgctttcccaatatcacaaacctgtgcccttttggcgaggtgttcaacgccaccagattcgccagcgtgtacgcctggaatcggaagagaatctccaactgcgtggccgactattctgtgctgtacaactccgcctctttcagcacctttaagtgctatggcgtgtctcccacaaagctgaatgatctgtgctttaccaacgtgtacgccgatagcttcgtgatcaggggagacgaagtgagacagatcgcaccaggacagacaggaaagatcgcagactacaattataagctgcctgacgatttcaccggctgcgtgatcgcctggaactccaacaatctggattctaaagtgggcggcaactacaattatctgtacaggctgtttcgcaagtccaatctgaagccattcgagcgggacatctccacagagatctaccaggccggctctaccccctgcaatggcgtggagggctttaactgttatttccctctgcagtcttacggcttccagccaacaaacggcgtgggctatcagccctacagagtggtggtgctgtcctttgagctgctgcacgcaccagcaacagtgtgcggcccaaagaagtctaccaatctggtgaagaacaagtgcgtgaacttcaacttcaacggactgaccggcacaggcgtgctgaccgagagcaataagaagttcctgccttttcagcagttcggcagggacatcgcagataccacagacgccgtgcgcgaccctcagaccctggagatcctggacatcacaccatgcagcttcggcggcgtgtccgtgatcacaccaggcaccaatacatccaaccaggtggccgtgctgtatcaggacgtgaattgtaccgaggtgcccgtggcaatccacgcagatcagctgacccctacatggcgggtgtactctaccggcagcaacgtgttccagacaagagccggatgcctgatcggagcagagcacgtgaacaatagctatgagtgcgacatccctatcggcgccggcatctgtgccagctaccagacccagacaaactccccatctggagcaggctccgtggccagccagtccatcatcgcctataccatgagcctgggcgccgagaacagcgtggcctactccaacaattctatcgccatccctaccaacttcacaatcagcgtgaccacagagatcctgccagtgtctatgaccaagacaagcgtggactgcacaatgtatatctgtggcgatagcaccgagtgctccaacctgctgctgcagtacggctccttttgtacccagctgaatagagccctgacaggcatcgccgtggagcaggataagaacacacaggaggtgttcgcccaggtgaagcagatctacaagaccccacccatcaaggactttggcggcttcaacttcagccagatcctgcctgatccaagcaagccctccaagaggtcttttatcgaggacctgctgttcaacaaggtgaccctggccgatgccggcttcatcaagcagtatggagattgcctgggagacatcgcagcccgcgacctgatctgtgcccagaagtttaatggcctgaccgtgctgcctccactgctgacagatgagatgatcgcccagtacacatctgccctgctggccggcaccatcacaagcggatggaccttcggcgcaggagccgccctgcagatcccttttgccatgcagatggcctataggttcaacggcatcggcgtgacccagaatgtgctgtacgagaaccagaagctgatcgccaatcagtttaacagcgccatcggcaagatccaggactctctgtcctctacagccagcgccctgggcaagctgcaggatgtggtgaatcagaacgcccaggccctgaataccctggtgaagcagctgagctccaacttcggcgccatctctagcgtgctgaatgacatcctgagccggctggacccccctgaggcagaggtgcagatcgacaggctgatcacaggccgcctgcagagcctgcagacctacgtgacacagcagctgatcagggcagcagagatcagagcctccgccaatctggccgccaccaagatgagcgagtgcgtgctgggacagtccaagagggtggacttttgtggcaagggctatcacctgatgtctttcccacagagcgcccctcacggcgtggtgtttctgcacgtgacctacgtgccagcccaggagaagaacttcaccacagcaccagccatctgccacgatggaaaggcacactttcctagggagggcgtgttcgtgtctaacggcacccactggtttgtgacacagcgcaatttctacgagccacagatcatcaccacagacaatacattcgtgagcggcaactgtgatgtggtgatcggcatcgtgaacaataccgtgtatgatccactgcagcccgagctggactcctttaaggaggagctggataagtacttcaagaatcacacctctcccgacgtggatctgggcgacatctccggcatcaatgcctctgtggtgaacatccagaaggagatcgaccggctgaacgaggtggccaagaatctgaacgagagcctgatcgatctgcaggagctgggcaagtatgagcagtacatcaagggctctggcagagagaacctgtatttccagggaggaggaggcagcggatacatccctgaggcaccaagggacggacaggcctacgtgcgcaaggatggcgagtgggtgctgctgtccacctttctgggccatcatcaccaccaccaccaccactga

SEQ ID NO: 1537 - DNA, 3846 bp, Artificial Sequence
  Description of Artificial Sequence: Synthetic polynucleotide
atgggcatcctgccaagcccaggaatgcccgccctgctgtctctggtgagcctgctgtccgtgctgctgatgggatgcgtggcagagacaggcacacagtgcgtgaacctgaccacaaggacccagctgccccctgcctataccaattctttcacacggggcgtgtactatcccgacaaggtgtttagaagctccgtgctgcactccacacaggatctgtttctgcctttcttttctaacgtgacctggttccacgccatccacgtgtccggcaccaatggcacaaagcggttcgacaatcccgtgctgccttttaacgatggcgtgtacttcgccagcaccgagaagtccaacatcatcagaggctggatctttggcaccacactggactctaagacacagagcctgctgatcgtgaacaatgccaccaacgtggtgatcaaggtgtgcgagttccagttttgtaatgatccattcctgggcgtgtactatcacaagaacaataagtcctggatggagtctgagtttcgcgtgtattctagcgccaacaattgcacatttgagtacgtgagccagcccttcctgatggacctggagggcaagcagggcaatttcaagaacctgagggagttcgtgtttaagaatatcgatggctacttcaagatctacagcaagcacaccccaatcaacctggtgcgcgacctgccacagggattctccgccctggagccactggtggatctgcccatcggcatcaacatcacccggtttcagacactgctggccctgcacagatcctacctgacaccaggcgactcctctagcggatggaccgcaggagctgccgcctactatgtgggctatctgcagccccggaccttcctgctgaagtacaacgagaatggcaccatcacagacgcagtggattgcgccctggaccccctgtctgagacaaagtgtacactgaagagctttaccgtggagaagggcatctatcagacaagcaatttcagggtgcagcctaccgagtccatcgtgcgctttcccaatatcacaaacctgtgcccttttggcgaggtgttcaacgccaccagattcgccagcgtgtacgcctggaatcggaagagaatctccaactgcgtggccgactattctgtgctgtacaactccgcctctttcagcacctttaagtgctatggcgtgtctcccacaaagctgaatgatctgtgctttaccaacgtgtacgccgatagcttcgtgatcaggggagacgaagtgagacagatcgcaccaggacagacaggaaagatcgcagactacaattataagctgcctgacgatttcaccggctgcgtgatcgcctggaactccaacaatctggattctaaagtgggcggcaactacaattatctgtacaggctgtttcgcaagtccaatctgaagccattcgagcgggacatctccacagagatctaccaggccggctctaccccctgcaatggcgtggagggctttaactgttatttccctctgcagtcttacggcttccagccaacaaacggcgtgggctatcagccctacagagtggtggtgctgtcctttgagctgctgcacgcaccagcaacagtgtgcggcccaaagaagtctaccaatctggtgaagaacaagtgcgtgaacttcaacttcaacggactgaccggcacaggcgtgctgaccgagagcaataagaagttcctgccttttcagcagttcggcagggacatcgcagataccacagacgccgtgcgcgaccctcagaccctggagatcctggacatcacaccatgcagcttcggcggcgtgtccgtgatcacaccaggcaccaatacatccaaccaggtggccgtgctgtatcaggacgtgaattgtaccgaggtgcccgtggcaatccacgcagatcagctgacccctacatggcgggtgtactctaccggcagcaacgtgttccagacaagagccggatgcctgatcggagcagagcacgtgaacaatagctatgagtgcgacatccctatcggcgccggcatctgtgccagctaccagacccagacaaactccccatctggagcaggctccgtggccagccagtccatcatcgcctataccatgagcctgggcgccgagaacagcgtggcctactccaacaattctatcgccatccctaccaacttcacaatcagcgtgaccacagagatcctgccagtgtctatgaccaagacaagcgtggactgcacaatgtatatctgtggcgatagcaccgagtgctccaacctgctgctgcagtacggctccttttgtacccagctgaatagagccctgacaggcatcgcccgagagcaggataagaacacacaggaggtgttcgcccaggtgaagcagatctacaagaccccacccatcaaggactttggcggcttcaacttcagccagatcctgcctgatccaagcaagccctccaagaggtcttttatcgaggacctgctgttcaacaaggtgaccctggccgatgccggcttcatcaagcagtatggagattgcctgggagacatcgcagcccgcgacctgatctgtgcccagaagtttaatggcctgaccgtgctgcctccactgctgacagatgagatgatcgcccagtacacatctgccctgctggccggcaccatcacaagcggatggaccttcggcgcaggagccgccctgcagatcccttttgccatgcagatggcctataggttcaacggcatcggcgtgacccagaatgtgctgtacgagaaccagaagctgatcgccaatcagtttaacagcgccatcggcaagatccaggactctctgtcctctacagccagcgccctgggcaagctgcaggatgtggtgaatcagaacgcccaggccctgaataccctggtgaagcagctgagctccaacttcggcgccatctctagcgtgctgaatgacatcctgagccggctggacccccctgaggcagaggtgcagatcgacaggctgatcacaggccgcctgcagagcctgcagacctacgtgacacagcagctgatcagggcagcagagatcagagcctccgccaatctggccgccaccaagatgagcgagtgcgtgctgggacagtccaagagggtggacttttgtggcaagggctatcacctgatgtctttcccacagagcgcccctcacggcgtggtgtttctgcacgtgacctacgtgccagcccaggagaagaacttcaccacagcaccagccatctgccacgatggaaaggcacactttcctagggagggcgtgttcgtgtctaacggcacccactggtttgtgacacagcgcaatttctacgagccacagatcatcaccacagacaatacattcgtgagcggcaactgtgatgtggtgatcggcatcgtgaacaataccgtgtatgatccactgcagcccgagctggactcctttaaggaggagctggataagtacttcaagaatcacacctctcccgacgtggatctgggcgacatctccggcatcaatgcctctgtggtgaacatccagaaggagatcgaccggctgaacgaggtggccaagaatctgaacgagagcctgatcgatctgcaggagctgggcaagtatgagcagtacatcaagggctctggcagagagaacctgtatttccagggaggaggaggcagcggatacatccctgaggcaccaagggacggacaggcctacgtgcgcaaggatggcgagtgggtgctgctgtccacctttctgggccatcatcaccaccaccaccaccactga

SEQ ID NO: 1538 - DNA, 3846 bp, Artificial Sequence
  Description of Artificial Sequence: Synthetic polynucleotide
atgggcatcctgccaagcccaggaatgcccgccctgctgtctctggtgagcctgctgtccgtgctgctgatgggatgcgtggcagagacaggcacacagtgcgtgaacctgaccacaaggacccagctgccccctgcctataccaattctttcacacggggcgtgtactatcccgacaaggtgtttagaagctccgtgctgcactccacacaggatctgtttctgcctttcttttctaacgtgacctggttccacgccatccacgtgtccggcaccaatggcacaaagcggttcgacaatcccgtgctgccttttaacgatggcgtgtacttcgccagcaccgagaagtccaacatcatcagaggctggatctttggcaccacactggactctaagacacagagcctgctgatcgtgaacaatgccaccaacgtggtgatcaaggtgtgcgagttccagttttgtaatgatccattcctgggcgtgtactatcacaagaacaataagtcctggatggagtctgagtttcgcgtgtattctagcgccaacaattgcacatttgagtacgtgagccagcccttcctgatggacctggagggcaagcagggcaatttcaagaacctgagggagttcgtgtttaagaatatcgatggctacttcaagatctacagcaagcacaccccaatcaacctggtgcgcgacctgccacagggattctccgccctggagccactggtggatctgcccatcggcatcaacatcacccggtttcagacactgctggccctgcacagatcctacctgacaccaggcgactcctctagcggatggaccgcaggagctgccgcctactatgtgggctatctgcagccccggaccttcctgctgaagtacaacgagaatggcaccatcacagacgcagtggattgcgccctggaccccctgtctgagacaaagtgtacactgaagagctttaccgtggagaagggcatctatcagacaagcaatttcagggtgcagcctaccgagtccatcgtgcgctttcccaatatcacaaacctgtgcccttttggcgaggtgttcaacgccaccagattcgccagcgtgtacgcctggaatcggaagagaatctccaactgcgtggccgactattctgtgctgtacaactccgcctctttcagcacctttaagtgctatggcgtgtctcccacaaagctgaatgatctgtgctttaccaacgtgtacgccgatagcttcgtgatcaggggagacgaagtgagacagatcgcaccaggacagacaggaaagatcgcagactacaattataagctgcctgacgatttcaccggctgcgtgatcgcctggaactccaacaatctggattctaaagtgggcggcaactacaattatctgtacaggctgtttcgcaagtccaatctgaagccattcgagcgggacatctccacagagatctaccaggccggctctaccccctgcaatggcgtggagggctttaactgttatttccctctgcagtcttacggcttccagccaacaaacggcgtgggctatcagccctacagagtggtggtgctgtcctttgagctgctgcacgcaccagcaacagtgtgcggcccaaagaagtctaccaatctggtgaagaacaagtgcgtgaacttcaacttcaacggactgaccggcacaggcgtgctgaccgagagcaataagaagttcctgccttttcagcagttcggcagggacatcgcagataccacagacgccgtgcgcgaccctcagaccctggagatcctggacatcacaccatgcagcttcggcggcgtgtccgtgatcacaccaggcaccaatacatccaaccaggtggccgtgctgtatcaggacgtgaattgtaccgaggtgcccgtggcaatccacgcagatcagctgacccctacatggcgggtgtactctaccggcagcaacgtgttccagacaagagccggatgcctgatcggagcagagcacgtgaacaatagctatgagtgcgacatccctatcggcgccggcatctgtgccagctaccagacccagacaaactccccatctggagcaggctccgtggccagccagtccatcatcgcctataccatgagcctgggcgccgagaacagcgtggcctactccaacaattctatcgccatccctaccaacttcacaatcagcgtgaccacagagatcctgccagtgtctatgaccaagacaagcgtggactgcacaatgtatatctgtggcgatagcaccgagtgctccaacctgctgctgcagtacggctccttttgtgatcagctgaatagagccctgacaggcatcgccgtggagcaggataagaacacacaggaggtgttcgcccaggtgaagcagatctacaagaccccacccatcaaggactttggcggcttcaacttcagccagatcctgcctgatccaagcaagccctccaagaggtcttttatcgaggacctgctgttcaacaaggtgaccctggccgatgccggcttcatcaagcagtatggagattgcctgggagacatcgcagcccgcgacctgatctgtgcccagaagtttaatggcctgaccgtgctgcctccactgctgacagatgagatgatcgcccagtacacatctgccctgctggccggcaccatcacaagcggatggaccttcggcgcaggagccgccctgcagatcccttttgccatgcagatggcctataggttcaacggcatcggcgtgacccagaatgtgctgtacgagaaccagaagctgatcgccaatcagtttaacagcgccatcggcaagatccaggactctctgtcctctacagccagcgccctgggcaagctgcaggatgtggtgaatcagaacgcccaggccctgaataccctggtgaagcagctgagctccaacttcggcgccatctctagcgtgctgaatgacatcctgagccggctggacccccctgaggcagaggtgcagatcgacaggctgatcacaggccgcctgcagagcctgcagacctacgtgacacagcagctgatcagggcagcagagatcagagcctccgccaatctggccgccaccaagatgagcgagtgcgtgctgggacagtccaagagggtggacttttgtggcaagggctatcacctgatgtctttcccacagagcgcccctcacggcgtggtgtttctgcacgtgacctacgtgccagcccaggagaagaacttcaccacagcaccagccatctgccacgatggaaaggcacactttcctagggagggcgtgttcgtgtctaacggcacccactggtttgtgacacagcgcaatttctacgagccacagatcatcaccacagacaatacattcgtgagcggcaactgtgatgtggtgatcggcatcgtgaacaataccgtgtatgatccactgcagcccgagctggactcctttaaggaggagctggataagtacttcaagaatcacacctctcccgacgtggatctgggcgacatctccggcatcaatgcctctgtggtgaacatccagaaggagatcgaccggctgaacgaggtggccaagaatctgaacgagagcctgatcgatctgcaggagctgggcaagtatgagcagtacatcaagggctctggcagagagaacctgtatttccagggaggaggaggcagcggatacatccctgaggcaccaagggacggacaggcctacgtgcgcaaggatggcgagtgggtgctgctgtccacctttctgggccatcatcaccaccaccaccaccactga

SEQ ID NO: 1539 - DNA, 3846 bp, Artificial Sequence
  Description of Artificial Sequence: Synthetic polynucleotide
atgggcatcctgccaagcccaggaatgcccgccctgctgtctctggtgagcctgctgtccgtgctgctgatgggatgcgtggcagagacaggcacacagtgcgtgaacctgaccacaaggacccagctgccccctgcctataccaattctttcacacggggcgtgtactatcccgacaaggtgtttagaagcgatgtgctgcactccacacaggatctgtttctgcctttcttttctaacgtgacctggttccacgccatccacgtgtccggcaccaatggcacaaagcggttcgacaatcccgtgctgccttttaacgatggcgtgtacttcgccagcaccgagaagtccaacatcatcagaggctggatctttggcaccacactggactctaagacacagagcctgctgatcgtgaacaatgccaccaacgtggtgatcaaggtgtgcgagttccagttttgtgatgatccattcctgggcgtgtactatcacaagaacaataagtcctggatggagaaagagtttcgcgtgtattctagcgccaacaattgcacatttgagtacgtgagccagcccttcctgatggacctgggtggcaagcagggcaatttcaagtggctgagggagttcgtgtttaagaatatcgatggctacttcaagatctacagcaagcacaccccaatcaacctggtgcgcgacctgccacagggattctccgccctggagccactgatggatctgcccatcggcatcaacatcacccggtttcagacactgctggccctgcacagatcctacctgacaccaggcgactcctctagcggatggaccgcaggagctgccgcctactatgtgggctatctgcagccccggaccttcctgctgaagtacaacgagaatggcaccatcacagacgcagtggattgcgccctggaccccctgtctgagacaaagtgtacactgaagagctttaccgtggagaagggcatctatcagacaagcaatttcagggtgcagcctaccgagtccatcgtgcgctttcccaatatcacaaacctgtgcccttttggcgaggtgttcaacgccaccagattcgccagcgtgtacgcctggaatcggaagagaatctccaactgcgtggccgactattctgtgctgtacaactccgcctctttcagcacctttaagtgctatggcgtgtctcccacaaagctgaatgatctgtgctttaccaacgtgtacgccgatagcttcgtgatcaggggagacgaagtgagacagatcgcaccaggacagacaggaaagatcgcagactacaattataagctgcctgacgatttcaccggctgcgtgatcgcctggaactccaacaatctggattctaaagtgggcggcaactacaattatctgtacaggctgtttcgcaagtccaatctgaagccattcgagcgggacatctccacagagatctaccaggccggctctaccccctgcaatggcgtggagggctttaactgttatttccctctgcagtcttacggcttccagccaacaaacggcgtgggctatcagccctacagagtggtggtgctgtcctttgagctgctgcacgcaccagcaacagtgtgcggcccaaagaagtctaccaatctggtgaagaacaagtgcgtgaacttcaacttcaacggactgaccggcacaggcgtgctgaccgagagcaataagaagttcctgccttttcagcagttcggcagggacatcgcagataatacagacgccgtgcgcgaccctcagaccctggagatcctggacatcacaccatgcagcttcggcggcgtgtccgtgatcacaccaggcaccaatacatccaaccaggtggccgtgctgtatcaggacgtgaattgtaccgaggtgcccaatgcaatccacgcagatcagctgacccctacatggcgggtgtactctaccggcagcaacgtgttccagacaagagccggatgcctgatcggagcagagcacgtgaacaatagctatgagtgcgacatccctatcggcgccggcatctgtgccagctaccagacccagacaaactccccatctggagcaggctccgtggccagccagtccatcatcgcctataccatgagcctgggcgccgagaacagcgtggcctactccaacaattctatcgccatccctaccaacttcacaatcagcgtgaccacagagatcctgccagtgtctatgaccaagacaagcgtggactgcacaatgtatatctgtggcgatagcaccgagtgctccaacctgctgctgcagtacggctccttttgtacccagctgaatagagccctgcaaggcatcgcccgtgagcaggataagaacacacaggaggtgttcgcccaggtgaagcagatctacaagaccccacccatcaaggactttggcggcttcaacttcagccagatcctgcctgatccaagcaagccctccaagaggtcttttatcgaggacctgctgttcaacaaggtgaccctggccgatgccggcttcatcaagcagtatggagattgcctgggagacatcgcagcccgcgacctgatctgtgcccagaagtttaatggcctgaccgtgctgcctccactgctgacagatgagatgatcgcccagtacacatctgccctgctggccggcaccatcacaagcggatggaccttcggcgcaggagccgccctgcagatcccttttgccatgcagatggcctataggttcaacggcatcggcgtgacccagaatgtgctgtacgagaaccagaagctgatcgccaatcagtttaacaaagccatcggcaagatccaggactctctgtcctctacagccagcgccctgggcaagctgcaggatgtggtgaatcagaacgcccaggccctgaataccctggtgaagcagctgagctccaacttcggcgccatctctagcgtgctgaatgacatcctgagccggctggacccccctgaggcagaggtgcagatcgacaggctgatcacaggccgcctgcagagcctgcagacctacgtgacacagcagctgatcagggcagcagagatcagagcctccgccaatctggccgccaccaagatgagcgagtgcgtgctgggacagtccaagagggtggacttttgtggcaagggctatcacctgatgtctttcccacagagcgcccctcacggcgtggtgtttctgcacgtgacctacgtgccagcccaggagaagaacttcaccacagcaccagccatctgccacgatggaaaggcattttttcctagggagggcgtgttcgtgtctaacggcacccaatggtttgtgacacagcgcaatttctacgagccacagatcatcaccacagacaatacattcgtgagcggcaactgtgatgtggtgatcggcatcgtgaacaataccgtgtatgatccactgcagcccgagctggactcctttaaggaggagctggataagtacttcaagaatcacacctctcccgacgtggatctgggcgacatctccggcatcaatgcctctgtggtgaacatccagaaggagatcgaccggctgaacgaggtggccaagaatctgaacgagagcctgatcgatctgcaggagctgggcaagtatgagcagtacatcaagggctctggcagagagaacctgtatttccagggaggaggaggcagcggatacatccctgaggcaccaagggacggacaggcctacgtgcgcaaggatggcgagtgggtgctgctgtccacctttctgggccatcatcaccaccaccaccaccactga

SEQ ID NO: 1540 - DNA, 3846 bp, Artificial Sequence
  Description of Artificial Sequence: Synthetic polynucleotide
atgggcatcctgccaagcccaggaatgcccgccctgctgtctctggtgagcctgctgtccgtgctgctgatgggatgcgtggcagagacaggcacacagtgcgtgaacctgaccacaaggacccagctgccccctgcctataccaattctttcacacggggcgtgtactatcccgacaaggtgtttagaagctccgtgctgcactccacacaggatctgtttctgcctttcttttctaacgtgacctggttccacgccatccacgtgtccggcaccaatggcacaaagcggttcgacaatcccgtgctgccttttaacgatggcgtgtacttcgccagcaccgagaagtccaacatcatcagaggctggatctttggcaccacactggactctaagacacagagcctgctgatcgtgaacaatgccaccaacgtggtgatcaaggtgtgcgagttccagttttgtaatgatccattcctgggcgtgtactatcacaagaacaataagtcctggatggagtctgagtttcgcgtgtattctagcgccaacaattgcacatttgagtacgtgagccagcccttcctgatggacctggagggcaagcagggcaatttcaagaacctgagggagttcgtgtttaagaatatcgatggctacttcaagatctacagcaagcacaccccaatcaacctggtgcgcgacctgccacagggattctccgccctggagccactggtggatctgcccatcggcatcaacatcacccggtttcagacactgctggccctgcacagatcctacctgacaccaggcgactcctctagcggatggaccgcaggagctgccgcctactatgtgggctatctgcagccccggaccttcctgctgaagtacaacgagaatggcaccatcacagacgcagtggattgcgccctggaccccctgtctgagacaaagtgtacactgaagagctttaccgtggagaagggcatctatcagacaagcaatttcagggtgcagcctaccgagtccatcgtgcgctttcccaatatcacaaacctgtgcccttttggcgaggtgttcaacgccaccagattcgccagcgtgtacgcctggaatcggaagagaatctccaactgcgtggccgactattctgtgctgtacaactccgcctctttcagcacctttaagtgctatggcgtgtctcccacaaagctgaatgatctgtgctttaccaacgtgtacgccgatagcttcgtgatcaggggagacgaagtgagacagatcgcaccaggacagacaggaaagatcgcagactacaattataagctgcctgacgatttcaccggctgcgtgatcgcctggaactccaacaatctggattctaaagtgggcggcaactacaattatctgtacaggctgtttcgcaagtccaatctgaagccattcgagcgggacatctccacagagatctaccaggccggctctaccccctgcaatggcgtggagggctttaactgttatttccctctgcagtcttacggcttccagccaacaaacggcgtgggctatcagccctacagagtggtggtgctgtcctttgagctgctgcacgcaccagcaacagtgtgcggcccaaagaagtctaccaatctggtgaagaacaagtgcgtgaacttcaacttcaacggactgaaaggcacaggcgtgctgaccgagagcaataagaagttcctgccttttcagcagttcggcagggacatcgcagataccacagacgccgtgcgcgaccctcagaccctggagatcctggacatcacaccatgcagcttcggcggcgtgtccgtgatcacaccaggcaccaatacatccaaccaggtggccgtgctgtatcaggacgtgaattgtaccgaggtgcccgtggcaatccacgcagatcagctgacccctacatggcgggtgtactctaccggcagcaacgtgttccagacaagagccggatgcctgatcggagcagagcacgtgaacaatagctatgagtgcgacatccctatcggcgccggcatctgtgccagctaccagacccagacaaactccccatctggagcaggctccgtggccagccagtccatcatcgcctataccatgagcctgggcgccgagaacagcgtggcctactccaacaattctatcgccatccctaccaacttcacaatcagcgtgaccacagagatcctgccagtgtctatgaccaagacaagcgtggactgcacaatgtatatctgtggcgatagcaccgagtgctccaacctgctgctgcagtacggctccttttgtacccagctgaatagagccctgacaggcatcgccgtggagcaggataagaacacacaggaggtgttcgcccaggtgaagcagatctacaagaccccacccatcaaggactttggcggcttcaacttcagccagatcctgcctgatccaagcaagccctccaagaggtcttttatcgaggacctgctgttcaacaaggtgaccctggccgatgccggcttcatcaagcagtatggagattgcctgggagacatcgcagcccgcgacctgatctgtgcccagaagtttaatggcctgaccgtgctgcctccactgctgacagatgagatgatcgcccagtacacatctgccctgctggccggcaccatcacaagcggatggaccttcggcgcaggagccgccctgcagatcccttttgccatgcagatggcctataggttcaacggcatcggcgtgacccagaatgtgctgtacgagaaccagaagctgatcgccaatcagtttaacagcgccatcggcaagatccaggactctctgtcctctacagccagcgccctgggcaagctgcaggatgtggtgaatcagaacgcccaggccctgaataccctggtgaagcagctgagctccaacttcggcgccatctctagcgtgctgaatgacatcctgagccggctggacccccctgaggcagaggtgcagatcgacaggctgatcacaggccgcctgcagagcctgcagacctacgtgacacagcagctgatcagggcagcagagatcagagcctccgccaatctggccgccaccaagatgagcgagtgcgtgctgggacagtccaagagggtggacttttgtggcaagggctatcacctgatgtctttcccacagagcgcccctcacggcgtggtgtttctgcacgtgacctacgtgccagcccaggagaagaacttcaccacagcaccagccatctgccacgatggaaaggcacactttcctagggagggcgtgttcgtgtctaacggcacccactggtttgtgacacagcgcaatttctacgagccacagatcatcaccacagacaatacattcgtgagcggcaactgtgatgtggtgatcggcatcgtgaacaataccgtgtatgatccactgcagcccgagctggactcctttaaggaggagctggataagtacttcaagaatcacacctctcccgacgtggatctgggcgacatctccggcatcaatgcctctgtggtgaacatccagaaggagatcgaccggctgaacgaggtggccaagaatctgaacgagagcctgatcgatctgcaggagctgggcaagtatgagcagtacatcaagggctctggcagagagaacctgtatttccagggaggaggaggcagcggatacatccctgaggcaccaagggacggacaggcctacgtgcgcaaggatggcgagtgggtgctgctgtccacctttctgggccatcatcaccaccaccaccaccactga

SEQ ID NO: 1541 - DNA, 3846 bp, Artificial Sequence
  Description of Artificial Sequence: Synthetic polynucleotide
atgggcatcctgccaagcccaggaatgcccgccctgctgtctctggtgagcctgctgtccgtgctgctgatgggatgcgtggcagagacaggcacacagtgcgtgaacctgaccacaaggacccagctgccccctgcctataccaattctttcacacggggcgtgtactatcccgacaaggtgtttagaagctccgtgctgcactccacacaggatctgtttctgcctttcttttctaacgtgacctggttccacgccatccacgtgtccggcaccaatggcacaaagcggttcgacaatcccgtgctgccttttaacgatggcgtgtacttcgccagcaccgagaagtccaacatcatcagaggctggatctttggcaccacactggactctaagacacagagcctgctgatcgtgaacaatgccaccaacgtggtgatcaaggtgtgcgagttccagttttgtaatgatccattcctgggcgtgtactatcacaagaacaataagtcctggatggagtctgagtttcgcgtgtattctagcgccaacaattgcacatttgagtacgtgagccagcccttcctgatggacctggagggcaagcagggcaatttcaagaacctgagggagttcgtgtttaagaatatcgatggctacttcaagatctacagcaagcacaccccaatcaacctggtgcgcgacctgccacagggattctccgccctggagccactggtggatctgcccatcggcatcaacatcacccggtttcagacactgctggccctgcacagatcctacctgacaccaggcgactcctctagcggatggaccgcaggagctgccgcctactatgtgggctatctgcagccccggaccttcctgctgaagtacaacgagaatggcaccatcacagacgcagtggattgcgccctggaccccctgtctgagacaaagtgtacactgaagagctttaccgtggagaagggcatctatcagacaagcaatttcagggtgcagcctaccgagtccatcgtgcgctttcccaatatcacaaacctgtgcccttttggcgaggtgttcaacgccaccagattcgccagcgtgtacgcctggaatcggaagagaatctccaactgcgtggccgactattctgtgctgtacaactccgcctctttcagcacctttaagtgctatggcgtgtctcccacaaagctgaatgatctgtgctttaccaacgtgtacgccgatagcttcgtgatcaggggagacgaagtgagacagatcgcaccaggacagacaggaaagatcgcagactacaattataagctgcctgacgatttcaccggctgcgtgatcgcctggaactccaacaatctggattctaaagtgggcggcaactacaattatctgtacaggctgtttcgcaagtccaatctgaagccattcgagcgggacatctccacagagatctaccaggccggctctaccccctgcaatggcgtggagggctttaactgttatttccctctgcagtcttacggcttccagccaacaaacggcgtgggctatcagccctacagagtggtggtgctgtcctttgagctgctgcacgcaccagcaacagtgtgcggcccaaagaagtctaccaatctggtgaagaacaagtgcgtgaacttcaacttcaacggactgaccggcacaggcgtgctgaccgagagcaataagaagttcctgccttttcagcagttcggcagggacatcgcagataccacagacgccgtgcgcgaccctcagaccctggagatcctggacatcacaccatgcagcttcggcggcgtgtccgtgatcacaccaggcaccaatacatccaaccaggtggccgtgctgtatcaggacgtgaattgtaccgaggtgcccgtggcaatccacgcagatcagctgacccctacatggcgggtgtactctaccggcagcaacgtgttccagacaagagccggatgcctgatcggagcagagcacgtgaacaatagctatgagtgcgacatccctatcggcgccggcatctgtgccagctaccagacccagacaaactccccatctggagcaggctccgtggccagccagtccatcatcgcctataccatgagcctgggcgccgagaacagcgtggcctactccaacaattctatcgccatccctaccaacttcacaatcagcgtgaccacagagatcctgccagtgtctatgaccaagacaagcgtggactgcacaatgtatatctgtggcgatagcaccgagtgctccaacctgctgctgcagtacggctccttttgtacccagctgaatagagccctgacaggcatcgccgtggagcaggataagaacacacaggaggtgttcgcccaggtgaagcagatctacaagaccccacccatcaaggactttggcggcttcaacttcagccagatcctgcctgatccaagcaagccctccaagaggtcttttatcgaggacctgctgttcaacaaggtgaccctggccgatgccggcttcatcaagcagtatggagattgcctgggagacatcgcagcccgcgacctgatctgtgcccagaagtttaatggcctgaccgtgctgcctccactgctgacagatgagatgatcgcccagtacacatcttcactgctggccggcaccatcacaagcggatggaccttcggcgcaggagccgccctgcagatcccttttgccatgcagatggcctataggttcaacggcatcggcgtgacccagaatgtgctgtacgagaaccagaagctgatcgccaatcagtttaacagcgccatcggcaagatccaggactctctgtcctctacagccagcgccctgggcaagctgcaggatgtggtgaatcagaacgcccaggccctgaataccctggtgaagcagctgagctccaacttcggcgccatctctagcgtgctgaatgacatcctgagccggctggacccccctgaggcagaggtgcagatcgacaggctgatcacaggccgcctgcagagcctgcagacctacgtgacacagcagctgatcagggcagcagagatcagagcctccgccaatctggccgccaccaagatgagcgagtgcgtgctgggacagtccaagagggtggacttttgtggcaagggctatcacctgatgtctttcccacagagcgcccctcacggcgtggtgtttctgcacgtgacctacgtgccagcccaggagaagaacttcaccacagcaccagccatctgccacgatggaaaggcacactttcctagggagggcgtgttcgtgtctaacggcacccactggtttgtgacacagcgcaatttctacgagccacagatcatcaccacagacaatacattcgtgagcggcaactgtgatgtggtgatcggcatcgtgaacaataccgtgtatgatccactgcagcccgagctggactcctttaaggaggagctggataagtacttcaagaatcacacctctcccgacgtggatctgggcgacatctccggcatcaatgcctctgtggtgaacatccagaaggagatcgaccggctgaacgaggtggccaagaatctgaacgagagcctgatcgatctgcaggagctgggcaagtatgagcagtacatcaagggctctggcagagagaacctgtatttccagggaggaggaggcagcggatacatccctgaggcaccaagggacggacaggcctacgtgcgcaaggatggcgagtgggtgctgctgtccacctttctgggccatcatcaccaccaccaccaccactga

SEQ ID NO: 1542 - DNA, 3846 bp, Artificial Sequence
  Description of Artificial Sequence: Synthetic polynucleotide
atgggcatcctgccaagcccaggaatgcccgccctgctgtctctggtgagcctgctgtccgtgctgctgatgggatgcgtggcagagacaggcacacagtgcgtgaacctgaccacaaggacccagctgccccctgcctataccaattctttcacacggggcgtgtactatcccgacaaggtgtttagaagctccgtgctgcactccacacaggatctgtttctgcctttcttttctaacgtgacctggttccacgccatccacgtgtccggcaccaatggcacaaagcggttcgacaatcccgtgctgccttttaacgatggcgtgtacttcgccagcaccgagaagtccaacatcatcagaggctggatctttggcaccacactggactctaagacacagagcctgctgatcgtgaacaatgccaccaacgtggtgatcaaggtgtgcgagttccagttttgtaatgatccattcctgggcgtgtactatcacaagaacaataagtcctggatggagtctgagtttcgcgtgtattctagcgccaacaattgcacatttgagtacgtgagccagcccttcctgatggacctggagggcaagcagggcaatttcaagaacctgagggagttcgtgtttaagaatatcgatggctacttcaagatctacagcaagcacaccccaatcaacctggtgcgcgacctgccacagggattctccgccctggagccactggtggatctgcccatcggcatcaacatcacccggtttcagacactgctggccctgcacagatcctacctgacaccaggcgactcctctagcggatggaccgcaggagctgccgcctactatgtgggctatctgcagccccggaccttcctgctgaagtacaacgagaatggcaccatcacagacgcagtggattgcgccctggaccccctgtctgagacaaagtgtacactgaagagctttaccgtggagaagggcatctatcagacaagcaatttcagggtgcagcctaccgagtccatcgtgcgctttcccaatatcacaaacctgtgcccttttggcgaggtgttcaacgccaccagattcgccagcgtgtacgcctggaatcggaagagaatctccaactgcgtggccgactattctgtgctgtacaactccgcctctttcagcacctttaagtgctatggcgtgtctcccacaaagctgaatgatctgtgctttaccaacgtgtacgccgatagcttcgtgatcaggggagacgaagtgagacagatcgcaccaggacagacaggaaagatcgcagactacaattataagctgcctgacgatttcaccggctgcgtgatcgcctggaactccaacaatctggattctaaagtgggcggcaactacaattatctgtacaggctgtttcgcaagtccaatctgaagccattcgagcgggacatctccacagagatctaccaggccggctctaccccctgcaatggcgtggagggctttaactgttatttccctctgcagtcttacggcttccagccaacaaacggcgtgggctatcagccctacagagtggtggtgctgtcctttgagctgctgcacgcaccagcaacagtgtgcggcccaaagaagtctaccaatctggtgaagaacaagtgcgtgaacttcaacttcaacggactgaccggcacaggcgtgctgaccgagagcaataagaagttcctgccttttcagcagttcggcagggacatcgcagataccacagacgccgtgcgcgaccctcagaccctggagatcctggacatcacaccatgcagcttcggcggcgtgtccgtgatcacaccaggcaccaatacatccaaccaggtggccgtgctgtatcaggacgtgaattgtaccgaggtgccctcggcaatccacgcagatcagctgacccctacatggcgggtgtactctaccggcagcaacgtgttccagacaagagccggatgcctgatcggagcagagcacgtgaacaatagctatgagtgcgacatccctatcggcgccggcatctgtgccagctaccagacccagacaaactccccatctggagcaggctccgtggccagccagtccatcatcgcctataccatgagcctgggcgccgagaacagcgtggcctactccaacaattctatcgccatccctaccaacttcacaatcagcgtgaccacagagatcctgccagtgtctatgaccaagacaagcgtggactgcacaatgtatatctgtggcgatagcaccgagtgctccaacctgctgctgcagtacggctccttttgtacccagctgaatagagccctgacaggcatcgccgtggagcaggataagaacacacaggaggtgttcgcccaggtgaagcagatctacaagaccccacccatcaaggactttggcggcttcaacttcagccagatcctgcctgatccaagcaagccctccaagaggtcttttatcgaggacctgctgttcaacaaggtgaccctggccgatgccggcttcatcaagcagtatggagattgcctgggagacatcgcagcccgcgacctgatctgtgcccagaagtttaatggcctgaccgtgctgcctccactgctgacagatgagatgatcgcccagtacacatctgccctgctggccggcaccatcacaagcggatggaccttcggcgcaggagccgccctgcagatcccttttgccatgcagatggcctataggttcaacggcatcggcgtgacccagaatgtgctgtacgagaaccagaagctgatcgccaatcagtttaacagcgccatcggcaagatccaggactctctgtcctctacagccagcgccctgggcaagctgcaggatgtggtgaatcagaacgcccaggccctgaataccctggtgaagcagctgagctccaacttcggcgccatctctagcgtgctgaatgacatcctgagccggctggacccccctgaggcagaggtgcagatcgacaggctgatcacaggccgcctgcagagcctgcagacctacgtgacacagcagctgatcagggcagcagagatcagagcctccgccaatctggccgccaccaagatgagcgagtgcgtgctgggacagtccaagagggtggacttttgtggcaagggctatcacctgatgtctttcccacagagcgcccctcacggcgtggtgtttctgcacgtgacctacgtgccagcccaggagaagaacttcaccacagcaccagccatctgccacgatggaaaggcacactttcctagggagggcgtgttcgtgtctaacggcacccactggtttgtgacacagcgcaatttctacgagccacagatcatcaccacagacaatacattcgtgagcggcaactgtgatgtggtgatcggcatcgtgaacaataccgtgtatgatccactgcagcccgagctggactcctttaaggaggagctggataagtacttcaagaatcacacctctcccgacgtggatctgggcgacatctccggcatcaatgcctctgtggtgaacatccagaaggagatcgaccggctgaacgaggtggccaagaatctgaacgagagcctgatcgatctgcaggagctgggcaagtatgagcagtacatcaagggctctggcagagagaacctgtatttccagggaggaggaggcagcggatacatccctgaggcaccaagggacggacaggcctacgtgcgcaaggatggcgagtgggtgctgctgtccacctttctgggccatcatcaccaccaccaccaccactga

SEQ ID NO: 1543 - DNA, 3846 bp, Artificial Sequence
  Description of Artificial Sequence: Synthetic polynucleotide
atgggcatcctgccaagcccaggaatgcccgccctgctgtctctggtgagcctgctgtccgtgctgctgatgggatgcgtggcagagacaggcacacagtgcgtgaacctgaccacaaggacccagctgccccctgcctataccaattctttcacacggggcgtgtactatcccgacaaggtgtttagaagctccgtgctgcactccacacaggatctgtttctgcctttcttttctaacgtgacctggttccacgccatccacgtgtccggcaccaatggcacaaagcggttcgacaatcccgtgctgccttttaacgatggcgtgtacttcgccgcgatagagaagtccaacatcatcagaggctggatctttggcaccacactggactctaagacacagagcctgctgatcgtgaacaatgccaccaacgtggtgatcaaggtgtgcgagttccagttttgtaatgatccattcctgggcgtgtactatcacaagaacaataagtcctggatggagtctgagtttcgcgtgtattctagcgccaacaattgcacatttgagtacgtgagccagcccttcctgatggacctggagggcaagcagggcaatttcaagaacctgagggagttcgtgtttaagaatatcgatggctacttcaagatctacagcaagcacaccccaatcaacctggtgcgcgacctgccacagggattctccgccctggagccactggtggatctgcccatcggcatcaacatcacccggtttcagacactgctggccctgcacagatcctacctgacaccaggcgactcctctagcggatggaccgcaggagctgccgcctactatgtgggctatctgcagccccggaccttcctgctgaagtacaacgagaatggcaccatcacagacgcagtggattgcgccctggaccccctgtctgagacaaagtgtacactgaagagctttaccgtggagaagggcatctatcagacaagcaatttcagggtgcagcctaccgagtccatcgtgcgctttcccaatatcacaaacctgtgcccttttggcgaggtgttcaacgccaccagattcgccagcgtgtacgcctggaatcggaagagaatctccaactgcgtggccgactattctgtgctgtacaactccgcctctttcagcacctttaagtgctatggcgtgtctcccacaaagctgaatgatctgtgctttaccaacgtgtacgccgatagcttcgtgatcaggggagacgaagtgagacagatcgcaccaggacagacaggaaagatcgcagactacaattataagctgcctgacgatttcaccggctgcgtgatcgcctggaactccaacaatctggattctaaagtgggcggcaactacaattatctgtacaggctgtttcgcaagtccaatctgaagccattcgagcgggacatctccacagagatctaccaggccggctctaccccctgcaatggcgtggagggctttaactgttatttccctctgcagtcttacggcttccagccaacaaacggcgtgggctatcagccctacagagtggtggtgctgtcctttgagctgctgcacgcaccagcaacagtgtgcggcccaaagaagtctaccaatctggtgaagaacaagtgcgtgaacttcaacttcaacggactgaccggcacaggcgtgctgaccgagagcaataagaagttcctgccttttcagcagttcggcagggacatctcagataccacagacgccgtgcgcgaccctcagaccctggagatcctggacatcacaccatgcagcttcggcggcgtgtccgtggtcacaccaggcaccaatacatccaaccaggtggccgtgctgtatcaggacgtgaattgtaccgaggtgcccgtggcaatccacgcagatcagctgacccctacatggcgggtgtactctaccggcagcaacgtgttccagacaagagccggatgcctgatcggagcagagcacgtgaacaatagctatgagtgcgacatccctatcggcgccggcatctgtgccagctaccagacccagacaaactccccatctggagcaggctccgtggccagccagtccatcatcgcctataccatgagcctgggcgccgagaacagcgtggcctactccaacaattctatctcaatccctaccaacttcacaatcagcgtgaccacagagatcctgccagtgtctatgaccaagacaagcgtggactgcacaatgtatatctgtggcgatagcaccgagtgctccaacctgctgctgcagtacggctccttttgtacccagctgaatagagccctgacaggcatcgccgtggaggaagataagaacacacaggaggtgttcgcccaggtgaagcagatctacaagaccccacccatcaaggactttggcggcttcaacttcagccagatcctgcctgatccaagcaagccctccaagaggtcttttatcgaggacctgctgttcaacaaggtgaccctggccgatgccggcttcatcaagcagtatggagattgcctgggagacatcgcagcccgcgacctgatctgtgcccagaagtttaatggcctgaccgtgctgcctccactgctgacagatgagatgatcgcccagtacacatcttcactgctggccggcaccatcacagctggatggaccttcggcgcaggagccgccctgcagatcccttttgccatgcagatggcctataggttcaacggcatcggcgtgacccagaatgtgctgtacgagaaccagaagctgatcgccaatcagtttaacagcgccatcggcaagatccaggactctctgtcctctacagccagcgccctgggcaagctgcaggatgtggtgaatcagaacgcccaggccctgaataccctggtgaagcagctgagctccaacttcggcgccatctctagcgtgctgaatgacatcctgagccggctggacccccctgaggcagaggtgcagatcgacaggctgatcacaggccgcctgcagagcctgcagacctacgtgacacagcagctgatcagggcagcagagatcagagcctccgccaatctggccgccaccaagatgagcgagtgcgtgaaaggacagtccaagagggtggacttttgtggcaagggctatcacctgatgtctttcccacagagcgcccctcacggcatagtgtttctgcacgtgacctacgtgccagcccaggagaagaacttcaccacagcaccagccatctgccacgatggaaaggcacactttcctagggagggcgtgttcgtgtctaacggcacccactggtttgtgacacagcgcaatttctacgagccacagatcatcaccacagacaatacattcgtgagcggcaactgtgatgtggtgatcggcatcgtgaacaataccgtgtatgatccactgcagcccgagctggactcctttaaggaggagctggataagtacttcaagaatcacacctctcccgacgtggatctgggcgacatctccggcatcaatgcctctgtggtgaacatccagaaggagatcgaccggctgaacgaggtggccaagaatctgaacgagagcctgatcgatctgcaggagctgggcaagtatgagcagtacatcaagggctctggcagagagaacctgtatttccagggaggaggaggcagcggatacatccctgaggcaccaagggacggacaggcctacgtgcgcaaggatggcgagtgggtgctgctgtccacctttctgggccatcatcaccaccaccaccaccactga

SEQ ID NO: 1544 - DNA, 3846 bp, Artificial Sequence
  Description of Artificial Sequence: Synthetic polynucleotide
atgggcatcctgccaagcccaggaatgcccgccctgctgtctctggtgagcctgctgtccgtgctgctgatgggatgcgtggcagagacaggcacacagtgcgtgaacctgaccacaaggacccagctgccccctgcctataccaattctttcacacggggcgtgtactatcccgacaaggtgtttagaagctccgtgctgcactccacacaggatctgtttctgcctttcttttctaacgtgacctggttccacgccatccacgtgtccggcaccaatggcacaaagcggttcgacaatcccgtgctgccttttaacgatggcgtgtacttcgccagcaccgagaagtccaacatcatcagaggctggatctttggcaccacactggactctaagacacagagcctgctgatcgtgaacaatgccaccaacgtggtgatcaaggtgtgcgagttccagttttgtaatgatccattcctgggcgtgtactatcacaagaacaataagtcctggatggagtctgagtttcgcgtgtattctagcgccaacaattgcacatttgagtacgtgagccagcccttcctgatggacctggagggcaagcagggcaatttcaagaacctgagggagttcgtgtttaagaatatcgatggctacttcaagatctacagcaagcacaccccaatcaacctggtgcgcgacctgccacagggattctccgccctggagccactggtggatctgcccatcggcatcaacatcacccggtttcagacactgctggccctgcacagatcctacctgacaccaggcgactcctctagcggatggaccgcaggagctgccgcctactatgtgggctatctgcagccccggaccttcctgctgaagtacaacgagaatggcaccatcacagacgcagtggattgcgccctggaccccctgtctgagacaaagtgtacactgaagagctttaccgtggagaagggcatctatcagacaagcaatttcagggtgcagcctaccgagtccatcgtgcgctttcccaatatcacaaacctgtgcccttttggcgaggtgttcaacgccaccagattcgccagcgtgtacgcctggaatcggaagagaatctccaactgcgtggccgactattctgtgctgtacaactccgcctctttcagcacctttaagtgctatggcgtgtctcccacaaagctgaatgatctgtgctttaccaacgtgtacgccgatagcttcgtgatcaggggagacgaagtgagacagatcgcaccaggacagacaggaaagatcgcagactacaattataagctgcctgacgatttcaccggctgcgtgatcgcctggaactccaacaatctggattctaaagtgggcggcaactacaattatctgtacaggctgtttcgcaagtccaatctgaagccattcgagcgggacatctccacagagatctaccaggccggctctaccccctgcaatggcgtggagggctttaactgttatttccctctgcagtcttacggcttccagccaacaaacggcgtgggctatcagccctacagagtggtggtgctgtcctttgagctgctgcacgcaccagcaacagtgtgcggcccaaagaagtctaccaatctggtgaagaacaagtgcgtgaacttcaacttcaacggactgaccggcacaggcgtgctgaccgagagcaataagaagttcctgccttttcagcagttcggcagggacatcgcagataccacagacgccgtgcgcgaccctcagaccctggagatcctggacatcacaccatgcagcttcggcggcgtgtccgtgatcacaccaggcaccaatacatccaaccaggtggccgtgctgtatcaggacgtgaattgtaccgaggtgcccgtggcaatccacgcagatcagctgacccctacatggcgggtgtactctaccggcagcaacgtgttccagacaagagccggatgcctgatcggagcagagcacgtgaacaatagctatgagtgcgacatccctatcggcgccggcatctgtgccagctaccagacccagacaaactccccatctggagcaggctccgtggccagccagtccatcatcgcctataccatgagcctgggcgccgagaacagcgtggcctactccaacaattctatcgccatccctaccaacttcacaatcagcgtgaccacagagatcctgccagtgtctatgaccaagacaagcgtggactgcacaatgtatatctgtggcgatagcaccgagtgctccaacctgctgagtcagtacggctccttttgtacccagctgaatagagccctgacaggcatcgccgtggagcaggataagaacacacaggaggtgttcgcccaggtgaagcagatctacaagaccccacccatcaaggactttggcggcttcaacttcagccagatcctgcctgatccaagcaagccctccaagaggtcttttatcgaggacctgctgttcaacaaggtgaccctggccgatgccggcttcatcaagcagtatggagattgcctgggagacatcgcagcccgcgacctgatctgtgcccagaagtttaatggcctgaccgtgctgcctccactgctgacagatgagatgatcgcccagtacacatctgccctgctggccggcaccatcacaagcggatggaccttcggcgcaggagccgccctgcagatcccttttgccatgcagatggcctataggttcaacggcatcggcgtgacccagaatgtgctgtacgagaaccagaagctgatcgccaatcagtttaacagcgccatcggcaagatccaggactctctgtcctctacagccagcgccctgggcaagctgcaggatgtggtgaatcagaacgcccaggccctgaataccctggtgaagcagctgagctccaacttcggcgccatctctagcgtgctgaatgacatcctgagccggctggacccccctgaggcagaggtgcagatcgacaggctgatcacaggccgcctgcagagcctgcagacctacgtgacacagcagctgatcagggcagcagagatcagagcctccgccaatctggccgccaccaagatgagcgagtgcgtgctgggacagtccaagagggtggacttttgtggcaagggctatcacctgatgtctttcccacagagcgcccctcacggcgtggtgtttctgcacgtgacctacgtgccagcccaggagaagaacttcaccacagcaccagccatctgccacgatggaaaggcacactttcctagggagggcgtgttcgtgtctaacggcacccactggtttgtgacacagcgcaatttctacgagccacagatcatcaccacagacaatacattcgtgagcggcaactgtgatgtggtgatcggcatcgtgaacaataccgtgtatgatccactgcagcccgagctggactcctttaaggaggagctggataagtacttcaagaatcacacctctcccgacgtggatctgggcgacatctccggcatcaatgcctctgtggtgaacatccagaaggagatcgaccggctgaacgaggtggccaagaatctgaacgagagcctgatcgatctgcaggagctgggcaagtatgagcagtacatcaagggctctggcagagagaacctgtatttccagggaggaggaggcagcggatacatccctgaggcaccaagggacggacaggcctacgtgcgcaaggatggcgagtgggtgctgctgtccacctttctgggccatcatcaccaccaccaccaccactga

SEQ ID NO: 1545 - DNA, 3846 bp, Artificial Sequence
  Description of Artificial Sequence: Synthetic polynucleotide
atgggcatcctgccaagcccaggaatgcccgccctgctgtctctggtgagcctgctgtccgtgctgctgatgggatgcgtggcagagacaggcacacagtgcgtgaacctgaccacaaggacccagctgccccctgcctataccaattctttcacacggggcgtgtactatcccgacaaggtgtttagaagctccgtgctgcactccacacaggatctgtttctgcctttcttttctaacgtgacctggttccacgccatccacgtgtccggcaccaatggcacaaagcggttcgacaatcccgtgctgccttttaacgatggcgtgtacttcgccagcaccgagaagtccaacatcatcagaggctggatctttggcaccacactggactctaagacacagagcctgctgatcgtgaacaatgccaccaacgtggtgatcaaggtgtgcgagttccagttttgtaatgatccattcctgggcgtgtactatcacaagaacaataagtcctggatggagtctgagtttcgcgtgtattctagcgccaacaattgcacatttgagtacgtgagccagcccttcctgatggacctggagggcaagcagggcaatttcaagaacctgagggagttcgtgtttaagaatatcgatggctacttcaagatctacagcaagcacaccccaatcaacctggtgcgcgacctgccacagggattctccgccctggagccactggtggatctgcccatcggcatcaacatcacccggtttcagacactgctggccctgcacagatcctacctgacaccaggcgactcctctagcggatggaccgcaggagctgccgcctactatgtgggctatctgcagccccggaccttcctgctgaagtacaacgagaatggcaccatcacagacgcagtggattgcgccctggaccccctgtctgagacaaagtgtacactgaagagctttaccgtggagaagggcatctatcagacaagcaatttcagggtgcagcctaccgagtccatcgtgcgctttcccaatatcacaaacctgtgcccttttggcgaggtgttcaacgccaccagattcgccagcgtgtacgcctggaatcggaagagaatctccaactgcgtggccgactattctgtgctgtacaactccgcctctttcagcacctttaagtgctatggcgtgtctcccacaaagctgaatgatctgtgctttaccaacgtgtacgccgatagcttcgtgatcaggggagacgaagtgagacagatcgcaccaggacagacaggaaagatcgcagactacaattataagctgcctgacgatttcaccggctgcgtgatcgcctggaactccaacaatctggattctaaagtgggcggcaactacaattatctgtacaggctgtttcgcaagtccaatctgaagccattcgagcgggacatctccacagagatctaccaggccggctctaccccctgcaatggcgtggagggctttaactgttatttccctctgcagtcttacggcttccagccaacaaacggcgtgggctatcagccctacagagtggtggtgctgtcctttgagctgctgcacgcaccagcaacagtgtgcggcccaaagaagtctaccaatctggtgaagaacaagtgcgtgaacttcaacttcaacggactgaccggcacaggcgtgctgaccgagagcaataagaagttcctgccttttcagcagttcggcagggacatcgcagataccacagacgccgtgcgcgaccctcagaccctggagatcctggacatcacaccatgcagcttcggcggcgtgtccgtgatcacaccaggcaccaatacatccaaccaggtggccgtgctgtatcaggacgtgaattgtaccgaggtgcccgtggcaatccacgcagatcagctgacccctacatggcgggtgtactctaccggcagcaacgtgttccagacaagagccggatgcctgatcggagcagagcacgtgaacaatagctatgagtgcgacatccctatcggcgccggcatctgtgccagctaccagacccagacaaactccccatctggagcaggctccgtggccagccagtccatcatcgcctataccatgagcctgggcgccgagaacagcgtggcctactccaacaattctatcgccatccctaccaacttcacaatcagcgtgaccacagagatcctgccagtgtctatgaccaagacaagcgtggactgcacaatgtatatctgtggcgatagcaccgagtgctccaacctgctgctgcagtacggctccttttgtacccagctgaatagagccctgagtggcatcgccgtggagcaggataagaacacacaggaggtgttcgcccaggtgaagcagatctacaagaccccacccatcaaggactttggcggcttcaacttcagccagatcctgcctgatccaagcaagccctccaagaggtcttttatcgaggacctgctgttcaacaaggtgaccctggccgatgccggcttcatcaagcagtatggagattgcctgggagacatcgcagcccgcgacctgatctgtgcccagaagtttaatggcctgaccgtgctgcctccactgctgacagatgagatgatcgcccagtacacatctgccctgctggccggcaccatcacaagcggatggaccttcggcgcaggagccgccctgcagatcccttttgccatgcagatggcctataggttcaacggcatcggcgtgacccagaatgtgctgtacgagaaccagaagctgatcgccaatcagtttaacagcgccatcggcaagatccaggactctctgtcctctacagccagcgccctgggcaagctgcaggatgtggtgaatcagaacgcccaggccctgaataccctggtgaagcagctgagctccaacttcggcgccatctctagcgtgctgaatgacatcctgagccggctggacccccctgaggcagaggtgcagatcgacaggctgatcacaggccgcctgcagagcctgcagacctacgtgacacagcagctgatcagggcagcagagatcagagcctccgccaatctggccgccaccaagatgagcgagtgcgtgctgggacagtccaagagggtggacttttgtggcaagggctatcacctgatgtctttcccacagagcgcccctcacggcgtggtgtttctgcacgtgacctacgtgccagcccaggagaagaacttcaccacagcaccagccatctgccacgatggaaaggcacactttcctagggagggcgtgttcgtgtctaacggcacccactggtttgtgacacagcgcaatttctacgagccacagatcatcaccacagacaatacattcgtgagcggcaactgtgatgtggtgatcggcatcgtgaacaataccgtgtatgatccactgcagcccgagctggactcctttaaggaggagctggataagtacttcaagaatcacacctctcccgacgtggatctgggcgacatctccggcatcaatgcctctgtggtgaacatccagaaggagatcgaccggctgaacgaggtggccaagaatctgaacgagagcctgatcgatctgcaggagctgggcaagtatgagcagtacatcaagggctctggcagagagaacctgtatttccagggaggaggaggcagcggatacatccctgaggcaccaagggacggacaggcctacgtgcgcaaggatggcgagtgggtgctgctgtccacctttctgggccatcatcaccaccaccaccaccactga

SEQ ID NO: 1546 - DNA, 3846 bp, Artificial Sequence
  Description of Artificial Sequence: Synthetic polynucleotide
atgggcatcctgccaagcccaggaatgcccgccctgctgtctctggtgagcctgctgtccgtgctgctgatgggatgcgtggcagagacaggcacacagtgcgtgaacctgaccacaaggacccagctgccccctgcctataccaattctttcacacggggcgtgtactatcccgacaagatatttagaagctccgtgctgcacttgacacaggatctgtttctgcctttcttttctaacgtgacctggttccacgccatccacgtgtccggcaccaatggcacaaagcggttcgacaatcccgtgctgccttttaacgatggcgtgtacttcgccgctaccgagaagtccaacatcatcagaggctggatctttggcaccacactggactctaagacacagagcctgctgatcgtgaacaatgccaccaacgtggtgatcaaggtgtgcaatttccagttttgtaatgatccattcctgggcgtgtactatcacaagaacaataagtcctggatggagtctgagtttcgcgtgtattctagcgccaacaattgcacatttgagtacgtgagccagcccttcctgatggacctggagggcaagcagggcaatttcaagaacctgagggagttcgtgtttaagaatatcgatggctacttcaagatctacagcaagtataccccaatcaacctggtgcgcgacctgccacagggattctccgccctggagccactggtgaaactgcccatcggcatcaacatcacccggtttcagacactgctggccctgcacagatcctacctgacaccaggcgactcctctagcggatggaccgcaggagctgccgcctactatgtgggctatctgcagccccggaccttcctgctgaagtacaacgagaatggcaccatcacagacgcagtggattgcgccctggaccccctgtctgagacaaagtgtacactgaagagctttaccgtggagaagggcatctatcagacaagcaatttcagggtgcagcctaccgagtccatcgtgcgctttcccaatatcacaaacctgtgcccttttggcgaggtgttcaacgccaccagattcgccagcgtgtacgcctggaatcggaagagaatctccaactgcgtggccgactattctgtgctgtacaactccgcctctttcagcacctttaagtgctatggcgtgtctcccacaaagctgaatgatctgtgctttaccaacgtgtacgccgatagcttcgtgatcaggggagacgaagtgagacagatcgcaccaggacagacaggaaagatcgcagactacaattataagctgcctgacgatttcaccggctgcgtgatcgcctggaactccaacaatctggattctaaagtgggcggcaactacaattatctgtacaggctgtttcgcaagtccaatctgaagccattcgagcgggacatctccacagagatctaccaggccggctctaccccctgcaatggcgtggagggctttaactgttatttccctctgcagtcttacggcttccagccaacaaacggcgtgggctatcagccctacagagtggtggtgctgtcctttgagctgctgcacgcaccagcaacagtgtgcggcccaaagaagtctaccaatctggtgaagaacaagtgcgtgaacttcaacttcaacggactgaccggcacaggcgtgctgaccgagagcaataagaagttcctgccttttcagcagttcggcagggacatctcagataccacagacgccgtgcgcgaccctcagaccctggagatcctggacatcacaccatgcagcttcggcggcgtgtccgtgatcacaccaggcaccaatacatccaaccaggtggccgtgctgtatcaggacgtgaattgtaccgatgtgcccgtggcaatccacgcagatcagctgacccctacatggcgggtgtactctaccggcagcaacgtgttccagacacaagccggatgcctgatcggagcagagcacgtgaacaatagctatgagtgcgacatccctatcggcgccggcatctgtgccagctaccagacccagacaaactccccatctggagcaggctccgtggccagccagtccatcgtagcctataccatgagcctgggcgccgagaacagcgtggcctactccaacaattctatcgccatccctaccaacttcacaatcagcgtgaccacagagatcctgccagtgtctatgaccaagacaagcgtggactgcacaatgtatatctgtggcgatagcaccgagtgctccaacctgctgctgcagtacggctccttttgtacccagctgaatagagccctgacaggcatcgccgtggagcaggataagaacacacaggaggtgttcgcccaggtgaagcagatctacaagaccccacccatcaaggactttggcggcttcaacttcagccagatcctgcctgatccaagcaagccctccaagaggtcttttatcgaggacctgctgttcaacaaggtgaccctggccgatgccggcttcatcaagcagtatggagattgcctgggagacatcgcagcccgcgacctgatctgtgcccagaagtttaatggcctgaccgtgctgcctccactgctgacagatgagatgatcgcccagtacacagctgccctgctggccggcaccgcgacagctggatggaccttcggcgcaggagccgccctgcagatcccttttgccatgcagatggcctataggttcaacggcatcggcgtgacccagaatgtgctgtacgagaaccagaagctgatcgccaatcagtttaacagcgccatcggcaagatccaggactctctgtcctctacagccagcgccctgggcaagctgcaggatgtggtgaatcagaacgcccaggccctgaataccctggtgaagcagctgagctccaacttcggcgccatctctagcgtgctgaatgacatcctgagccggctggacccccctgaggcagaggtgcagatcgacaggctgatcacaggccgcctgcagagcctgcagacctacgtgacacagcagctgatcagggcagcagagatcagagcctccgccaatctggccgccaccaagatgagcgagtgcgtgctgggacagtccaagagggtggacttttgtggcaagggctatcacctgatgtctttcccacagagcgcccctcacggcgtggtgtttctgcacgtgacctacgtgccagcccaggagaagaacttcaccacagcaccagccatctgccacgatggaaaggcacactttcctagggagggcgtgttcgtgtctaacggcacccactggtttgtgacacagcgcaatttctacgagccacagatcatcaccacagacaatacattcgtgagcggcaactgtgatgtggtgatcggcatcgtgaacaataccgtgtatgatccactgcagcccgagctggactcctttaaggaggagctggataagtacttcaagaatcacacctctcccgacgtggatctgggcgacatctccggcatcaatgcctctgtggtgaacatccagaaggagatcgaccggctgaacgaggtggccaagaatctgaacgagagcctgatcgatctgcaggagctgggcaagtatgagcagtacatcaagggctctggcagagagaacctgtatttccagggaggaggaggcagcggatacatccctgaggcaccaagggacggacaggcctacgtgcgcaaggatggcgagtgggtgctgctgtccacctttctgggccatcatcaccaccaccaccaccactga

SEQ ID NO: 1547 - DNA, 3846 bp, Artificial Sequence
  Description of Artificial Sequence: Synthetic polynucleotide
atgggcatcctgccaagcccaggaatgcccgccctgctgtctctggtgagcctgctgtccgtgctgctgatgggatgcgtggcagagacaggcacacagtgcgtgaacctgaccacaaggacccagctgccccctgcctataccaattctttcacacggggcgtgtactatcccgacaaggtgtttagaagctccgtgctgcactccacacaggatctgtttctgcctttcttttctaacgtgacctggttccacgccatccacgtgtccggcaccaatggcacaaagcggttcgacaatcccgtgctgccttttaacgatggcgtgtacttcgccagcaccgagaagtccaacatcatcagaggctggatctttggcaccacactggactctaagacacagagcctgctgatcgtgaacaatgccaccaacgtggtgatcaaggtgtgcgagttccagttttgtaatgatccattcctgggcgtgtactatcacaagaacaataagtcctggatggagtctgagtttcgcgtgtattctagcgccaacaattgcacatttgagtacgtgagccagcccttcctgatggacctggagggcaagcagggcaatttcaagaacctgagggagttcgtgtttaagaatatcgatggctacttcaagatctacagcaagcacaccccaatcaacctggtgcgcgacctgccacagggattctccgccctggagccactggtggatctgcccatcggcatcaacatcacccggtttcagacactgctggccctgcacagatcctacctgacaccaggcgactcctctagcggatggaccgcaggagctgccgcctactatgtgggctatctgcagccccggaccttcctgctgaagtacaacgagaatggcaccatcacagacgcagtggattgcgccctggaccccctgtctgagacaaagtgtacactgaagagctttaccgtggagaagggcatctatcagacaagcaatttcagggtgcagcctaccgagtccatcgtgcgctttcccaatatcacaaacctgtgcccttttggcgaggtgttcaacgccaccagattcgccagcgtgtacgcctggaatcggaagagaatctccaactgcgtggccgactattctgtgctgtacaactccgcctctttcagcacctttaagtgctatggcgtgtctcccacaaagctgaatgatctgtgctttaccaacgtgtacgccgatagcttcgtgatcaggggagacgaagtgagacagatcgcaccaggacagacaggaaagatcgcagactacaattataagctgcctgacgatttcaccggctgcgtgatcgcctggaactccaacaatctggattctaaagtgggcggcaactacaattatctgtacaggctgtttcgcaagtccaatctgaagccattcgagcgggacatctccacagagatctaccaggccggctctaccccctgcaatggcgtggagggctttaactgttatttccctctgcagtcttacggcttccagccaacaaacggcgtgggctatcagccctacagagtggtggtgctgtcctttgagctgctgcacgcaccagcaacagtgtgcggcccaaagaagtctaccaatctggtgaagaacaagtgcgtgaacttcaacttcaacggactgaccggcacaggcgtgctgaccgagagcaataagaagttcctgccttttcagcagttcggcagggacatcgcagatatgacagacgccgtgcgcgaccctcagaccctggagatcctggacatcacaccatgcagcttcggcggcgtgtccgtgatcacaccaggcaccaatacatccaaccaggtggccgtgctgtatcaggacgtgaattgtaccgaggtgcccgtggcaatccacgcagatcagctgacccctacatggcgggtgtactctaccggcagcaacgtgttccagacaagagccggatgcctgatcggagcagagcacgtgaacaatagctatgagtgcgacatccctatcggcgccggcatctgtgccagctaccagacccagacaaactccccatctggagcaggctccgtggccagccagtccatcatcgcctataccatgagcctgggcgccgagaacagcgtggcctactccaacaattctatcgccatccctaccaacttcacaatcagcgtgaccacagagatcctgccagtgtctatgaccaagacaagcgtggactgcacaatgtatatctgtggcgatagcaccgagtgctccaacctgctgctgcagtacggctccttttgtacccagctgaatagagccctgacaggcatcgccgtggagcaggataagaacacacaggaggtgttcgcccaggtgaagcagatctacaagaccccacccatcaaggactttggcggcttcaacttcagccagatcctgcctgatccaagcaagccctccaagaggtcttttatcgaggacctgctgttcaacaaggtgaccctggccgatgccggcttcatcaagcagtatggagattgcctgggagacatcgcagcccgcgacctgatctgtgcccagaagtttaatggcctgaccgtgctgcctccactgctgacagatgagatgatcgcccagtacacatctgccctgctggccggcaccatcacaagcggatggaccttcggcgcaggagccgccctgcagatcccttttgccatgcagatggcctataggttcaacggcatcggcgtgacccagaatgtgctgtacgagaaccagaagctgatcgccaatcagtttaacagcgccatcggcaagatccaggactctctgtcctctacagccagcgccctgggcaagctgcaggatgtggtgaatcagaacgcccaggccctgaataccctggtgaagcagctgagctccaacttcggcgccatctctagcgtgctgaatgacatcctgagccggctggacccccctgaggcagaggtgcagatcgacaggctgatcacaggccgcctgcagagcctgcagacctacgtgacacagcagctgatcagggcagcagagatcagagcctccgccaatctggccgccaccaagatgagcgagtgcgtgctgggacagtccaagagggtggacttttgtggcaagggctatcacctgatgtctttcccacagagcgcccctcacggcgtggtgtttctgcacgtgacctacgtgccagcccaggagaagaacttcaccacagcaccagccatctgccacgatggaaaggcacactttcctagggagggcgtgttcgtgtctaacggcacccactggtttgtgacacagcgcaatttctacgagccacagatcatcaccacagacaatacattcgtgagcggcaactgtgatgtggtgatcggcatcgtgaacaataccgtgtatgatccactgcagcccgagctggactcctttaaggaggagctggataagtacttcaagaatcacacctctcccgacgtggatctgggcgacatctccggcatcaatgcctctgtggtgaacatccagaaggagatcgaccggctgaacgaggtggccaagaatctgaacgagagcctgatcgatctgcaggagctgggcaagtatgagcagtacatcaagggctctggcagagagaacctgtatttccagggaggaggaggcagcggatacatccctgaggcaccaagggacggacaggcctacgtgcgcaaggatggcgagtgggtgctgctgtccacctttctgggccatcatcaccaccaccaccaccactga

SEQ ID NO: 1548 - DNA, 3846 bp, Artificial Sequence
  Description of Artificial Sequence: Synthetic polynucleotide
atgggcatcctgccaagcccaggaatgcccgccctgctgtctctggtgagcctgctgtccgtgctgctgatgggatgcgtggcagagacaggcacacagtgcgtgaacctgaccacaaggacccagctgccccctgcctataccaattctttcacacggggcgtgtactatcccgacaaggtgtttagaagctccgtgctgcactccacacaggatctgtttctgcctttcttttctaacgtgacctggttccacgccatccacgtgtccggcaccaatggcacaaagcggttcgacaatcccgtgctgccttttaacgatggcgtgtacttcgccagcaccgagaagtccaacatcatcagaggctggatctttggcaccacactggactctaagacacagagcctgctgatcgtgaacaatgccaccaacgtggtgatcaaggtgtgcgagttccagttttgtaatgatccattcctgggcgtgtactatcacaagaacaataagtcctggatggagtctgagtttcgcgtgtattctagcgccaacaattgcacatttgagtacgtgagccagcccttcctgatggacctggagggcaagcagggcaatttcaagaacctgagggagttcgtgtttaagaatatcgatggctacttcaagatctacagcaagcacaccccaatcaacctggtgcgcgacctgccacagggattctccgccctggagccactggtggatctgcccatcggcatcaacatcacccggtttcagacactgctggccctgcacagatcctacctgacaccaggcgactcctctagcggatggaccgcaggagctgccgcctactatgtgggctatctgcagccccggaccttcctgctgaagtacaacgagaatggcaccatcacagacgcagtggattgcgccctggaccccctgtctgagacaaagtgtacactgaagagctttaccgtggagaagggcatctatcagacaagcaatttcagggtgcagcctaccgagtccatcgtgcgctttcccaatatcacaaacctgtgcccttttggcgaggtgttcaacgccaccagattcgccagcgtgtacgcctggaatcggaagagaatctccaactgcgtggccgactattctgtgctgtacaactccgcctctttcagcacctttaagtgctatggcgtgtctcccacaaagctgaatgatctgtgctttaccaacgtgtacgccgatagcttcgtgatcaggggagacgaagtgagacagatcgcaccaggacagacaggaaagatcgcagactacaattataagctgcctgacgatttcaccggctgcgtgatcgcctggaactccaacaatctggattctaaagtgggcggcaactacaattatctgtacaggctgtttcgcaagtccaatctgaagccattcgagcgggacatctccacagagatctaccaggccggctctaccccctgcaatggcgtggagggctttaactgttatttccctctgcagtcttacggcttccagccaacaaacggcgtgggctatcagccctacagagtggtggtgctgtcctttgagctgctgcacgcaccagcaacagtgtgcggcccaaagaagtctaccaatctggtgaagaacaagtgcgtgaacttcaacttcaacggactgaccggcacaggcgtgctgacccctagcaataagaagttcctgccttttcagcagttcggcagggacatcgcagataccacagacgccgtgcgcgaccctcagaccctggagatcctggacatcacaccatgcagcttcggcggcgtgtccgtgatcacaccaggcaccaatacatccaaccaggtggccgtgctgtatcaggacgtgaattgtaccgaggtgcccgtggcaatccacgcagatcagctgacccctacatggcgggtgtactctaccggcagcaacgtgttccagacaagagccggatgcctgatcggagcagagcacgtgaacaatagctatgagtgcgacatccctatcggcgccggcatctgtgccagctaccagacccagacaaactccccatctggagcaggctccgtggccagccagtccatcatcgcctataccatgagcctgggcgccgagaacagcgtggcctactccaacaattctatcgccatccctaccaacttcacaatcagcgtgaccacagagatcctgccagtgtctatgaccaagacaagcgtggactgcacaatgtatatctgtggcgatagcaccgagtgctccaacctgctgctgcagtacggctccttttgtacccagctgaatagagccctgacaggcatcgccgtggagcaggataagaacacacaggaggtgttcgcccaggtgaagcagatctacaagaccccacccatcaaggactttggcggcttcaacttcagccagatcctgcctgatccaagcaagccctccaagaggtcttttatcgaggacctgctgttcaacaaggtgaccctggccgatgccggcttcatcaagcagtatggagattgcctgggagacatcgcagcccgcgacctgatctgtgcccagaagtttaatggcctgaccgtgctgcctccactgctgacagatgagatgatcgcccagtacacatctgccctgctggccggcaccatcacaagcggatggaccttcggcgcaggagccgccctgcagatcccttttgccatgcagatggcctataggttcaacggcatcggcgtgacccagaatgtgctgtacgagaaccagaagctgatcgccaatcagtttaacagcgccatcggcaagatccaggactctctgtcctctacagccagcgccctgggcaagctgcaggatgtggtgaatcagaacgcccaggccctgaataccctggtgaagcagctgagctccaacttcggcgccatctctagcgtgctgaatgacatcctgagccggctggacccccctgaggcagaggtgcagatcgacaggctgatcacaggccgcctgcagagcctgcagacctacgtgacacagcagctgatcagggcagcagagatcagagcctccgccaatctggccgccaccaagatgagcgagtgcgtgctgggacagtccaagagggtggacttttgtggcaagggctatcacctgatgtctttcccacagagcgcccctcacggcgtggtgtttctgcacgtgacctacgtgccagcccaggagaagaacttcaccacagcaccagccatctgccacgatggaaaggcacactttcctagggagggcgtgttcgtgtctaacggcacccactggtttgtgacacagcgcaatttctacgagccacagatcatcaccacagacaatacattcgtgagcggcaactgtgatgtggtgatcggcatcgtgaacaataccgtgtatgatccactgcagcccgagctggactcctttaaggaggagctggataagtacttcaagaatcacacctctcccgacgtggatctgggcgacatctccggcatcaatgcctctgtggtgaacatccagaaggagatcgaccggctgaacgaggtggccaagaatctgaacgagagcctgatcgatctgcaggagctgggcaagtatgagcagtacatcaagggctctggcagagagaacctgtatttccagggaggaggaggcagcggatacatccctgaggcaccaagggacggacaggcctacgtgcgcaaggatggcgagtgggtgctgctgtccacctttctgggccatcatcaccaccaccaccaccactga

SEQ ID NO: 1549 - DNA, 3846 bp, Artificial Sequence
  Description of Artificial Sequence: Synthetic polynucleotide
atgggcatcctgccaagcccaggaatgcccgccctgctgtctctggtgagcctgctgtccgtgctgctgatgggatgcgtggcagagacaggcacacagtgcgtgaacctgaccacaaggacccagctgccccctgcctataccaattctttcacacggggcgtgtactatcccgacaaggtgtttagaagctccgtgctgcactccacacaggatctgtttctgcctttcttttctaacgtgacctggttccacgccatccacgtgtccggcaccaatggcacaaagcggttcgacaatcccgtgctgccttttaacgatggcgtgtacttcgccagcaccgagaagtccaacatcatcagaggctggatctttggcaccacactggactctaagacacagagcctgctgatcgtgaacaatgccaccaacgtggtgatcaaggtgtgcgagttccagttttgtaatgatccattcctgggcgtgtactatcacaagaacaataagtcctggatggagtctgagtttcgcgtgtattctagcgccaacaattgcacatttgagtacgtgagccagcccttcctgatggacctggagggcaagcagggcaatttcaagaacctgagggagttcgtgtttaagaatatcgatggctacttcaagatctacagcaagcacaccccaatcaacctggtgcgcgacctgccacagggattctccgccctggagccactggtggatctgcccatcggcatcaacatcacccggtttcagacactgctggccctgcacagatcctacctgacaccaggcgactcctctagcggatggaccgcaggagctgccgcctactatgtgggctatctgcagccccggaccttcctgctgaagtacaacgagaatggcaccatcacagacgcagtggattgcgccctggaccccctgtctgagacaaagtgtacactgaagagctttaccgtggagaagggcatctatcagacaagcaatttcagggtgcagcctaccgagtccatcgtgcgctttcccaatatcacaaacctgtgcccttttggcgaggtgttcaacgccaccagattcgccagcgtgtacgcctggaatcggaagagaatctccaactgcgtggccgactattctgtgctgtacaactccgcctctttcagcacctttaagtgctatggcgtgtctcccacaaagctgaatgatctgtgctttaccaacgtgtacgccgatagcttcgtgatcaggggagacgaagtgagacagatcgcaccaggacagacaggaaagatcgcagactacaattataagctgcctgacgatttcaccggctgcgtgatcgcctggaactccaacaatctggattctaaagtgggcggcaactacaattatctgtacaggctgtttcgcaagtccaatctgaagccattcgagcgggacatctccacagagatctaccaggccggctctaccccctgcaatggcgtggagggctttaactgttatttccctctgcagtcttacggcttccagccaacaaacggcgtgggctatcagccctacagagtggtggtgctgtcctttgagctgctgcacgcaccagcaacagtgtgcggcccaaagaagtctaccaatctggtgaagaacaagtgcgtgaacttcaacttcaacggactgaccggcacaggcgtgctgaccgagagcaataagaagttcctgccttttcagcagttcggcagggacatcgcagataccacagacgccgtgcgcgaccctcagaccctggagatcctggacatcacaccatgcagcttcggcggcgtgtccgtgatcacaccaggcaccaatacatccaaccaggtggccgtgctgtatcaggacgtgaattgtaccgaggtgcccgtggcaatccacgcagatcagctgacccctacatggcgggtgtactctaccggcagcaacgtgttccagacaagagccggatgcctgatcggagcagagcacgtgaacaatagctatgagtgcgacatccctatcggcgccggcatctgtgccagctaccagacccagacaaactccccatctggagcaggctccgtggccagccagtccatcgtagcctataccatgagcctgggcgccgagaacagcgtggcctactccaacaattctatcgccatccctaccaacttcacaatcagcgtgaccacagagatcctgccagtgtctatgaccaagacaagcgtggactgcacaatgtatatctgtggcgatagcaccgagtgctccaacctgctgctgcagtacggctccttttgtacccagctgaatagagccctgacaggcatcgccgtggagcaggataagaacacacaggaggtgttcgcccaggtgaagcagatctacaagaccccacccatcaaggactttggcggcttcaacttcagccagatcctgcctgatccaagcaagccctccaagaggtcttttatcgaggacctgctgttcaacaaggtgaccctggccgatgccggcttcatcaagcagtatggagattgcctgggagacatcgcagcccgcgacctgatctgtgcccagaagtttaatggcctgaccgtgctgcctccactgctgacagatgagatgatcgcccagtacacatctgccctgctggccggcaccatcacaagcggatggaccttcggcgcaggagccgccctgcagatcccttttgccatgcagatggcctataggttcaacggcatcggcgtgacccagaatgtgctgtacgagaaccagaagctgatcgccaatcagtttaacagcgccatcggcaagatccaggactctctgtcctctacagccagcgccctgggcaagctgcaggatgtggtgaatcagaacgcccaggccctgaataccctggtgaagcagctgagctccaacttcggcgccatctctagcgtgctgaatgacatcctgagccggctggacccccctgaggcagaggtgcagatcgacaggctgatcacaggccgcctgcagagcctgcagacctacgtgacacagcagctgatcagggcagcagagatcagagcctccgccaatctggccgccaccaagatgagcgagtgcgtgctgggacagtccaagagggtggacttttgtggcaagggctatcacctgatgtctttcccacagagcgcccctcacggcgtggtgtttctgcacgtgacctacgtgccagcccaggagaagaacttcaccacagcaccagccatctgccacgatggaaaggcacactttcctagggagggcgtgttcgtgtctaacggcacccactggtttgtgacacagcgcaatttctacgagccacagatcatcaccacagacaatacattcgtgagcggcaactgtgatgtggtgatcggcatcgtgaacaataccgtgtatgatccactgcagcccgagctggactcctttaaggaggagctggataagtacttcaagaatcacacctctcccgacgtggatctgggcgacatctccggcatcaatgcctctgtggtgaacatccagaaggagatcgaccggctgaacgaggtggccaagaatctgaacgagagcctgatcgatctgcaggagctgggcaagtatgagcagtacatcaagggctctggcagagagaacctgtatttccagggaggaggaggcagcggatacatccctgaggcaccaagggacggacaggcctacgtgcgcaaggatggcgagtgggtgctgctgtccacctttctgggccatcatcaccaccaccaccaccactga

SEQ ID NO: 1550 - DNA, 3846 bp, Artificial Sequence
  Description of Artificial Sequence: Synthetic polynucleotide
atgggcatcctgccaagcccaggaatgcccgccctgctgtctctggtgagcctgctgtccgtgctgctgatgggatgcgtggcagagacaggcacacagtgcgtgaacctgaccacaaggacccagctgccccctgcctataccaattctttcacacggggcgtgtactatcccgacaaggtgtttagaagctccgtgctgcactccacacaggatctgtttctgcctttcttttctaacgtgacctggttccacgccatccacgtgtccggcaccaatggcacaaagcggttcgacaatcccgtgctgccttttaacgatggcgtgtacttcgccagcaccgagaagtccaacatcatcagaggctggatctttggcaccacactggactctaagacacagagcctgctgatcgtgaacaatgccaccaacgtggtgatcaaggtgtgcgagttccagttttgtaatgatccattcctgggcgtgtactatcacaagaacaataagtcctggatggagtctgagtttcgcgtgtattctagcgccaacaattgcacatttgagtacgtgagccagcccttcctgatggacctgggtggcaagcagggcaatttcaagaacctgagggagttcgtgtttaagaatatcgatggctacttcaagatctacagcaagcacaccccaatcaacctggtgcgcgacctgccacagggattctccgccctggagccactggtggatctgcccatcggcatcaacatcacccggtttcagacactgctggccctgcacagatcctacctgacaccaggcgactcctctagcggatggaccgcaggagctgccgcctactatgtgggctatctgcagccccggaccttcctgctgaagtacaacgagaatggcaccatcacagacgcagtggattgcgccctggaccccctgtctgagacaaagtgtacactgaagagctttaccgtggagaagggcatctatcagacaagcaatttcagggtgcagcctaccgagtccatcgtgcgctttcccaatatcacaaacctgtgcccttttggcgaggtgttcaacgccaccagattcgccagcgtgtacgcctggaatcggaagagaatctccaactgcgtggccgactattctgtgctgtacaactccgcctctttcagcacctttaagtgctatggcgtgtctcccacaaagctgaatgatctgtgctttaccaacgtgtacgccgatagcttcgtgatcaggggagacgaagtgagacagatcgcaccaggacagacaggaaagatcgcagactacaattataagctgcctgacgatttcaccggctgcgtgatcgcctggaactccaacaatctggattctaaagtgggcggcaactacaattatctgtacaggctgtttcgcaagtccaatctgaagccattcgagcgggacatctccacagagatctaccaggccggctctaccccctgcaatggcgtggagggctttaactgttatttccctctgcagtcttacggcttccagccaacaaacggcgtgggctatcagccctacagagtggtggtgctgtcctttgagctgctgcacgcaccagcaacagtgtgcggcccaaagaagtctaccaatctggtgaagaacaagtgcgtgaacttcaacttcaacggactgaccggcacaggcgtgctgaccgagagcaataagaagttcctgccttttcagcagttcggcagggacatcgcagataccacagacgccgtgcgcgaccctcagaccctggagatcctggacatcacaccatgcagcttcggcggcgtgtccgtgatcacaccaggcaccaatacatccaaccaggtggccgtgctgtatcaggacgtgaattgtaccgaggtgcccgtggcaatccacgcagatcagctgacccctacatggcgggtgtactctaccggcagcaacgtgttccagacaagagccggatgcctgatcggagcagagcacgtgaacaatagctatgagtgcgacatccctatcggcgccggcatctgtgccagctaccagacccagacaaactccccatctggagcaggctccgtggccagccagtccatcatcgcctataccatgagcctgggcgccgagaacagcgtggcctactccaacaattctatcgccatccctaccaacttcacaatcagcgtgaccacagagatcctgccagtgtctatgaccaagacaagcgtggactgcacaatgtatatctgtggcgatagcaccgagtgctccaacctgctgctgcagtacggctccttttgtacccagctgaatagagccctgacaggcatcgccgtggagcaggataagaacacacaggaggtgttcgcccaggtgaagcagatctacaagaccccacccatcaaggactttggcggcttcaacttcagccagatcctgcctgatccaagcaagccctccaagaggtcttttatcgaggacctgctgttcaacaaggtgaccctggccgatgccggcttcatcaagcagtatggagattgcctgggagacatcgcagcccgcgacctgatctgtgcccagaagtttaatggcctgaccgtgctgcctccactgctgacagatgagatgatcgcccagtacacatctgccctgctggccggcaccatcacaagcggatggaccttcggcgcaggagccgccctgcagatcccttttgccatgcagatggcctataggttcaacggcatcggcgtgacccagaatgtgctgtacgagaaccagaagctgatcgccaatcagtttaacagcgccatcggcaagatccaggactctctgtcctctacagccagcgccctgggcaagctgcaggatgtggtgaatcagaacgcccaggccctgaataccctggtgaagcagctgagctccaacttcggcgccatctctagcgtgctgaatgacatcctgagccggctggacccccctgaggcagaggtgcagatcgacaggctgatcacaggccgcctgcagagcctgcagacctacgtgacacagcagctgatcagggcagcagagatcagagcctccgccaatctggccgccaccaagatgagcgagtgcgtgctgggacagtccaagagggtggacttttgtggcaagggctatcacctgatgtctttcccacagagcgcccctcacggcgtggtgtttctgcacgtgacctacgtgccagcccaggagaagaacttcaccacagcaccagccatctgccacgatggaaaggcacactttcctagggagggcgtgttcgtgtctaacggcacccactggtttgtgacacagcgcaatttctacgagccacagatcatcaccacagacaatacattcgtgagcggcaactgtgatgtggtgatcggcatcgtgaacaataccgtgtatgatccactgcagcccgagctggactcctttaaggaggagctggataagtacttcaagaatcacacctctcccgacgtggatctgggcgacatctccggcatcaatgcctctgtggtgaacatccagaaggagatcgaccggctgaacgaggtggccaagaatctgaacgagagcctgatcgatctgcaggagctgggcaagtatgagcagtacatcaagggctctggcagagagaacctgtatttccagggaggaggaggcagcggatacatccctgaggcaccaagggacggacaggcctacgtgcgcaaggatggcgagtgggtgctgctgtccacctttctgggccatcatcaccaccaccaccaccactga

SEQ ID NO: 1551 - DNA, 3846 bp, Artificial Sequence
  Description of Artificial Sequence: Synthetic polynucleotide
atgggcatcctgccaagcccaggaatgcccgccctgctgtctctggtgagcctgctgtccgtgctgctgatgggatgcgtggcagagacaggcacacagtgcgtgaacctgaccacaaggacccagctgccccctgcctataccaattctttcacacggggcgtgtactatcccgacaaggtgtttagaagctccgtgctgcactccacacaggatctgtttctgcctttcttttctaacgtgacctggttccacgccatccacgtgtccggcaccaatggcacaaagcggttcgacaatcccgtgctgccttttaacgatggcgtgtacttcgccagcaccgagaagtccaacatcatcagaggctggatctttggcaccacactggactctaagacacagagcctgctgatcgtgaacaatgccaccaacgtggtgatcaaggtgtgcgagttccagttttgtaatgatccattcctgggcgtgtactatcacaagaacaataagtcctggatggagtctgagtttcgcgtgtattctagcgccaacaattgcacatttgagtacgtgagccagcccttcctgatggacctggagggcaagcagggcaatttcaagaacctgagggagttcgtgtttaagaatatcgatggctacttcaagatctacagcaagcacaccccaatcaacctggtgcgcgacctgccacagggattctccgccctggagccactggtggatctgcccatcggcatcaacatcacccggtttcagacactgctggccctgcacagatcctacctgacaccaggcgactcctctagcggatggaccgcaggagctgccgcctactatgtgggctatctgcagccccggaccttcctgctgaagtacaacgagaatggcaccatcacagacgcagtggattgcgccctggaccccctgtctgagacaaagtgtacactgaagagctttaccgtggagaagggcatctatcagacaagcaatttcagggtgcagcctaccgagtccatcgtgcgctttcccaatatcacaaacctgtgcccttttggcgaggtgttcaacgccaccagattcgccagcgtgtacgcctggaatcggaagagaatctccaactgcgtggccgactattctgtgctgtacaactccgcctctttcagcacctttaagtgctatggcgtgtctcccacaaagctgaatgatctgtgctttaccaacgtgtacgccgatagcttcgtgatcaggggagacgaagtgagacagatcgcaccaggacagacaggaaagatcgcagactacaattataagctgcctgacgatttcaccggctgcgtgatcgcctggaactccaacaatctggattctaaagtgggcggcaactacaattatctgtacaggctgtttcgcaagtccaatctgaagccattcgagcgggacatctccacagagatctaccaggccggctctaccccctgcaatggcgtggagggctttaactgttatttccctctgcagtcttacggcttccagccaacaaacggcgtgggctatcagccctacagagtggtggtgctgtcctttgagctgctgcacgcaccagcaacagtgtgcggcccaaagaagtctaccaatctggtgaagaacaagtgcgtgaacttcaacttcaacggactgaccggcacaggcgtgctgaccgagagcaataagaagttcctgccttttcagcagttcggcagggacatcgcagataccacagacgccgtgcgcgaccctcagaccctggagatcctggacatcacaccatgcagcttcggcggcgtgtccgtgatcacaccaggcaccaatacatccaaccaggtggccgtgctgtatcaggacgtgaattgtaccgaggtgcccgtggcaatccacgcagatcagctgacccctacatggcgggtgtactctaccggcagcaacgtgttccagacaagagccggatgcctgatcggagcagagcacgtgaacaatagctatgagtgcgacatccctatcggcgccggcatctgtgccagctaccagacccagacaaactccccatctggagcaggctccgtggccagccagtccatcatcgcctataccatgagcctgggcgccgagaacagcgtggcctactccaacaattctatcgccatccctaccaacttcacaatcagcgtgaccacagagatcctgccagtgtctatgaccaagacaagcgtggactgcacaatgtatatctgtggcgatagcaccgagtgctccaacctgctgctgcagtacggctccttttgtacccagctgaatagagccctgacaggcatcgccgtggagcaggataagaacacacaggaggtgttcgcccaggtgaagcagatctacaagaccccacccatcaaggactttggcggcttcaacttcagccagatcctgcctgatccaagcaagccctccaagaggtcttttatcgaggacctgctgttcaacaaggtgaccctggccgatgccggcttcatcaagcagtatggagattgcctgggagacatcgcagcccgcgacctgatctgtgcccagaagtttaatggcctgatggtgctgcctccactgctgacagatgagatgatcgcccagtacacatctgccctgctggccggcaccatcacaagcggatggaccttcggcgcaggagccgccctgcagatcccttttgccatgcagatggcctataggttcaacggcatcggcgtgacccagaatgtgctgtacgagaaccagaagctgatcgccaatcagtttaacagcgccatcggcaagatccaggactctctgtcctctacagccagcgccctgggcaagctgcaggatgtggtgaatcagaacgcccaggccctgaataccctggtgaagcagctgagctccaacttcggcgccatctctagcgtgctgaatgacatcctgagccggctggacccccctgaggcagaggtgcagatcgacaggctgatcacaggccgcctgcagagcctgcagacctacgtgacacagcagctgatcagggcagcagagatcagagcctccgccaatctggccgccaccaagatgagcgagtgcgtgctgggacagtccaagagggtggacttttgtggcaagggctatcacctgatgtctttcccacagagcgcccctcacggcgtggtgtttctgcacgtgacctacgtgccagcccaggagaagaacttcaccacagcaccagccatctgccacgatggaaaggcacactttcctagggagggcgtgttcgtgtctaacggcacccactggtttgtgacacagcgcaatttctacgagccacagatcatcaccacagacaatacattcgtgagcggcaactgtgatgtggtgatcggcatcgtgaacaataccgtgtatgatccactgcagcccgagctggactcctttaaggaggagctggataagtacttcaagaatcacacctctcccgacgtggatctgggcgacatctccggcatcaatgcctctgtggtgaacatccagaaggagatcgaccggctgaacgaggtggccaagaatctgaacgagagcctgatcgatctgcaggagctgggcaagtatgagcagtacatcaagggctctggcagagagaacctgtatttccagggaggaggaggcagcggatacatccctgaggcaccaagggacggacaggcctacgtgcgcaaggatggcgagtgggtgctgctgtccacctttctgggccatcatcaccaccaccaccaccactga

SEQ ID NO: 1552 - DNA, 3846 bp, Artificial Sequence
  Description of Artificial Sequence: Synthetic polynucleotide
atgggcatcctgccaagcccaggaatgcccgccctgctgtctctggtgagcctgctgtccgtgctgctgatgggatgcgtggcagagacaggcacacagtgcgtgaacctgaccacaaggacccagctgccccctgcctataccaattctttcacacggggcgtgtactatcccgacaaggtgtttagaagctccgtgctgcactccacacaggatctgtttctgcctttcttttctaacgtgacctggttccacgccatccacgtgtccggcaccaatggcacaaagcggttcgacaatcccgtgctgccttttaacgatggcgtgtacttcgccagcaccgagaagtccaacatcatcagaggctggatctttggcaccacactggactctaagacacagagcctgctgatcgtgaacaatgccaccaacgtggtgatcaaggtgtgcgagttccagttttgtaatgatccattcctgggcgtgtactatcacaagaacaataagtcctggatggagtctgagtttcgcgtgtattctagcgccaacaattgcacatttgagtacgtgagccagcccttcctgatggacctggagggcaagcagggcaatttcaagaacctgagggagttcgtgtttaagaatatcgatggctacttcaagatctacagcaagcacaccccaatcaacctggtgcgcgacctgccacagggattctccgccctggagccactggtggatctgcccatcggcatcaacatcacccggtttcagacactgctggccctgcacagatcctacctgacaccaggcgactcctctagcggatggaccgcaggagctgccgcctactatgtgggctatctgcagccccggaccttcctgctgaagtacaacgagaatggcaccatcacagacgcagtggattgcgccctggaccccctgtctgagacaaagtgtacactgaagagctttaccgtggagaagggcatctatcagacaagcaatttcagggtgcagcctaccgagtccatcgtgcgctttcccaatatcacaaacctgtgcccttttggcgaggtgttcaacgccaccagattcgccagcgtgtacgcctggaatcggaagagaatctccaactgcgtggccgactattctgtgctgtacaactccgcctctttcagcacctttaagtgctatggcgtgtctcccacaaagctgaatgatctgtgctttaccaacgtgtacgccgatagcttcgtgatcaggggagacgaagtgagacagatcgcaccaggacagacaggaaagatcgcagactacaattataagctgcctgacgatttcaccggctgcgtgatcgcctggaactccaacaatctggattctaaagtgggcggcaactacaattatctgtacaggctgtttcgcaagtccaatctgaagccattcgagcgggacatctccacagagatctaccaggccggctctaccccctgcaatggcgtggagggctttaactgttatttccctctgcagtcttacggcttccagccaacaaacggcgtgggctatcagccctacagagtggtggtgctgtcctttgagctgctgcacgcaccagcaacagtgtgcggcccaaagaagtctaccaatctggtgaagaacaagtgcgtgaacttcaacttcaacggactgaccggcacaggcgtgctgaccgagagcaataagaagttcctgccttttcagcagttcggcagggacatcgcagataccacagacgccgtgcgcgaccctcagaccctggagatcctggacatcacaccatgcagcttcggcggcgtgtccgtgatcacaccaggcaccaatacatccaaccaggtggccgtgctgtatcaggacgtgaattgtaccgaggtgcccgtggcaatccacgcagatcagctgacccctacatggcgggtgtactctaccggcagcaacgtgttccagacaagagccggatgcctgatcggagcagagcacgtgaacaatagctatgagtgcgacatccctatcggcgccggcatctgtgccagctaccagacccagacaaactccccatctggagcaggctccgtggccagccagtccatcatcgcctataccatgagcctgggcgccgagaacagcgtggcctactccaacaattctatcgccatccctaccaacttcacaatcagcgtgaccacagagatcctgccagtgtctatgaccaagacaagcgtggactgcacaatgtatatctgtggcgatagcaccgagtgctccaacctgctgctgcagtacggctccttttgtacccagctgaatagagccctgacaggcatcgccgtggagcaggataagaacacacaggaggtgttcgcccaggtgaagcagatctacaagaccccacccatcaaggactttggcggcttcaacttcagccagatcctgcctgatccaagcaagccctccaagaggtcttttatcgaggacctgctgttcaacaaggtgaccctggccgatgccggcttcatcaagcagtatggagattgcctgggagacatcgcagcccgcgacctgatctgtgcccagaagtttaatggcctgaccgtgctgcctccactgctgacagatgagatgatcgcccagtacacatctgccctgctggccggcaccatcacaagcggatggaccttcggcgcaggagccgccctgcagatcccttttgccatgcagatggcctataggttcaacggcatcggcgtgacccagaatgtgctgtacgagaaccagaagctgatcgccaatcagtttaacagcgccatcggcaagatccaggactctctgtcctctacagccagcgccctgggcaagctgcaggatgtggtgaatcagaacgcccaggccctgcataccctggtgaagcagctgagctccaacttcggcgccatctctagcgtgctgaatgacatcctgagccggctggacccccctgaggcagaggtgcagatcgacaggctgatcacaggccgcctgcagagcctgcagacctacgtgacacagcagctgatcagggcagcagagatcagagcctccgccaatctggccgccaccaagatgagcgagtgcgtgctgggacagtccaagagggtggacttttgtggcaagggctatcacctgatgtctttcccacagagcgcccctcacggcgtggtgtttctgcacgtgacctacgtgccagcccaggagaagaacttcaccacagcaccagccatctgccacgatggaaaggcacactttcctagggagggcgtgttcgtgtctaacggcacccactggtttgtgacacagcgcaatttctacgagccacagatcatcaccacagacaatacattcgtgagcggcaactgtgatgtggtgatcggcatcgtgaacaataccgtgtatgatccactgcagcccgagctggactcctttaaggaggagctggataagtacttcaagaatcacacctctcccgacgtggatctgggcgacatctccggcatcaatgcctctgtggtgaacatccagaaggagatcgaccggctgaacgaggtggccaagaatctgaacgagagcctgatcgatctgcaggagctgggcaagtatgagcagtacatcaagggctctggcagagagaacctgtatttccagggaggaggaggcagcggatacatccctgaggcaccaagggacggacaggcctacgtgcgcaaggatggcgagtgggtgctgctgtccacctttctgggccatcatcaccaccaccaccaccactga

SEQ ID NO: 1553 - DNA, 3846 bp, Artificial Sequence
  Description of Artificial Sequence: Synthetic polynucleotide
atgggcatcctgccaagcccaggaatgcccgccctgctgtctctggtgagcctgctgtccgtgctgctgatgggatgcgtggcagagacaggcacacagtgcgtgaacctgaccacaaggacccagctgccccctgcctataccaattctttcacacggggcgtgtactatcccgacaagatctttagaagctccgtgctgcactccacacaggatctgtttctgcctttcttttctaacgtgacctggttccacgccatccacgtgtccggcaccaatggcacaaagcggttcgacaatcccgtgctgccttttaacgatggcgtgtacttcgccagcaccgagaagtccaacatcatcagaggctggatctttggcaccacactggactctaagacacagagcctgctgatcgtgaacaatgccaccaacgtggtgatcaaggtgtgcgagttccagttttgtaatgatccattcctgggcgtgtactatcacaagaacaataagtcctggatggagtctgagtttcgcgtgtattctagcgccaacaattgcacatttgagtacgtgagccagcccttcctgatggacctggagggcaagcagggcaatttcaagaacctgagggagttcgtgtttaagaatatcgatggctacttcaagatctacagcaagcacaccccaatcaacctggtgcgcgacctgccacagggattctccgccctggagccactggtggatctgcccatcggcatcaacatcacccggtttcagacactgctggccctgcacagatcctacctgacaccaggcgactcctctagcggatggaccgcaggagctgccgcctactatgtgggctatctgcagccccggaccttcctgctgaagtacaacgagaatggcaccatcacagacgcagtggattgcgccctggaccccctgtctgagacaaagtgtacactgaagagctttaccgtggagaagggcatctatcagacaagcaatttcagggtgcagcctaccgagtccatcgtgcgctttcccaatatcacaaacctgtgcccttttggcgaggtgttcaacgccaccagattcgccagcgtgtacgcctggaatcggaagagaatctccaactgcgtggccgactattctgtgctgtacaactccgcctctttcagcacctttaagtgctatggcgtgtctcccacaaagctgaatgatctgtgctttaccaacgtgtacgccgatagcttcgtgatcaggggagacgaagtgagacagatcgcaccaggacagacaggaaagatcgcagactacaattataagctgcctgacgatttcaccggctgcgtgatcgcctggaactccaacaatctggattctaaagtgggcggcaactacaattatctgtacaggctgtttcgcaagtccaatctgaagccattcgagcgggacatctccacagagatctaccaggccggctctaccccctgcaatggcgtggagggctttaactgttatttccctctgcagtcttacggcttccagccaacaaacggcgtgggctatcagccctacagagtggtggtgctgtcctttgagctgctgcacgcaccagcaacagtgtgcggcccaaagaagtctaccaatctggtgaagaacaagtgcgtgaacttcaacttcaacggactgaccggcacaggcgtgctgaccgagagcaataagaagttcctgccttttcagcagttcggcagggacatcgcagataccacagacgccgtgcgcgaccctcagaccctggagatcctggacatcacaccatgcagcttcggcggcgtgtccgtgatcacaccaggcaccaatacatccaaccaggtggccgtgctgtatcaggacgtgaattgtaccgaggtgcccgtggcaatccacgcagatcagctgacccctacatggcgggtgtactctaccggcagcaacgtgttccagacaagagccggatgcctgatcggagcagagcacgtgaacaatagctatgagtgcgacatccctatcggcgccggcatctgtgccagctaccagacccagacaaactccccatctggagcaggctccgtggccagccagtccatcatcgcctataccatgagcctgggcgccgagaacagcgtggcctactccaacaattctatcgccatccctaccaacttcacaatcagcgtgaccacagagatcctgccagtgtctatgaccaagacaagcgtggactgcacaatgtatatctgtggcgatagcaccgagtgctccaacctgctgctgcagtacggctccttttgtacccagctgaatagagccctgacaggcatcgccgtggagcaggataagaacacacaggaggtgttcgcccaggtgaagcagatctacaagaccccacccatcaaggactttggcggcttcaacttcagccagatcctgcctgatccaagcaagccctccaagaggtcttttatcgaggacctgctgttcaacaaggtgaccctggccgatgccggcttcatcaagcagtatggagattgcctgggagacatcgcagcccgcgacctgatctgtgcccagaagtttaatggcctgaccgtgctgcctccactgctgacagatgagatgatcgcccagtacacatctgccctgctggccggcaccatcacaagcggatggaccttcggcgcaggagccgccctgcagatcccttttgccatgcagatggcctataggttcaacggcatcggcgtgacccagaatgtgctgtacgagaaccagaagctgatcgccaatcagtttaacagcgccatcggcaagatccaggactctctgtcctctacagccagcgccctgggcaagctgcaggatgtggtgaatcagaacgcccaggccctgaataccctggtgaagcagctgagctccaacttcggcgccatctctagcgtgctgaatgacatcctgagccggctggacccccctgaggcagaggtgcagatcgacaggctgatcacaggccgcctgcagagcctgcagacctacgtgacacagcagctgatcagggcagcagagatcagagcctccgccaatctggccgccaccaagatgagcgagtgcgtgctgggacagtccaagagggtggacttttgtggcaagggctatcacctgatgtctttcccacagagcgcccctcacggcgtggtgtttctgcacgtgacctacgtgccagcccaggagaagaacttcaccacagcaccagccatctgccacgatggaaaggcacactttcctagggagggcgtgttcgtgtctaacggcacccactggtttgtgacacagcgcaatttctacgagccacagatcatcaccacagacaatacattcgtgagcggcaactgtgatgtggtgatcggcatcgtgaacaataccgtgtatgatccactgcagcccgagctggactcctttaaggaggagctggataagtacttcaagaatcacacctctcccgacgtggatctgggcgacatctccggcatcaatgcctctgtggtgaacatccagaaggagatcgaccggctgaacgaggtggccaagaatctgaacgagagcctgatcgatctgcaggagctgggcaagtatgagcagtacatcaagggctctggcagagagaacctgtatttccagggaggaggaggcagcggatacatccctgaggcaccaagggacggacaggcctacgtgcgcaaggatggcgagtgggtgctgctgtccacctttctgggccatcatcaccaccaccaccaccactga

SEQ ID NO: 1554 - DNA, 3846 bp, Artificial Sequence
  Description of Artificial Sequence: Synthetic polynucleotide
atgggcatcctgccaagcccaggaatgcccgccctgctgtctctggtgagcctgctgtccgtgctgctgatgggatgcgtggcagagacaggcacacagtgcgtgaacctgaccacaaggacccagctgccccctgcctataccaattctttcacacggggcgtgtactatcccgacaaggtgtttagaagctccgtgctgcactccacacaggatctgtttctgcctttcttttctaacgtgacctggttccacgccatccacgtgtccggcaccaatggcacaaagcggttcgacaatcccgtgctgccttttaacgatggcgtgtacttcgccactaccgagaagtccaacatcatcagaggctggatctttggcaccacactggactctaagacacagagcctgctgatcgtgaacaatgccaccaacgtggtgatcaaggtgtgcgagttccagttttgtaatgatccattcctgggcgtgtactatcacaagaacaataagtcctggatggagtctgagtttcgcgtgtattctagcgccaacaattgcacatttgagtacgtgagccagcccttcctgatggacctggagggcaagcagggcaatttcaagaacctgagggagttcgtgtttaagaatatcgatggctacttcaagatctacagcaagcacaccccaatcaacctggtgcgcgacctgccacagggattctccgccctggagccactggtggatctgcccatcggcatcaacatcacccggtttcagacactgctggccctgcacagatcctacctgacaccaggcgactcctctagcggatggaccgcaggagctgccgcctactatgtgggctatctgcagccccggaccttcctgctgaagtacaacgagaatggcaccatcacagacgcagtggattgcgccctggaccccctgtctgagacaaagtgtacactgaagagctttaccgtggagaagggcatctatcagacaagcaatttcagggtgcagcctaccgagtccatcgtgcgctttcccaatatcacaaacctgtgcccttttggcgaggtgttcaacgccaccagattcgccagcgtgtacgcctggaatcggaagagaatctccaactgcgtggccgactattctgtgctgtacaactccgcctctttcagcacctttaagtgctatggcgtgtctcccacaaagctgaatgatctgtgctttaccaacgtgtacgccgatagcttcgtgatcaggggagacgaagtgagacagatcgcaccaggacagacaggaaagatcgcagactacaattataagctgcctgacgatttcaccggctgcgtgatcgcctggaactccaacaatctggattctaaagtgggcggcaactacaattatctgtacaggctgtttcgcaagtccaatctgaagccattcgagcgggacatctccacagagatctaccaggccggctctaccccctgcaatggcgtggagggctttaactgttatttccctctgcagtcttacggcttccagccaacaaacggcgtgggctatcagccctacagagtggtggtgctgtcctttgagctgctgcacgcaccagcaacagtgtgcggcccaaagaagtctaccaatctggtgaagaacaagtgcgtgaacttcaacttcaacggactgaccggcacaggcgtgctgaccgagagcaataagaagttcctgccttttcagcagttcggcagggacatcgcagataccacagacgccgtgcgcgaccctcagaccctggagatcctggacatcacaccatgcagcttcggcggcgtgtccgtgatcacaccaggcaccaatacatccaaccaggtggccgtgctgtatcaggacgtgaattgtaccgaggtgcccgtggcaatccacgcagatcagctgacccctacatggcgggtgtactctaccggcagcaacgtgttccagacaagagccggatgcctgatcggagcagagcacgtgaacaatagctatgagtgcgacatccctatcggcgccggcatctgtgccagctaccagacccagacaaactccccatctggagcaggctccgtggccagccagtccatcatcgcctataccatgagcctgggcgccgagaacagcgtggcctactccaacaattctatcgccatccctaccaacttcacaatcagcgtgaccacagagatcctgccagtgtctatgaccaagacaagcgtggactgcacaatgtatatctgtggcgatagcaccgagtgctccaacctgctgctgcagtacggctccttttgtacccagctgaatagagccctgacaggcatcgccgtggagcaggataagaacacacaggaggtgttcgcccaggtgaagcagatctacaagaccccacccatcaaggactttggcggcttcaacttcagccagatcctgcctgatccaagcaagccctccaagaggtcttttatcgaggacctgctgttcaacaaggtgaccctggccgatgccggcttcatcaagcagtatggagattgcctgggagacatcgcagcccgcgacctgatctgtgcccagaagtttaatggcctgaccgtgctgcctccactgctgacagatgagatgatcgcccagtacacatctgccctgctggccggcaccatcacaagcggatggaccttcggcgcaggagccgccctgcagatcccttttgccatgcagatggcctataggttcaacggcatcggcgtgacccagaatgtgctgtacgagaaccagaagctgatcgccaatcagtttaacagcgccatcggcaagatccaggactctctgtcctctacagccagcgccctgggcaagctgcaggatgtggtgaatcagaacgcccaggccctgaataccctggtgaagcagctgagctccaacttcggcgccatctctagcgtgctgaatgacatcctgagccggctggacccccctgaggcagaggtgcagatcgacaggctgatcacaggccgcctgcagagcctgcagacctacgtgacacagcagctgatcagggcagcagagatcagagcctccgccaatctggccgccaccaagatgagcgagtgcgtgctgggacagtccaagagggtggacttttgtggcaagggctatcacctgatgtctttcccacagagcgcccctcacggcgtggtgtttctgcacgtgacctacgtgccagcccaggagaagaacttcaccacagcaccagccatctgccacgatggaaaggcacactttcctagggagggcgtgttcgtgtctaacggcacccactggtttgtgacacagcgcaatttctacgagccacagatcatcaccacagacaatacattcgtgagcggcaactgtgatgtggtgatcggcatcgtgaacaataccgtgtatgatccactgcagcccgagctggactcctttaaggaggagctggataagtacttcaagaatcacacctctcccgacgtggatctgggcgacatctccggcatcaatgcctctgtggtgaacatccagaaggagatcgaccggctgaacgaggtggccaagaatctgaacgagagcctgatcgatctgcaggagctgggcaagtatgagcagtacatcaagggctctggcagagagaacctgtatttccagggaggaggaggcagcggatacatccctgaggcaccaagggacggacaggcctacgtgcgcaaggatggcgagtgggtgctgctgtccacctttctgggccatcatcaccaccaccaccaccactga

SEQ ID NO: 1555 - DNA, 3846 bp, Artificial Sequence
  Description of Artificial Sequence: Synthetic polynucleotide
atgggcatcctgccaagcccaggaatgcccgccctgctgtctctggtgagcctgctgtccgtgctgctgatgggatgcgtggcagagacaggcacacagtgcgtgaacctgaccacaaggacccagctgccccctgcctataccaattctttcacacggggcgtgtactatcccgacaaggtgtttagaagctccgtgctgcactccacacaggatctgtttctgcctttcttttctaacgtgacctggttccacgccatccacgtgtccggcaccaatggcacaaagcggttcgacaatcccgtgctgccttttaacgatggcgtgtacttcgccagcaccgagaagtccaacatcatcagaggctggatctttggcaccacactggactctaagacacagagcctgctgatcgtgaacaatgccaccaacgtggtgatcaaggtgtgcgagttccagttttgtaatgatccattcctgggcgtgtactatcacaagaacaataagtcctggatggagtctgagtttcgcgtgtattctagcgccaacaattgcacatttgagtacgtgagccagcccttcctgatggacctggagggcaagcagggcaatttcaagaacctgagggagttcgtgtttaagaatatcgatggctacttcaagatctacagcaagcacaccccaatcaacctggtgcgcgacctgccacagggattctccgccctggagccactggtggatctgcccatcggcatcaacatcacccggtttcagacactgctggccctgcacagatcctacctgacaccaggcgactcctctagcggatggaccgcaggagctgccgcctactatgtgggctatctgcagccccggaccttcctgctgaagtacaacgagaatggcaccatcacagacgcagtggattgcgccctggaccccctgtctgagacaaagtgtacactgaagagctttaccgtggagaagggcatctatcagacaagcaatttcagggtgcagcctaccgagtccatcgtgcgctttcccaatatcacaaacctgtgcccttttggcgaggtgttcaacgccaccagattcgccagcgtgtacgcctggaatcggaagagaatctccaactgcgtggccgactattctgtgctgtacaactccgcctctttcagcacctttaagtgctatggcgtgtctcccacaaagctgaatgatctgtgctttaccaacgtgtacgccgatagcttcgtgatcaggggagacgaagtgagacagatcgcaccaggacagacaggaaagatcgcagactacaattataagctgcctgacgatttcaccggctgcgtgatcgcctggaactccaacaatctggattctaaagtgggcggcaactacaattatctgtacaggctgtttcgcaagtccaatctgaagccattcgagcgggacatctccacagagatctaccaggccggctctaccccctgcaatggcgtggagggctttaactgttatttccctctgcagtcttacggcttccagccaacaaacggcgtgggctatcagccctacagagtggtggtgctgtcctttgagctgctgcacgcaccagcaacagtgtgcggcccaaagaagtctaccaatctggtgaagaacaagtgcgtgaacttcaacttcaacggactgaccggcacaggcgtgctgaccgagagcaataagaagttcctgccttttcagcagttcggcagggacatcgcagataccacagacgccgtgcgcgaccctcagaccctggagatcctggacatcacaccatgcagcttcggcggcgtgtccgtgatcacaccaggcaccaatacatccaaccaggtggccgtgctgtatcaggacgtgaattgtaccgaggtgcccgtggcaatccacgcagatcagctgacccctacatggcgggtgtactctaccggcagcaacgtgttccagacaagagccggatgcctgatcggagcagagcacgtgaacaatagctatgagtgcgacatccctatcggcgccggcatctgtgccagctaccagacccagacaaactccccatctggagcaggctccgtggccagccagtccatcatcgcctataccatgagcctgggcgccgagaacagcgtggcctactccaacaattctatcgccatccctaccaacttcacaatcagcgtgaccacagagatcctgccagtgtctatgaccaagacaagcgtggactgcacaatgtatatctgtggcgatagcaccgagtgctccaacctgctgctgcagtacggctccttttgtacccagctgaatagagccctgacaggcatcgccgtggagcaggataagaacacacaggaggtgttcgcccaggtgaagcagatctacaagaccccacccatcaaggactttggcggcttcaacttcagccagatcctgcctgatccaagcaagccctccaagaggtcttttatcgaggacctgctgttcaacaaggtgaccctggccgatgccggcttcatcaagcagtatggagattgcctgggagacatcgcagcccgcgacctgatctgtgcccagaagtttaatggcctgaccgtgctgcctccactgctgacagatgagatgatcgcccagtacacatctgccctggtcgccggcaccatcacaagcggatggaccttcggcgcaggagccgccctgcagatcccttttgccatgcagatggcctataggttcaacggcatcggcgtgacccagaatgtgctgtacgagaaccagaagctgatcgccaatcagtttaacagcgccatcggcaagatccaggactctctgtcctctacagccagcgccctgggcaagctgcaggatgtggtgaatcagaacgcccaggccctgaataccctggtgaagcagctgagctccaacttcggcgccatctctagcgtgctgaatgacatcctgagccggctggacccccctgaggcagaggtgcagatcgacaggctgatcacaggccgcctgcagagcctgcagacctacgtgacacagcagctgatcagggcagcagagatcagagcctccgccaatctggccgccaccaagatgagcgagtgcgtgctgggacagtccaagagggtggacttttgtggcaagggctatcacctgatgtctttcccacagagcgcccctcacggcgtggtgtttctgcacgtgacctacgtgccagcccaggagaagaacttcaccacagcaccagccatctgccacgatggaaaggcacactttcctagggagggcgtgttcgtgtctaacggcacccactggtttgtgacacagcgcaatttctacgagccacagatcatcaccacagacaatacattcgtgagcggcaactgtgatgtggtgatcggcatcgtgaacaataccgtgtatgatccactgcagcccgagctggactcctttaaggaggagctggataagtacttcaagaatcacacctctcccgacgtggatctgggcgacatctccggcatcaatgcctctgtggtgaacatccagaaggagatcgaccggctgaacgaggtggccaagaatctgaacgagagcctgatcgatctgcaggagctgggcaagtatgagcagtacatcaagggctctggcagagagaacctgtatttccagggaggaggaggcagcggatacatccctgaggcaccaagggacggacaggcctacgtgcgcaaggatggcgagtgggtgctgctgtccacctttctgggccatcatcaccaccaccaccaccactga

SEQ ID NO: 1556 - DNA, 3846 bp, Artificial Sequence
  Description of Artificial Sequence: Synthetic polynucleotide
atgggcatcctgccaagcccaggaatgcccgccctgctgtctctggtgagcctgctgtccgtgctgctgatgggatgcgtggcagagacaggcacacagtgcgtgaacctgaccacaaggacccagctgccccctgcctataccaattctttcacacggggcgtgtactatcccgacaaggtgtttagaagcgatgtgctgcactccacacaggatctgtttctgcctttcttttctaacgtgacctggttccacgccatccacgtgtccggcaccaatggcacaaagcggttcgacaatcccgtgctgccttttaacgatggcgtgtacttcgccagcaccgagaagtccaacatcatcagaggctggatctttggcaccacactggactctaagacacagagcctgctgatcgtgaacaatgccaccaacgtggtgatcaaggtgtgcgagttccagttttgtgaaaatccattcctgggcgtgtactatcacaagaacaataagtcctggatggagaaagagtttcgcgtgtattctagcgccaacaattgcacatttgagtacgtgagccagcccttcctgatggacctggggggcaagcagggcaatttcaagtggctgagggagttcgtgtttaagaatatcgatggctacttcaagatctacagcaagcacaccccaatcaacctggtgcgcgacctgccacagggattctccgccctggagccactgatggatctgcccatcggcatcaacatcacccggtttcagacactgctggccctgcacagatcctacctgacaccaggcgactcctctagcggatggaccgcaggagctgccgcctactatgtgggctatctgcagccccggaccttcctgctgaagtacaacgagaatggcaccatcacagacgcagtggattgcgccctggaccccctgtctgagacaaagtgtacactgaagagctttaccgtggagaagggcatctatcagacaagcaatttcagggtgcagcctaccgagtccatcgtgcgctttcccaatatcacaaacctgtgcccttttggcgaggtgttcaacgccaccagattcgccagcgtgtacgcctggaatcggaagagaatctccaactgcgtggccgactattctgtgctgtacaactccgcctctttcagcacctttaagtgctatggcgtgtctcccacaaagctgaatgatctgtgctttaccaacgtgtacgccgatagcttcgtgatcaggggagacgaagtgagacagatcgcaccaggacagacaggaaagatcgcagactacaattataagctgcctgacgatttcaccggctgcgtgatcgcctggaactccaacaatctggattctaaagtgggcggcaactacaattatctgtacaggctgtttcgcaagtccaatctgaagccattcgagcgggacatctccacagagatctaccaggccggctctaccccctgcaatggcgtggagggctttaactgttatttccctctgcagtcttacggcttccagccaacaaacggcgtgggctatcagccctacagagtggtggtgctgtcctttgagctgctgcacgcaccagcaacagtgtgcggcccaaagaagtctaccaatctggtgaagaacaagtgcgtgaacttcaacttcaacggactgaccggcacaggcgtgctgaccgagagcaataagaagttcctgccttttcagcagttcggcagggacatcgcagataacacagacgccgtgcgcgaccctcagaccctggagatcctggacatcacaccatgcagcttcggcggcgtgtccgtgatcacaccaggcaccaatacatccaaccaggtggccgtgctgtatcaggacgtgaattgtaccgaggtgcccaacgcaatccacgcagatcagctgacccctacatggcgggtgtactctaccggcagcaacgtgttccagacaagagccggatgcctgatcggagcagagcacgtgaacaatagctatgagtgcgacatccctatcggcgccggcatctgtgccagctaccagacccagacaaactccccatctggagcaggctccgtggccagccagtccatcatcgcctataccatgagcctgggcgccgagaacagcgtggcctactccaacaattctatcgccatccctaccaacttcacaatcagcgtgaccacagagatcctgccagtgtctatgaccaagacaagcgtggactgcacaatgtatatctgtggcgatagcaccgagtgctccaacctgctgctgcagtacggctccttttgtacccagctgaatagagccctgcaaggcatcgcccaagagcaggataagaacacacaggaggtgttcgcccaggtgaagcagatctacaagaccccacccatcaaggactttggcggcttcaacttcagccagatcctgcctgatccaagcaagccctccaagaggtcttttatcgaggacctgctgttcaacaaggtgaccctggccgatgccggcttcatcaagcagtatggagattgcctgggagacatcgcagcccgcgacctgatctgtgcccagaagtttaatggcctgaccgtgctgcctccactgctgacagatgagatgatcgcccagtacacatctgccctgctggccggcaccatcacaagcggatggaccttcggcgcaggagccgccctgcagatcccttttgccatgcagatggcctataggttcaacggcatcggcgtgacccagaatgtgctgtacgagaaccagaagctgatcgccaatcagtttaacaaagccatcggcaagatccaggactctctgtcctctacagccagcgccctgggcaagctgcaggatgtggtgaatcagaacgcccaggccctgaataccctggtgaagcagctgagctccaacttcggcgccatctctagcgtgctgaatgacatcctgagccggctggacccccctgaggcagaggtgcagatcgacaggctgatcacaggccgcctgcagagcctgcagacctacgtgacacagcagctgatcagggcagcagagatcagagcctccgccaatctggccgccaccaagatgagcgagtgcgtgctgggacagtccaagagggtggacttttgtggcaagggctatcacctgatgtctttcccacagagcgcccctcacggcgtggtgtttctgcacgtgacctacgtgccagcccaggagaagaacttcaccacagcaccagccatctgccacgatggaaaggcattttttcctagggagggcgtgttcgtgtctaacggcacccaatggtttgtgacacagcgcaatttctacgagccacagatcatcaccacagacaatacattcgtgagcggcaactgtgatgtggtgatcggcatcgtgaacaataccgtgtatgatccactgcagcccgagctggactcctttaaggaggagctggataagtacttcaagaatcacacctctcccgacgtggatctgggcgacatctccggcatcaatgcctctgtggtgaacatccagaaggagatcgaccggctgaacgaggtggccaagaatctgaacgagagcctgatcgatctgcaggagctgggcaagtatgagcagtacatcaagggctctggcagagagaacctgtatttccagggaggaggaggcagcggatacatccctgaggcaccaagggacggacaggcctacgtgcgcaaggatggcgagtgggtgctgctgtccacctttctgggccatcatcaccaccaccaccaccactga

SEQ ID NO: 1557 - DNA, 3846 bp, Artificial Sequence
  Description of Artificial Sequence: Synthetic polynucleotide
atgggcatcctgccaagcccaggaatgcccgccctgctgtctctggtgagcctgctgtccgtgctgctgatgggatgcgtggcagagacaggcacacagtgcgtgaacctgaccacaaggacccagctgccccctgcctataccaattctttcacacggggcgtgtactatcccgacaaggtgtttagaagctccgtgctgcactccacacaggatctgtttctgcctttcttttctaacgtgacctggttccacgccatccacgtgtccggcaccaatggcacaaagcggttcgacaatcccgtgctgccttttaacgatggcgtgtacttcgccagcaccgagaagtccaacatcatcagaggctggatctttggcaccacactggactctaagacacagagcctgctgatcgtgaacaatgccaccaacgtggtgatcaaggtgtgcgagttccagttttgtaatgatccattcctgggcgtgtactatcacaagaacaataagtcctggatggagtctgagtttcgcgtgtattctagcgccaacaattgcacatttgagtacgtgagccagcccttcctgatggacctggagggcaagcagggcaatttcaagaacctgagggagttcgtgtttaagaatatcgatggctacttcaagatctacagcaagcacgaaccaatcaacctggtgcgcgacctgccacagggattctccgccctggagccactggtggatctgcccatcggcatcaacatcacccggtttcagacactgctggccctgcacagatcctacctgacaccaggcgactcctctagcggatggaccgcaggagctgccgcctactatgtgggctatctgcagccccggaccttcctgctgaagtacaacgagaatggcaccatcacagacgcagtggattgcgccctggaccccctgtctgagacaaagtgtacactgaagagctttaccgtggagaagggcatctatcagacaagcaatttcagggtgcagcctaccgagtccatcgtgcgctttcccaatatcacaaacctgtgcccttttggcgaggtgttcaacgccaccagattcgccagcgtgtacgcctggaatcggaagagaatctccaactgcgtggccgactattctgtgctgtacaactccgcctctttcagcacctttaagtgctatggcgtgtctcccacaaagctgaatgatctgtgctttaccaacgtgtacgccgatagcttcgtgatcaggggagacgaagtgagacagatcgcaccaggacagacaggaaagatcgcagactacaattataagctgcctgacgatttcaccggctgcgtgatcgcctggaactccaacaatctggattctaaagtgggcggcaactacaattatctgtacaggctgtttcgcaagtccaatctgaagccattcgagcgggacatctccacagagatctaccaggccggctctaccccctgcaatggcgtggagggctttaactgttatttccctctgcagtcttacggcttccagccaacaaacggcgtgggctatcagccctacagagtggtggtgctgtcctttgagctgctgcacgcaccagcaacagtgtgcggcccaaagaagtctaccaatctggtgaagaacaagtgcgtgaacttcaacttcaacggactgaccggcacaggcgtgctgaccgagagcaataagaagttcctgccttttcagcagttcggcagggacatcgcagataccacagacgccgtgcgcgaccctcagaccctggagatcctggacatcacaccatgcagcttcggcggcgtgtccgtgatcacaccaggcaccaatacatccaaccaggtggccgtgctgtatcaggacgtgaattgtaccgaggtgcccgtggcaatccacgcagatcagctgacccctacatggcgggtgtactctaccggcagcaacgtgttccagacaagagccggatgcctgatcggagcagagcacgtgaacaatagctatgagtgcgacatccctatcggcgccggcatctgtgccagctaccagacccagacaaactccccatctggagcaggctccgtggccagccagtccatcatcgcctataccatgagcctgggcgccgagaacagcgtggcctactccaacaattctatcgccatccctaccaacttcacaatcagcgtgaccacagagatcctgccagtgtctatgaccaagacaagcgtggactgcacaatgtatatctgtggcgatagcaccgagtgctccaacctgctgctgcagtacggctccttttgtacccagctgaatagagccctgacaggcatcgccgtggagcaggataagaacacacaggaggtgttcgcccaggtgaagcagatctacaagaccccacccatcaaggactttggcggcttcaacttcagccagatcctgcctgatccaagcaagccctccaagaggtcttttatcgaggacctgctgttcaacaaggtgaccctggccgatgccggcttcatcaagcagtatggagattgcctgggagacatcgcagcccgcgacctgatctgtgcccagaagtttaatggcctgaccgtgctgcctccactgctgacagatgagatgatcgcccagtacacatctgccctgctggccggcaccatcacaagcggatggaccttcggcgcaggagccgccctgcagatcccttttgccatgcagatggcctataggttcaacggcatcggcgtgacccagaatgtgctgtacgagaaccagaagctgatcgccaatcagtttaacagcgccatcggcaagatccaggactctctgtcctctacagccagcgccctgggcaagctgcaggatgtggtgaatcagaacgcccaggccctgaataccctggtgaagcagctgagctccaacttcggcgccatctctagcgtgctgaatgacatcctgagccggctggacccccctgaggcagaggtgcagatcgacaggctgatcacaggccgcctgcagagcctgcagacctacgtgacacagcagctgatcagggcagcagagatcagagcctccgccaatctggccgccaccaagatgagcgagtgcgtgctgggacagtccaagagggtggacttttgtggcaagggctatcacctgatgtctttcccacagagcgcccctcacggcgtggtgtttctgcacgtgacctacgtgccagcccaggagaagaacttcaccacagcaccagccatctgccacgatggaaaggcacactttcctagggagggcgtgttcgtgtctaacggcacccactggtttgtgacacagcgcaatttctacgagccacagatcatcaccacagacaatacattcgtgagcggcaactgtgatgtggtgatcggcatcgtgaacaataccgtgtatgatccactgcagcccgagctggactcctttaaggaggagctggataagtacttcaagaatcacacctctcccgacgtggatctgggcgacatctccggcatcaatgcctctgtggtgaacatccagaaggagatcgaccggctgaacgaggtggccaagaatctgaacgagagcctgatcgatctgcaggagctgggcaagtatgagcagtacatcaagggctctggcagagagaacctgtatttccagggaggaggaggcagcggatacatccctgaggcaccaagggacggacaggcctacgtgcgcaaggatggcgagtgggtgctgctgtccacctttctgggccatcatcaccaccaccaccaccactga

SEQ ID NO: 1558 - DNA, 3846 bp, Artificial Sequence
  Description of Artificial Sequence: Synthetic polynucleotide
atgggcatcctgccaagcccaggaatgcccgccctgctgtctctggtgagcctgctgtccgtgctgctgatgggatgcgtggcagagacaggcacacagtgcgtgaacctgaccacaaggacccagctgccccctgcctataccaattctttcacacggggcgtgtactatcccgacaaggtgtttagaagcgatgtgctgcactccacacaggatctgtttctgcctttcttttctaacgtgacctggttccacgccatccacgtgtccggcaccaatggcacaaagcggttcgacaatcccgtgctgccttttaacgatggcgtgtacttcgccagcaccgagaagtccaacatcatcagaggctggatctttggcaccacactggactctaagacacagagcctgctgatcgtgaacaatgccaccaacgtggtgatcaaggtgtgcgagttccagttttgtgataatccattcctgggcgtgtactatcacaagaacaataagtcctggatggagaaagagtttcgcgtgtattctagcgccaacaattgcacatttgagtacgtgagccagcccttcctgatggacctggggggcaagcagggcaatttcaagaacctgagggagttcgtgtttaagaatatcgatggctacttcaagatctacagcaagcacaccccaatcaacctggtgcgcgacctgccacagggattctccgccctggagccactgtgggatctgcccatcggcatcaacatcacccggtttcagacactgctggccctgcacagatcctacctgacaccaggcgactcctctagcggatggaccgcaggagctgccgcctactatgtgggctatctgcagccccggaccttcctgctgaagtacaacgagaatggcaccatcacagacgcagtggattgcgccctggaccccctgtctgagacaaagtgtacactgaagagctttaccgtggagaagggcatctatcagacaagcaatttcagggtgcagcctaccgagtccatcgtgcgctttcccaatatcacaaacctgtgcccttttggcgaggtgttcaacgccaccagattcgccagcgtgtacgcctggaatcggaagagaatctccaactgcgtggccgactattctgtgctgtacaactccgcctctttcagcacctttaagtgctatggcgtgtctcccacaaagctgaatgatctgtgctttaccaacgtgtacgccgatagcttcgtgatcaggggagacgaagtgagacagatcgcaccaggacagacaggaaagatcgcagactacaattataagctgcctgacgatttcaccggctgcgtgatcgcctggaactccaacaatctggattctaaagtgggcggcaactacaattatctgtacaggctgtttcgcaagtccaatctgaagccattcgagcgggacatctccacagagatctaccaggccggctctaccccctgcaatggcgtggagggctttaactgttatttccctctgcagtcttacggcttccagccaacaaacggcgtgggctatcagccctacagagtggtggtgctgtcctttgagctgctgcacgcaccagcaacagtgtgcggcccaaagaagtctaccaatctggtgaagaacaagtgcgtgaacttcaacttcaacggactgaccggcacaggcgtgctgaccgagagcaataagaagttcctgccttttcagcagttcggcagggacatcgcagataatacagacgccgtgcgcgaccctcagaccctggagatcctggacatcacaccatgcagcttcggcggcgtgtccgtgatcacaccaggcaccaatacatccaaccaggtggccgtgctgtatcaggacgtgaattgtaccgaggtgcccaatgcaatccacgcagatcagctgacccctacatggcgggtgtactctaccggcagcaacgtgttccagacaagagccggatgcctgatcggagcagagcacgtgaacaatagctatgagtgcgacatccctatcggcgccggcatctgtgccagctaccagacccagacaaactccccatctggagcaggctccgtggccagccagtccatcatcgcctataccatgagcctgggcgccgagaacagcgtggcctactccaacaattctatcgccatccctaccaacttcacaatcagcgtgaccacagagatcctgccagtgtctatgaccaagacaagcgtggactgcacaatgtatatctgtggcgatagcaccgagtgctccaacctgctgctgcagtacggctccttttgtacccagctgaatagagccctgcaaggcatcgcccaagagcaggataagaacacacaggaggtgttcgcccaggtgaagcagatctacaagaccccacccatcaaggactttggcggcttcaacttcagccagatcctgcctgatccaagcaagccctccaagaggtcttttatcgaggacctgctgttcaacaaggtgaccctggccgatgccggcttcatcaagcagtatggagattgcctgggagacatcgcagcccgcgacctgatctgtgcccagaagtttaatggcctgaccgtgctgcctccactgctgacagatgagatgatcgcccagtacacatctgccctgctggccggcaccatcacaagcggatggaccttcggcgcaggagccgccctgcagatcccttttgccatgcagatggcctataggttcaacggcatcggcgtgacccagaatgtgctgtacgagaaccagaagctgatcgccaatcagtttaacaaagccatcggcaagatccaggactctctgtcctctacagccagcgccctgggcaagctgcaggatgtggtgaatcagaacgcccaggccctgaataccctggtgaagcagctgagctccaacttcggcgccatctctagcgtgctgaatgacatcctgagccggctggacccccctgaggcagaggtgcagatcgacaggctgatcacaggccgcctgcagagcctgcagacctacgtgacacagcagctgatcagggcagcagagatcagagcctccgccaatctggccgccaccaagatgagcgagtgcgtgctgggacagtccaagagggtggacttttgtggcaagggctatcacctgatgtctttcccacagagcgcccctcacggcgtggtgtttctgcacgtgacctacgtgccagcccaggagaagaacttcaccacagcaccagccatctgccacgatggaaaggcattttttcctagggagggcgtgttcgtgtctaacggcacccaatggtttgtgacacagcgcaatttctacgagccacagatcatcaccacagacaatacattcgtgagcggcaactgtgatgtggtgatcggcatcgtgaacaataccgtgtatgatccactgcagcccgagctggactcctttaaggaggagctggataagtacttcaagaatcacacctctcccgacgtggatctgggcgacatctccggcatcaatgcctctgtggtgaacatccagaaggagatcgaccggctgaacgaggtggccaagaatctgaacgagagcctgatcgatctgcaggagctgggcaagtatgagcagtacatcaagggctctggcagagagaacctgtatttccagggaggaggaggcagcggatacatccctgaggcaccaagggacggacaggcctacgtgcgcaaggatggcgagtgggtgctgctgtccacctttctgggccatcatcaccaccaccaccaccactga

SEQ ID NO: 1559 - DNA, 3846 bp, Artificial Sequence
  Description of Artificial Sequence: Synthetic polynucleotide
atgggcatcctgccaagcccaggaatgcccgccctgctgtctctggtgagcctgctgtccgtgctgctgatgggatgcgtggcagagacaggcacacagtgcgtgaacctgaccacaaggacccagctgccccctgcctataccaattctttcacacggggcgtgtactatcccgacaaggtgtttagaagctccgtgctgcactccacacaggatctgtttctgcctttcttttctaacgtgacctggttccacgccatccacgtgtccggcaccaatggcacaaagcggttcgacaatcccgtgctgccttttaacgatggcgtgtacttcgccagcaccgagaagtccaacatcatcagaggctggatctttggcaccacactggactctaagacacagagcctgctgatcgtgaacaatgccaccaacgtggtgatcaaggtgtgcgagttccagttttgtaatgatccattcctgggcgtgtactatcacaagaacaataagtcctggatggagtctgagtttcgcgtgtattctagcgccaacaattgcacatttgagtacaacagccagcccttcctgatggacctggagggcaagcagggcaatttcaagaacctgagggagttcgtgtttaagaatatcgatggctacttcaagatctacagcaagcacaccccaatcaacctggtgcgcgacctgccacagggattctccgccctggagccactggtggatctgcccatcggcatcaacatcacccggtttcagacactgctggccctgcacagatcctacctgacaccaggcgactcctctagcggatggaccgcaggagctgccgcctactatgtgggctatctgcagccccggaccttcctgctgaagtacaacgagaatggcaccatcacagacgcagtggattgcgccctggaccccctgtctgagacaaagtgtacactgaagagctttaccgtggagaagggcatctatcagacaagcaatttcagggtgcagcctaccgagtccatcgtgcgctttcccaatatcacaaacctgtgcccttttggcgaggtgttcaacgccaccagattcgccagcgtgtacgcctggaatcggaagagaatctccaactgcgtggccgactattctgtgctgtacaactccgcctctttcagcacctttaagtgctatggcgtgtctcccacaaagctgaatgatctgtgctttaccaacgtgtacgccgatagcttcgtgatcaggggagacgaagtgagacagatcgcaccaggacagacaggaaagatcgcagactacaattataagctgcctgacgatttcaccggctgcgtgatcgcctggaactccaacaatctggattctaaagtgggcggcaactacaattatctgtacaggctgtttcgcaagtccaatctgaagccattcgagcgggacatctccacagagatctaccaggccggctctaccccctgcaatggcgtggagggctttaactgttatttccctctgcagtcttacggcttccagccaacaaacggcgtgggctatcagccctacagagtggtggtgctgtcctttgagctgctgcacgcaccagcaacagtgtgcggcccaaagaagtctaccaatctggtgaagaacaagtgcgtgaacttcaacttcaacggactgaccggcacaggcgtgctgaccgagagcaataagaagttcctgccttttcagcagttcggcagggacatcgcagataccacagacgccgtgcgcgaccctcagaccctggagatcctggacatcacaccatgcagcttcggcggcgtgtccgtgatcacaccaggcaccaatacatccaaccaggtggccgtgctgtatcaggacgtgaattgtaccgaggtgcccgtggcaatccacgcagatcagctgacccctacatggcgggtgtactctaccggcagcaacgtgttccagacaagagccggatgcctgatcggagcagagcacgtgaacaatagctatgagtgcgacatccctatcggcgccggcatctgtgccagctaccagacccagacaaactccccatctggagcaggctccgtggccagccagtccatcatcgcctataccatgagcctgggcgccgagaacagcgtggcctactccaacaattctatcgccatccctaccaacttcacaatcagcgtgaccacagagatcctgccagtgtctatgaccaagacaagcgtggactgcacaatgtatatctgtggcgatagcaccgagtgctccaacctgctgctgcagtacggctccttttgtacccagctgaatagagccctgacaggcatcgccgtggagcaggataagaacacacaggaggtgttcgcccaggtgaagcagatctacaagaccccacccatcaaggactttggcggcttcaacttcagccagatcctgcctgatccaagcaagccctccaagaggtcttttatcgaggacctgctgttcaacaaggtgaccctggccgatgccggcttcatcaagcagtatggagattgcctgggagacatcgcagcccgcgacctgatctgtgcccagaagtttaatggcctgaccgtgctgcctccactgctgacagatgagatgatcgcccagtacacatctgccctgctggccggcaccatcacaagcggatggaccttcggcgcaggagccgccctgcagatcccttttgccatgcagatggcctataggttcaacggcatcggcgtgacccagaatgtgctgtacgagaaccagaagctgatcgccaatcagtttaacagcgccatcggcaagatccaggactctctgtcctctacagccagcgccctgggcaagctgcaggatgtggtgaatcagaacgcccaggccctgaataccctggtgaagcagctgagctccaacttcggcgccatctctagcgtgctgaatgacatcctgagccggctggacccccctgaggcagaggtgcagatcgacaggctgatcacaggccgcctgcagagcctgcagacctacgtgacacagcagctgatcagggcagcagagatcagagcctccgccaatctggccgccaccaagatgagcgagtgcgtgctgggacagtccaagagggtggacttttgtggcaagggctatcacctgatgtctttcccacagagcgcccctcacggcgtggtgtttctgcacgtgacctacgtgccagcccaggagaagaacttcaccacagcaccagccatctgccacgatggaaaggcacactttcctagggagggcgtgttcgtgtctaacggcacccactggtttgtgacacagcgcaatttctacgagccacagatcatcaccacagacaatacattcgtgagcggcaactgtgatgtggtgatcggcatcgtgaacaataccgtgtatgatccactgcagcccgagctggactcctttaaggaggagctggataagtacttcaagaatcacacctctcccgacgtggatctgggcgacatctccggcatcaatgcctctgtggtgaacatccagaaggagatcgaccggctgaacgaggtggccaagaatctgaacgagagcctgatcgatctgcaggagctgggcaagtatgagcagtacatcaagggctctggcagagagaacctgtatttccagggaggaggaggcagcggatacatccctgaggcaccaagggacggacaggcctacgtgcgcaaggatggcgagtgggtgctgctgtccacctttctgggccatcatcaccaccaccaccaccactga

SEQ ID NO: 1560 - DNA, 3846 bp, Artificial Sequence
  Description of Artificial Sequence: Synthetic polynucleotide
atgggcatcctgccaagcccaggaatgcccgccctgctgtctctggtgagcctgctgtccgtgctgctgatgggatgcgtggcagagacaggcacacagtgcgtgaacctgaccacaaggacccagctgccccctgcctataccaattctttcacacggggcgtgtactatcccgacaaggtgtttagaagctccgtgctgcactccacacaggatctgtttctgcctttcttttctaacgtgacctggttccacgccatccacgtgtccggcaccaatggcacaaagcggttcgacaatcccgtgctgccttttaacgatggcgtgtacttcgccagcaccgagaagtccaacatcatcagaggctggatctttggcaccacactggactctaagacacagagcctgctgatcgtgaacaatgccaccaacgtggtgatcaaggtgtgcgagttccagttttgtaatgatccattcctgggcgtgtactatcacaagaacaataagtcctggatggagtctgagtttcgcgtgtattctagcgccaacaattgcacatttgagtacgtgagccagcccttcctgatggacctggagggcaagcagggcaatttcaagaacctgagggagttcgtgtttaagaatatcgatggctacttcaagatctacagcaagcacaccccaatcaacctggtgcgcgacctgccacagggattctccgccctggagccactggtggatctgcccatcggcatcaacatcacccggtttcagacactgctggccctgcacagatcctacctgacaccaggcgactcctctagcggatggaccgcaggagctgccgcctactatgtgggctatctgcagccccggaccttcctgctgaagtacaacgagaatggcaccatcacagacgcagtggattgcgccctggaccccctgtctgagacaaagtgtacactgaagagctttaccgtggagaagggcatctatcagacaagcaatttcagggtgcagcctaccgagtccatcgtgcgctttcccaatatcacaaacctgtgcccttttggcgaggtgttcaacgccaccagattcgccagcgtgtacgcctggaatcggaagagaatctccaactgcgtggccgactattctgtgctgtacaactccgcctctttcagcacctttaagtgctatggcgtgtctcccacaaagctgaatgatctgtgctttaccaacgtgtacgccgatagcttcgtgatcaggggagacgaagtgagacagatcgcaccaggacagacaggaaagatcgcagactacaattataagctgcctgacgatttcaccggctgcgtgatcgcctggaactccaacaatctggattctaaagtgggcggcaactacaattatctgtacaggctgtttcgcaagtccaatctgaagccattcgagcgggacatctccacagagatctaccaggccggctctaccccctgcaatggcgtggagggctttaactgttatttccctctgcagtcttacggcttccagccaacaaacggcgtgggctatcagccctacagagtggtggtgctgtcctttgagctgctgcacgcaccagcaacagtgtgcggcccaaagaagtctaccaatctggtgaagaacaagtgcgtgaacttcaacttcaacggactgaccggcacaggcgtgctgaccgagagcaataagaagttcctgccttttcagcagttcggcagggacatcgcagatataacagacgccgtgcgcgaccctcagaccctggagatcctggacatcacaccatgcagcttcggcggcgtgtccgtgatcacaccaggcaccaatacatccaaccaggtggccgtgctgtatcaggacgtgaattgtaccgaggtgcccgtggcaatccacgcagatcagctgacccctacatggcgggtgtactctaccggcagcaacgtgttccagacaagagccggatgcctgatcggagcagagcacgtgaacaatagctatgagtgcgacatccctatcggcgccggcatctgtgccagctaccagacccagacaaactccccatctggagcaggctccgtggccagccagtccatcatcgcctataccatgagcctgggcgccgagaacagcgtggcctactccaacaattctatcgccatccctaccaacttcacaatcagcgtgaccacagagatcctgccagtgtctatgaccaagacaagcgtggactgcacaatgtatatctgtggcgatagcaccgagtgctccaacctgctgctgcagtacggctccttttgtacccagctgaatagagccctgacaggcatcgccgtggagcaggataagaacacacaggaggtgttcgcccaggtgaagcagatctacaagaccccacccatcaaggactttggcggcttcaacttcagccagatcctgcctgatccaagcaagccctccaagaggtcttttatcgaggacctgctgttcaacaaggtgaccctggccgatgccggcttcatcaagcagtatggagattgcctgggagacatcgcagcccgcgacctgatctgtgcccagaagtttaatggcctgaccgtgctgcctccactgctgacagatgagatgatcgcccagtacacatctgccctgctggccggcaccatcacaagcggatggaccttcggcgcaggagccgccctgcagatcccttttgccatgcagatggcctataggttcaacggcatcggcgtgacccagaatgtgctgtacgagaaccagaagctgatcgccaatcagtttaacagcgccatcggcaagatccaggactctctgtcctctacagccagcgccctgggcaagctgcaggatgtggtgaatcagaacgcccaggccctgaataccctggtgaagcagctgagctccaacttcggcgccatctctagcgtgctgaatgacatcctgagccggctggacccccctgaggcagaggtgcagatcgacaggctgatcacaggccgcctgcagagcctgcagacctacgtgacacagcagctgatcagggcagcagagatcagagcctccgccaatctggccgccaccaagatgagcgagtgcgtgctgggacagtccaagagggtggacttttgtggcaagggctatcacctgatgtctttcccacagagcgcccctcacggcgtggtgtttctgcacgtgacctacgtgccagcccaggagaagaacttcaccacagcaccagccatctgccacgatggaaaggcacactttcctagggagggcgtgttcgtgtctaacggcacccactggtttgtgacacagcgcaatttctacgagccacagatcatcaccacagacaatacattcgtgagcggcaactgtgatgtggtgatcggcatcgtgaacaataccgtgtatgatccactgcagcccgagctggactcctttaaggaggagctggataagtacttcaagaatcacacctctcccgacgtggatctgggcgacatctccggcatcaatgcctctgtggtgaacatccagaaggagatcgaccggctgaacgaggtggccaagaatctgaacgagagcctgatcgatctgcaggagctgggcaagtatgagcagtacatcaagggctctggcagagagaacctgtatttccagggaggaggaggcagcggatacatccctgaggcaccaagggacggacaggcctacgtgcgcaaggatggcgagtgggtgctgctgtccacctttctgggccatcatcaccaccaccaccaccactga

SEQ ID NO: 1561 - DNA, 3846 bp, Artificial Sequence
  Description of Artificial Sequence: Synthetic polynucleotide
atgggcatcctgccaagcccaggaatgcccgccctgctgtctctggtgagcctgctgtccgtgctgctgatgggatgcgtggcagagacaggcacacagtgcgtgaacctgaccacaaggacccagctgccccctgcctataccaattctttcacacggggcgtgtactatcccgacaaggtgtttagaagctccgtgctgcactccacacaggatctgtttctgcctttcttttctaacgtgacctggttccacgccatccacgtgtccggcaccaatggcacaaagcggttcgacaatcccgtgctgccttttaacgatggcgtgtacttcgccagcaccgagaagtccaacatcatcagaggctggatctttggcaccacactggactctaagacacagagcctgctgatcgtgaacaatgccaccaacgtggtgatcaaggtgtgcgagttccagttttgtaatgatccattcctgggcgtgtactatcacaagaacaataagtcctggatggagtctgagtttcgcgtgtattctagcgccaacaattgcacatttgagtacgtgagccagcccttcctgatggacctggagggcaagcagggcaatttcaagaacctgagggagttcgtgtttaagaatatcgatggctacttcaagatctacagcaagcacaccccaatcaacctggtgcgcgacctgccacagggattctccgccctggagccactggtggatctgcccatcggcatcaacatcacccggtttcagacactgctggccctgcacagatcctacctgacaccaggcgactcctctagcggatggaccgcaggagctgccgcctactatgtgggctatctgcagccccggaccttcctgctgaagtacaacgagaatggcaccatcacagacgcagtggattgcgccctggaccccctgtctgagacaaagtgtacactgaagagctttaccgtggagaagggcatctatcagacaagcaatttcagggtgcagcctaccgagtccatcgtgcgctttcccaatatcacaaacctgtgcccttttggcgaggtgttcaacgccaccagattcgccagcgtgtacgcctggaatcggaagagaatctccaactgcgtggccgactattctgtgctgtacaactccgcctctttcagcacctttaagtgctatggcgtgtctcccacaaagctgaatgatctgtgctttaccaacgtgtacgccgatagcttcgtgatcaggggagacgaagtgagacagatcgcaccaggacagacaggaaagatcgcagactacaattataagctgcctgacgatttcaccggctgcgtgatcgcctggaactccaacaatctggattctaaagtgggcggcaactacaattatctgtacaggctgtttcgcaagtccaatctgaagccattcgagcgggacatctccacagagatctaccaggccggctctaccccctgcaatggcgtggagggctttaactgttatttccctctgcagtcttacggcttccagccaacaaacggcgtgggctatcagccctacagagtggtggtgctgtcctttgagctgctgcacgcaccagcaacagtgtgcggcccaaagaagtctaccaatctggtgaagaacaagtgcgtgaacttcaacttcaacggactgaccggcacaggcgtgctgaccgatagcaataagaagttcctgccttttcagcagttcggcagggacatcgcagataccacagacgccgtgcgcgaccctcagaccctggagatcctggacatcacaccatgcagcttcggcggcgtgtccgtgatcacaccaggcaccaatacatccaaccaggtggccgtgctgtatcaggacgtgaattgtaccgaggtgcccgtggcaatccacgcagatcagctgacccctacatggcgggtgtactctaccggcagcaacgtgttccagacaagagccggatgcctgatcggagcagagcacgtgaacaatagctatgagtgcgacatccctatcggcgccggcatctgtgccagctaccagacccagacaaactccccatctggagcaggctccgtggccagccagtccatcatcgcctataccatgagcctgggcgccgagaacagcgtggcctactccaacaattctatcgccatccctaccaacttcacaatcagcgtgaccacagagatcctgccagtgtctatgaccaagacaagcgtggactgcacaatgtatatctgtggcgatagcaccgagtgctccaacctgctgctgcagtacggctccttttgtacccagctgaatagagccctgacaggcatcgccgtggagcaggataagaacacacaggaggtgttcgcccaggtgaagcagatctacaagaccccacccatcaaggactttggcggcttcaacttcagccagatcctgcctgatccaagcaagccctccaagaggtcttttatcgaggacctgctgttcaacaaggtgaccctggccgatgccggcttcatcaagcagtatggagattgcctgggagacatcgcagcccgcgacctgatctgtgcccagaagtttaatggcctgaccgtgctgcctccactgctgacagatgagatgatcgcccagtacacatctgccctgctggccggcaccatcacaagcggatggaccttcggcgcaggagccgccctgcagatcccttttgccatgcagatggcctataggttcaacggcatcggcgtgacccagaatgtgctgtacgagaaccagaagctgatcgccaatcagtttaacagcgccatcggcaagatccaggactctctgtcctctacagccagcgccctgggcaagctgcaggatgtggtgaatcagaacgcccaggccctgaataccctggtgaagcagctgagctccaacttcggcgccatctctagcgtgctgaatgacatcctgagccggctggacccccctgaggcagaggtgcagatcgacaggctgatcacaggccgcctgcagagcctgcagacctacgtgacacagcagctgatcagggcagcagagatcagagcctccgccaatctggccgccaccaagatgagcgagtgcgtgctgggacagtccaagagggtggacttttgtggcaagggctatcacctgatgtctttcccacagagcgcccctcacggcgtggtgtttctgcacgtgacctacgtgccagcccaggagaagaacttcaccacagcaccagccatctgccacgatggaaaggcacactttcctagggagggcgtgttcgtgtctaacggcacccactggtttgtgacacagcgcaatttctacgagccacagatcatcaccacagacaatacattcgtgagcggcaactgtgatgtggtgatcggcatcgtgaacaataccgtgtatgatccactgcagcccgagctggactcctttaaggaggagctggataagtacttcaagaatcacacctctcccgacgtggatctgggcgacatctccggcatcaatgcctctgtggtgaacatccagaaggagatcgaccggctgaacgaggtggccaagaatctgaacgagagcctgatcgatctgcaggagctgggcaagtatgagcagtacatcaagggctctggcagagagaacctgtatttccagggaggaggaggcagcggatacatccctgaggcaccaagggacggacaggcctacgtgcgcaaggatggcgagtgggtgctgctgtccacctttctgggccatcatcaccaccaccaccaccactga

SEQ ID NO: 1562 - DNA, 3846 bp, Artificial Sequence
  Description of Artificial Sequence: Synthetic polynucleotide
atgggcatcctgccaagcccaggaatgcccgccctgctgtctctggtgagcctgctgtccgtgctgctgatgggatgcgtggcagagacaggcacacagtgcgtgaacctgaccacaaggacccagctgccccctgcctataccaattctttcacacggggcgtgtactatcccgacaaggtgtttagaagctccgtgctgcactccacacaggatctgtttctgcctttcttttctaacgtgacctggttccacgccatccacgtgtccggcaccaatggcacaaagcggttcgacaatcccgtgctgccttttaacgatggcgtgtacttcgccagcaccgagaagtccaacatcatcagaggctggatctttggcaccacactggactctaagacacagagcctgctgatcgtgaacaatgccaccaacgtggtgatcaaggtgtgcgagttccagttttgtaatgatccattcctgggcgtgtactatcacaagaacaataagtcctggatggagtctgagtttcgcgtgtattctagcgccaacaattgcacatttgagtacgtgagccagcccttcctgatggacctggagggcaagcagggcaatttcaagaacctgagggagttcgtgtttaagaatatcgatggctacttcaagatctacagcaagcacaccccaatcaacctggtgcgcgacctgccacagggattctccgccctggagccactggtggatctgcccatcggcatcaacatcacccggtttcagacactgctggccctgcacagatcctacctgacaccaggcgactcctctagcggatggaccgcaggagctgccgcctactatgtgggctatctgcagccccggaccttcctgctgaagtacaacgagaatggcaccatcacagacgcagtggattgcgccctggaccccctgtctgagacaaagtgtacactgaagagctttaccgtggagaagggcatctatcagacaagcaatttcagggtgcagcctaccgagtccatcgtgcgctttcccaatatcacaaacctgtgcccttttggcgaggtgttcaacgccaccagattcgccagcgtgtacgcctggaatcggaagagaatctccaactgcgtggccgactattctgtgctgtacaactccgcctctttcagcacctttaagtgctatggcgtgtctcccacaaagctgaatgatctgtgctttaccaacgtgtacgccgatagcttcgtgatcaggggagacgaagtgagacagatcgcaccaggacagacaggaaagatcgcagactacaattataagctgcctgacgatttcaccggctgcgtgatcgcctggaactccaacaatctggattctaaagtgggcggcaactacaattatctgtacaggctgtttcgcaagtccaatctgaagccattcgagcgggacatctccacagagatctaccaggccggctctaccccctgcaatggcgtggagggctttaactgttatttccctctgcagtcttacggcttccagccaacaaacggcgtgggctatcagccctacagagtggtggtgctgtcctttgagctgctgcacgcaccagcaacagtgtgcggcccaaagaagtctaccaatctggtgaagaacaagtgcgtgaacttcaacttcaacggactgaccggcacaggcgtgctgaccgagagcaataagaagttcctgccttttcagcagttcggcagggacatcgcagataccacagacgccgtgcgcgaccctcagaccctggagatcctggacatcacaccatgcagcttcggcggcgtgtccgtgatcacaccaggcaccaatacatccaaccaggtggccgtgctgtatcaggacgtgaattgtaccgaggtgcccgtggcaatccacgcagatcagctgacccctacatggcgggtgtactctaccggcagcaacgtgttccagacaagagccggatgcctgatcggagcagagcacgtgaacaatagctatgagtgcgacatccctatcggcgccggcatctgtgccagctaccagacccagacaaactccccatctggagcaggctccgtggccagccagtccatcatcgcctataccatgagcctgggcgccgagaacagcgtggcctactccaacaattctatcgccatccctaccaacttcacaatcagcgtgaccacagagatcattccagtgtctatgaccaagacaagcgtggactgcacaatgtatatctgtggcgatagcaccgagtgctccaacctgctgctgcagtacggctccttttgtacccagctgaatagagccctgacaggcatcgccgtggagcaggataagaacacacaggaggtgttcgcccaggtgaagcagatctacaagaccccacccatcaaggactttggcggcttcaacttcagccagatcctgcctgatccaagcaagccctccaagaggtcttttatcgaggacctgctgttcaacaaggtgaccctggccgatgccggcttcatcaagcagtatggagattgcctgggagacatcgcagcccgcgacctgatctgtgcccagaagtttaatggcctgaccgtgctgcctccactgctgacagatgagatgatcgcccagtacacatctgccctgctggccggcaccatcacaagcggatggaccttcggcgcaggagccgccctgcagatcccttttgccatgcagatggcctataggttcaacggcatcggcgtgacccagaatgtgctgtacgagaaccagaagctgatcgccaatcagtttaacagcgccatcggcaagatccaggactctctgtcctctacagccagcgccctgggcaagctgcaggatgtggtgaatcagaacgcccaggccctgaataccctggtgaagcagctgagctccaacttcggcgccatctctagcgtgctgaatgacatcctgagccggctggacccccctgaggcagaggtgcagatcgacaggctgatcacaggccgcctgcagagcctgcagacctacgtgacacagcagctgatcagggcagcagagatcagagcctccgccaatctggccgccaccaagatgagcgagtgcgtgctgggacagtccaagagggtggacttttgtggcaagggctatcacctgatgtctttcccacagagcgcccctcacggcgtggtgtttctgcacgtgacctacgtgccagcccaggagaagaacttcaccacagcaccagccatctgccacgatggaaaggcacactttcctagggagggcgtgttcgtgtctaacggcacccactggtttgtgacacagcgcaatttctacgagccacagatcatcaccacagacaatacattcgtgagcggcaactgtgatgtggtgatcggcatcgtgaacaataccgtgtatgatccactgcagcccgagctggactcctttaaggaggagctggataagtacttcaagaatcacacctctcccgacgtggatctgggcgacatctccggcatcaatgcctctgtggtgaacatccagaaggagatcgaccggctgaacgaggtggccaagaatctgaacgagagcctgatcgatctgcaggagctgggcaagtatgagcagtacatcaagggctctggcagagagaacctgtatttccagggaggaggaggcagcggatacatccctgaggcaccaagggacggacaggcctacgtgcgcaaggatggcgagtgggtgctgctgtccacctttctgggccatcatcaccaccaccaccaccactga

SEQ ID NO: 1563 - DNA, 3846 bp, Artificial Sequence
  Description of Artificial Sequence: Synthetic polynucleotide
atgggcatcctgccaagcccaggaatgcccgccctgctgtctctggtgagcctgctgtccgtgctgctgatgggatgcgtggcagagacaggcacacagtgcgtgaacctgaccacaaggacccagctgccccctgcctataccaattctttcacacggggcgtgtactatcccgacaaggtgtttagaagctccgtgctgcactccacacaggatctgtttctgcctttcttttctaacgtgacctggttccacgccatccacgtgtccggcaccaatggcacaaagcggttcgacaatcccgtgctgccttttaacgatggcgtgtacttcgccagcaccgagaagtccaacatcatcagaggctggatctttggcaccacactggactctaagacacagagcctgctgatcgtgaacaatgccaccaacgtggtgatcaaggtgtgcgagttccagttttgtaatgatccattcctgggcgtgtactatcacaagaacaataagtcctggatggagtctgagtttcgcgtgtattctagcgccaacaattgcacatttgagtacgtgagccagcccttcctgatggacctggagggcaagcagggcaatttcaagaacctgagggagttcgtgtttaagaatatcgatggctacttcaagatctacagcaagcacaccccaatcaacctggtgcgcgacctgccacagggattctccgccctggagccactggtggatctgcccatcggcatcaacatcacccggtttcagacactgctggccctgcacagatcctacctgacaccaggcgactcctctagcggatggaccgcaggagctgccgcctactatgtgggctatctgcagccccggaccttcctgctgaagtacaacgagaatggcaccatcacagacgcagtggattgcgcccaagaccccctgtctgagacaaagtgtacactgaagagctttaccgtggagaagggcatctatcagacaagcaatttcagggtgcagcctaccgagtccatcgtgcgctttcccaatatcacaaacctgtgcccttttggcgaggtgttcaacgccaccagattcgccagcgtgtacgcctggaatcggaagagaatctccaactgcgtggccgactattctgtgctgtacaactccgcctctttcagcacctttaagtgctatggcgtgtctcccacaaagctgaatgatctgtgctttaccaacgtgtacgccgatagcttcgtgatcaggggagacgaagtgagacagatcgcaccaggacagacaggaaagatcgcagactacaattataagctgcctgacgatttcaccggctgcgtgatcgcctggaactccaacaatctggattctaaagtgggcggcaactacaattatctgtacaggctgtttcgcaagtccaatctgaagccattcgagcgggacatctccacagagatctaccaggccggctctaccccctgcaatggcgtggagggctttaactgttatttccctctgcagtcttacggcttccagccaacaaacggcgtgggctatcagccctacagagtggtggtgctgtcctttgagctgctgcacgcaccagcaacagtgtgcggcccaaagaagtctaccaatctggtgaagaacaagtgcgtgaacttcaacttcaacggactgaccggcacaggcgtgctgaccgagagcaataagaagttcctgccttttcagcagttcggcagggacatcgcagataccacagacgccgtgcgcgaccctcagaccctggagatcctggacatcacaccatgcagcttcggcggcgtgtccgtgatcacaccaggcaccaatacatccaaccaggtggccgtgctgtatcaggacgtgaattgtaccgaggtgcccgtggcaatccacgcagatcagctgacccctacatggcgggtgtactctaccggcagcaacgtgttccagacaagagccggatgcctgatcggagcagagcacgtgaacaatagctatgagtgcgacatccctatcggcgccggcatctgtgccagctaccagacccagacaaactccccatctggagcaggctccgtggccagccagtccatcatcgcctataccatgagcctgggcgccgagaacagcgtggcctactccaacaattctatcgccatccctaccaacttcacaatcagcgtgaccacagagatcctgccagtgtctatgaccaagacaagcgtggactgcacaatgtatatctgtggcgatagcaccgagtgctccaacctgctgctgcagtacggctccttttgtacccagctgaatagagccctgacaggcatcgccgtggagcaggataagaacacacaggaggtgttcgcccaggtgaagcagatctacaagaccccacccatcaaggactttggcggcttcaacttcagccagatcctgcctgatccaagcaagccctccaagaggtcttttatcgaggacctgctgttcaacaaggtgaccctggccgatgccggcttcatcaagcagtatggagattgcctgggagacatcgcagcccgcgacctgatctgtgcccagaagtttaatggcctgaccgtgctgcctccactgctgacagatgagatgatcgcccagtacacatctgccctgctggccggcaccatcacaagcggatggaccttcggcgcaggagccgccctgcagatcccttttgccatgcagatggcctataggttcaacggcatcggcgtgacccagaatgtgctgtacgagaaccagaagctgatcgccaatcagtttaacagcgccatcggcaagatccaggactctctgtcctctacagccagcgccctgggcaagctgcaggatgtggtgaatcagaacgcccaggccctgaataccctggtgaagcagctgagctccaacttcggcgccatctctagcgtgctgaatgacatcctgagccggctggacccccctgaggcagaggtgcagatcgacaggctgatcacaggccgcctgcagagcctgcagacctacgtgacacagcagctgatcagggcagcagagatcagagcctccgccaatctggccgccaccaagatgagcgagtgcgtgctgggacagtccaagagggtggacttttgtggcaagggctatcacctgatgtctttcccacagagcgcccctcacggcgtggtgtttctgcacgtgacctacgtgccagcccaggagaagaacttcaccacagcaccagccatctgccacgatggaaaggcacactttcctagggagggcgtgttcgtgtctaacggcacccactggtttgtgacacagcgcaatttctacgagccacagatcatcaccacagacaatacattcgtgagcggcaactgtgatgtggtgatcggcatcgtgaacaataccgtgtatgatccactgcagcccgagctggactcctttaaggaggagctggataagtacttcaagaatcacacctctcccgacgtggatctgggcgacatctccggcatcaatgcctctgtggtgaacatccagaaggagatcgaccggctgaacgaggtggccaagaatctgaacgagagcctgatcgatctgcaggagctgggcaagtatgagcagtacatcaagggctctggcagagagaacctgtatttccagggaggaggaggcagcggatacatccctgaggcaccaagggacggacaggcctacgtgcgcaaggatggcgagtgggtgctgctgtccacctttctgggccatcatcaccaccaccaccaccactga

SEQ ID NO: 1564 - DNA, 3846 bp, Artificial Sequence
  Description of Artificial Sequence: Synthetic polynucleotide
atgggcatcctgccaagcccaggaatgcccgccctgctgtctctggtgagcctgctgtccgtgctgctgatgggatgcgtggcagagacaggcacacagtgcgtgaacctgaccacaaggacccagctgccccctgcctataccaattctttcacacggggcgtgtactatcccgacaaggtgtttagaagctccgtgctgcactccacacaggatctgtttctgcctttcttttctaacgtgacctggttccacgccatccacgtgtccggcaccaatggcacaaagcggttcgacaatcccgtgctgccttttaacgatggcgtgtacttcgccagcaccgagaagtccaacatcatcagaggctggatctttggcaccacactggactctaagacacagagcctgctgatcgtgaacaatgccaccaacgtggtgatcaaggtgtgcgagttccagttttgtaatgatccattcctgggcgtgtactatcacaagaacaataagtcctggatggagtctgagtttcgcgtgtattctagcgccaacaattgcacatttgagtacgtgagccagcccttcctgatggacctggagggcaagcagggcaatttcaagaacctgagggagttcgtgtttaagaatatcgatggctacttcaagatctacagcaagtacaccccaatcaacctggtgcgcgacctgccacagggattctccgccctggagccactggtggatctgcccatcggcatcaacatcacccggtttcagacactgctggccctgcacagatcctacctgacaccaggcgactcctctagcggatggaccgcaggagctgccgcctactatgtgggctatctgcagccccggaccttcctgctgaagtacaacgagaatggcaccatcacagacgcagtggattgcgccctggaccccctgtctgagacaaagtgtacactgaagagctttaccgtggagaagggcatctatcagacaagcaatttcagggtgcagcctaccgagtccatcgtgcgctttcccaatatcacaaacctgtgcccttttggcgaggtgttcaacgccaccagattcgccagcgtgtacgcctggaatcggaagagaatctccaactgcgtggccgactattctgtgctgtacaactccgcctctttcagcacctttaagtgctatggcgtgtctcccacaaagctgaatgatctgtgctttaccaacgtgtacgccgatagcttcgtgatcaggggagacgaagtgagacagatcgcaccaggacagacaggaaagatcgcagactacaattataagctgcctgacgatttcaccggctgcgtgatcgcctggaactccaacaatctggattctaaagtgggcggcaactacaattatctgtacaggctgtttcgcaagtccaatctgaagccattcgagcgggacatctccacagagatctaccaggccggctctaccccctgcaatggcgtggagggctttaactgttatttccctctgcagtcttacggcttccagccaacaaacggcgtgggctatcagccctacagagtggtggtgctgtcctttgagctgctgcacgcaccagcaacagtgtgcggcccaaagaagtctaccaatctggtgaagaacaagtgcgtgaacttcaacttcaacggactgaccggcacaggcgtgctgaccgagagcaataagaagttcctgccttttcagcagttcggcagggacatcgcagataccacagacgccgtgcgcgaccctcagaccctggagatcctggacatcacaccatgcagcttcggcggcgtgtccgtgatcacaccaggcaccaatacatccaaccaggtggccgtgctgtatcaggacgtgaattgtaccgaggtgcccgtggcaatccacgcagatcagctgacccctacatggcgggtgtactctaccggcagcaacgtgttccagacaagagccggatgcctgatcggagcagagcacgtgaacaatagctatgagtgcgacatccctatcggcgccggcatctgtgccagctaccagacccagacaaactccccatctggagcaggctccgtggccagccagtccatcatcgcctataccatgagcctgggcgccgagaacagcgtggcctactccaacaattctatcgccatccctaccaacttcacaatcagcgtgaccacagagatcctgccagtgtctatgaccaagacaagcgtggactgcacaatgtatatctgtggcgatagcaccgagtgctccaacctgctgctgcagtacggctccttttgtacccagctgaatagagccctgacaggcatcgccgtggagcaggataagaacacacaggaggtgttcgcccaggtgaagcagatctacaagaccccacccatcaaggactttggcggcttcaacttcagccagatcctgcctgatccaagcaagccctccaagaggtcttttatcgaggacctgctgttcaacaaggtgaccctggccgatgccggcttcatcaagcagtatggagattgcctgggagacatcgcagcccgcgacctgatctgtgcccagaagtttaatggcctgaccgtgctgcctccactgctgacagatgagatgatcgcccagtacacatctgccctgctggccggcaccatcacaagcggatggaccttcggcgcaggagccgccctgcagatcccttttgccatgcagatggcctataggttcaacggcatcggcgtgacccagaatgtgctgtacgagaaccagaagctgatcgccaatcagtttaacagcgccatcggcaagatccaggactctctgtcctctacagccagcgccctgggcaagctgcaggatgtggtgaatcagaacgcccaggccctgaataccctggtgaagcagctgagctccaacttcggcgccatctctagcgtgctgaatgacatcctgagccggctggacccccctgaggcagaggtgcagatcgacaggctgatcacaggccgcctgcagagcctgcagacctacgtgacacagcagctgatcagggcagcagagatcagagcctccgccaatctggccgccaccaagatgagcgagtgcgtgctgggacagtccaagagggtggacttttgtggcaagggctatcacctgatgtctttcccacagagcgcccctcacggcgtggtgtttctgcacgtgacctacgtgccagcccaggagaagaacttcaccacagcaccagccatctgccacgatggaaaggcacactttcctagggagggcgtgttcgtgtctaacggcacccactggtttgtgacacagcgcaatttctacgagccacagatcatcaccacagacaatacattcgtgagcggcaactgtgatgtggtgatcggcatcgtgaacaataccgtgtatgatccactgcagcccgagctggactcctttaaggaggagctggataagtacttcaagaatcacacctctcccgacgtggatctgggcgacatctccggcatcaatgcctctgtggtgaacatccagaaggagatcgaccggctgaacgaggtggccaagaatctgaacgagagcctgatcgatctgcaggagctgggcaagtatgagcagtacatcaagggctctggcagagagaacctgtatttccagggaggaggaggcagcggatacatccctgaggcaccaagggacggacaggcctacgtgcgcaaggatggcgagtgggtgctgctgtccacctttctgggccatcatcaccaccaccaccaccactga

SEQ ID NO: 1565 - DNA, 3846 bp, Artificial Sequence
  Description of Artificial Sequence: Synthetic polynucleotide
atgggcatcctgccaagcccaggaatgcccgccctgctgtctctggtgagcctgctgtccgtgctgctgatgggatgcgtggcagagacaggcacacagtgcgtgaacctgaccacaaggacccagctgccccctgcctataccaattctttcacacggggcgtgtactatcccgacaagatctttagaagcaatgtgctgcactccacacaggatctgtttctgcctttcttttctaacgtgacctggttccacgccatccacgtgtccggcaccaatggcacaaagcggttcgacaatcccgtgctgccttttaacgatggcgtgtacttcgccagcaccgagaagtccaacatcatcagaggctggatctttggcaccacactggactctaagacacagagcctgctgatcgtgaacaatgccaccaacgtggtgatcaaggtgtgcgagttccagttttgtaatgatccattcctgggcgtgtactatcacaagaacaataagtcctggatggagtctgagtttcgcgtgtattctagcgccaacaattgcacatttgagtacgtgagccagcccttcctgatggacctggagggcaagcagggcaatttcaagaacctgagggagttcgtgtttaagaatatcgatggctacttcaagatctacagcaagcacaccccaatcaacctggtgcgcgacctgccacagggattctccgccctggagccactgatgaaactgcccatcggcatcaacatcacccggtttcagacactgctggccctgcacagatcctacctgacaccaggcgactcctctagcggatggaccgcaggagctgccgcctactatgtgggctatctgcagccccggaccttcctgctgaagtacaacgagaatggcaccatcacagacgcagtggattgcgccctggaccccctgtctgagacaaagtgtacactgaagagctttaccgtggagaagggcatctatcagacaagcaatttcagggtgcagcctaccgagtccatcgtgcgctttcccaatatcacaaacctgtgcccttttggcgaggtgttcaacgccaccagattcgccagcgtgtacgcctggaatcggaagagaatctccaactgcgtggccgactattctgtgctgtacaactccgcctctttcagcacctttaagtgctatggcgtgtctcccacaaagctgaatgatctgtgctttaccaacgtgtacgccgatagcttcgtgatcaggggagacgaagtgagacagatcgcaccaggacagacaggaaagatcgcagactacaattataagctgcctgacgatttcaccggctgcgtgatcgcctggaactccaacaatctggattctaaagtgggcggcaactacaattatctgtacaggctgtttcgcaagtccaatctgaagccattcgagcgggacatctccacagagatctaccaggccggctctaccccctgcaatggcgtggagggctttaactgttatttccctctgcagtcttacggcttccagccaacaaacggcgtgggctatcagccctacagagtggtggtgctgtcctttgagctgctgcacgcaccagcaacagtgtgcggcccaaagaagtctaccaatctggtgaagaacaagtgcgtgaacttcaacttcaacggactgaccggcacaggcgtgctgaccgagagcaataagaagttcctgccttttcagcagttcggcagggacatcgcagataccacagacgccgtgcgcgaccctcagaccctggagatcctggacatcacaccatgcagcttcggcggcgtgtccgtgatcacaccaggcaccaatacatccaaccaggtggccgtgctgtatcaggacgtgaattgtaccgaggtgcccgtggcaatccacgcagatcagctgacccctacatggcgggtgtactctaccggcagcaacgtgttccagacaagagccggatgcctgatcggagcagagcacgtgaacaatagctatgagtgcgacatccctatcggcgccggcatctgtgccagctaccagacccagacaaactccccatctggagcaggctccgtggccagccagtccatcatcgcctataccatgagcctgggcgccgagaacagcgtggcctactccaacaattctatcgccatccctaccaacttcacaatcagcgtgaccacagagatcctgccagtgtctatgaccaagacaagcgtggactgcacaatgtatatctgtggcgatagcaccgagtgctccaacctgctgctgcagtacggctccttttgtacccagctgaatagagccctgacaggcatcgccgtggagcaggataagaacacacaggaggtgttcgcccaggtgaagcagatctacaagaccccacccatcaaggactttggcggcttcaacttcagccagatcctgcctgatccaagcaagccctccaagaggtcttttatcgaggacctgctgttcaacaaggtgaccctggccgatgccggcttcatcaagcagtatggagattgcctgggagacatcgcagcccgcgacctgatctgtgcccagaagtttaatggcctgaccgtgctgcctccactgctgacagatgagatgatcgcccagtacacatctgccctgctggccggcaccatcacaagcggatggaccttcggcgcaggagccgccctgcagatcccttttgccatgcagatggcctataggttcaacggcatcggcgtgacccagaatgtgctgtacgagaaccagaagctgatcgccaatcagtttaacagcgccatcggcaagatccaggactctctgtcctctacagccagcgccctgggcaagctgcaggatgtggtgaatcagaacgcccaggccctgaataccctggtgaagcagctgagctccaacttcggcgccatctctagcgtgctgaatgacatcctgagccggctggacccccctgaggcagaggtgcagatcgacaggctgatcacaggccgcctgcagagcctgcagacctacgtgacacagcagctgatcagggcagcagagatcagagcctccgccaatctggccgccaccaagatgagcgagtgcgtgctgggacagtccaagagggtggacttttgtggcaagggctatcacctgatgtctttcccacagagcgcccctcacggcgtggtgtttctgcacgtgacctacgtgccagcccaggagaagaacttcaccacagcaccagccatctgccacgatggaaaggcacactttcctagggagggcgtgttcgtgtctaacggcacccactggtttgtgacacagcgcaatttctacgagccacagatcatcaccacagacaatacattcgtgagcggcaactgtgatgtggtgatcggcatcgtgaacaataccgtgtatgatccactgcagcccgagctggactcctttaaggaggagctggataagtacttcaagaatcacacctctcccgacgtggatctgggcgacatctccggcatcaatgcctctgtggtgaacatccagaaggagatcgaccggctgaacgaggtggccaagaatctgaacgagagcctgatcgatctgcaggagctgggcaagtatgagcagtacatcaagggctctggcagagagaacctgtatttccagggaggaggaggcagcggatacatccctgaggcaccaagggacggacaggcctacgtgcgcaaggatggcgagtgggtgctgctgtccacctttctgggccatcatcaccaccaccaccaccactga

SEQ ID NO: 1566 - DNA, 3846 bp, Artificial Sequence
  Description of Artificial Sequence: Synthetic polynucleotide
atgggcatcctgccaagcccaggaatgcccgccctgctgtctctggtgagcctgctgtccgtgctgctgatgggatgcgtggcagagacaggcacacagtgcgtgaacctgaccacaaggacccagctgccccctgcctataccaattctttcacacggggcgtgtactatcccgacaaggtgtttagaagcgatgtgctgcactccacacaggatctgtttctgcctttcttttctaacgtgacctggttccacgccatccacgtgtccggcaccaatggcacaaagcggttcgacaatcccgtgctgccttttaacgatggcgtgtacttcgccagcaccgagaagtccaacatcatcagaggctggatctttggcaccacactggactctaagacacagagcctgctgatcgtgaacaatgccaccaacgtggtgatcaaggtgtgcgagttccagttttgtgacgatccattcctgggcgtgtactatcacaagaacaataagtcctggatggagaaagagtttcgcgtgtattctagcgccaacaattgcacatttgagtacgtgagccagcccttcctgatggacctggggggcaagcagggcaatttcaagaacctgagggagttcgtgtttaagaatatcgatggctacttcaagatctacagcaagcacaccccaatcaacctggtgcgcgacctgccacagggattctccgccctggagccactgatggatctgcccatcggcatcaacatcacccggtttcagacactgctggccctgcacagatcctacctgacaccaggcgactcctctagcggatggaccgcaggagctgccgcctactatgtgggctatctgcagccccggaccttcctgctgaagtacaacgagaatggcaccatcacagacgcagtggattgcgccctggaccccctgtctgagacaaagtgtacactgaagagctttaccgtggagaagggcatctatcagacaagcaatttcagggtgcagcctaccgagtccatcgtgcgctttcccaatatcacaaacctgtgcccttttggcgaggtgttcaacgccaccagattcgccagcgtgtacgcctggaatcggaagagaatctccaactgcgtggccgactattctgtgctgtacaactccgcctctttcagcacctttaagtgctatggcgtgtctcccacaaagctgaatgatctgtgctttaccaacgtgtacgccgatagcttcgtgatcaggggagacgaagtgagacagatcgcaccaggacagacaggaaagatcgcagactacaattataagctgcctgacgatttcaccggctgcgtgatcgcctggaactccaacaatctggattctaaagtgggcggcaactacaattatctgtacaggctgtttcgcaagtccaatctgaagccattcgagcgggacatctccacagagatctaccaggccggctctaccccctgcaatggcgtggagggctttaactgttatttccctctgcagtcttacggcttccagccaacaaacggcgtgggctatcagccctacagagtggtggtgctgtcctttgagctgctgcacgcaccagcaacagtgtgcggcccaaagaagtctaccaatctggtgaagaacaagtgcgtgaacttcaacttcaacggactgaccggcacaggcgtgctgaccgagagcaataagaagttcctgccttttcagcagttcggcagggacatcgcagataatacagacgccgtgcgcgaccctcagaccctggagatcctggacatcacaccatgcagcttcggcggcgtgtccgtgatcacaccaggcaccaatacatccaaccaggtggccgtgctgtatcaggacgtgaattgtaccgaggtgcccaatgcaatccacgcagatcagctgacccctacatggcgggtgtactctaccggcagcaacgtgttccagacaagagccggatgcctgatcggagcagagcacgtgaacaatagctatgagtgcgacatccctatcggcgccggcatctgtgccagctaccagacccagacaaactccccatctggagcaggctccgtggccagccagtccatcatcgcctataccatgagcctgggcgccgagaacagcgtggcctactccaacaattctatcgccatccctaccaacttcacaatcagcgtgaccacagagatcctgccagtgtctatgaccaagacaagcgtggactgcacaatgtatatctgtggcgatagcaccgagtgctccaacctgctgctgcagtacggctccttttgtacccagctgaatagagccctgcaaggcatcgcccgagagcaggataagaacacacaggaggtgttcgcccaggtgaagcagatctacaagaccccacccatcaaggactttggcggcttcaacttcagccagatcctgcctgatccaagcaagccctccaagaggtcttttatcgaggacctgctgttcaacaaggtgaccctggccgatgccggcttcatcaagcagtatggagattgcctgggagacatcgcagcccgcgacctgatctgtgcccagaagtttaatggcctgaccgtgctgcctccactgctgacagatgagatgatcgcccagtacacatctgccctgctggccggcaccatcacaagcggatggaccttcggcgcaggagccgccctgcagatcccttttgccatgcagatggcctataggttcaacggcatcggcgtgacccagaatgtgctgtacgagaaccagaagctgatcgccaatcagtttaacaaagccatcggcaagatccaggactctctgtcctctacagccagcgccctgggcaagctgcaggatgtggtgaatcagaacgcccaggccctgaataccctggtgaagcagctgagctccaacttcggcgccatctctagcgtgctgaatgacatcctgagccggctggacccccctgaggcagaggtgcagatcgacaggctgatcacaggccgcctgcagagcctgcagacctacgtgacacagcagctgatcagggcagcagagatcagagcctccgccaatctggccgccaccaagatgagcgagtgcgtgctgggacagtccaagagggtggacttttgtggcaagggctatcacctgatgtctttcccacagagcgcccctcacggcgtggtgtttctgcacgtgacctacgtgccagcccaggagaagaacttcaccacagcaccagccatctgccacgatggaaaggcattttttcctagggagggcgtgttcgtgtctaacggcacccaatggtttgtgacacagcgcaatttctacgagccacagatcatcaccacagacaatacattcgtgagcggcaactgtgatgtggtgatcggcatcgtgaacaataccgtgtatgatccactgcagcccgagctggactcctttaaggaggagctggataagtacttcaagaatcacacctctcccgacgtggatctgggcgacatctccggcatcaatgcctctgtggtgaacatccagaaggagatcgaccggctgaacgaggtggccaagaatctgaacgagagcctgatcgatctgcaggagctgggcaagtatgagcagtacatcaagggctctggcagagagaacctgtatttccagggaggaggaggcagcggatacatccctgaggcaccaagggacggacaggcctacgtgcgcaaggatggcgagtgggtgctgctgtccacctttctgggccatcatcaccaccaccaccaccactga

SEQ ID NO: 1567 - DNA, 3846 bp, Artificial Sequence
  Description of Artificial Sequence: Synthetic polynucleotide
atgggcatcctgccaagcccaggaatgcccgccctgctgtctctggtgagcctgctgtccgtgctgctgatgggatgcgtggcagagacaggcacacagtgcgtgaacctgaccacaaggacccagctgccccctgcctataccaattctttcacacggggcgtgtactatcccgacaaggtgtttagaagctccgtgctgcactccacacaggatctgtttctgcctttcttttctaacgtgacctggttccacgccatccacgtgtccggcaccaatggcacaaagcggttcgacaatcccgtgctgccttttaacgatggcgtgtacttcgccagcaccgagaagtccaacatcatcagaggctggatctttggcaccacactggactctaagacacagagcctgctgatcgtgaacaatgccaccaacgtggtgatcaaggtgtgcgagttccagttttgtaatgatccattcctgggcgtgtactatcacaagaacaataagtcctggatggagtctgagtttcgcgtgtattctagcgccaacaattgcacatttgagtacgtgagccagcccttcctgatggacctggagggcaagcagggcaatttcaagaacctgagggagttcgtgtttaagaatatcgatggctacttcaagatctacagcaagcacaccccaatcaacctggtgcgcgacctgccacagggattctccgccctggagccactggtggatctgcccatcggcatcaacatcacccggtttcagacactgctggccctgcacagatcctacctgacaccaggcgactcctctagcggatggaccgcaggagctgccgcctactatgtgggctatctgcagccccggaccttcctgctgaagtacaacgagaatggcaccatcacagacgcagtggattgcgccctggaccccctgtctgagacaaagtgtacactgaagagctttaccgtggagaagggcatctatcagacaagcaatttcagggtgcagcctaccgagtccatcgtgcgctttcccaatatcacaaacctgtgcccttttggcgaggtgttcaacgccaccagattcgccagcgtgtacgcctggaatcggaagagaatctccaactgcgtggccgactattctgtgctgtacaactccgcctctttcagcacctttaagtgctatggcgtgtctcccacaaagctgaatgatctgtgctttaccaacgtgtacgccgatagcttcgtgatcaggggagacgaagtgagacagatcgcaccaggacagacaggaaagatcgcagactacaattataagctgcctgacgatttcaccggctgcgtgatcgcctggaactccaacaatctggattctaaagtgggcggcaactacaattatctgtacaggctgtttcgcaagtccaatctgaagccattcgagcgggacatctccacagagatctaccaggccggctctaccccctgcaatggcgtggagggctttaactgttatttccctctgcagtcttacggcttccagccaacaaacggcgtgggctatcagccctacagagtggtggtgctgtcctttgagctgctgcacgcaccagcaacagtgtgcggcccaaagaagtctaccaatctggtgaagaacaagtgcgtgaacttcaacttcaacggactgaccggcacaggcgtgctgaccgagagcaataagaagttcctgccttttcagcagttcggcagggacatcgcagataccacagacgccgtgcgcgaccctcagaccctggagatcctggacatcacaccatgcagcttcggcggcgtgtccgtgatcacaccaggcaccaatacatccaaccaggtggccgtgctgtatcaggacgtgaattgtaccgaggtgcccgtggcaatccacgcagatcagctgacccctacatggcgggtgtactctaccggcagcaacgtgttccagacaagagccggatgcctgatcggagcagagcacgtgaacaatagctatgagtgcgacatccctatcggcgccggcatctgtgccagctaccagacccagacaaactccccatctggagcaggctccgtggccagccagtccatcatcgcctataccatgagcctgggcgccgagaacagcgtggcctactccaacaattctatcgccatccctaccaacttcacaatcagcgtgaccacagagatcattccagtgtctatgccgaagacaagcgtggactgcacaatgtatatctgtggcgatagcaccgagtgctccaacctgctgctgcagtacggctccttttgtacccagctgaatagagccctgaacggcatcgcccgagagcaggataagaacacacaggaggtgttcgcccaggtgaagcagatctacaagaccccacccatcaaggactttggcggcttcaacttcagccagatcctgcctgatccaagcaagccctccaagaggtcttttatcgaggacctgctgttcaacaaggtgaccctggccgatgccggcttcatcaagcagtatggagattgcctgggagacatcgcagcccgcgacctgatctgtgcccagaagtttaatggcctgaccgtgctgcctccactgctgacagatgagatgatcgcccagtacacatctgccctgctggccggcaccatcacaagcggatggaccttcggcgcaggagccgccctgcagatcccttttgccatgcagatggcctataggttcaacggcatcggcgtgacccagaatgtgctgtacgagaaccagaagctgatcgccaatcagtttaacagcgccatcggcaagatccaggactctctgtcctctacagccagcgccctgggcaagctgcaggatgtggtgaatcagaacgcccaggccctgaataccctggtgaagcagctgagctccaacttcggcgccatctctagcgtgctgaatgacatcctgagccggctggacccccctgaggcagaggtgcagatcgacaggctgatcacaggccgcctgcagagcctgcagacctacgtgacacagcagctgatcagggcagcagagatcagagcctccgccaatctggccgccaccaagatgagcgagtgcgtgctgggacagtccaagagggtggacttttgtggcaagggctatcacctgatgtctttcccacagagcgcccctcacggcgtggtgtttctgcacgtgacctacgtgccagcccaggagaagaacttcaccacagcaccagccatctgccacgatggaaaggcacactttcctagggagggcgtgttcgtgtctaacggcacccactggtttgtgacacagcgcaatttctacgagccacagatcatcaccacagacaatacattcgtgagcggcaactgtgatgtggtgatcggcatcgtgaacaataccgtgtatgatccactgcagcccgagctggactcctttaaggaggagctggataagtacttcaagaatcacacctctcccgacgtggatctgggcgacatctccggcatcaatgcctctgtggtgaacatccagaaggagatcgaccggctgaacgaggtggccaagaatctgaacgagagcctgatcgatctgcaggagctgggcaagtatgagcagtacatcaagggctctggcagagagaacctgtatttccagggaggaggaggcagcggatacatccctgaggcaccaagggacggacaggcctacgtgcgcaaggatggcgagtgggtgctgctgtccacctttctgggccatcatcaccaccaccaccaccactga

SEQ ID NO: 1568 - DNA, 3846 bp, Artificial Sequence
  Description of Artificial Sequence: Synthetic polynucleotide
atgggcatcctgccaagcccaggaatgcccgccctgctgtctctggtgagcctgctgtccgtgctgctgatgggatgcgtggcagagacaggcacacagtgcgtgaacctgaccacaaggacccagctgccccctgcctataccaattctttcacacggggcgtgtactatcccgacaaggtgtttagaagctccgtgctgcactccacacaggatctgtttctgcctttcttttctaacgtgacctggttccacgccatccacgtgtccggcaccaatggcacaaagcggttcgacaatcccgtgctgccttttaacgatggcgtgtacttcgccagcaccgagaagtccaacatcatcagaggctggatctttggcaccacactggactctaagacacagagcctgctgatcgtgaacaatgccaccaacgtggtgatcaaggtgtgcgagttccagttttgtaatgatccattcctgggcgtgtactatcacaagaacaataagtcctggatggagtctgagtttcgcgtgtattctagcgccaacaattgcacatttgagtacgtgagccagcccttcctgatggacctggagggcaagcagggcaatttcaagaacctgagggagttcgtgtttaagaatatcgatggctacttcaagatctacagcaagcacaccccaatcaacctggtgcgcgacctgccacagggattctccgccctggagccactggtggatctgcccatcggcatcaacatcacccggtttcagacactgctggccctgcacagatcctacctgacaccaggcgactcctctagcggatggaccgcaggagctgccgcctactatgtgggctatctgcagccccggaccttcctgctgaagtacaacgagaatggcaccatcacagacgcagtggattgcgccctggaccccctgtctgagacaaagtgtacactgaagagctttaccgtggagaagggcatctatcagacaagcaatttcagggtgcagcctaccgagtccatcgtgcgctttcccaatatcacaaacctgtgcccttttggcgaggtgttcaacgccaccagattcgccagcgtgtacgcctggaatcggaagagaatctccaactgcgtggccgactattctgtgctgtacaactccgcctctttcagcacctttaagtgctatggcgtgtctcccacaaagctgaatgatctgtgctttaccaacgtgtacgccgatagcttcgtgatcaggggagacgaagtgagacagatcgcaccaggacagacaggaaagatcgcagactacaattataagctgcctgacgatttcaccggctgcgtgatcgcctggaactccaacaatctggattctaaagtgggcggcaactacaattatctgtacaggctgtttcgcaagtccaatctgaagccattcgagcgggacatctccacagagatctaccaggccggctctaccccctgcaatggcgtggagggctttaactgttatttccctctgcagtcttacggcttccagccaacaaacggcgtgggctatcagccctacagagtggtggtgctgtcctttgagctgctgcacgcaccagcaacagtgtgcggcccaaagaagtctaccaatctggtgaagaacaagtgcgtgaacttcaacttcaacggactgaccggcacaggcgtgctgaccgagagcaataagaagttcctgccttttcagcagttcggcagggacatcgcagataccacagacgccgtgcgcgaccctcagaccctggagatcctggacatcacaccatgcagcttcggcggcgtgtccgtgatcacaccaggcaccaatacatccaaccaggtggccgtgctgtatcaggacgtgaattgtaccgaggtgcccgtggcaatccacgcagatcagctgacccctacatggcgggtgtactctaccggcagcaacgtgttccagacaagagccggatgcctgatcggagcagagcacgtgaacaatagctatgagtgcgacatccctatcggcgccggcatctgtgccagctaccagacccagacaaactccccatctggagcaggctccgtggccagccagtccatcatcgcctataccatgagcctgggcgccgagaacagcgtggcctactccaacaattctatcgccatccctaccaacttcaaaatcagcgtgaccacagagatcctgccagtgtctatgaccaagacaagcgtggactgcacaatgtatatctgtggcgatagcaccgagtgctccaacctgctgctgcagtacggctccttttgtacccagctgaatagagccctgacaggcatcgccgtggagcaggataagaacacacaggaggtgttcgcccaggtgaagcagatctacaagaccccacccatcaaggactttggcggcttcaacttcagccagatcctgcctgatccaagcaagccctccaagaggtcttttatcgaggacctgctgttcaacaaggtgaccctggccgatgccggcttcatcaagcagtatggagattgcctgggagacatcgcagcccgcgacctgatctgtgcccagaagtttaatggcctgaccgtgctgcctccactgctgacagatgagatgatcgcccagtacacatctgccctgctggccggcaccatcacaagcggatggaccttcggcgcaggagccgccctgcagatcccttttgccatgcagatggcctataggttcaacggcatcggcgtgacccagaatgtgctgtacgagaaccagaagctgatcgccaatcagtttaacagcgccatcggcaagatccaggactctctgtcctctacagccagcgccctgggcaagctgcaggatgtggtgaatcagaacgcccaggccctgaataccctggtgaagcagctgagctccaacttcggcgccatctctagcgtgctgaatgacatcctgagccggctggacccccctgaggcagaggtgcagatcgacaggctgatcacaggccgcctgcagagcctgcagacctacgtgacacagcagctgatcagggcagcagagatcagagcctccgccaatctggccgccaccaagatgagcgagtgcgtgctgggacagtccaagagggtggacttttgtggcaagggctatcacctgatgtctttcccacagagcgcccctcacggcgtggtgtttctgcacgtgacctacgtgccagcccaggagaagaacttcaccacagcaccagccatctgccacgatggaaaggcacactttcctagggagggcgtgttcgtgtctaacggcacccactggtttgtgacacagcgcaatttctacgagccacagatcatcaccacagacaatacattcgtgagcggcaactgtgatgtggtgatcggcatcgtgaacaataccgtgtatgatccactgcagcccgagctggactcctttaaggaggagctggataagtacttcaagaatcacacctctcccgacgtggatctgggcgacatctccggcatcaatgcctctgtggtgaacatccagaaggagatcgaccggctgaacgaggtggccaagaatctgaacgagagcctgatcgatctgcaggagctgggcaagtatgagcagtacatcaagggctctggcagagagaacctgtatttccagggaggaggaggcagcggatacatccctgaggcaccaagggacggacaggcctacgtgcgcaaggatggcgagtgggtgctgctgtccacctttctgggccatcatcaccaccaccaccaccactga

SEQ ID NO: 1569 - DNA, 3846 bp, Artificial Sequence
  Description of Artificial Sequence: Synthetic polynucleotide
atgggcatcctgccaagcccaggaatgcccgccctgctgtctctggtgagcctgctgtccgtgctgctgatgggatgcgtggcagagacaggcacacagtgcgtgaacctgaccacaaggacccagctgccccctgcctataccaattctttcacacggggcgtgtactatcccgacaaggtgtttagaagctccgtgctgcactccacacaggatctgtttctgcctttcttttctaacgtgacctggttccacgccatccacgtgtccggcaccaatggcacaaagcggttcgacaatcccgtgctgccttttaacgatggcgtgtacttcgccagcaccgagaagtccaacatcatcagaggctggatctttggcaccacactggactctaagacacagagcctgctgatcgtgaacaatgccaccaacgtggtgatcaaggtgtgcgagttccagttttgtaatgatccattcctgggcgtgtactatcacaagaacaataagtcctggatggagtctgagtttcgcgtgtattctagcgccaacaattgcacatttgagtacgtgagccagcccttcctgatggacctggagggcaagcagggcaatttcaagaacctgagggagttcgtgtttaagaatatcgatggctacttcaagatctacagcaagcacaccccaatcaacctggtgcgcgacctgccacagggattctccgccctggagccactggtggatctgcccatcggcatcaacatcacccggtttcagacactgctggccctgcacagatcctacctgacaccaggcgactcctctagcggatggaccgcaggagctgccgcctactatgtgggctatctgcagccccggaccttcctgctgaagtacaacgagaatggcaccatcacagacgcagtggattgcgccctggaccccctgtctgagacaaagtgtacactgaagagctttaccgtggagaagggcatctatcagacaagcaatttcagggtgcagcctaccgagtccatcgtgcgctttcccaatatcacaaacctgtgcccttttggcgaggtgttcaacgccaccagattcgccagcgtgtacgcctggaatcggaagagaatctccaactgcgtggccgactattctgtgctgtacaactccgcctctttcagcacctttaagtgctatggcgtgtctcccacaaagctgaatgatctgtgctttaccaacgtgtacgccgatagcttcgtgatcaggggagacgaagtgagacagatcgcaccaggacagacaggaaagatcgcagactacaattataagctgcctgacgatttcaccggctgcgtgatcgcctggaactccaacaatctggattctaaagtgggcggcaactacaattatctgtacaggctgtttcgcaagtccaatctgaagccattcgagcgggacatctccacagagatctaccaggccggctctaccccctgcaatggcgtggagggctttaactgttatttccctctgcagtcttacggcttccagccaacaaacggcgtgggctatcagccctacagagtggtggtgctgtcctttgagctgctgcacgcaccagcaacagtgtgcggcccaaagaagtctaccaatctggtgaagaacaagtgcgtgaacttcaacttcaacggactgaccggcacaggcgtgctgaccgagagcaataagaagttcctgccttttcagcagttcggcagggacatcgcagataccacagacgccgtgcgcgaccctcagaccctggagatcctggacatcacaccatgcagcttcggcggcgtgtccgtgatcacaccaggcaccaatacatccaaccaggtggccgtgctgtatcaggacgtgaattgtaccgaggtgcccgtggcaatccacgcagatcagctgacccctacatggcgggtgtactctaccggcagcaacgtgttccagacaagagccggatgcctgatcggagcagagcacgtgaacaatagctatgagtgcgacatccctatcggcgccggcatctgtgccagctaccagacccagacaaactccccatctggagcaggctccgtggccagccagtccatcatcgcctataccatgagcctgggcgccgagaacagcgtggcctactccaacaattctatcgccatccctaccaacttcacaatcagcgtgaccacagagatcctgccagtgtctatgaccaagacaagcgtggactgcacaatgtatatctgtggcgatagcaccgagtgctccaacctgctgctgcagtacggctccttttgtacccagctgaatagagccctgacaggcatcgccgtggagcaggataagaacacacaggaggtgttcgcccaggtgaagcagatctacaagaccccacccatcaaggactttggcggcttcaacttcagccagatcctgcctgatccaagcaagccctccaagaggtcttttatcgaggacctgctgttcaacaaggtgaccctggccgatgccggcttcatcaagcagtatggagattgcctgggagacatcgcagcccgcgacctgatctgtgcccagaagtttaatggcctgaccgtgctgcctccactgctgacagatgagatgatcgcccagtacacatctgccctgctggccggcaccatcacaagcggatggaccttcggcgcaggagccgccctgcagatcccttttgccatgcagatggcctataggttcaacggcatcggcgtgacccagaatgtgctgtacgagaaccagaagctgatcgccaatcagtttaacagcgccatcggcaagatccaggacgggctgtcctctacagccagcgccctgggcaagctgcaggatgtggtgaatcagaacgcccaggccctgaataccctggtgaagcagctgagctccaacttcggcgccatctctagcgtgctgaatgacatcctgagccggctggacccccctgaggcagaggtgcagatcgacaggctgatcacaggccgcctgcagagcctgcagacctacgtgacacagcagctgatcagggcagcagagatcagagcctccgccaatctggccgccaccaagatgagcgagtgcgtgctgggacagtccaagagggtggacttttgtggcaagggctatcacctgatgtctttcccacagagcgcccctcacggcgtggtgtttctgcacgtgacctacgtgccagcccaggagaagaacttcaccacagcaccagccatctgccacgatggaaaggcacactttcctagggagggcgtgttcgtgtctaacggcacccactggtttgtgacacagcgcaatttctacgagccacagatcatcaccacagacaatacattcgtgagcggcaactgtgatgtggtgatcggcatcgtgaacaataccgtgtatgatccactgcagcccgagctggactcctttaaggaggagctggataagtacttcaagaatcacacctctcccgacgtggatctgggcgacatctccggcatcaatgcctctgtggtgaacatccagaaggagatcgaccggctgaacgaggtggccaagaatctgaacgagagcctgatcgatctgcaggagctgggcaagtatgagcagtacatcaagggctctggcagagagaacctgtatttccagggaggaggaggcagcggatacatccctgaggcaccaagggacggacaggcctacgtgcgcaaggatggcgagtgggtgctgctgtccacctttctgggccatcatcaccaccaccaccaccactga

SEQ ID NO: 1570 - DNA, 3846 bp, Artificial Sequence
  Description of Artificial Sequence: Synthetic polynucleotide
atgggcatcctgccaagcccaggaatgcccgccctgctgtctctggtgagcctgctgtccgtgctgctgatgggatgcgtggcagagacaggcacacagtgcgtgaacctgaccacaaggacccagctgccccctgcctataccaattctttcacacggggcgtgtactatcccgacaaggtgtttagaagctccgtgctgcactccacacaggatctgtttctgcctttcttttctaacgtgacctggttccacgccatccacgtgtccggcaccaatggcacaaagcggttcgacaatcccgtgctgccttttaacgatggcgtgtacttcgccagcaccgagaagtccaacatcatcagaggctggatctttggcaccacactggactctaagacacagagcctgctgatcgtgaacaatgccaccaacgtggtgatcaaggtgtgcgagttccagttttgtaatgatccattcctgggcgtgtactatcacaagaacaataagtcctggatggagtctgagtttcgcgtgtattctagcgccaacaattgcacatttgagtacgtgagccagcccttcctgatggacctggagggcaagcagggcaatttcaagaacctgagggagttcgtgtttaagaatatcgatggctacttcaagatctacagcaagtttaccccaatcaacctggtgcgcgacctgccacagggattctccgccctggagccactggtggatctgcccatcggcatcaacatcacccggtttcagacactgctggccctgcacagatcctacctgacaccaggcgactcctctagcggatggaccgcaggagctgccgcctactatgtgggctatctgcagccccggaccttcctgctgaagtacaacgagaatggcaccatcacagacgcagtggattgcgccctggaccccctgtctgagacaaagtgtacactgaagagctttaccgtggagaagggcatctatcagacaagcaatttcagggtgcagcctaccgagtccatcgtgcgctttcccaatatcacaaacctgtgcccttttggcgaggtgttcaacgccaccagattcgccagcgtgtacgcctggaatcggaagagaatctccaactgcgtggccgactattctgtgctgtacaactccgcctctttcagcacctttaagtgctatggcgtgtctcccacaaagctgaatgatctgtgctttaccaacgtgtacgccgatagcttcgtgatcaggggagacgaagtgagacagatcgcaccaggacagacaggaaagatcgcagactacaattataagctgcctgacgatttcaccggctgcgtgatcgcctggaactccaacaatctggattctaaagtgggcggcaactacaattatctgtacaggctgtttcgcaagtccaatctgaagccattcgagcgggacatctccacagagatctaccaggccggctctaccccctgcaatggcgtggagggctttaactgttatttccctctgcagtcttacggcttccagccaacaaacggcgtgggctatcagccctacagagtggtggtgctgtcctttgagctgctgcacgcaccagcaacagtgtgcggcccaaagaagtctaccaatctggtgaagaacaagtgcgtgaacttcaacttcaacggactgaccggcacaggcgtgctgaccgagagcaataagaagttcctgccttttcagcagttcggcagggacatcgcagataccacagacgccgtgcgcgaccctcagaccctggagatcctggacatcacaccatgcagcttcggcggcgtgtccgtgatcacaccaggcaccaatacatccaaccaggtggccgtgctgtatcaggacgtgaattgtaccgaggtgcccgtggcaatccacgcagatcagctgacccctacatggcgggtgtactctaccggcagcaacgtgttccagacaagagccggatgcctgatcggagcagagcacgtgaacaatagctatgagtgcgacatccctatcggcgccggcatctgtgccagctaccagacccagacaaactccccatctggagcaggctccgtggccagccagtccatcatcgcctataccatgagcctgggcgccgagaacagcgtggcctactccaacaattctatcgccatccctaccaacttcacaatcagcgtgaccacagagatcctgccagtgtctatgaccaagacaagcgtggactgcacaatgtatatctgtggcgatagcaccgagtgctccaacctgctgctgcagtacggctccttttgtacccagctgaatagagccctgacaggcatcgccgtggagcaggataagaacacacaggaggtgttcgcccaggtgaagcagatctacaagaccccacccatcaaggactttggcggcttcaacttcagccagatcctgcctgatccaagcaagccctccaagaggtcttttatcgaggacctgctgttcaacaaggtgaccctggccgatgccggcttcatcaagcagtatggagattgcctgggagacatcgcagcccgcgacctgatctgtgcccagaagtttaatggcctgaccgtgctgcctccactgctgacagatgagatgatcgcccagtacacatctgccctgctggccggcaccatcacaagcggatggaccttcggcgcaggagccgccctgcagatcccttttgccatgcagatggcctataggttcaacggcatcggcgtgacccagaatgtgctgtacgagaaccagaagctgatcgccaatcagtttaacagcgccatcggcaagatccaggactctctgtcctctacagccagcgccctgggcaagctgcaggatgtggtgaatcagaacgcccaggccctgaataccctggtgaagcagctgagctccaacttcggcgccatctctagcgtgctgaatgacatcctgagccggctggacccccctgaggcagaggtgcagatcgacaggctgatcacaggccgcctgcagagcctgcagacctacgtgacacagcagctgatcagggcagcagagatcagagcctccgccaatctggccgccaccaagatgagcgagtgcgtgctgggacagtccaagagggtggacttttgtggcaagggctatcacctgatgtctttcccacagagcgcccctcacggcgtggtgtttctgcacgtgacctacgtgccagcccaggagaagaacttcaccacagcaccagccatctgccacgatggaaaggcacactttcctagggagggcgtgttcgtgtctaacggcacccactggtttgtgacacagcgcaatttctacgagccacagatcatcaccacagacaatacattcgtgagcggcaactgtgatgtggtgatcggcatcgtgaacaataccgtgtatgatccactgcagcccgagctggactcctttaaggaggagctggataagtacttcaagaatcacacctctcccgacgtggatctgggcgacatctccggcatcaatgcctctgtggtgaacatccagaaggagatcgaccggctgaacgaggtggccaagaatctgaacgagagcctgatcgatctgcaggagctgggcaagtatgagcagtacatcaagggctctggcagagagaacctgtatttccagggaggaggaggcagcggatacatccctgaggcaccaagggacggacaggcctacgtgcgcaaggatggcgagtgggtgctgctgtccacctttctgggccatcatcaccaccaccaccaccactga

SEQ ID NO: 1571 - DNA, 3846 bp, Artificial Sequence
  Description of Artificial Sequence: Synthetic polynucleotide
atgggcatcctgccaagcccaggaatgcccgccctgctgtctctggtgagcctgctgtccgtgctgctgatgggatgcgtggcagagacaggcacacagtgcgtgaacctgaccacaaggacccagctgccccctgcctataccaattctttcacacggggcgtgtactatcccgacaaggtgtttagaagcgatgtgctgcactccacacaggatctgtttctgcctttcttttctaacgtgacctggttccacgccatccacgtgtccggcaccaatggcacaaagcggttcgacaatcccgtgctgccttttaacgatggcgtgtacttcgccagcaccgagaagtccaacatcatcagaggctggatctttggcaccacactggactctaagacacagagcctgctgatcgtgaacaatgccaccaacgtggtgatcaaggtgtgcgagttccagttttgtgaaaatccattcctgggcgtgtactatcacaagaacaataagtcctggatggagaaagagtttcgcgtgtattctagcgccaacaattgcacatttgagtacgtgagccagcccttcctgatggacctgggtggcaagcagggcaatttcaagtggctgagggagttcgtgtttaagaatatcgatggctacttcaagatctacagcaagcacaccccaatcaacctggtgcgcgacctgccacagggattctccgccctggagccactgatggatctgcccatcggcatcaacatcacccggtttcagacactgctggccctgcacagatcctacctgacaccaggcgactcctctagcggatggaccgcaggagctgccgcctactatgtgggctatctgcagccccggaccttcctgctgaagtacaacgagaatggcaccatcacagacgcagtggattgcgcctatgaccccctgtctgagacaaagtgtacactgaagagctttaccgtggagaagggcatctatcagacaagcaatttcagggtgcagcctaccgagtccatcgtgcgctttcccaatatcacaaacctgtgcccttttggcgaggtgttcaacgccaccagattcgccagcgtgtacgcctggaatcggaagagaatctccaactgcgtggccgactattctgtgctgtacaactccgcctctttcagcacctttaagtgctatggcgtgtctcccacaaagctgaatgatctgtgctttaccaacgtgtacgccgatagcttcgtgatcaggggagacgaagtgagacagatcgcaccaggacagacaggaaagatcgcagactacaattataagctgcctgacgatttcaccggctgcgtgatcgcctggaactccaacaatctggattctaaagtgggcggcaactacaattatctgtacaggctgtttcgcaagtccaatctgaagccattcgagcgggacatctccacagagatctaccaggccggctctaccccctgcaatggcgtggagggctttaactgttatttccctctgcagtcttacggcttccagccaacaaacggcgtgggctatcagccctacagagtggtggtgctgtcctttgagctgctgcacgcaccagcaacagtgtgcggcccaaagaagtctaccaatctggtgaagaacaagtgcgtgaacttcaacttcaacggactgaccggcacaggcgtgctgaccgagagcaataagaagttcctgccttttcagcagttcggcagggacatcgcagataatacagacgccgtgcgcgaccctcagaccctggagatcctggacatcacaccatgcagcttcggcggcgtgtccgtgatcacaccaggcaccaatacatccaaccaggtggccgtgctgtatcaggacgtgaattgtaccgaggtgcccaatgcaatccacgcagatcagctgacccctacatggcgggtgtactctaccggcagcaacgtgttccagacaagagccggatgcctgatcggagcagagcacgtgaacaatagctatgagtgcgacatccctatcggcgccggcatctgtgccagctaccagacccagacaaactccccatctggagcaggctccgtggccagccagtccatcatcgcctataccatgagcctgggcgccgagaacagcgtggcctactccaacaattctatcgccatccctaccaacttcacaatcagcgtgaccacagagatcctgccagtgtctatgaccaagacaagcgtggactgcacaatgtatatctgtggcgatagcaccgagtgctccaacctgctgctgcagtacggctccttttgtacccagctgaatagagccctgcaaggcatcgcccaagagcaggataagaacacacaggaggtgttcgcccaggtgaagcagatctacaagaccccacccatcaaggactttggcggcttcaacttcagccagatcctgcctgatccaagcaagccctccaagaggtcttttatcgaggacctgctgttcaacaaggtgaccctggccgatgccggcttcatcaagcagtatggagattgcctgggagacatcgcagcccgcgacctgatctgtgcccagaagtttaatggcctgaccgtgctgcctccactgctgacagatgagatgatcgcccagtacacatctgccctgctggccggcaccatcacaagcggatggaccttcggcgcaggagccgccctgcagatcccttttgccatgcagatggcctataggttcaacggcatcggcgtgacccagaatgtgctgtacgagaaccagaagctgatcgccaatcagtttaacaaagccatcggcaagatccaggactctctgtcctctacagccagcgccctgggcaagctgcaggatgtggtgaatcagaacgcccaggccctgaataccctggtgaagcagctgagctccaacttcggcgccatctctagcgtgctgaatgacatcctgagccggctggacccccctgaggcagaggtgcagatcgacaggctgatcacaggccgcctgcagagcctgcagacctacgtgacacagcagctgatcagggcagcagagatcagagcctccgccaatctggccgccaccaagatgagcgagtgcgtgctgggacagtccaagagggtggacttttgtggcaagggctatcacctgatgtctttcccacagagcgcccctcacggcgtggtgtttctgcacgtgacctacgtgccagcccaggagaagaacttcaccacagcaccagccatctgccacgatggaaaggcattttttcctagggagggcgtgttcgtgtctaacggcacccaatggtttgtgacacagcgcaatttctacgagccacagatcatcaccacagacaatacattcgtgagcggcaactgtgatgtggtgatcggcatcgtgaacaataccgtgtatgatccactgcagcccgagctggactcctttaaggaggagctggataagtacttcaagaatcacacctctcccgacgtggatctgggcgacatctccggcatcaatgcctctgtggtgaacatccagaaggagatcgaccggctgaacgaggtggccaagaatctgaacgagagcctgatcgatctgcaggagctgggcaagtatgagcagtacatcaagggctctggcagagagaacctgtatttccagggaggaggaggcagcggatacatccctgaggcaccaagggacggacaggcctacgtgcgcaaggatggcgagtgggtgctgctgtccacctttctgggccatcatcaccaccaccaccaccactga

SEQ ID NO: 1572 - DNA, 3846 bp, Artificial Sequence
  Description of Artificial Sequence: Synthetic polynucleotide
atgggcatcctgccaagcccaggaatgcccgccctgctgtctctggtgagcctgctgtccgtgctgctgatgggatgcgtggcagagacaggcacacagtgcgtgaacctgaccacaaggacccagctgccccctgcctataccaattctttcacacggggcgtgtactatcccgacaaggtgtttagaagctccgtgctgcactccacacaggatctgtttctgcctttcttttctaacgtgacctggttccacgccatccacgtgtccggcaccaatggcacaaagcggttcgacaatcccgtgctgccttttaacgatggcgtgtacttcgccagcaccgagaagtccaacatcatcagaggctggatctttggcaccacactggactctaagacacagagcctgctgatcgtgaacaatgccaccaacgtggtgatcaaggtgtgcgagttccagttttgtaatgatccattcctgggcgtgtactatcacaagaacaataagtcctggatggagtctgagtttcgcgtgtattctagcgccaacaattgcacatttgagtacgtgagccagcccttcctgatggacctggagggcaagcagggcaatttcaagaacctgagggagttcgtgtttaagaatatcgatggctacttcaagatctacagcaagcacaccccaatcaacctggtgcgcgacctgccacagggattctccgccctggagccactggtggatctgcccatcggcatcaacatcacccggtttcagacactgctggccctgcacagatcctacctgacaccaggcgactcctctagcggatggaccgcaggagctgccgcctactatgtgggctatctgcagccccggaccttcctgctgaagtacaacgagaatggcaccatcacagacgcagtggattgcgcctatgaccccctgtctgagacaaagtgtacactgaagagctttaccgtggagaagggcatctatcagacaagcaatttcagggtgcagcctaccgagtccatcgtgcgctttcccaatatcacaaacctgtgcccttttggcgaggtgttcaacgccaccagattcgccagcgtgtacgcctggaatcggaagagaatctccaactgcgtggccgactattctgtgctgtacaactccgcctctttcagcacctttaagtgctatggcgtgtctcccacaaagctgaatgatctgtgctttaccaacgtgtacgccgatagcttcgtgatcaggggagacgaagtgagacagatcgcaccaggacagacaggaaagatcgcagactacaattataagctgcctgacgatttcaccggctgcgtgatcgcctggaactccaacaatctggattctaaagtgggcggcaactacaattatctgtacaggctgtttcgcaagtccaatctgaagccattcgagcgggacatctccacagagatctaccaggccggctctaccccctgcaatggcgtggagggctttaactgttatttccctctgcagtcttacggcttccagccaacaaacggcgtgggctatcagccctacagagtggtggtgctgtcctttgagctgctgcacgcaccagcaacagtgtgcggcccaaagaagtctaccaatctggtgaagaacaagtgcgtgaacttcaacttcaacggactgaccggcacaggcgtgctgaccgagagcaataagaagttcctgccttttcagcagttcggcagggacatcgcagataccacagacgccgtgcgcgaccctcagaccctggagatcctggacatcacaccatgcagcttcggcggcgtgtccgtgatcacaccaggcaccaatacatccaaccaggtggccgtgctgtatcaggacgtgaattgtaccgaggtgcccgtggcaatccacgcagatcagctgacccctacatggcgggtgtactctaccggcagcaacgtgttccagacaagagccggatgcctgatcggagcagagcacgtgaacaatagctatgagtgcgacatccctatcggcgccggcatctgtgccagctaccagacccagacaaactccccatctggagcaggctccgtggccagccagtccatcatcgcctataccatgagcctgggcgccgagaacagcgtggcctactccaacaattctatcgccatccctaccaacttcacaatcagcgtgaccacagagatcctgccagtgtctatgaccaagacaagcgtggactgcacaatgtatatctgtggcgatagcaccgagtgctccaacctgctgctgcagtacggctccttttgtacccagctgaatagagccctgacaggcatcgccgtggagcaggataagaacacacaggaggtgttcgcccaggtgaagcagatctacaagaccccacccatcaaggactttggcggcttcaacttcagccagatcctgcctgatccaagcaagccctccaagaggtcttttatcgaggacctgctgttcaacaaggtgaccctggccgatgccggcttcatcaagcagtatggagattgcctgggagacatcgcagcccgcgacctgatctgtgcccagaagtttaatggcctgaccgtgctgcctccactgctgacagatgagatgatcgcccagtacacatctgccctgctggccggcaccatcacaagcggatggaccttcggcgcaggagccgccctgcagatcccttttgccatgcagatggcctataggttcaacggcatcggcgtgacccagaatgtgctgtacgagaaccagaagctgatcgccaatcagtttaacagcgccatcggcaagatccaggactctctgtcctctacagccagcgccctgggcaagctgcaggatgtggtgaatcagaacgcccaggccctgaataccctggtgaagcagctgagctccaacttcggcgccatctctagcgtgctgaatgacatcctgagccggctggacccccctgaggcagaggtgcagatcgacaggctgatcacaggccgcctgcagagcctgcagacctacgtgacacagcagctgatcagggcagcagagatcagagcctccgccaatctggccgccaccaagatgagcgagtgcgtgctgggacagtccaagagggtggacttttgtggcaagggctatcacctgatgtctttcccacagagcgcccctcacggcgtggtgtttctgcacgtgacctacgtgccagcccaggagaagaacttcaccacagcaccagccatctgccacgatggaaaggcacactttcctagggagggcgtgttcgtgtctaacggcacccactggtttgtgacacagcgcaatttctacgagccacagatcatcaccacagacaatacattcgtgagcggcaactgtgatgtggtgatcggcatcgtgaacaataccgtgtatgatccactgcagcccgagctggactcctttaaggaggagctggataagtacttcaagaatcacacctctcccgacgtggatctgggcgacatctccggcatcaatgcctctgtggtgaacatccagaaggagatcgaccggctgaacgaggtggccaagaatctgaacgagagcctgatcgatctgcaggagctgggcaagtatgagcagtacatcaagggctctggcagagagaacctgtatttccagggaggaggaggcagcggatacatccctgaggcaccaagggacggacaggcctacgtgcgcaaggatggcgagtgggtgctgctgtccacctttctgggccatcatcaccaccaccaccaccactga

SEQ ID NO: 1573 - DNA, 3846 bp, Artificial Sequence
  Description of Artificial Sequence: Synthetic polynucleotide
atgggcatcctgccaagcccaggaatgcccgccctgctgtctctggtgagcctgctgtccgtgctgctgatgggatgcgtggcagagacaggcacacagtgcgtgaacctgaccacaaggacccagctgccccctgcctataccaattctttcacacggggcgtgtactatcccgacaaggtgtttagaagctccgtgctgcactccacacaggatctgtttctgcctttcttttctaacgtgacctggttccacgccatccacgtgtccggcaccaatggcacaaagcggttcgacaatcccgtgctgccttttaacgatggcgtgtacttcgccagcaccgagaagtccaacatcatcagaggctggatctttggcaccacactggactctaagacacagagcctgctgatcgtgaacaatgccaccaacgtggtgatcaaggtgtgcgagttccagttttgtaatgatccattcctgggcgtgtactatcacaagaacaataagtcctggatggagtctgagtttcgcgtgtattctagcgccaacaattgcacatttgagtacgtgagccagcccttcatgatggacctggagggcaagcagggcaatttcaagaacctgagggagttcgtgtttaagaatatcgatggctacttcaagatctacagcaagcacaccccaatcaacctggtgcgcgacctgccacagggattctccgccctggagccactggtggatctgcccatcggcatcaacatcacccggtttcagacactgctggccctgcacagatcctacctgacaccaggcgactcctctagcggatggaccgcaggagctgccgcctactatgtgggctatctgcagccccggaccttcctgctgaagtacaacgagaatggcaccatcacagacgcagtggattgcgccctggaccccctgtctgagacaaagtgtacactgaagagctttaccgtggagaagggcatctatcagacaagcaatttcagggtgcagcctaccgagtccatcgtgcgctttcccaatatcacaaacctgtgcccttttggcgaggtgttcaacgccaccagattcgccagcgtgtacgcctggaatcggaagagaatctccaactgcgtggccgactattctgtgctgtacaactccgcctctttcagcacctttaagtgctatggcgtgtctcccacaaagctgaatgatctgtgctttaccaacgtgtacgccgatagcttcgtgatcaggggagacgaagtgagacagatcgcaccaggacagacaggaaagatcgcagactacaattataagctgcctgacgatttcaccggctgcgtgatcgcctggaactccaacaatctggattctaaagtgggcggcaactacaattatctgtacaggctgtttcgcaagtccaatctgaagccattcgagcgggacatctccacagagatctaccaggccggctctaccccctgcaatggcgtggagggctttaactgttatttccctctgcagtcttacggcttccagccaacaaacggcgtgggctatcagccctacagagtggtggtgctgtcctttgagctgctgcacgcaccagcaacagtgtgcggcccaaagaagtctaccaatctggtgaagaacaagtgcgtgaacttcaacttcaacggactgaccggcacaggcgtgctgaccgagagcaataagaagttcctgccttttcagcagttcggcagggacatcgcagataccacagacgccgtgcgcgaccctcagaccctggagatcctggacatcacaccatgcagcttcggcggcgtgtccgtgatcacaccaggcaccaatacatccaaccaggtggccgtgctgtatcaggacgtgaattgtaccgaggtgcccgtggcaatccacgcagatcagctgacccctacatggcgggtgtactctaccggcagcaacgtgttccagacaagagccggatgcctgatcggagcagagcacgtgaacaatagctatgagtgcgacatccctatcggcgccggcatctgtgccagctaccagacccagacaaactccccatctggagcaggctccgtggccagccagtccatcatcgcctataccatgagcctgggcgccgagaacagcgtggcctactccaacaattctatcgccatccctaccaacttcacaatcagcgtgaccacagagatcctgccagtgtctatgaccaagacaagcgtggactgcacaatgtatatctgtggcgatagcaccgagtgctccaacctgctgctgcagtacggctccttttgtacccagctgaatagagccctgacaggcatcgccgtggagcaggataagaacacacaggaggtgttcgcccaggtgaagcagatctacaagaccccacccatcaaggactttggcggcttcaacttcagccagatcctgcctgatccaagcaagccctccaagaggtcttttatcgaggacctgctgttcaacaaggtgaccctggccgatgccggcttcatcaagcagtatggagattgcctgggagacatcgcagcccgcgacctgatctgtgcccagaagtttaatggcctgaccgtgctgcctccactgctgacagatgagatgatcgcccagtacacatctgccctgctggccggcaccatcacaagcggatggaccttcggcgcaggagccgccctgcagatcccttttgccatgcagatggcctataggttcaacggcatcggcgtgacccagaatgtgctgtacgagaaccagaagctgatcgccaatcagtttaacagcgccatcggcaagatccaggactctctgtcctctacagccagcgccctgggcaagctgcaggatgtggtgaatcagaacgcccaggccctgaataccctggtgaagcagctgagctccaacttcggcgccatctctagcgtgctgaatgacatcctgagccggctggacccccctgaggcagaggtgcagatcgacaggctgatcacaggccgcctgcagagcctgcagacctacgtgacacagcagctgatcagggcagcagagatcagagcctccgccaatctggccgccaccaagatgagcgagtgcgtgctgggacagtccaagagggtggacttttgtggcaagggctatcacctgatgtctttcccacagagcgcccctcacggcgtggtgtttctgcacgtgacctacgtgccagcccaggagaagaacttcaccacagcaccagccatctgccacgatggaaaggcacactttcctagggagggcgtgttcgtgtctaacggcacccactggtttgtgacacagcgcaatttctacgagccacagatcatcaccacagacaatacattcgtgagcggcaactgtgatgtggtgatcggcatcgtgaacaataccgtgtatgatccactgcagcccgagctggactcctttaaggaggagctggataagtacttcaagaatcacacctctcccgacgtggatctgggcgacatctccggcatcaatgcctctgtggtgaacatccagaaggagatcgaccggctgaacgaggtggccaagaatctgaacgagagcctgatcgatctgcaggagctgggcaagtatgagcagtacatcaagggctctggcagagagaacctgtatttccagggaggaggaggcagcggatacatccctgaggcaccaagggacggacaggcctacgtgcgcaaggatggcgagtgggtgctgctgtccacctttctgggccatcatcaccaccaccaccaccactga

SEQ ID NO: 1574 - DNA, 3846 bp, Artificial Sequence
  Description of Artificial Sequence: Synthetic polynucleotide
atgggcatcctgccaagcccaggaatgcccgccctgctgtctctggtgagcctgctgtccgtgctgctgatgggatgcgtggcagagacaggcacacagtgcgtgaacctgaccacaaggacccagctgccccctgcctataccaattctttcacacggggcgtgtactatcccgacaaggtgtttagaagctccgtgctgcactccacacaggatctgtttctgcctttcttttctaacgtgacctggttccacgccatccacgtgtccggcaccaatggcacaaagcggttcgacaatcccgtgctgccttttaacgatggcgtgtacttcgccagcaccgagaagtccaacatcatcagaggctggatctttggcaccacactggactctaagacacagagcctgctgatcgtgaacaatgccaccaacgtggtgatcaaggtgtgcgagttccagttttgtaatgatccattcctgactgtgtactatcacaagaacaataagtcctggatggagtctgagtttcgcgtgtattctagcgccaacaattgcacatttgagtacgtgagccagcccttcctgatggacctggagggcaagcagggcaatttcaagaacctgagggagttcgtgtttaagaatatcgatggctacttcaagatctacagcaagcacaccccaatcaacctggtgcgcgacctgccacagggattctccgccctggagccactggtggatctgcccatcggcatcaacatcacccggtttcagacactgctggccctgcacagatcctacctgacaccaggcgactcctctagcggatggaccgcaggagctgccgcctactatgtgggctatctgcagccccggaccttcctgctgaagtacaacgagaatggcaccatcacagacgcagtggattgcgccctggaccccctgtctgagacaaagtgtacactgaagagctttaccgtggagaagggcatctatcagacaagcaatttcagggtgcagcctaccgagtccatcgtgcgctttcccaatatcacaaacctgtgcccttttggcgaggtgttcaacgccaccagattcgccagcgtgtacgcctggaatcggaagagaatctccaactgcgtggccgactattctgtgctgtacaactccgcctctttcagcacctttaagtgctatggcgtgtctcccacaaagctgaatgatctgtgctttaccaacgtgtacgccgatagcttcgtgatcaggggagacgaagtgagacagatcgcaccaggacagacaggaaagatcgcagactacaattataagctgcctgacgatttcaccggctgcgtgatcgcctggaactccaacaatctggattctaaagtgggcggcaactacaattatctgtacaggctgtttcgcaagtccaatctgaagccattcgagcgggacatctccacagagatctaccaggccggctctaccccctgcaatggcgtggagggctttaactgttatttccctctgcagtcttacggcttccagccaacaaacggcgtgggctatcagccctacagagtggtggtgctgtcctttgagctgctgcacgcaccagcaacagtgtgcggcccaaagaagtctaccaatctggtgaagaacaagtgcgtgaacttcaacttcaacggactgaccggcacaggcgtgctgaccgagagcaataagaagttcctgccttttcagcagttcggcagggacatcgcagataccacagacgccgtgcgcgaccctcagaccctggagatcctggacatcacaccatgcagcttcggcggcgtgtccgtgatcacaccaggcaccaatacatccaaccaggtggccgtgctgtatcaggacgtgaattgtaccgaggtgcccgtggcaatccacgcagatcagctgacccctacatggcgggtgtactctaccggcagcaacgtgttccagacaagagccggatgcctgatcggagcagagcacgtgaacaatagctatgagtgcgacatccctatcggcgccggcatctgtgccagctaccagacccagacaaactccccatctggagcaggctccgtggccagccagtccatcatcgcctataccatgagcctgggcgccgagaacagcgtggcctactccaacaattctatcgccatccctaccaacttcacaatcagcgtgaccacagagatcctgccagtgtctatgaccaagacaagcgtggactgcacaatgtatatctgtggcgatagcaccgagtgctccaacctgctgctgcagtacggctccttttgtacccagctgaatagagccctgacaggcatcgccgtggagcaggataagaacacacaggaggtgttcgcccaggtgaagcagatctacaagaccccacccatcaaggactttggcggcttcaacttcagccagatcctgcctgatccaagcaagccctccaagaggtcttttatcgaggacctgctgttcaacaaggtgaccctggccgatgccggcttcatcaagcagtatggagattgcctgggagacatcgcagcccgcgacctgatctgtgcccagaagtttaatggcctgaccgtgctgcctccactgctgacagatgagatgatcgcccagtacacatctgccctgctggccggcaccatcacaagcggatggaccttcggcgcaggagccgccctgcagatcccttttgccatgcagatggcctataggttcaacggcatcggcgtgacccagaatgtgctgtacgagaaccagaagctgatcgccaatcagtttaacagcgccatcggcaagatccaggactctctgtcctctacagccagcgccctgggcaagctgcaggatgtggtgaatcagaacgcccaggccctgaataccctggtgaagcagctgagctccaacttcggcgccatctctagcgtgctgaatgacatcctgagccggctggacccccctgaggcagaggtgcagatcgacaggctgatcacaggccgcctgcagagcctgcagacctacgtgacacagcagctgatcagggcagcagagatcagagcctccgccaatctggccgccaccaagatgagcgagtgcgtgctgggacagtccaagagggtggacttttgtggcaagggctatcacctgatgtctttcccacagagcgcccctcacggcgtggtgtttctgcacgtgacctacgtgccagcccaggagaagaacttcaccacagcaccagccatctgccacgatggaaaggcacactttcctagggagggcgtgttcgtgtctaacggcacccactggtttgtgacacagcgcaatttctacgagccacagatcatcaccacagacaatacattcgtgagcggcaactgtgatgtggtgatcggcatcgtgaacaataccgtgtatgatccactgcagcccgagctggactcctttaaggaggagctggataagtacttcaagaatcacacctctcccgacgtggatctgggcgacatctccggcatcaatgcctctgtggtgaacatccagaaggagatcgaccggctgaacgaggtggccaagaatctgaacgagagcctgatcgatctgcaggagctgggcaagtatgagcagtacatcaagggctctggcagagagaacctgtatttccagggaggaggaggcagcggatacatccctgaggcaccaagggacggacaggcctacgtgcgcaaggatggcgagtgggtgctgctgtccacctttctgggccatcatcaccaccaccaccaccactga

SEQ ID NO: 1575 - DNA, 3846 bp, Artificial Sequence
  Description of Artificial Sequence: Synthetic polynucleotide
atgggcatcctgccaagcccaggaatgcccgccctgctgtctctggtgagcctgctgtccgtgctgctgatgggatgcgtggcagagacaggcacacagtgcgtgaacctgaccacaaggacccagctgccccctgcctataccaattctttcacacggggcgtgtactatcccgacaagatctttagaagctccgtgctgcacctcacacaggatctgtttctgcctttcttttctaacgtgacctggttccacgccatccacgtgtccggcaccaatggcacaaagcggttcgacaatcccgtgctgccttttaacgatggcgtgtacttcgccgctaccgagaagtccaacatcatcagaggctggatctttggcaccacactggactctaagacacagagcctgctgatcgtgaacaatgccaccaacgtggtgatcaaggtgtgcgagttccagttttgtaatgatccattcctgggcgtgtactatcacaagaacaataagtcctggatggagtctgagtttcgcgtgtattctagcgccaacaattgcacatttgagtacgtgagccagcccttcctgatggacctggagggcaagcagggcaatttcaagaacctgagggagttcgtgtttaagaatatcgatggctacttcaagatctacagcaagtataccccaatcaacctggtgcgcgacctgccacagggattctccgccctgaaaccactggtgaaactgcccatcggcatcaacatcacccggtttcagacactgctggccctgcacagatcctacctgacaccaggcgactcctctagcggatggaccgcaggagctgccgcctactatgtgggctatctgcagccccggaccttcctgctgaagtacaacgagaatggcaccatcacagacgcagtggattgcgccctggaccccctgtctgagacaaagtgtacactgaagagctttaccgtggagaagggcatctatcagacaagcaatttcagggtgcagcctaccgagtccatcgtgcgctttcccaatatcacaaacctgtgcccttttggcgaggtgttcaacgccaccagattcgccagcgtgtacgcctggaatcggaagagaatctccaactgcgtggccgactattctgtgctgtacaactccgcctctttcagcacctttaagtgctatggcgtgtctcccacaaagctgaatgatctgtgctttaccaacgtgtacgccgatagcttcgtgatcaggggagacgaagtgagacagatcgcaccaggacagacaggaaagatcgcagactacaattataagctgcctgacgatttcaccggctgcgtgatcgcctggaactccaacaatctggattctaaagtgggcggcaactacaattatctgtacaggctgtttcgcaagtccaatctgaagccattcgagcgggacatctccacagagatctaccaggccggctctaccccctgcaatggcgtggagggctttaactgttatttccctctgcagtcttacggcttccagccaacaaacggcgtgggctatcagccctacagagtggtggtgctgtcctttgagctgctgcacgcaccagcaacagtgtgcggcccaaagaagtctaccaatctggtgaagaacaagtgcgtgaacttcaacttcaacggactgaccggcacaggcgtgctgaccgagagcaataagaagttcctgccttttcagcagttcggcagggacatcagtgataccacagacgccgtgcgcgaccctcagaccctggagatcctggacatcacaccatgcagcttcggcggcgtgtccgtgatcacaccaggcaccaatacatccaaccaggtggccgtgctgtatcaggacgtgaattgtaccgatgtgcccgtggcaatccacgcagatcagctgacccctacatggcgggtgtactctaccggcagcaacgtgttccagacacaagccggatgcctgatcggagcagagcacgtgaacaatagctatgagtgcgacatccctatcggcgccggcatctgtgccagctaccagacccagacaaactccccatctggagcaggctccgtggccagccagtccatcatcgcctataccatgagcctgggcgccgagaacagcgtggcctactccaacaattctatcgccatccctaccaacttcacaatcagcgtgaccacagagatcctgccagtgtctatgaccaagacaagcgtggactgcacaatgtatatctgtggcgatagcaccgagtgctccaacctgctgctgcagtacggctccttttgtacccagctgaatagagccctgacaggcatcgccgtggagcaggataagaacacacaggaggtgttcgcccaggtgaagcagatctacaagaccccacccatcaaggactttggcggcttcaacttcagccagatcctgcctgatccaagcaagccctccaagaggtcttttatcgaggacctgctgttcaacaaggtgaccctggccgatgccggcttcatcaagcagtatggagattgcctgggagacatcgcagcccgcgacctgatctgtgcccagaagtttaatggcctgaccgtgctgcctccactgctgacagatgagatgatcgccgcttacacagcggccctgctggccggcaccgcgacagctggatggaccttcggcgcaggagccgccctgcagatcccttttgccatgcagatggcctataggttcaacggcatcggcgtgacccagaatgtgctgtacgagaaccagaagctgatcgccaatcagtttaacagcgccatcggcaagatccaggactctctgtcctctacagccagcgccctgggcaagctgcaggatgtggtgaatcagaacgcccaggccctgaataccctggtgaagcagctgagctccaacttcggcgccatctctagcgtgctgaatgacatcctgagccggctggacccccctgaggcagaggtgcagatcgacaggctgatcacaggccgcctgcagagcctgcagacctacgtgacacagcagctgatcagggcagcagagatcagagcctccgccaatctggccgccaccaagatgagcgagtgcgtgctgggacagtccaagagggtggacttttgtggcaagggctatcacctgatgtctttcccacagagcgcccctcacggcgtggtgtttctgcacgtgacctacgtgccagcccaggagaagaacttcaccacagcaccagccatctgccacgatggaaaggcacactttcctagggagggcgtgttcgtgtctaacggcacccactggtttgtgacacagcgcaatttctacgagccacagatcatcaccacagacaatacattcgtgagcggcaactgtgatgtggtgatcggcatcgtgaacaataccgtgtatgatccactgcagcccgagctggactcctttaaggaggagctggataagtacttcaagaatcacacctctcccgacgtggatctgggcgacatctccggcatcaatgcctctgtggtgaacatccagaaggagatcgaccggctgaacgaggtggccaagaatctgaacgagagcctgatcgatctgcaggagctgggcaagtatgagcagtacatcaagggctctggcagagagaacctgtatttccagggaggaggaggcagcggatacatccctgaggcaccaagggacggacaggcctacgtgcgcaaggatggcgagtgggtgctgctgtccacctttctgggccatcatcaccaccaccaccaccactga

SEQ ID NO: 1576 - DNA, 3846 bp, Artificial Sequence
  Description of Artificial Sequence: Synthetic polynucleotide
atgggcatcctgccaagcccaggaatgcccgccctgctgtctctggtgagcctgctgtccgtgctgctgatgggatgcgtggcagagacaggcacacagtgcgtgaacctgaccacaaggacccagctgccccctgcctataccaattctttcacacggggcgtgtactatcccgacaaggtgtttagaagctccgtgctgcactccacacaggatctgtttctgcctttcttttctaacgtgacctggttccacgccatccacgtgtccggcaccaatggcacaaagcggttcgacaatcccgtgctgccttttaacgatggcgtgtacttcgccagcaccgagaagtccaacatcatcagaggctggatctttggcaccacactggactctaagacacagagcctgctgatcgtgaacaatgccaccaacgtggtgatcaaggtgtgcgagttccagttttgtaatgatccattcctgggcgtgtactatcacaagaacaataagtcctggatggagaaagagtttcgcgtgtattctagcgccaacaattgcacatttgagtacgtgagccagcccttcctgatggacctggagggcaagcagggcaatttcaagaacctgagggagttcgtgtttaagaatatcgatggctacttcaagatctacagcaagcacaccccaatcaacctggtgcgcgacctgccacagggattctccgccctggagccactggtggatctgcccatcggcatcaacatcacccggtttcagacactgctggccctgcacagatcctacctgacaccaggcgactcctctagcggatggaccgcaggagctgccgcctactatgtgggctatctgcagccccggaccttcctgctgaagtacaacgagaatggcaccatcacagacgcagtggattgcgccctggaccccctgtctgagacaaagtgtacactgaagagctttaccgtggagaagggcatctatcagacaagcaatttcagggtgcagcctaccgagtccatcgtgcgctttcccaatatcacaaacctgtgcccttttggcgaggtgttcaacgccaccagattcgccagcgtgtacgcctggaatcggaagagaatctccaactgcgtggccgactattctgtgctgtacaactccgcctctttcagcacctttaagtgctatggcgtgtctcccacaaagctgaatgatctgtgctttaccaacgtgtacgccgatagcttcgtgatcaggggagacgaagtgagacagatcgcaccaggacagacaggaaagatcgcagactacaattataagctgcctgacgatttcaccggctgcgtgatcgcctggaactccaacaatctggattctaaagtgggcggcaactacaattatctgtacaggctgtttcgcaagtccaatctgaagccattcgagcgggacatctccacagagatctaccaggccggctctaccccctgcaatggcgtggagggctttaactgttatttccctctgcagtcttacggcttccagccaacaaacggcgtgggctatcagccctacagagtggtggtgctgtcctttgagctgctgcacgcaccagcaacagtgtgcggcccaaagaagtctaccaatctggtgaagaacaagtgcgtgaacttcaacttcaacggactgaccggcacaggcgtgctgaccgagagcaataagaagttcctgccttttcagcagttcggcagggacatcgcagataccacagacgccgtgcgcgaccctcagaccctggagatcctggacatcacaccatgcagcttcggcggcgtgtccgtgatcacaccaggcaccaatacatccaaccaggtggccgtgctgtatcaggacgtgaattgtaccgaggtgcccgtggcaatccacgcagatcagctgacccctacatggcgggtgtactctaccggcagcaacgtgttccagacaagagccggatgcctgatcggagcagagcacgtgaacaatagctatgagtgcgacatccctatcggcgccggcatctgtgccagctaccagacccagacaaactccccatctggagcaggctccgtggccagccagtccatcatcgcctataccatgagcctgggcgccgagaacagcgtggcctactccaacaattctatcgccatccctaccaacttcacaatcagcgtgaccacagagatcctgccagtgtctatgaccaagacaagcgtggactgcacaatgtatatctgtggcgatagcaccgagtgctccaacctgctgctgcagtacggctccttttgtacccagctgaatagagccctgacaggcatcgccgtggagcaggataagaacacacaggaggtgttcgcccaggtgaagcagatctacaagaccccacccatcaaggactttggcggcttcaacttcagccagatcctgcctgatccaagcaagccctccaagaggtcttttatcgaggacctgctgttcaacaaggtgaccctggccgatgccggcttcatcaagcagtatggagattgcctgggagacatcgcagcccgcgacctgatctgtgcccagaagtttaatggcctgaccgtgctgcctccactgctgacagatgagatgatcgcccagtacacatctgccctgctggccggcaccatcacaagcggatggaccttcggcgcaggagccgccctgcagatcccttttgccatgcagatggcctataggttcaacggcatcggcgtgacccagaatgtgctgtacgagaaccagaagctgatcgccaatcagtttaacagcgccatcggcaagatccaggactctctgtcctctacagccagcgccctgggcaagctgcaggatgtggtgaatcagaacgcccaggccctgaataccctggtgaagcagctgagctccaacttcggcgccatctctagcgtgctgaatgacatcctgagccggctggacccccctgaggcagaggtgcagatcgacaggctgatcacaggccgcctgcagagcctgcagacctacgtgacacagcagctgatcagggcagcagagatcagagcctccgccaatctggccgccaccaagatgagcgagtgcgtgctgggacagtccaagagggtggacttttgtggcaagggctatcacctgatgtctttcccacagagcgcccctcacggcgtggtgtttctgcacgtgacctacgtgccagcccaggagaagaacttcaccacagcaccagccatctgccacgatggaaaggcacactttcctagggagggcgtgttcgtgtctaacggcacccactggtttgtgacacagcgcaatttctacgagccacagatcatcaccacagacaatacattcgtgagcggcaactgtgatgtggtgatcggcatcgtgaacaataccgtgtatgatccactgcagcccgagctggactcctttaaggaggagctggataagtacttcaagaatcacacctctcccgacgtggatctgggcgacatctccggcatcaatgcctctgtggtgaacatccagaaggagatcgaccggctgaacgaggtggccaagaatctgaacgagagcctgatcgatctgcaggagctgggcaagtatgagcagtacatcaagggctctggcagagagaacctgtatttccagggaggaggaggcagcggatacatccctgaggcaccaagggacggacaggcctacgtgcgcaaggatggcgagtgggtgctgctgtccacctttctgggccatcatcaccaccaccaccaccactga

SEQ ID NO: 1577 - DNA, 3846 bp, Artificial Sequence
  Description of Artificial Sequence: Synthetic polynucleotide
atgggcatcctgccaagcccaggaatgcccgccctgctgtctctggtgagcctgctgtccgtgctgctgatgggatgcgtggcagagacaggcacacagtgcgtgaacctgaccacaaggacccagctgccccctgcctataccaattctttcacacggggcgtgtactatcccgacaaggtgtttagaagctccgtgctgcactccacacaggatctgtttctgcctttcttttctaacgtgacctggttccacgccatccacgtgtccggcaccaatggcacaaagcggttcgacaatcccgtgctgccttttaacgatggcgtgtacttcgccagcaccgagaagtccaacatcatcagaggctggatctttggcaccacactggactctaagacacagagcctgctgatcgtgaacaatgccaccaacgtggtgatcaaggtgtgcgagttccagttttgtaatgatccattcctgggcgtgtactatcacaagaacaataagtcctggatggagtctgagtttcgcgtgtattctagcgccaacaattgcacatttgagtacgtgagccagcccttcctgatggacctggagggcaagcagggcaatttcaagaacctgagggagttcgtgtttaagaatatcgatggctacttcaagatctacagcaagcacaccccaatcaacctggtgcgcgacctgccacagggattctccgccctggagccactggtggatctgcccatcggcatcaacatcacccggtttcagacactgctggccctgcacagatcctacctgacaccaggcgactcctctagcggatggaccgcaggagctgccgcctactatgtgggctatctgcagccccggaccttcctgctgaagtacaacgagaatggcaccatcacagacgcagtggattgcgccctggaccccctgtctgagacaaagtgtacactgaagagctttaccgtggagaagggcatctatcagacaagcaatttcagggtgcagcctaccgagtccatcgtgcgctttcccaatatcacaaacctgtgcccttttggcgaggtgttcaacgccaccagattcgccagcgtgtacgcctggaatcggaagagaatctccaactgcgtggccgactattctgtgctgtacaactccgcctctttcagcacctttaagtgctatggcgtgtctcccacaaagctgaatgatctgtgctttaccaacgtgtacgccgatagcttcgtgatcaggggagacgaagtgagacagatcgcaccaggacagacaggaaagatcgcagactacaattataagctgcctgacgatttcaccggctgcgtgatcgcctggaactccaacaatctggattctaaagtgggcggcaactacaattatctgtacaggctgtttcgcaagtccaatctgaagccattcgagcgggacatctccacagagatctaccaggccggctctaccccctgcaatggcgtggagggctttaactgttatttccctctgcagtcttacggcttccagccaacaaacggcgtgggctatcagccctacagagtggtggtgctgtcctttgagctgctgcacgcaccagcaacagtgtgcggcccaaagaagtctaccaatctggtgaagaacaagtgcgtgaacttcaacttcaacggactgaccggcacaggcgtgctgaccgagagcaataagaagttcctgccttttcagcagttcggcagggacatcgcagataccacagacgccgtgcgcgaccctcagaccctggagatcctggacatcacaccatgcagcttcggcggcgtgtccgtgatcacaccaggcaccaatacatccaaccaggtggccgtgctgtatcaggacgtgaattgtaccgaggtgcccgtggcaatccacgcagatcagctgacccctacatggcgggtgtactctaccggcagcaacgtgttccagacaagagccggatgcctgatcggagcagagcacgtgaacaatagctatgagtgcgacatccctatcggcgccggcatctgtgccagctaccagacccagacaaactccccatctggagcaggctccgtggccagccagtccatcatcgcctataccatgagcctgggcgccgagaacagcgtggcctactccaacaattctatcgccatccctaccaacttctatatcagcgtgaccacagagatcctgccagtgtctatgaccaagacaagcgtggactgcacaatgtatatctgtggcgatagcaccgagtgctccaacctgctgctgcagtacggctccttttgtacccagctgaatagagccctgacaggcatcgccgtggagcaggataagaacacacaggaggtgttcgcccaggtgaagcagatctacaagaccccacccatcaaggactttggcggcttcaacttcagccagatcctgcctgatccaagcaagccctccaagaggtcttttatcgaggacctgctgttcaacaaggtgaccctggccgatgccggcttcatcaagcagtatggagattgcctgggagacatcgcagcccgcgacctgatctgtgcccagaagtttaatggcctgaccgtgctgcctccactgctgacagatgagatgatcgcccagtacacatctgccctgctggccggcaccatcacaagcggatggaccttcggcgcaggagccgccctgcagatcccttttgccatgcagatggcctataggttcaacggcatcggcgtgacccagaatgtgctgtacgagaaccagaagctgatcgccaatcagtttaacagcgccatcggcaagatccaggactctctgtcctctacagccagcgccctgggcaagctgcaggatgtggtgaatcagaacgcccaggccctgaataccctggtgaagcagctgagctccaacttcggcgccatctctagcgtgctgaatgacatcctgagccggctggacccccctgaggcagaggtgcagatcgacaggctgatcacaggccgcctgcagagcctgcagacctacgtgacacagcagctgatcagggcagcagagatcagagcctccgccaatctggccgccaccaagatgagcgagtgcgtgctgggacagtccaagagggtggacttttgtggcaagggctatcacctgatgtctttcccacagagcgcccctcacggcgtggtgtttctgcacgtgacctacgtgccagcccaggagaagaacttcaccacagcaccagccatctgccacgatggaaaggcacactttcctagggagggcgtgttcgtgtctaacggcacccactggtttgtgacacagcgcaatttctacgagccacagatcatcaccacagacaatacattcgtgagcggcaactgtgatgtggtgatcggcatcgtgaacaataccgtgtatgatccactgcagcccgagctggactcctttaaggaggagctggataagtacttcaagaatcacacctctcccgacgtggatctgggcgacatctccggcatcaatgcctctgtggtgaacatccagaaggagatcgaccggctgaacgaggtggccaagaatctgaacgagagcctgatcgatctgcaggagctgggcaagtatgagcagtacatcaagggctctggcagagagaacctgtatttccagggaggaggaggcagcggatacatccctgaggcaccaagggacggacaggcctacgtgcgcaaggatggcgagtgggtgctgctgtccacctttctgggccatcatcaccaccaccaccaccactga

SEQ ID NO: 1578 - DNA, 3846 bp, Artificial Sequence
  Description of Artificial Sequence: Synthetic polynucleotide
atgggcatcctgccaagcccaggaatgcccgccctgctgtctctggtgagcctgctgtccgtgctgctgatgggatgcgtggcagagacaggcacacagtgcgtgaacctgaccacaaggacccagctgccccctgcctataccaattctttcacacggggcgtgtactatcccgacaaggtgtttagaagctccgtgctgcactccacacaggatctgtttctgcctttcttttctaacgtgacctggttccacgccatccacgtgtccggcaccaatggcacaaagcggttcgacaatcccgtgctgccttttaacgatggcgtgtacttcgccagcatagagaagtccaacatcatcagaggctggatctttggcaccacactggactctaagacacagagcctgctgatcgtgaacaatgccaccaacgtggtgatcaaggtgtgcgagttccagttttgtaatgatccattcctgggcgtgtactatcacaagaacaataagtcctggatggagtctgagtttcgcgtgtattctagcgccaacaattgcacatttgagtacgtgagccagcccttcctgatggacctggagggcaagcagggcaatttcaagaacctgagggagttcgtgtttaagaatatcgatggctacttcaagatctacagcaagcacaccccaatcaacctggtgcgcgacctgccacagggattctccgccctggagccactggtggatctgcccatcggcatcaacatcacccggtttcagacactgctggccctgcacagatcctacctgacaccaggcgactcctctagcggatggaccgcaggagctgccgcctactatgtgggctatctgcagccccggaccttcctgctgaagtacaacgagaatggcaccatcacagacgcagtggattgcgccctggaccccctgtctgagacaaagtgtacactgaagagctttaccgtggagaagggcatctatcagacaagcaatttcagggtgcagcctaccgagtccatcgtgcgctttcccaatatcacaaacctgtgcccttttggcgaggtgttcaacgccaccagattcgccagcgtgtacgcctggaatcggaagagaatctccaactgcgtggccgactattctgtgctgtacaactccgcctctttcagcacctttaagtgctatggcgtgtctcccacaaagctgaatgatctgtgctttaccaacgtgtacgccgatagcttcgtgatcaggggagacgaagtgagacagatcgcaccaggacagacaggaaagatcgcagactacaattataagctgcctgacgatttcaccggctgcgtgatcgcctggaactccaacaatctggattctaaagtgggcggcaactacaattatctgtacaggctgtttcgcaagtccaatctgaagccattcgagcgggacatctccacagagatctaccaggccggctctaccccctgcaatggcgtggagggctttaactgttatttccctctgcagtcttacggcttccagccaacaaacggcgtgggctatcagccctacagagtggtggtgctgtcctttgagctgctgcacgcaccagcaacagtgtgcggcccaaagaagtctaccaatctggtgaagaacaagtgcgtgaacttcaacttcaacggactgaccggcacaggcgtgctgaccgagagcaataagaagttcctgccttttcagcagttcggcagggacatcgcagataccacagacgccgtgcgcgaccctcagaccctggagatcctggacatcacaccatgcagcttcggcggcgtgtccgtgatcacaccaggcaccaatacatccaaccaggtggccgtgctgtatcaggacgtgaattgtaccgaggtgcccgtggcaatccacgcagatcagctgacccctacatggcgggtgtactctaccggcagcaacgtgttccagacaagagccggatgcctgatcggagcagagcacgtgaacaatagctatgagtgcgacatccctatcggcgccggcatctgtgccagctaccagacccagacaaactccccatctggagcaggctccgtggccagccagtccatcatcgcctataccatgagcctgggcgccgagaacagcgtggcctactccaacaattctatcgccatccctaccaacttcacaatcagcgtgaccacagagatcctgccagtgtctatgaccaagacaagcgtggactgcacaatgtatatctgtggcgatagcaccgagtgctccaacctgctgctgcagtacggctccttttgtacccagctgaatagagccctgacaggcatcgccgtggagcaggataagaacacacaggaggtgttcgcccaggtgaagcagatctacaagaccccacccatcaaggactttggcggcttcaacttcagccagatcctgcctgatccaagcaagccctccaagaggtcttttatcgaggacctgctgttcaacaaggtgaccctggccgatgccggcttcatcaagcagtatggagattgcctgggagacatcgcagcccgcgacctgatctgtgcccagaagtttaatggcctgaccgtgctgcctccactgctgacagatgagatgatcgcccagtacacatctgccctgctggccggcaccatcacaagcggatggaccttcggcgcaggagccgccctgcagatcccttttgccatgcagatggcctataggttcaacggcatcggcgtgacccagaatgtgctgtacgagaaccagaagctgatcgccaatcagtttaacagcgccatcggcaagatccaggactctctgtcctctacagccagcgccctgggcaagctgcaggatgtggtgaatcagaacgcccaggccctgaataccctggtgaagcagctgagctccaacttcggcgccatctctagcgtgctgaatgacatcctgagccggctggacccccctgaggcagaggtgcagatcgacaggctgatcacaggccgcctgcagagcctgcagacctacgtgacacagcagctgatcagggcagcagagatcagagcctccgccaatctggccgccaccaagatgagcgagtgcgtgctgggacagtccaagagggtggacttttgtggcaagggctatcacctgatgtctttcccacagagcgcccctcacggcgtggtgtttctgcacgtgacctacgtgccagcccaggagaagaacttcaccacagcaccagccatctgccacgatggaaaggcacactttcctagggagggcgtgttcgtgtctaacggcacccactggtttgtgacacagcgcaatttctacgagccacagatcatcaccacagacaatacattcgtgagcggcaactgtgatgtggtgatcggcatcgtgaacaataccgtgtatgatccactgcagcccgagctggactcctttaaggaggagctggataagtacttcaagaatcacacctctcccgacgtggatctgggcgacatctccggcatcaatgcctctgtggtgaacatccagaaggagatcgaccggctgaacgaggtggccaagaatctgaacgagagcctgatcgatctgcaggagctgggcaagtatgagcagtacatcaagggctctggcagagagaacctgtatttccagggaggaggaggcagcggatacatccctgaggcaccaagggacggacaggcctacgtgcgcaaggatggcgagtgggtgctgctgtccacctttctgggccatcatcaccaccaccaccaccactga

SEQ ID NO: 1579 - DNA, 3846 bp, Artificial Sequence
  Description of Artificial Sequence: Synthetic polynucleotide
atgggcatcctgccaagcccaggaatgcccgccctgctgtctctggtgagcctgctgtccgtgctgctgatgggatgcgtggcagagacaggcacacagtgcgtgaacctgaccacaaggacccagctgccccctgcctataccaattctttcacacggggcgtgtactatcccgacaaggtgtttagaagctccgtgctgcactccacacaggatctgtttctgcctttcttttctaacgtgacctggttccacgccatccacgtgtccggcaccaatggcacaaagcggttcgacaatcccgtgctgccttttcgcgatggcgtgtacttcgccagcaccgagaagtccaacatcatcagaggctggatctttggcaccacactggactctaagacacagagcctgctgatcgtgaacaatgccaccaacgtggtgatcaaggtgtgcgagttccagttttgtaatgatccattcctgggcgtgtactatcacaagaacaataagtcctggatggagtctgagtttcgcgtgtattctagcgccaacaattgcacatttgagtacgtgagccagcccttcctgatggacctggagggcaagcagggcaatttcaagaacctgagggagttcgtgtttaagaatatcgatggctacttcaagatctacagcaagcacaccccaatcaacctggtgcgcgacctgccacagggattctccgccctggagccactggtggatctgcccatcggcatcaacatcacccggtttcagacactgctggccctgcacagatcctacctgacaccaggcgactcctctagcggatggaccgcaggagctgccgcctactatgtgggctatctgcagccccggaccttcctgctgaagtacaacgagaatggcaccatcacagacgcagtggattgcgccctggaccccctgtctgagacaaagtgtacactgaagagctttaccgtggagaagggcatctatcagacaagcaatttcagggtgcagcctaccgagtccatcgtgcgctttcccaatatcacaaacctgtgcccttttggcgaggtgttcaacgccaccagattcgccagcgtgtacgcctggaatcggaagagaatctccaactgcgtggccgactattctgtgctgtacaactccgcctctttcagcacctttaagtgctatggcgtgtctcccacaaagctgaatgatctgtgctttaccaacgtgtacgccgatagcttcgtgatcaggggagacgaagtgagacagatcgcaccaggacagacaggaaagatcgcagactacaattataagctgcctgacgatttcaccggctgcgtgatcgcctggaactccaacaatctggattctaaagtgggcggcaactacaattatctgtacaggctgtttcgcaagtccaatctgaagccattcgagcgggacatctccacagagatctaccaggccggctctaccccctgcaatggcgtggagggctttaactgttatttccctctgcagtcttacggcttccagccaacaaacggcgtgggctatcagccctacagagtggtggtgctgtcctttgagctgctgcacgcaccagcaacagtgtgcggcccaaagaagtctaccaatctggtgaagaacaagtgcgtgaacttcaacttcaacggactgaccggcacaggcgtgctgaccgagagcaataagaagttcctgccttttcagcagttcggcagggacatcgcagataccacagacgccgtgcgcgaccctcagaccctggagatcctggacatcacaccatgcagcttcggcggcgtgtccgtgatcacaccaggcaccaatacatccaaccaggtggccgtgctgtatcaggacgtgaattgtaccgaggtgcccgtggcaatccacgcagatcagctgacccctacatggcgggtgtactctaccggcagcaacgtgttccagacaagagccggatgcctgatcggagcagagcacgtgaacaatagctatgagtgcgacatccctatcggcgccggcatctgtgccagctaccagacccagacaaactccccatctggagcaggctccgtggccagccagtccatcatcgcctataccatgagcctgggcgccgagaacagcgtggcctactccaacaattctatcgccatccctaccaacttcacaatcagcgtgaccacagagatcctgccagtgtctatgaccaagacaagcgtggactgcacaatgtatatctgtggcgatagcaccgagtgctccaacctgctgctgcagtacggctccttttgtacccagctgaatagagccctgacaggcatcgccgtggagcaggataagaacacacaggaggtgttcgcccaggtgaagcagatctacaagaccccacccatcaaggactttggcggcttcaacttcagccagatcctgcctgatccaagcaagccctccaagaggtcttttatcgaggacctgctgttcaacaaggtgaccctggccgatgccggcttcatcaagcagtatggagattgcctgggagacatcgcagcccgcgacctgatctgtgcccagaagtttaatggcctgaccgtgctgcctccactgctgacagatgagatgatcgcccagtacacatctgccctgctggccggcaccatcacaagcggatggaccttcggcgcaggagccgccctgcagatcccttttgccatgcagatggcctataggttcaacggcatcggcgtgacccagaatgtgctgtacgagaaccagaagctgatcgccaatcagtttaacagcgccatcggcaagatccaggactctctgtcctctacagccagcgccctgggcaagctgcaggatgtggtgaatcagaacgcccaggccctgaataccctggtgaagcagctgagctccaacttcggcgccatctctagcgtgctgaatgacatcctgagccggctggacccccctgaggcagaggtgcagatcgacaggctgatcacaggccgcctgcagagcctgcagacctacgtgacacagcagctgatcagggcagcagagatcagagcctccgccaatctggccgccaccaagatgagcgagtgcgtgctgggacagtccaagagggtggacttttgtggcaagggctatcacctgatgtctttcccacagagcgcccctcacggcgtggtgtttctgcacgtgacctacgtgccagcccaggagaagaacttcaccacagcaccagccatctgccacgatggaaaggcacactttcctagggagggcgtgttcgtgtctaacggcacccactggtttgtgacacagcgcaatttctacgagccacagatcatcaccacagacaatacattcgtgagcggcaactgtgatgtggtgatcggcatcgtgaacaataccgtgtatgatccactgcagcccgagctggactcctttaaggaggagctggataagtacttcaagaatcacacctctcccgacgtggatctgggcgacatctccggcatcaatgcctctgtggtgaacatccagaaggagatcgaccggctgaacgaggtggccaagaatctgaacgagagcctgatcgatctgcaggagctgggcaagtatgagcagtacatcaagggctctggcagagagaacctgtatttccagggaggaggaggcagcggatacatccctgaggcaccaagggacggacaggcctacgtgcgcaaggatggcgagtgggtgctgctgtccacctttctgggccatcatcaccaccaccaccaccactga

SEQ ID NO: 1580 - DNA, 3846 bp, Artificial Sequence
  Description of Artificial Sequence: Synthetic polynucleotide
atgggcatcctgccaagcccaggaatgcccgccctgctgtctctggtgagcctgctgtccgtgctgctgatgggatgcgtggcagagacaggcacacagtgcgtgaacctgaccacaaggacccagctgccccctgcctataccaattctttcacacggggcgtgtactatcccgacaaggtgtttagaagctccgtgctgcactccacacaggatctgtttctgcctttcttttctaacgtgacctggttccacgccatccacgtgtccggcaccaatggcacaaagcggttcgacaatcccgtgctgccttttaacgatggcgtgtacttcgccagcaccgagaagtccaacatcatcagaggctggatctttggcaccacactggactctaagacacagagcctgctgatcgtgaacaatgccaccaacgtggtgatcaaggtgtgcgagttccagttttgtaatgatccattcctgggcgtgtactatcacaagaacaataagtcctggatggagtctgagtttcgcgtgtattctagcgccaacaattgcacatttgagtacgtgaaacagcccttcctgatggacctggagggcaagcagggcaatttcaagaacctgagggagttcgtgtttaagaatatcgatggctacttcaagatctacagcaagcacaccccaatcaacctggtgcgcgacctgccacagggattctccgccctggagccactggtggatctgcccatcggcatcaacatcacccggtttcagacactgctggccctgcacagatcctacctgacaccaggcgactcctctagcggatggaccgcaggagctgccgcctactatgtgggctatctgcagccccggaccttcctgctgaagtacaacgagaatggcaccatcacagacgcagtggattgcgccctggaccccctgtctgagacaaagtgtacactgaagagctttaccgtggagaagggcatctatcagacaagcaatttcagggtgcagcctaccgagtccatcgtgcgctttcccaatatcacaaacctgtgcccttttggcgaggtgttcaacgccaccagattcgccagcgtgtacgcctggaatcggaagagaatctccaactgcgtggccgactattctgtgctgtacaactccgcctctttcagcacctttaagtgctatggcgtgtctcccacaaagctgaatgatctgtgctttaccaacgtgtacgccgatagcttcgtgatcaggggagacgaagtgagacagatcgcaccaggacagacaggaaagatcgcagactacaattataagctgcctgacgatttcaccggctgcgtgatcgcctggaactccaacaatctggattctaaagtgggcggcaactacaattatctgtacaggctgtttcgcaagtccaatctgaagccattcgagcgggacatctccacagagatctaccaggccggctctaccccctgcaatggcgtggagggctttaactgttatttccctctgcagtcttacggcttccagccaacaaacggcgtgggctatcagccctacagagtggtggtgctgtcctttgagctgctgcacgcaccagcaacagtgtgcggcccaaagaagtctaccaatctggtgaagaacaagtgcgtgaacttcaacttcaacggactgaccggcacaggcgtgctgaccgagagcaataagaagttcctgccttttcagcagttcggcagggacatcgcagataccacagacgccgtgcgcgaccctcagaccctggagatcctggacatcacaccatgcagcttcggcggcgtgtccgtgatcacaccaggcaccaatacatccaaccaggtggccgtgctgtatcaggacgtgaattgtaccgaggtgcccgtggcaatccacgcagatcagctgacccctacatggcgggtgtactctaccggcagcaacgtgttccagacaagagccggatgcctgatcggagcagagcacgtgaacaatagctatgagtgcgacatccctatcggcgccggcatctgtgccagctaccagacccagacaaactccccatctggagcaggctccgtggccagccagtccatcatcgcctataccatgagcctgggcgccgagaacagcgtggcctactccaacaattctatcgccatccctaccaacttcacaatcagcgtgaccacagagatcctgccagtgtctatgaccaagacaagcgtggactgcacaatgtatatctgtggcgatagcaccgagtgctccaacctgctgctgcagtacggctccttttgtacccagctgaatagagccctgacaggcatcgccgtggagcaggataagaacacacaggaggtgttcgcccaggtgaagcagatctacaagaccccacccatcaaggactttggcggcttcaacttcagccagatcctgcctgatccaagcaagccctccaagaggtcttttatcgaggacctgctgttcaacaaggtgaccctggccgatgccggcttcatcaagcagtatggagattgcctgggagacatcgcagcccgcgacctgatctgtgcccagaagtttaatggcctgaccgtgctgcctccactgctgacagatgagatgatcgcccagtacacatctgccctgctggccggcaccatcacaagcggatggaccttcggcgcaggagccgccctgcagatcccttttgccatgcagatggcctataggttcaacggcatcggcgtgacccagaatgtgctgtacgagaaccagaagctgatcgccaatcagtttaacagcgccatcggcaagatccaggactctctgtcctctacagccagcgccctgggcaagctgcaggatgtggtgaatcagaacgcccaggccctgaataccctggtgaagcagctgagctccaacttcggcgccatctctagcgtgctgaatgacatcctgagccggctggacccccctgaggcagaggtgcagatcgacaggctgatcacaggccgcctgcagagcctgcagacctacgtgacacagcagctgatcagggcagcagagatcagagcctccgccaatctggccgccaccaagatgagcgagtgcgtgctgggacagtccaagagggtggacttttgtggcaagggctatcacctgatgtctttcccacagagcgcccctcacggcgtggtgtttctgcacgtgacctacgtgccagcccaggagaagaacttcaccacagcaccagccatctgccacgatggaaaggcacactttcctagggagggcgtgttcgtgtctaacggcacccactggtttgtgacacagcgcaatttctacgagccacagatcatcaccacagacaatacattcgtgagcggcaactgtgatgtggtgatcggcatcgtgaacaataccgtgtatgatccactgcagcccgagctggactcctttaaggaggagctggataagtacttcaagaatcacacctctcccgacgtggatctgggcgacatctccggcatcaatgcctctgtggtgaacatccagaaggagatcgaccggctgaacgaggtggccaagaatctgaacgagagcctgatcgatctgcaggagctgggcaagtatgagcagtacatcaagggctctggcagagagaacctgtatttccagggaggaggaggcagcggatacatccctgaggcaccaagggacggacaggcctacgtgcgcaaggatggcgagtgggtgctgctgtccacctttctgggccatcatcaccaccaccaccaccactga

SEQ ID NO: 1581 - DNA, 3846 bp, Artificial Sequence
  Description of Artificial Sequence: Synthetic polynucleotide
atgggcatcctgccaagcccaggaatgcccgccctgctgtctctggtgagcctgctgtccgtgctgctgatgggatgcgtggcagagacaggcacacagtgcgtgaacctgaccacaaggacccagctgccccctgcctataccaattctttcacacggggcgtgtactatcccgacaaggtgtttagaagcgatgtgctgcactccacacaggatctgtttctgcctttcttttctaacgtgacctggttccacgccatccacgtgtccggcaccaatggcacaaagcggttcgacaatcccgtgctgccttttaacgatggcgtgtacttcgccagcaccgagaagtccaacatcatcagaggctggatctttggcaccacactggactctaagacacagagcctgctgatcgtgaacaatgccaccaacgtggtgatcaaggtgtgcgagttccagttttgtgaaaatccattcctgggcgtgtactatcacaagaacaataagtcctggatggagaaagagtttcgcgtgtattctagcgccaacaattgcacatttgagtacgtgagccagcccttcctgatggacctgggaggcaagcagggcaatttcaagaacctgagggagttcgtgtttaagaatatcgatggctacttcaagatctacagcaagcacaccccaatcaacctggtgcgcgacctgccacagggattctccgccctggagccactgatggatctgcccatcggcatcaacatcacccggtttcagacactgctggccctgcacagatcctacctgacaccaggcgactcctctagcggatggaccgcaggagctgccgcctactatgtgggctatctgcagccccggaccttcctgctgaagtacaacgagaatggcaccatcacagacgcagtggattgcgcctatgaccccctgtctgagacaaagtgtacactgaagagctttaccgtggagaagggcatctatcagacaagcaatttcagggtgcagcctaccgagtccatcgtgcgctttcccaatatcacaaacctgtgcccttttggcgaggtgttcaacgccaccagattcgccagcgtgtacgcctggaatcggaagagaatctccaactgcgtggccgactattctgtgctgtacaactccgcctctttcagcacctttaagtgctatggcgtgtctcccacaaagctgaatgatctgtgctttaccaacgtgtacgccgatagcttcgtgatcaggggagacgaagtgagacagatcgcaccaggacagacaggaaagatcgcagactacaattataagctgcctgacgatttcaccggctgcgtgatcgcctggaactccaacaatctggattctaaagtgggcggcaactacaattatctgtacaggctgtttcgcaagtccaatctgaagccattcgagcgggacatctccacagagatctaccaggccggctctaccccctgcaatggcgtggagggctttaactgttatttccctctgcagtcttacggcttccagccaacaaacggcgtgggctatcagccctacagagtggtggtgctgtcctttgagctgctgcacgcaccagcaacagtgtgcggcccaaagaagtctaccaatctggtgaagaacaagtgcgtgaacttcaacttcaacggactgaccggcacaggcgtgctgaccgagagcaataagaagttcctgccttttcagcagttcggcagggacatcgcagataatacagacgccgtgcgcgaccctcagaccctggagatcctggacatcacaccatgcagcttcggcggcgtgtccgtgatcacaccaggcaccaatacatccaaccaggtggccgtgctgtatcaggacgtgaattgtaccgaggtgcccaatgcaatccacgcagatcagctgacccctacatggcgggtgtactctaccggcagcaacgtgttccagacaagagccggatgcctgatcggagcagagcacgtgaacaatagctatgagtgcgacatccctatcggcgccggcatctgtgccagctaccagacccagacaaactccccatctggagcaggctccgtggccagccagtccatcatcgcctataccatgagcctgggcgccgagaacagcgtggcctactccaacaattctatcgccatccctaccaacttcacaatcagcgtgaccacagagatcctgccagtgtctatgaccaagacaagcgtggactgcacaatgtatatctgtggcgatagcaccgagtgctccaacctgctgctgcagtacggctccttttgtacccagctgaatagagccctgcaaggcatcgcccgagagcaggataagaacacacaggaggtgttcgcccaggtgaagcagatctacaagaccccacccatcaaggactttggcggcttcaacttcagccagatcctgcctgatccaagcaagccctccaagaggtcttttatcgaggacctgctgttcaacaaggtgaccctggccgatgccggcttcatcaagcagtatggagattgcctgggagacatcgcagcccgcgacctgatctgtgcccagaagtttaatggcctgaccgtgctgcctccactgctgacagatgagatgatcgcccagtacacatctgccctgctggccggcaccatcacaagcggatggaccttcggcgcaggagccgccctgcagatcccttttgccatgcagatggcctataggttcaacggcatcggcgtgacccagaatgtgctgtacgagaaccagaagctgatcgccaatcagtttaacaaagccatcggcaagatccaggactctctgtcctctacagccagcgccctgggcaagctgcaggatgtggtgaatcagaacgcccaggccctgaataccctggtgaagcagctgagctccaacttcggcgccatctctagcgtgctgaatgacatcctgagccggctggacccccctgaggcagaggtgcagatcgacaggctgatcacaggccgcctgcagagcctgcagacctacgtgacacagcagctgatcagggcagcagagatcagagcctccgccaatctggccgccaccaagatgagcgagtgcgtgctgggacagtccaagagggtggacttttgtggcaagggctatcacctgatgtctttcccacagagcgcccctcacggcgtggtgtttctgcacgtgacctacgtgccagcccaggagaagaacttcaccacagcaccagccatctgccacgatggaaaggcattttttcctagggagggcgtgttcgtgtctaacggcacccaatggtttgtgacacagcgcaatttctacgagccacagatcatcaccacagacaatacattcgtgagcggcaactgtgatgtggtgatcggcatcgtgaacaataccgtgtatgatccactgcagcccgagctggactcctttaaggaggagctggataagtacttcaagaatcacacctctcccgacgtggatctgggcgacatctccggcatcaatgcctctgtggtgaacatccagaaggagatcgaccggctgaacgaggtggccaagaatctgaacgagagcctgatcgatctgcaggagctgggcaagtatgagcagtacatcaagggctctggcagagagaacctgtatttccagggaggaggaggcagcggatacatccctgaggcaccaagggacggacaggcctacgtgcgcaaggatggcgagtgggtgctgctgtccacctttctgggccatcatcaccaccaccaccaccactga

SEQ ID NO: 1582 - DNA, 3846 bp, Artificial Sequence
  Description of Artificial Sequence: Synthetic polynucleotide
atgggcatcctgccaagcccaggaatgcccgccctgctgtctctggtgagcctgctgtccgtgctgctgatgggatgcgtggcagagacaggcacacagtgcgtgaacctgaccacaaggacccagctgccccctgcctataccaattctttcacacggggcgtgtactatcccgacaaggtgtttagaagctccgtgctgcactccacacaggatctgtttctgcctttcttttctaacgtgacctggttccacgccatccacgtgtccggcaccaatggcacaaagcggttcgacaatcccgtgctgccttttaacgatggcgtgtacttcgccagcaccgagaagtccaacatcatcagaggctggatctttggcaccacactggactctaagacacagagcctgctgatcgtgaacaatgccaccaacgtggtgatcaaggtgtgcgagttccagttttgtgatgatccattcctgggcgtgtactatcacaagaacaataagtcctggatggagtctgagtttcgcgtgtattctagcgccaacaattgcacatttgagtacgtgagccagcccttcctgatggacctggagggcaagcagggcaatttcaagaacctgagggagttcgtgtttaagaatatcgatggctacttcaagatctacagcaagcacaccccaatcaacctggtgcgcgacctgccacagggattctccgccctggagccactggtggatctgcccatcggcatcaacatcacccggtttcagacactgctggccctgcacagatcctacctgacaccaggcgactcctctagcggatggaccgcaggagctgccgcctactatgtgggctatctgcagccccggaccttcctgctgaagtacaacgagaatggcaccatcacagacgcagtggattgcgccctggaccccctgtctgagacaaagtgtacactgaagagctttaccgtggagaagggcatctatcagacaagcaatttcagggtgcagcctaccgagtccatcgtgcgctttcccaatatcacaaacctgtgcccttttggcgaggtgttcaacgccaccagattcgccagcgtgtacgcctggaatcggaagagaatctccaactgcgtggccgactattctgtgctgtacaactccgcctctttcagcacctttaagtgctatggcgtgtctcccacaaagctgaatgatctgtgctttaccaacgtgtacgccgatagcttcgtgatcaggggagacgaagtgagacagatcgcaccaggacagacaggaaagatcgcagactacaattataagctgcctgacgatttcaccggctgcgtgatcgcctggaactccaacaatctggattctaaagtgggcggcaactacaattatctgtacaggctgtttcgcaagtccaatctgaagccattcgagcgggacatctccacagagatctaccaggccggctctaccccctgcaatggcgtggagggctttaactgttatttccctctgcagtcttacggcttccagccaacaaacggcgtgggctatcagccctacagagtggtggtgctgtcctttgagctgctgcacgcaccagcaacagtgtgcggcccaaagaagtctaccaatctggtgaagaacaagtgcgtgaacttcaacttcaacggactgaccggcacaggcgtgctgaccgagagcaataagaagttcctgccttttcagcagttcggcagggacatcgcagataccacagacgccgtgcgcgaccctcagaccctggagatcctggacatcacaccatgcagcttcggcggcgtgtccgtgatcacaccaggcaccaatacatccaaccaggtggccgtgctgtatcaggacgtgaattgtaccgaggtgcccgtggcaatccacgcagatcagctgacccctacatggcgggtgtactctaccggcagcaacgtgttccagacaagagccggatgcctgatcggagcagagcacgtgaacaatagctatgagtgcgacatccctatcggcgccggcatctgtgccagctaccagacccagacaaactccccatctggagcaggctccgtggccagccagtccatcatcgcctataccatgagcctgggcgccgagaacagcgtggcctactccaacaattctatcgccatccctaccaacttcacaatcagcgtgaccacagagatcctgccagtgtctatgaccaagacaagcgtggactgcacaatgtatatctgtggcgatagcaccgagtgctccaacctgctgctgcagtacggctccttttgtacccagctgaatagagccctgacaggcatcgccgtggagcaggataagaacacacaggaggtgttcgcccaggtgaagcagatctacaagaccccacccatcaaggactttggcggcttcaacttcagccagatcctgcctgatccaagcaagccctccaagaggtcttttatcgaggacctgctgttcaacaaggtgaccctggccgatgccggcttcatcaagcagtatggagattgcctgggagacatcgcagcccgcgacctgatctgtgcccagaagtttaatggcctgaccgtgctgcctccactgctgacagatgagatgatcgcccagtacacatctgccctgctggccggcaccatcacaagcggatggaccttcggcgcaggagccgccctgcagatcccttttgccatgcagatggcctataggttcaacggcatcggcgtgacccagaatgtgctgtacgagaaccagaagctgatcgccaatcagtttaacagcgccatcggcaagatccaggactctctgtcctctacagccagcgccctgggcaagctgcaggatgtggtgaatcagaacgcccaggccctgaataccctggtgaagcagctgagctccaacttcggcgccatctctagcgtgctgaatgacatcctgagccggctggacccccctgaggcagaggtgcagatcgacaggctgatcacaggccgcctgcagagcctgcagacctacgtgacacagcagctgatcagggcagcagagatcagagcctccgccaatctggccgccaccaagatgagcgagtgcgtgctgggacagtccaagagggtggacttttgtggcaagggctatcacctgatgtctttcccacagagcgcccctcacggcgtggtgtttctgcacgtgacctacgtgccagcccaggagaagaacttcaccacagcaccagccatctgccacgatggaaaggcacactttcctagggagggcgtgttcgtgtctaacggcacccactggtttgtgacacagcgcaatttctacgagccacagatcatcaccacagacaatacattcgtgagcggcaactgtgatgtggtgatcggcatcgtgaacaataccgtgtatgatccactgcagcccgagctggactcctttaaggaggagctggataagtacttcaagaatcacacctctcccgacgtggatctgggcgacatctccggcatcaatgcctctgtggtgaacatccagaaggagatcgaccggctgaacgaggtggccaagaatctgaacgagagcctgatcgatctgcaggagctgggcaagtatgagcagtacatcaagggctctggcagagagaacctgtatttccagggaggaggaggcagcggatacatccctgaggcaccaagggacggacaggcctacgtgcgcaaggatggcgagtgggtgctgctgtccacctttctgggccatcatcaccaccaccaccaccactga

SEQ ID NO: 1583 - DNA, 3846 bp, Artificial Sequence
  Description of Artificial Sequence: Synthetic polynucleotide
atgggcatcctgccaagcccaggaatgcccgccctgctgtctctggtgagcctgctgtccgtgctgctgatgggatgcgtggcagagacaggcacacagtgcgtgaacctgaccacaaggacccagctgccccctgcctataccaattctttcacacggggcgtgtactatcccgacaaggtgtttagaagctccgtgctgcactccacacaggatctgtttctgcctttcttttctaacgtgacctggttccacgccatccacgtgtccggcaccaatggcacaaagcggttcgacaatcccgtgctgccttttaacgatggcgtgtacttcgccagcaccgagaagtccaacatcatcagaggctggatctttggcaccacactggactctaagacacagagcctgctgatcgtgaacaatgccaccaacgtggtgatcaaggtgtgcgagttccagttttgtaatgatccattcctgggcgtgtactatcacaagaacaataagtcctggatggagtctgagtttcgcgtgtattctagcgccaacaattgcacatttgagtacgtgagccagcccttcctgatggacctggaggaaaagcagggcaatttcaagaacctgagggagttcgtgtttaagaatatcgatggctacttcaagatctacagcaagcacaccccaatcaacctggtgcgcgacctgccacagggattctccgccctggagccactggtggatctgcccatcggcatcaacatcacccggtttcagacactgctggccctgcacagatcctacctgacaccaggcgactcctctagcggatggaccgcaggagctgccgcctactatgtgggctatctgcagccccggaccttcctgctgaagtacaacgagaatggcaccatcacagacgcagtggattgcgccctggaccccctgtctgagacaaagtgtacactgaagagctttaccgtggagaagggcatctatcagacaagcaatttcagggtgcagcctaccgagtccatcgtgcgctttcccaatatcacaaacctgtgcccttttggcgaggtgttcaacgccaccagattcgccagcgtgtacgcctggaatcggaagagaatctccaactgcgtggccgactattctgtgctgtacaactccgcctctttcagcacctttaagtgctatggcgtgtctcccacaaagctgaatgatctgtgctttaccaacgtgtacgccgatagcttcgtgatcaggggagacgaagtgagacagatcgcaccaggacagacaggaaagatcgcagactacaattataagctgcctgacgatttcaccggctgcgtgatcgcctggaactccaacaatctggattctaaagtgggcggcaactacaattatctgtacaggctgtttcgcaagtccaatctgaagccattcgagcgggacatctccacagagatctaccaggccggctctaccccctgcaatggcgtggagggctttaactgttatttccctctgcagtcttacggcttccagccaacaaacggcgtgggctatcagccctacagagtggtggtgctgtcctttgagctgctgcacgcaccagcaacagtgtgcggcccaaagaagtctaccaatctggtgaagaacaagtgcgtgaacttcaacttcaacggactgaccggcacaggcgtgctgaccgagagcaataagaagttcctgccttttcagcagttcggcagggacatcgcagataccacagacgccgtgcgcgaccctcagaccctggagatcctggacatcacaccatgcagcttcggcggcgtgtccgtgatcacaccaggcaccaatacatccaaccaggtggccgtgctgtatcaggacgtgaattgtaccgaggtgcccgtggcaatccacgcagatcagctgacccctacatggcgggtgtactctaccggcagcaacgtgttccagacaagagccggatgcctgatcggagcagagcacgtgaacaatagctatgagtgcgacatccctatcggcgccggcatctgtgccagctaccagacccagacaaactccccatctggagcaggctccgtggccagccagtccatcatcgcctataccatgagcctgggcgccgagaacagcgtggcctactccaacaattctatcgccatccctaccaacttcacaatcagcgtgaccacagagatcctgccagtgtctatgaccaagacaagcgtggactgcacaatgtatatctgtggcgatagcaccgagtgctccaacctgctgctgcagtacggctccttttgtacccagctgaatagagccctgacaggcatcgccgtggagcaggataagaacacacaggaggtgttcgcccaggtgaagcagatctacaagaccccacccatcaaggactttggcggcttcaacttcagccagatcctgcctgatccaagcaagccctccaagaggtcttttatcgaggacctgctgttcaacaaggtgaccctggccgatgccggcttcatcaagcagtatggagattgcctgggagacatcgcagcccgcgacctgatctgtgcccagaagtttaatggcctgaccgtgctgcctccactgctgacagatgagatgatcgcccagtacacatctgccctgctggccggcaccatcacaagcggatggaccttcggcgcaggagccgccctgcagatcccttttgccatgcagatggcctataggttcaacggcatcggcgtgacccagaatgtgctgtacgagaaccagaagctgatcgccaatcagtttaacagcgccatcggcaagatccaggactctctgtcctctacagccagcgccctgggcaagctgcaggatgtggtgaatcagaacgcccaggccctgaataccctggtgaagcagctgagctccaacttcggcgccatctctagcgtgctgaatgacatcctgagccggctggacccccctgaggcagaggtgcagatcgacaggctgatcacaggccgcctgcagagcctgcagacctacgtgacacagcagctgatcagggcagcagagatcagagcctccgccaatctggccgccaccaagatgagcgagtgcgtgctgggacagtccaagagggtggacttttgtggcaagggctatcacctgatgtctttcccacagagcgcccctcacggcgtggtgtttctgcacgtgacctacgtgccagcccaggagaagaacttcaccacagcaccagccatctgccacgatggaaaggcacactttcctagggagggcgtgttcgtgtctaacggcacccactggtttgtgacacagcgcaatttctacgagccacagatcatcaccacagacaatacattcgtgagcggcaactgtgatgtggtgatcggcatcgtgaacaataccgtgtatgatccactgcagcccgagctggactcctttaaggaggagctggataagtacttcaagaatcacacctctcccgacgtggatctgggcgacatctccggcatcaatgcctctgtggtgaacatccagaaggagatcgaccggctgaacgaggtggccaagaatctgaacgagagcctgatcgatctgcaggagctgggcaagtatgagcagtacatcaagggctctggcagagagaacctgtatttccagggaggaggaggcagcggatacatccctgaggcaccaagggacggacaggcctacgtgcgcaaggatggcgagtgggtgctgctgtccacctttctgggccatcatcaccaccaccaccaccactga

SEQ ID NO: 1584 - DNA, 3846 bp, Artificial Sequence
  Description of Artificial Sequence: Synthetic polynucleotide
atgggcatcctgccaagcccaggaatgcccgccctgctgtctctggtgagcctgctgtccgtgctgctgatgggatgcgtggcagagacaggcacacagtgcgtgaacctgaccacaaggacccagctgccccctgcctataccaattctttcacacggggcgtgtactatcccgacaaggtgtttagaagctccgtgctgcactccacacaggatctgtttctgcctttcttttctaacgtgacctggttccacgccatccacgtgtccggcaccaatggcacaaagcggttcgacaatcccgtgctgccttttaacgatggcgtgtacttcgccagcaccgagaagtccaacatcatcagaggctggatctttggcaccacactggactctaagacacagagcctgctgatcgtgaacaatgccaccaacgtggtgatcaaggtgtgcgagttccagttttgtaatgatccattcctgggcgtgtactatcacaagaacaataagtcctggatggagtctgagtttcgcgtgtattctagcgccaacaattgcacatttgagtacgtgagccagcccttcctgatggacctggagggcaagcagggcaatttcaagaacctgagggagttcgtgtttaagaatatcgatggctacttcaagatctacagcaagcacaccccaatcaacctggtgcgcgacctgccacagggattctccgccctggagccactggtggatctgcccatcggcatcaacatcacccggtttcagacactgctggccctgcacagatcctacctgacaccaggcgactcctctagcggatggaccgcaggagctgccgcctactatgtgggctatctgcagccccggaccttcctgctgaagtacaacgagaatggcaccatcacagacgcagtggattgcgccctggaccccctgtctgagacaaagtgtacactgaagagctttaccgtggagaagggcatctatcagacaagcaatttcagggtgcagcctaccgagtccatcgtgcgctttcccaatatcacaaacctgtgcccttttggcgaggtgttcaacgccaccagattcgccagcgtgtacgcctggaatcggaagagaatctccaactgcgtggccgactattctgtgctgtacaactccgcctctttcagcacctttaagtgctatggcgtgtctcccacaaagctgaatgatctgtgctttaccaacgtgtacgccgatagcttcgtgatcaggggagacgaagtgagacagatcgcaccaggacagacaggaaagatcgcagactacaattataagctgcctgacgatttcaccggctgcgtgatcgcctggaactccaacaatctggattctaaagtgggcggcaactacaattatctgtacaggctgtttcgcaagtccaatctgaagccattcgagcgggacatctccacagagatctaccaggccggctctaccccctgcaatggcgtggagggctttaactgttatttccctctgcagtcttacggcttccagccaacaaacggcgtgggctatcagccctacagagtggtggtgctgtcctttgagctgctgcacgcaccagcaacagtgtgcggcccaaagaagtctaccaatctggtgaagaacaagtgcgtgaacttcaacttcaacggactgaccggcacaggcgtgctgaccgagagcaataagaagttcctgccttttcagcagttcggcagggacatcgcagataccacagacgccgtgcgcgaccctcagaccctggagatcctggacatcacaccatgcagcttcggcggcgtgtccgtgatcacaccaggcaccaatacatccaaccaggtggccgtgctgtatcaggacgtgaattgtaccgaggtgcccgtggcaatccacgcagatcagctgacccctacatggcgggtgtactctaccggcagcaacgtgttccagacaagagccggatgcctgatcggagcagagcacgtgaacaatagctatgagtgcgacatccctatcggcgccggcatctgtgccagctaccagacccagacaaactccccatctggagcaggctccgtggccagccagtccatcatcgcctataccatgagcctgggcgccgagaacagcgtggcctactccaacaattctatcgccatccctaccaacttcacaatcagcgtgaccacagagtatctgccagtgtctatgaccaagacaagcgtggactgcacaatgtatatctgtggcgatagcaccgagtgctccaacctgctgctgcagtacggctccttttgtacccagctgaatagagccctgacaggcatcgccgtggagcaggataagaacacacaggaggtgttcgcccaggtgaagcagatctacaagaccccacccatcaaggactttggcggcttcaacttcagccagatcctgcctgatccaagcaagccctccaagaggtcttttatcgaggacctgctgttcaacaaggtgaccctggccgatgccggcttcatcaagcagtatggagattgcctgggagacatcgcagcccgcgacctgatctgtgcccagaagtttaatggcctgaccgtgctgcctccactgctgacagatgagatgatcgcccagtacacatctgccctgctggccggcaccatcacaagcggatggaccttcggcgcaggagccgccctgcagatcccttttgccatgcagatggcctataggttcaacggcatcggcgtgacccagaatgtgctgtacgagaaccagaagctgatcgccaatcagtttaacagcgccatcggcaagatccaggactctctgtcctctacagccagcgccctgggcaagctgcaggatgtggtgaatcagaacgcccaggccctgaataccctggtgaagcagctgagctccaacttcggcgccatctctagcgtgctgaatgacatcctgagccggctggacccccctgaggcagaggtgcagatcgacaggctgatcacaggccgcctgcagagcctgcagacctacgtgacacagcagctgatcagggcagcagagatcagagcctccgccaatctggccgccaccaagatgagcgagtgcgtgctgggacagtccaagagggtggacttttgtggcaagggctatcacctgatgtctttcccacagagcgcccctcacggcgtggtgtttctgcacgtgacctacgtgccagcccaggagaagaacttcaccacagcaccagccatctgccacgatggaaaggcacactttcctagggagggcgtgttcgtgtctaacggcacccactggtttgtgacacagcgcaatttctacgagccacagatcatcaccacagacaatacattcgtgagcggcaactgtgatgtggtgatcggcatcgtgaacaataccgtgtatgatccactgcagcccgagctggactcctttaaggaggagctggataagtacttcaagaatcacacctctcccgacgtggatctgggcgacatctccggcatcaatgcctctgtggtgaacatccagaaggagatcgaccggctgaacgaggtggccaagaatctgaacgagagcctgatcgatctgcaggagctgggcaagtatgagcagtacatcaagggctctggcagagagaacctgtatttccagggaggaggaggcagcggatacatccctgaggcaccaagggacggacaggcctacgtgcgcaaggatggcgagtgggtgctgctgtccacctttctgggccatcatcaccaccaccaccaccactga

SEQ ID NO: 1585 - DNA, 3846 bp, Artificial Sequence
  Description of Artificial Sequence: Synthetic polynucleotide
atgggcatcctgccaagcccaggaatgcccgccctgctgtctctggtgagcctgctgtccgtgctgctgatgggatgcgtggcagagacaggcacacagtgcgtgaacctgaccacaaggacccagctgccccctgcctataccaattctttcacacggggcgtgtactatcccgacaaggtgtttagaagctccgtgctgcactccacacaggatctgtttctgcctttcttttctaacgtgacctggttccacgccatccacgtgtccggcaccaatggcacaaagcggttcgacaatcccgtgctgccttttaacgatggcgtgtacttcgccagcaccgagaagtccaacatcatcagaggctggatctttggcaccacactggactctaagacacagagcctgctgatcgtgaacaatgccaccaacgtggtgatcaaggtgtgcgagttccagttttgtaatgatccattcctgggcgtgtactatcacaagaacaataagtcctggatggagtctgagtttcgcgtgtattctagcgccaacaattgcacatttgagtacgtgccgcagcccttcctgatggacctggagggcaagcagggcaatttcaagaacctgagggagttcgtgtttaagaatatcgatggctacttcaagatctacagcaagcacaccccaatcaacctggtgcgcgacctgccacagggattctccgccctggagccactggtggatctgcccatcggcatcaacatcacccggtttcagacactgctggccctgcacagatcctacctgacaccaggcgactcctctagcggatggaccgcaggagctgccgcctactatgtgggctatctgcagccccggaccttcctgctgaagtacaacgagaatggcaccatcacagacgcagtggattgcgccctggaccccctgtctgagacaaagtgtacactgaagagctttaccgtggagaagggcatctatcagacaagcaatttcagggtgcagcctaccgagtccatcgtgcgctttcccaatatcacaaacctgtgcccttttggcgaggtgttcaacgccaccagattcgccagcgtgtacgcctggaatcggaagagaatctccaactgcgtggccgactattctgtgctgtacaactccgcctctttcagcacctttaagtgctatggcgtgtctcccacaaagctgaatgatctgtgctttaccaacgtgtacgccgatagcttcgtgatcaggggagacgaagtgagacagatcgcaccaggacagacaggaaagatcgcagactacaattataagctgcctgacgatttcaccggctgcgtgatcgcctggaactccaacaatctggattctaaagtgggcggcaactacaattatctgtacaggctgtttcgcaagtccaatctgaagccattcgagcgggacatctccacagagatctaccaggccggctctaccccctgcaatggcgtggagggctttaactgttatttccctctgcagtcttacggcttccagccaacaaacggcgtgggctatcagccctacagagtggtggtgctgtcctttgagctgctgcacgcaccagcaacagtgtgcggcccaaagaagtctaccaatctggtgaagaacaagtgcgtgaacttcaacttcaacggactgaccggcacaggcgtgctgaccgagagcaataagaagttcctgccttttcagcagttcggcagggacatcgcagataccacagacgccgtgcgcgaccctcagaccctggagatcctggacatcacaccatgcagcttcggcggcgtgtccgtgatcacaccaggcaccaatacatccaaccaggtggccgtgctgtatcaggacgtgaattgtaccgaggtgcccgtggcaatccacgcagatcagctgacccctacatggcgggtgtactctaccggcagcaacgtgttccagacaagagccggatgcctgatcggagcagagcacgtgaacaatagctatgagtgcgacatccctatcggcgccggcatctgtgccagctaccagacccagacaaactccccatctggagcaggctccgtggccagccagtccatcatcgcctataccatgagcctgggcgccgagaacagcgtggcctactccaacaattctatcgccatccctaccaacttcacaatcagcgtgaccacagagatcctgccagtgtctatgaccaagacaagcgtggactgcacaatgtatatctgtggcgatagcaccgagtgctccaacctgctgctgcagtacggctccttttgtacccagctgaatagagccctgacaggcatcgccgtggagcaggataagaacacacaggaggtgttcgcccaggtgaagcagatctacaagaccccacccatcaaggactttggcggcttcaacttcagccagatcctgcctgatccaagcaagccctccaagaggtcttttatcgaggacctgctgttcaacaaggtgaccctggccgatgccggcttcatcaagcagtatggagattgcctgggagacatcgcagcccgcgacctgatctgtgcccagaagtttaatggcctgaccgtgctgcctccactgctgacagatgagatgatcgcccagtacacatctgccctgctggccggcaccatcacaagcggatggaccttcggcgcaggagccgccctgcagatcccttttgccatgcagatggcctataggttcaacggcatcggcgtgacccagaatgtgctgtacgagaaccagaagctgatcgccaatcagtttaacagcgccatcggcaagatccaggactctctgtcctctacagccagcgccctgggcaagctgcaggatgtggtgaatcagaacgcccaggccctgaataccctggtgaagcagctgagctccaacttcggcgccatctctagcgtgctgaatgacatcctgagccggctggacccccctgaggcagaggtgcagatcgacaggctgatcacaggccgcctgcagagcctgcagacctacgtgacacagcagctgatcagggcagcagagatcagagcctccgccaatctggccgccaccaagatgagcgagtgcgtgctgggacagtccaagagggtggacttttgtggcaagggctatcacctgatgtctttcccacagagcgcccctcacggcgtggtgtttctgcacgtgacctacgtgccagcccaggagaagaacttcaccacagcaccagccatctgccacgatggaaaggcacactttcctagggagggcgtgttcgtgtctaacggcacccactggtttgtgacacagcgcaatttctacgagccacagatcatcaccacagacaatacattcgtgagcggcaactgtgatgtggtgatcggcatcgtgaacaataccgtgtatgatccactgcagcccgagctggactcctttaaggaggagctggataagtacttcaagaatcacacctctcccgacgtggatctgggcgacatctccggcatcaatgcctctgtggtgaacatccagaaggagatcgaccggctgaacgaggtggccaagaatctgaacgagagcctgatcgatctgcaggagctgggcaagtatgagcagtacatcaagggctctggcagagagaacctgtatttccagggaggaggaggcagcggatacatccctgaggcaccaagggacggacaggcctacgtgcgcaaggatggcgagtgggtgctgctgtccacctttctgggccatcatcaccaccaccaccaccactga

SEQ ID NO: 1586 - DNA, 3846 bp, Artificial Sequence
  Description of Artificial Sequence: Synthetic polynucleotide
atgggcatcctgccaagcccaggaatgcccgccctgctgtctctggtgagcctgctgtccgtgctgctgatgggatgcgtggcagagacaggcacacagtgcgtgaacctgaccacaaggacccagctgccccctgcctataccaattctttcacacggggcgtgtactatcccgacaaggtgtttagaagctccgtgctgcactccacacaggatctgtttctgcctttcttttctaacgtgacctggttccacgccatccacgtgtccggcaccaatggcacaaagcggttcgacaatcccgtgctgccttttaacgatggcgtgtacttcgccagcaccgagaagtccaacatcatcagaggctggatctttggcaccacactggactctaagacacagagcctgctgatcgtgaacaatgccaccaacgtggtgatcaaggtgtgcgagttccagttttgtaatgatccattcctgggcgtgtactatcacaagaacaataagtcctggatggagtctgagtttcgcgtgtattctagcgccaacaattgcacatttgagtacgtgagccagcccttcctgatggacctggagggcaagcagggcaatttcaagaacctgagggagttcgtgtttaagaatatcgatggctacttcaagatctacagcaagcacaccccaatcaacctggtgcgcgacctgccacagggattctccgccctggagccactggtggatctgcccatcggcatcaacatcacccggtttcagacactgctggccctgcacagatcctacctgacaccaggcgactcctctagcggatggaccgcaggagctgccgcctactatgtgggctatctgcagccccggaccttcctgctgaagtacaacgagaatggcaccatcacagacgcagtggattgcgccctggaccccctgtctgagacaaagtgtacactgaagagctttaccgtggagaagggcatctatcagacaagcaatttcagggtgcagcctaccgagtccatcgtgcgctttcccaatatcacaaacctgtgcccttttggcgaggtgttcaacgccaccagattcgccagcgtgtacgcctggaatcggaagagaatctccaactgcgtggccgactattctgtgctgtacaactccgcctctttcagcacctttaagtgctatggcgtgtctcccacaaagctgaatgatctgtgctttaccaacgtgtacgccgatagcttcgtgatcaggggagacgaagtgagacagatcgcaccaggacagacaggaaagatcgcagactacaattataagctgcctgacgatttcaccggctgcgtgatcgcctggaactccaacaatctggattctaaagtgggcggcaactacaattatctgtacaggctgtttcgcaagtccaatctgaagccattcgagcgggacatctccacagagatctaccaggccggctctaccccctgcaatggcgtggagggctttaactgttatttccctctgcagtcttacggcttccagccaacaaacggcgtgggctatcagccctacagagtggtggtgctgtcctttgagctgctgcacgcaccagcaacagtgtgcggcccaaagaagtctaccaatctggtgaagaacaagtgcgtgaacttcaacttcaacggactgaccggcacaggcgtgctgaccgagagcaataagaagttcctgccttttcagcagttcggcagggacactgcagataccacagacgccgtgcgcgaccctcagaccctggagatcctggacatcacaccatgcagcttcggcggcgtgtccgtgatcacaccaggcaccaatacatccaaccaggtggccgtgctgtatcaggacgtgaattgtaccgaggtgcccgtggcaatccacgcagatcagctgacccctacatggcgggtgtactctaccggcagcaacgtgttccagacaagagccggatgcctgatcggagcagagcacgtgaacaatagctatgagtgcgacatccctatcggcgccggcatctgtgccagctaccagacccagacaaactccccatctggagcaggctccgtggccagccagtccatcatcgcctataccatgagcctgggcgccgagaacagcgtggcctactccaacaattctatcgccatccctaccaacttcacaatcagcgtgaccacagagatcctgccagtgtctatgaccaagacaagcgtggactgcacaatgtatatctgtggcgatagcaccgagtgctccaacctgctgctgcagtacggctccttttgtacccagctgaatagagccctgacaggcatcgccgtggagcaggataagaacacacaggaggtgttcgcccaggtgaagcagatctacaagaccccacccatcaaggactttggcggcttcaacttcagccagatcctgcctgatccaagcaagccctccaagaggtcttttatcgaggacctgctgttcaacaaggtgaccctggccgatgccggcttcatcaagcagtatggagattgcctgggagacatcgcagcccgcgacctgatctgtgcccagaagtttaatggcctgaccgtgctgcctccactgctgacagatgagatgatcgcccagtacacatctgccctgctggccggcaccatcacaagcggatggaccttcggcgcaggagccgccctgcagatcccttttgccatgcagatggcctataggttcaacggcatcggcgtgacccagaatgtgctgtacgagaaccagaagctgatcgccaatcagtttaacagcgccatcggcaagatccaggactctctgtcctctacagccagcgccctgggcaagctgcaggatgtggtgaatcagaacgcccaggccctgaataccctggtgaagcagctgagctccaacttcggcgccatctctagcgtgctgaatgacatcctgagccggctggacccccctgaggcagaggtgcagatcgacaggctgatcacaggccgcctgcagagcctgcagacctacgtgacacagcagctgatcagggcagcagagatcagagcctccgccaatctggccgccaccaagatgagcgagtgcgtgctgggacagtccaagagggtggacttttgtggcaagggctatcacctgatgtctttcccacagagcgcccctcacggcgtggtgtttctgcacgtgacctacgtgccagcccaggagaagaacttcaccacagcaccagccatctgccacgatggaaaggcacactttcctagggagggcgtgttcgtgtctaacggcacccactggtttgtgacacagcgcaatttctacgagccacagatcatcaccacagacaatacattcgtgagcggcaactgtgatgtggtgatcggcatcgtgaacaataccgtgtatgatccactgcagcccgagctggactcctttaaggaggagctggataagtacttcaagaatcacacctctcccgacgtggatctgggcgacatctccggcatcaatgcctctgtggtgaacatccagaaggagatcgaccggctgaacgaggtggccaagaatctgaacgagagcctgatcgatctgcaggagctgggcaagtatgagcagtacatcaagggctctggcagagagaacctgtatttccagggaggaggaggcagcggatacatccctgaggcaccaagggacggacaggcctacgtgcgcaaggatggcgagtgggtgctgctgtccacctttctgggccatcatcaccaccaccaccaccactga

SEQ ID NO: 1587 - DNA, 3846 bp, Artificial Sequence
  Description of Artificial Sequence: Synthetic polynucleotide
atgggcatcctgccaagcccaggaatgcccgccctgctgtctctggtgagcctgctgtccgtgctgctgatgggatgcgtggcagagacaggcacacagtgcgtgaacctgaccacaaggacccagctgccccctgcctataccaattctttcacacggggcgtgtactatcccgacaaggtgtttagaagctccgtgctgcactccacacaggatctgtttctgcctttcttttctaacgtgacctggttccacgccatccacgtgtccggcaccaatggcacaaagcggttcgacaatcccgtgctgccttttaacgatggcgtgtacttcgccagcaccgagaagtccaacatcatcagaggctggatctttggcaccacactggactctaagacacagagcctgctgatcgtgaacaatgccaccaacgtggtgatcaaggtgtgcgagttccagttttgtaatgatccattcctgggcgtgtactatcacaagaacaataagtcctggatggagcttgagtttcgcgtgtattctagcgccaacaattgcacatttgagtacgtgagccagcccttcctgatggacctggagggcaagcagggcaatttcaagaacctgagggagttcgtgtttaagaatatcgatggctacttcaagatctacagcaagcacaccccaatcaacctggtgcgcgacctgccacagggattctccgccctggagccactggtggatctgcccatcggcatcaacatcacccggtttcagacactgctggccctgcacagatcctacctgacaccaggcgactcctctagcggatggaccgcaggagctgccgcctactatgtgggctatctgcagccccggaccttcctgctgaagtacaacgagaatggcaccatcacagacgcagtggattgcgccctggaccccctgtctgagacaaagtgtacactgaagagctttaccgtggagaagggcatctatcagacaagcaatttcagggtgcagcctaccgagtccatcgtgcgctttcccaatatcacaaacctgtgcccttttggcgaggtgttcaacgccaccagattcgccagcgtgtacgcctggaatcggaagagaatctccaactgcgtggccgactattctgtgctgtacaactccgcctctttcagcacctttaagtgctatggcgtgtctcccacaaagctgaatgatctgtgctttaccaacgtgtacgccgatagcttcgtgatcaggggagacgaagtgagacagatcgcaccaggacagacaggaaagatcgcagactacaattataagctgcctgacgatttcaccggctgcgtgatcgcctggaactccaacaatctggattctaaagtgggcggcaactacaattatctgtacaggctgtttcgcaagtccaatctgaagccattcgagcgggacatctccacagagatctaccaggccggctctaccccctgcaatggcgtggagggctttaactgttatttccctctgcagtcttacggcttccagccaacaaacggcgtgggctatcagccctacagagtggtggtgctgtcctttgagctgctgcacgcaccagcaacagtgtgcggcccaaagaagtctaccaatctggtgaagaacaagtgcgtgaacttcaacttcaacggactgaccggcacaggcgtgctgaccgagagcaataagaagttcctgccttttcagcagttcggcagggacatcgcagataccacagacgccgtgcgcgaccctcagaccctggagatcctggacatcacaccatgcagcttcggcggcgtgtccgtgatcacaccaggcaccaatacatccaaccaggtggccgtgctgtatcaggacgtgaattgtaccgaggtgcccgtggcaatccacgcagatcagctgacccctacatggcgggtgtactctaccggcagcaacgtgttccagacaagagccggatgcctgatcggagcagagcacgtgaacaatagctatgagtgcgacatccctatcggcgccggcatctgtgccagctaccagacccagacaaactccccatctggagcaggctccgtggccagccagtccatcatcgcctataccatgagcctgggcgccgagaacagcgtggcctactccaacaattctatcgccatccctaccaacttcacaatcagcgtgaccacagagatcctgccagtgtctatgaccaagacaagcgtggactgcacaatgtatatctgtggcgatagcaccgagtgctccaacctgctgctgcagtacggctccttttgtacccagctgaatagagccctgacaggcatcgccgtggagcaggataagaacacacaggaggtgttcgcccaggtgaagcagatctacaagaccccacccatcaaggactttggcggcttcaacttcagccagatcctgcctgatccaagcaagccctccaagaggtcttttatcgaggacctgctgttcaacaaggtgaccctggccgatgccggcttcatcaagcagtatggagattgcctgggagacatcgcagcccgcgacctgatctgtgcccagaagtttaatggcctgaccgtgctgcctccactgctgacagatgagatgatcgcccagtacacatctgccctgctggccggcaccatcacaagcggatggaccttcggcgcaggagccgccctgcagatcccttttgccatgcagatggcctataggttcaacggcatcggcgtgacccagaatgtgctgtacgagaaccagaagctgatcgccaatcagtttaacagcgccatcggcaagatccaggactctctgtcctctacagccagcgccctgggcaagctgcaggatgtggtgaatcagaacgcccaggccctgaataccctggtgaagcagctgagctccaacttcggcgccatctctagcgtgctgaatgacatcctgagccggctggacccccctgaggcagaggtgcagatcgacaggctgatcacaggccgcctgcagagcctgcagacctacgtgacacagcagctgatcagggcagcagagatcagagcctccgccaatctggccgccaccaagatgagcgagtgcgtgctgggacagtccaagagggtggacttttgtggcaagggctatcacctgatgtctttcccacagagcgcccctcacggcgtggtgtttctgcacgtgacctacgtgccagcccaggagaagaacttcaccacagcaccagccatctgccacgatggaaaggcacactttcctagggagggcgtgttcgtgtctaacggcacccactggtttgtgacacagcgcaatttctacgagccacagatcatcaccacagacaatacattcgtgagcggcaactgtgatgtggtgatcggcatcgtgaacaataccgtgtatgatccactgcagcccgagctggactcctttaaggaggagctggataagtacttcaagaatcacacctctcccgacgtggatctgggcgacatctccggcatcaatgcctctgtggtgaacatccagaaggagatcgaccggctgaacgaggtggccaagaatctgaacgagagcctgatcgatctgcaggagctgggcaagtatgagcagtacatcaagggctctggcagagagaacctgtatttccagggaggaggaggcagcggatacatccctgaggcaccaagggacggacaggcctacgtgcgcaaggatggcgagtgggtgctgctgtccacctttctgggccatcatcaccaccaccaccaccactga

SEQ ID NO: 1588 - DNA, 3846 bp, Artificial Sequence
  Description of Artificial Sequence: Synthetic polynucleotide
atgggcatcctgccaagcccaggaatgcccgccctgctgtctctggtgagcctgctgtccgtgctgctgatgggatgcgtggcagagacaggcacacagtgcgtgaacctgaccacaaggacccagctgccccctgcctataccaattctttcacacggggcgtgtactatcccgacaaggtgtttagaagctccgtgctgcactccacacaggatctgtttctgcctttcttttctaacgtgacctggttccacgccatccacgtgtccggcaccaatggcacaaagcggttcgacaatcccgtgctgccttttaacgatggcgtgtacttcgccagcaccgagaagtccaacatcatcagaggctggatctttggcaccacactggactctaagacacagagcctgctgatcgtgaacaatgccaccaacgtggtgatcaaggtgtgcgagttccagttttgtaatgatccattcctgggcgtgtactatcacaagaacaataagtcctggatggagtctgagtttcgcgtgtattctagcgccaacaattgcacatttgagtacgtgagccagcccttcctgatggacctggagggcaagcagggcaatttcaagaacctgagggagttcgtgtttaagaatatcgatggctacttcaagatctacagcaagcacaccccaatcaacctggtgcgcgacctgccacagggattctccgccctggagccactggtggatctgcccatcggcatcaacatcacccggtttcagacactgctggccctgcacagatcctacctgacaccaggcgactcctctagcggatggaccgcaggagctgccgcctactatgtgggctatctgcagccccggaccttcctgctgaagtacaacgagaatggcaccatcacagacgcagtggattgcgccctggaccccctgtctgagacaaagtgtacactgaagagctttaccgtggagaagggcatctatcagacaagcaatttcagggtgcagcctaccgagtccatcgtgcgctttcccaatatcacaaacctgtgcccttttggcgaggtgttcaacgccaccagattcgccagcgtgtacgcctggaatcggaagagaatctccaactgcgtggccgactattctgtgctgtacaactccgcctctttcagcacctttaagtgctatggcgtgtctcccacaaagctgaatgatctgtgctttaccaacgtgtacgccgatagcttcgtgatcaggggagacgaagtgagacagatcgcaccaggacagacaggaaagatcgcagactacaattataagctgcctgacgatttcaccggctgcgtgatcgcctggaactccaacaatctggattctaaagtgggcggcaactacaattatctgtacaggctgtttcgcaagtccaatctgaagccattcgagcgggacatctccacagagatctaccaggccggctctaccccctgcaatggcgtggagggctttaactgttatttccctctgcagtcttacggcttccagccaacaaacggcgtgggctatcagccctacagagtggtggtgctgtcctttgagctgctgcacgcaccagcaacagtgtgcggcccaaagaagtctaccaatctggtgaagaacaagtgcgtgaacttcaacttcaacggactgaccggcacaggcgtgctgaccgagagcaataagaagttcctgccttttcagcagttcggcagggacatcgcagataccacagacgccgtgcgcgaccctcagaccctggagatcctggacatcacaccatgcagcttcggcggcgtgtccgtgatcacaccaggcaccaatacatccaaccaggtggccgtgctgtatcaggacgtgaattgtaccgaggtgcccggggcaatccacgcagatcagctgacccctacatggcgggtgtactctaccggcagcaacgtgttccagacaagagccggatgcctgatcggagcagagcacgtgaacaatagctatgagtgcgacatccctatcggcgccggcatctgtgccagctaccagacccagacaaactccccatctggagcaggctccgtggccagccagtccatcatcgcctataccatgagcctgggcgccgagaacagcgtggcctactccaacaattctatcgccatccctaccaacttcacaatcagcgtgaccacagagatcctgccagtgtctatgaccaagacaagcgtggactgcacaatgtatatctgtggcgatagcaccgagtgctccaacctgctgctgcagtacggctccttttgtacccagctgaatagagccctgacaggcatcgccgtggagcaggataagaacacacaggaggtgttcgcccaggtgaagcagatctacaagaccccacccatcaaggactttggcggcttcaacttcagccagatcctgcctgatccaagcaagccctccaagaggtcttttatcgaggacctgctgttcaacaaggtgaccctggccgatgccggcttcatcaagcagtatggagattgcctgggagacatcgcagcccgcgacctgatctgtgcccagaagtttaatggcctgaccgtgctgcctccactgctgacagatgagatgatcgcccagtacacatctgccctgctggccggcaccatcacaagcggatggaccttcggcgcaggagccgccctgcagatcccttttgccatgcagatggcctataggttcaacggcatcggcgtgacccagaatgtgctgtacgagaaccagaagctgatcgccaatcagtttaacagcgccatcggcaagatccaggactctctgtcctctacagccagcgccctgggcaagctgcaggatgtggtgaatcagaacgcccaggccctgaataccctggtgaagcagctgagctccaacttcggcgccatctctagcgtgctgaatgacatcctgagccggctggacccccctgaggcagaggtgcagatcgacaggctgatcacaggccgcctgcagagcctgcagacctacgtgacacagcagctgatcagggcagcagagatcagagcctccgccaatctggccgccaccaagatgagcgagtgcgtgctgggacagtccaagagggtggacttttgtggcaagggctatcacctgatgtctttcccacagagcgcccctcacggcgtggtgtttctgcacgtgacctacgtgccagcccaggagaagaacttcaccacagcaccagccatctgccacgatggaaaggcacactttcctagggagggcgtgttcgtgtctaacggcacccactggtttgtgacacagcgcaatttctacgagccacagatcatcaccacagacaatacattcgtgagcggcaactgtgatgtggtgatcggcatcgtgaacaataccgtgtatgatccactgcagcccgagctggactcctttaaggaggagctggataagtacttcaagaatcacacctctcccgacgtggatctgggcgacatctccggcatcaatgcctctgtggtgaacatccagaaggagatcgaccggctgaacgaggtggccaagaatctgaacgagagcctgatcgatctgcaggagctgggcaagtatgagcagtacatcaagggctctggcagagagaacctgtatttccagggaggaggaggcagcggatacatccctgaggcaccaagggacggacaggcctacgtgcgcaaggatggcgagtgggtgctgctgtccacctttctgggccatcatcaccaccaccaccaccactga

SEQ ID NO: 1589 - DNA, 3846 bp, Artificial Sequence
  Description of Artificial Sequence: Synthetic polynucleotide
atgggcatcctgccaagcccaggaatgcccgccctgctgtctctggtgagcctgctgtccgtgctgctgatgggatgcgtggcagagacaggcacacagtgcgtgaacctgaccacaaggacccagctgccccctgcctataccaattctttcacacggggcgtgtactatcccgacaaggtgtttagaagctccgtgctgcactccacacaggatctgtttctgcctttcttttctaacgtgacctggttccacgccatccacgtgtccggcaccaatggcacaaagcggttcgacaatcccgtgctgccttttaacgatggcgtgtacttcgccagcaccgagaagtccaacatcatcagaggctggatctttggcaccacactggactctaagacacagagcctgctgatcgtgaacaatgccaccaacgtggtgatcaaggtgtgcgagttccagttttgtaatgatccattcctgggcgtgtactatcacaagaacaataagtcctggatggagtctgagtttcgcgtgtattctagcgccaacaattgcacatttgagtacgtgagccagcccttcctgatggacctggagggcaagcagggcaatttcaagaacctgagggagttcgtgtttaagaatatcgatggctacttcaagatctacagcaagcacaccccaatcaacctggtgcgcgacctgccacagggattctccgccctggagccactggtggatctgcccatcggcatcaacatcacccggtttcagacactgctggccctgcacagatcctacctgacaccaggcgactcctctagcggatggaccgcaggagctgccgcctactatgtgggctatctgcagccccggaccttcctgctgaagtacaacgagaatggcaccatcacagacgcagtggattgcgccctggaccccctgtctgagacaaagtgtaaactgaagagctttaccgtggagaagggcatctatcagacaagcaatttcagggtgcagcctaccgagtccatcgtgcgctttcccaatatcacaaacctgtgcccttttggcgaggtgttcaacgccaccagattcgccagcgtgtacgcctggaatcggaagagaatctccaactgcgtggccgactattctgtgctgtacaactccgcctctttcagcacctttaagtgctatggcgtgtctcccacaaagctgaatgatctgtgctttaccaacgtgtacgccgatagcttcgtgatcaggggagacgaagtgagacagatcgcaccaggacagacaggaaagatcgcagactacaattataagctgcctgacgatttcaccggctgcgtgatcgcctggaactccaacaatctggattctaaagtgggcggcaactacaattatctgtacaggctgtttcgcaagtccaatctgaagccattcgagcgggacatctccacagagatctaccaggccggctctaccccctgcaatggcgtggagggctttaactgttatttccctctgcagtcttacggcttccagccaacaaacggcgtgggctatcagccctacagagtggtggtgctgtcctttgagctgctgcacgcaccagcaacagtgtgcggcccaaagaagtctaccaatctggtgaagaacaagtgcgtgaacttcaacttcaacggactgaccggcacaggcgtgctgaccgagagcaataagaagttcctgccttttcagcagttcggcagggacatcgcagataccacagacgccgtgcgcgaccctcagaccctggagatcctggacatcacaccatgcagcttcggcggcgtgtccgtgatcacaccaggcaccaatacatccaaccaggtggccgtgctgtatcaggacgtgaattgtaccgaggtgcccgtggcaatccacgcagatcagctgacccctacatggcgggtgtactctaccggcagcaacgtgttccagacaagagccggatgcctgatcggagcagagcacgtgaacaatagctatgagtgcgacatccctatcggcgccggcatctgtgccagctaccagacccagacaaactccccatctggagcaggctccgtggccagccagtccatcatcgcctataccatgagcctgggcgccgagaacagcgtggcctactccaacaattctatcgccatccctaccaacttcacaatcagcgtgaccacagagatcctgccagtgtctatgccgaaggtcagcgtggactgcacaatgtatatctgtggcgatagcaccgagtgctccaacctgctgctgcagtacggctccttttgtacccagctgaatagagccctgacaggcatcgcccgagagcaggataagaacctcttaaatgtgttcgcccaggtgaagcagatctacaagaccccacccatcaaggactttggcggcttcaacttcagccagatcctgcctgatccaagcaagccctccaagaggtcttttatcgaggacctgctgttcaacaaggtgaccctggccgatctaggcttcgtaaagcagtataaagattgcctgggagatcaagcagcccgcgacctgatctgtgcccagaagtataatggcataatggtgctgcctccactgctgacagatgagatgatcgcccagtacacatctgccctgctggccggcaccatcacaagcggatggaccttcggcgcaggagccgccctgcagatcccttttgccatgcagatggcctataggttcaacggcatcggcgtgacccagaatgtgctgtacgagaaccagaagctgatcgccaatcagtttaacagcgccatcggcaagatccaggacgggctgtccactacagccagcgccctgagtaagctgcaggatgtggtgaatcagcaagcccaggccctgaatgaactggtgaagcagctgagctccaacttcggcgccatctctagcgtgctgaatgacatcctgagccggctggacccccctgaggcagaggtgcagatcgacaggctgatcacaggccgcctgcagagcctgcagacctacgtgacacagcagctgatcagggcaacggagatcagagcctccgcccaactggccgccgaaaagatgagcgagtgcgtgctgggacagtccaagagggtggacttttgtggcaagggctatcacctgatgtctttcccacagagcgcccctcacggcgtggtgtttctgcacgtgacctacgtgccagcccaggagaagaacttcaccacagcaccagccatctgccacgatggaaaggcacactttcctagggagggcgtgttcgtgtctaacggcacccactggtttgtgacacagcgcaatttctacgagccacagatcatcaccacagacaatacattcgtgagcggcaactgtgatgtggtgatcggcatcgtgaacaataccgtgtatgatccactgcagcccgagctggactcctttaaggaggagctggataagtacttcaagaatcacacctctcccgacgtggatctgggcgacatctccggcatcaatgcctctgtggtgaacatccagaaggagatcgaccggctgaacgaggtggccaagaatctgaacgagagcctgatcgatctgcaggagctgggcaagtatgagcagtacatcaagggctctggcagagagaacctgtatttccagggaggaggaggcagcggatacatccctgaggcaccaagggacggacaggcctacgtgcgcaaggatggcgagtgggtgctgctgtccacctttctgggccatcatcaccaccaccaccaccactga

SEQ ID NO: 1590 - DNA, 3846 bp, Artificial Sequence
  Description of Artificial Sequence: Synthetic polynucleotide
atgggcatcctgccaagcccaggaatgcccgccctgctgtctctggtgagcctgctgtccgtgctgctgatgggatgcgtggcagagacaggcacacagtgcgtgaacctgaccacaaggacccagctgccccctgcctataccaattctttcacacggggcgtgtactatcccgacaaggtgtttagaagctccgtgctgcactccacacaggatctgtttctgcctttcttttctaacgtgacctggttccacgccatccacgtgtccggcaccaatggcacaaagcggttcgacaatcccgtgctgccttttaacgatggcgtgtacttcgccagcaccgagaagtccaacatcatcagaggctggatctttggcaccacactggactctaagacacagagcctgctgatcgtgaacaatgccaccaacgtggtgatcaaggtgtgcgagttccagttttgtaatgatccattcctgggcgtgtactatcacaagaacaataagtcctggatggagtctgagtttcgcgtgtattctagcgccaacaattgcacatttgagtacgtgagccagcccttcctgatggacctggagggcaagcagggcaatttcaagaacctgagggagttcgtgtttaagaatatcgatggctacttcaagatctacagcaagcacaccccaatcaacctggtgcgcgacctgccacagggattctccgccctggagccactggtggatctgcccatcggcatcaacatcacccggtttcagacactgctggccctgcacagatcctacctgacaccaggcgactcctctagcggatggaccgcaggagctgccgcctactatgtgggctatctgcagccccggaccttcctgctgaagtacaacgagaatggcaccatcacagacgcagtggattgcgccctggaccccctgtctgaggtcaagtgtacactgaagagctttaccgtggagaagggcatctatcagacaagcaatttcagggtgcagcctaccgagtccatcgtgcgctttcccaatatcacaaacctgtgcccttttggcgaggtgttcaacgccaccagattcgccagcgtgtacgcctggaatcggaagagaatctccaactgcgtggccgactattctgtgctgtacaactccgcctctttcagcacctttaagtgctatggcgtgtctcccacaaagctgaatgatctgtgctttaccaacgtgtacgccgatagcttcgtgatcaggggagacgaagtgagacagatcgcaccaggacagacaggaaagatcgcagactacaattataagctgcctgacgatttcaccggctgcgtgatcgcctggaactccaacaatctggattctaaagtgggcggcaactacaattatctgtacaggctgtttcgcaagtccaatctgaagccattcgagcgggacatctccacagagatctaccaggccggctctaccccctgcaatggcgtggagggctttaactgttatttccctctgcagtcttacggcttccagccaacaaacggcgtgggctatcagccctacagagtggtggtgctgtcctttgagctgctgcacgcaccagcaacagtgtgcggcccaaagaagtctaccaatctggtgaagaacaagtgcgtgaacttcaacttcaacggactgaccggcacaggcgtgctgaccgagagcaataagaagttcctgccttttcagcagttcggcagggacatcgcagataccacagacgccgtgcgcgaccctcagaccctggagatcctggacatcacaccatgcagcttcggcggcgtgtccgtgatcacaccaggcaccaatacatccaaccaggtggccgtgctgtatcaggacgtgaattgtaccgaggtgcccgtggcaatccacgcagatcagctgacccctacatggcgggtgtactctaccggcagcaacgtgttccagacaagagccggatgcctgatcggagcagagcacgtgaacaatagctatgagtgcgacatccctatcggcgccggcatctgtgccagctaccagacccagacaaactccccatctggagcaggctccgtggccagccagtccatcatcgcctataccatgagcctgggcgccgagaacagcgtggcctactccaacaattctatcgccatccctaccaacttcacaatcagcgtgaccacagagatcctgccagtgtctatgaccaagacaagcgtggactgcacaatgtatatctgtggcgatagcaccgagtgctccaacctgctgctgcagtacggctccttttgtacccagctgaatagagccctgacaggcatcgccgtggagcaggataagaacacacaggaggtgttcgcccaggtgaagcagatctacaagaccccacccatcaaggactttggcggcttcaacttcagccagatcctgcctgatccaagcaagccctccaagaggtcttttatcgaggacctgctgttcaacaaggtgaccctggccgatgccggcttcatcaagcagtatggagattgcctgggagacatcgcagcccgcgacctgatctgtgcccagaagtttaatggcctgaccgtgctgcctccactgctgacagatgagatgatcgcccagtacacatctgccctgctggccggcaccatcacaagcggatggaccttcggcgcaggagccgccctgcagatcccttttgccatgcagatggcctataggttcaacggcatcggcgtgacccagaatgtgctgtacgagaaccagaagctgatcgccaatcagtttaacagcgccatcggcaagatccaggactctctgtcctctacagccagcgccctgggcaagctgcaggatgtggtgaatcagaacgcccaggccctgaataccctggtgaagcagctgagctccaacttcggcgccatctctagcgtgctgaatgacatcctgagccggctggacccccctgaggcagaggtgcagatcgacaggctgatcacaggccgcctgcagagcctgcagacctacgtgacacagcagctgatcagggcagcagagatcagagcctccgccaatctggccgccaccaagatgagcgagtgcgtgctgggacagtccaagagggtggacttttgtggcaagggctatcacctgatgtctttcccacagagcgcccctcacggcgtggtgtttctgcacgtgacctacgtgccagcccaggagaagaacttcaccacagcaccagccatctgccacgatggaaaggcacactttcctagggagggcgtgttcgtgtctaacggcacccactggtttgtgacacagcgcaatttctacgagccacagatcatcaccacagacaatacattcgtgagcggcaactgtgatgtggtgatcggcatcgtgaacaataccgtgtatgatccactgcagcccgagctggactcctttaaggaggagctggataagtacttcaagaatcacacctctcccgacgtggatctgggcgacatctccggcatcaatgcctctgtggtgaacatccagaaggagatcgaccggctgaacgaggtggccaagaatctgaacgagagcctgatcgatctgcaggagctgggcaagtatgagcagtacatcaagggctctggcagagagaacctgtatttccagggaggaggaggcagcggatacatccctgaggcaccaagggacggacaggcctacgtgcgcaaggatggcgagtgggtgctgctgtccacctttctgggccatcatcaccaccaccaccaccactga

SEQ ID NO: 1591 - DNA, 3846 bp, Artificial Sequence
  Description of Artificial Sequence: Synthetic polynucleotide
atgggcatcctgccaagcccaggaatgcccgccctgctgtctctggtgagcctgctgtccgtgctgctgatgggatgcgtggcagagacaggcacacagtgcgtgaacctgaccacaaggacccagctgccccctgcctataccaattctttcacacggggcgtgtactatcccgacaaggtgtttagaagcgatgtgctgcactccacacaggatctgtttctgcctttcttttctaacgtgacctggttccacgccatccacgtgtccggcaccaatggcacaaagcggttcgacaatcccgtgctgccttttaacgatggcgtgtacttcgccagcaccgagaagtccaacatcatcagaggctggatctttggcaccacactggactctaagacacagagcctgctgatcgtgaacaatgccaccaacgtggtgatcaaggtgtgcgagttccagttttgtgataatccattcctgggcgtgtactatcacaagaacaataagtcctggatggagaaagagtttcgcgtgtattctagcgccaacaattgcacatttgagtacgtgagccagcccttcctgatggacctggggggcaagcagggcaatttcaagaacctgagggagttcgtgtttaagaatatcgatggctacttcaagatctacagcaagcacaccccaatcaacctggtgcgcgacctgccacagggattctccgccctggagccactgatggatctgcccatcggcatcaacatcacccggtttcagacactgctggccctgcacagatcctacctgacaccaggcgactcctctagcggatggaccgcaggagctgccgcctactatgtgggctatctgcagccccggaccttcctgctgaagtacaacgagaatggcaccatcacagacgcagtggattgcgccctggaccccctgtctgagacaaagtgtacactgaagagctttaccgtggagaagggcatctatcagacaagcaatttcagggtgcagcctaccgagtccatcgtgcgctttcccaatatcacaaacctgtgcccttttggcgaggtgttcaacgccaccagattcgccagcgtgtacgcctggaatcggaagagaatctccaactgcgtggccgactattctgtgctgtacaactccgcctctttcagcacctttaagtgctatggcgtgtctcccacaaagctgaatgatctgtgctttaccaacgtgtacgccgatagcttcgtgatcaggggagacgaagtgagacagatcgcaccaggacagacaggaaagatcgcagactacaattataagctgcctgacgatttcaccggctgcgtgatcgcctggaactccaacaatctggattctaaagtgggcggcaactacaattatctgtacaggctgtttcgcaagtccaatctgaagccattcgagcgggacatctccacagagatctaccaggccggctctaccccctgcaatggcgtggagggctttaactgttatttccctctgcagtcttacggcttccagccaacaaacggcgtgggctatcagccctacagagtggtggtgctgtcctttgagctgctgcacgcaccagcaacagtgtgcggcccaaagaagtctaccaatctggtgaagaacaagtgcgtgaacttcaacttcaacggactgaccggcacaggcgtgctgaccgagagcaataagaagttcctgccttttcagcagttcggcagggacatcgcagataatacagacgccgtgcgcgaccctcagaccctggagatcctggacatcacaccatgcagcttcggcggcgtgtccgtgatcacaccaggcaccaatacatccaaccaggtggccgtgctgtatcaggacgtgaattgtaccgaggtgcccaatgcaatccacgcagatcagctgacccctacatggcgggtgtactctaccggcagcaacgtgttccagacaagagccggatgcctgatcggagcagagcacgtgaacaatagctatgagtgcgacatccctatcggcgccggcatctgtgccagctaccagacccagacaaactccccatctggagcaggctccgtggccagccagtccatcatcgcctataccatgagcctgggcgccgagaacagcgtggcctactccaacaattctatcgccatccctaccaacttcacaatcagcgtgaccacagagatcctgccagtgtctatgaccaagacaagcgtggactgcacaatgtatatctgtggcgatagcaccgagtgctccaacctgctgctgcagtacggctccttttgtacccagctgaatagagccctgcaaggcatcgcccgtgagcaggataagaacacacaggaggtgttcgcccaggtgaagcagatctacaagaccccacccatcaaggactttggcggcttcaacttcagccagatcctgcctgatccaagcaagccctccaagaggtcttttatcgaggacctgctgttcaacaaggtgaccctggccgatgccggcttcatcaagcagtatggagattgcctgggagacatcgcagcccgcgacctgatctgtgcccagaagtttaatggcctgaccgtgctgcctccactgctgacagatgagatgatcgcccagtacacatctgccctgctggccggcaccatcacaagcggatggaccttcggcgcaggagccgccctgcagatcccttttgccatgcagatggcctataggttcaacggcatcggcgtgacccagaatgtgctgtacgagaaccagaagctgatcgccaatcagtttaacaaagccatcggcaagatccaggactctctgtcctctacagccagcgccctgggcaagctgcaggatgtggtgaatcagaacgcccaggccctgaataccctggtgaagcagctgagctccaacttcggcgccatctctagcgtgctgaatgacatcctgagccggctggacccccctgaggcagaggtgcagatcgacaggctgatcacaggccgcctgcagagcctgcagacctacgtgacacagcagctgatcagggcagcagagatcagagcctccgccaatctggccgccaccaagatgagcgagtgcgtgctgggacagtccaagagggtggacttttgtggcaagggctatcacctgatgtctttcccacagagcgcccctcacggcgtggtgtttctgcacgtgacctacgtgccagcccaggagaagaacttcaccacagcaccagccatctgccacgatggaaaggcattttttcctagggagggcgtgttcgtgtctaacggcacccaatggtttgtgacacagcgcaatttctacgagccacagatcatcaccacagacaatacattcgtgagcggcaactgtgatgtggtgatcggcatcgtgaacaataccgtgtatgatccactgcagcccgagctggactcctttaaggaggagctggataagtacttcaagaatcacacctctcccgacgtggatctgggcgacatctccggcatcaatgcctctgtggtgaacatccagaaggagatcgaccggctgaacgaggtggccaagaatctgaacgagagcctgatcgatctgcaggagctgggcaagtatgagcagtacatcaagggctctggcagagagaacctgtatttccagggaggaggaggcagcggatacatccctgaggcaccaagggacggacaggcctacgtgcgcaaggatggcgagtgggtgctgctgtccacctttctgggccatcatcaccaccaccaccaccactga

SEQ ID NO: 1592 - DNA, 3846 bp, Artificial Sequence
  Description of Artificial Sequence: Synthetic polynucleotide
atgggcatcctgccaagcccaggaatgcccgccctgctgtctctggtgagcctgctgtccgtgctgctgatgggatgcgtggcagagacaggcacacagtgcgtgaacctgaccacaaggacccagctgccccctgcctataccaattctttcacacggggcgtgtactatcccgacaaggtgtttagaagctccgtgctgcactccacacaggatctgtttctgcctttcttttctaacgtgacctggttccacgccatccacgtgtccggcaccaatggcacaaagcggttcgacaatcccgtgctgccttttaacgatggcgtgtacttcgccagcaccgagaagtccaacatcatcagaggctggatctttggcaccacactggacaataagacacagagcctgctgatcgtgaacaatgccaccaacgtggtgatcaaggtgtgcgagttccagttttgtaatgatccattcctgggcgtgtactatcacaagaacaataagtcctggatggagtctgagtttcgcgtgtattctagcgccaacaattgcacatttgagtacgtgagccagcccttcctgatggacctggagggcaagcagggcaatttcaagaacctgagggagttcgtgtttaagaatatcgatggctacttcaagatctacagcaagcacaccccaatcaacctggtgcgcgacctgccacagggattctccgccctggagccactggtggatctgcccatcggcatcaacatcacccggtttcagacactgctggccctgcacagatcctacctgacaccaggcgactcctctagcggatggaccgcaggagctgccgcctactatgtgggctatctgcagccccggaccttcctgctgaagtacaacgagaatggcaccatcacagacgcagtggattgcgccctggaccccctgtctgagacaaagtgtacactgaagagctttaccgtggagaagggcatctatcagacaagcaatttcagggtgcagcctaccgagtccatcgtgcgctttcccaatatcacaaacctgtgcccttttggcgaggtgttcaacgccaccagattcgccagcgtgtacgcctggaatcggaagagaatctccaactgcgtggccgactattctgtgctgtacaactccgcctctttcagcacctttaagtgctatggcgtgtctcccacaaagctgaatgatctgtgctttaccaacgtgtacgccgatagcttcgtgatcaggggagacgaagtgagacagatcgcaccaggacagacaggaaagatcgcagactacaattataagctgcctgacgatttcaccggctgcgtgatcgcctggaactccaacaatctggattctaaagtgggcggcaactacaattatctgtacaggctgtttcgcaagtccaatctgaagccattcgagcgggacatctccacagagatctaccaggccggctctaccccctgcaatggcgtggagggctttaactgttatttccctctgcagtcttacggcttccagccaacaaacggcgtgggctatcagccctacagagtggtggtgctgtcctttgagctgctgcacgcaccagcaacagtgtgcggcccaaagaagtctaccaatctggtgaagaacaagtgcgtgaacttcaacttcaacggactgaccggcacaggcgtgctgaccgagagcaataagaagttcctgccttttcagcagttcggcagggacatcgcagataccacagacgccgtgcgcgaccctcagaccctggagatcctggacatcacaccatgcagcttcggcggcgtgtccgtgatcacaccaggcaccaatacatccaaccaggtggccgtgctgtatcaggacgtgaattgtaccgaggtgcccgtggcaatccacgcagatcagctgacccctacatggcgggtgtactctaccggcagcaacgtgttccagacaagagccggatgcctgatcggagcagagcacgtgaacaatagctatgagtgcgacatccctatcggcgccggcatctgtgccagctaccagacccagacaaactccccatctggagcaggctccgtggccagccagtccatcatcgcctataccatgagcctgggcgccgagaacagcgtggcctactccaacaattctatcgccatccctaccaacttcacaatcagcgtgaccacagagatcctgccagtgtctatgaccaagacaagcgtggactgcacaatgtatatctgtggcgatagcaccgagtgctccaacctgctgctgcagtacggctccttttgtacccagctgaatagagccctgacaggcatcgccgtggagcaggataagaacacacaggaggtgttcgcccaggtgaagcagatctacaagaccccacccatcaaggactttggcggcttcaacttcagccagatcctgcctgatccaagcaagccctccaagaggtcttttatcgaggacctgctgttcaacaaggtgaccctggccgatgccggcttcatcaagcagtatggagattgcctgggagacatcgcagcccgcgacctgatctgtgcccagaagtttaatggcctgaccgtgctgcctccactgctgacagatgagatgatcgcccagtacacatctgccctgctggccggcaccatcacaagcggatggaccttcggcgcaggagccgccctgcagatcccttttgccatgcagatggcctataggttcaacggcatcggcgtgacccagaatgtgctgtacgagaaccagaagctgatcgccaatcagtttaacagcgccatcggcaagatccaggactctctgtcctctacagccagcgccctgggcaagctgcaggatgtggtgaatcagaacgcccaggccctgaataccctggtgaagcagctgagctccaacttcggcgccatctctagcgtgctgaatgacatcctgagccggctggacccccctgaggcagaggtgcagatcgacaggctgatcacaggccgcctgcagagcctgcagacctacgtgacacagcagctgatcagggcagcagagatcagagcctccgccaatctggccgccaccaagatgagcgagtgcgtgctgggacagtccaagagggtggacttttgtggcaagggctatcacctgatgtctttcccacagagcgcccctcacggcgtggtgtttctgcacgtgacctacgtgccagcccaggagaagaacttcaccacagcaccagccatctgccacgatggaaaggcacactttcctagggagggcgtgttcgtgtctaacggcacccactggtttgtgacacagcgcaatttctacgagccacagatcatcaccacagacaatacattcgtgagcggcaactgtgatgtggtgatcggcatcgtgaacaataccgtgtatgatccactgcagcccgagctggactcctttaaggaggagctggataagtacttcaagaatcacacctctcccgacgtggatctgggcgacatctccggcatcaatgcctctgtggtgaacatccagaaggagatcgaccggctgaacgaggtggccaagaatctgaacgagagcctgatcgatctgcaggagctgggcaagtatgagcagtacatcaagggctctggcagagagaacctgtatttccagggaggaggaggcagcggatacatccctgaggcaccaagggacggacaggcctacgtgcgcaaggatggcgagtgggtgctgctgtccacctttctgggccatcatcaccaccaccaccaccactga

SEQ ID NO: 1593 - DNA, 3846 bp, Artificial Sequence
  Description of Artificial Sequence: Synthetic polynucleotide
atgggcatcctgccaagcccaggaatgcccgccctgctgtctctggtgagcctgctgtccgtgctgctgatgggatgcgtggcagagacaggcacacagtgcgtgaacctgaccacaaggacccagctgccccctgcctataccaattctttcacacggggcgtgtactatcccgacaaggtgtttagaagctccgtgctgcactccacacaggatctgtttctgcctttcttttctaacgtgacctggttccacgccatccacgtgtccggcaccaatggcacaaagcggttcgacaatcccgtgctgccttttaacgatggcgtgtacttcgccagcaccgagaagtccaacatcatcagaggctggatctttggcaccacactggactctaagacacagagcctgctgatcgtgaacaatgccaccaacgtggtgatcaaggtgtgcgagttccagttttgtaatgatccattcctgggcgtgtactatcacaagaacaataagtcctggatggagtctgagtttcgcgtgtattctagcgccaacaattgcacatttgagtacgtgagccagcccttcctgatggacctggagggcaagcagggcaatttcaagaacctgagggagttcgtgtttaagaatatcgatggctacttcaagatctacagcaagcacaccccaatcaacctggtgcgcgacctgccacagggattctccgccctggagccactggtggatctgcccatcggcatcaacatcacccggtttcagacactgctggccctgcacagatcctacctgacaccaggcgactcctctagcggatggaccgcaggagctgccgcctactatgtgggctatctgcagccccggaccttcctgctgaagtacaacgagaatggcaccatcacagacgcagtggattgcgccctggaccccctgtctgagacaaagtgtacactgaagagctttaccgtggagaagggcatctatcagacaagcaatttcagggtgcagcctaccgagtccatcgtgcgctttcccaatatcacaaacctgtgcccttttggcgaggtgttcaacgccaccagattcgccagcgtgtacgcctggaatcggaagagaatctccaactgcgtggccgactattctgtgctgtacaactccgcctctttcagcacctttaagtgctatggcgtgtctcccacaaagctgaatgatctgtgctttaccaacgtgtacgccgatagcttcgtgatcaggggagacgaagtgagacagatcgcaccaggacagacaggaaagatcgcagactacaattataagctgcctgacgatttcaccggctgcgtgatcgcctggaactccaacaatctggattctaaagtgggcggcaactacaattatctgtacaggctgtttcgcaagtccaatctgaagccattcgagcgggacatctccacagagatctaccaggccggctctaccccctgcaatggcgtggagggctttaactgttatttccctctgcagtcttacggcttccagccaacaaacggcgtgggctatcagccctacagagtggtggtgctgtcctttgagctgctgcacgcaccagcaacagtgtgcggcccaaagaagtctaccaatctggtgaagaacaagtgcgtgaacttcaacttcaacggactgaccggcacaggcgtgctgaccgagagcaataagaagttcctgccttttcagcagttcggcagggacatcgcagataccacagacgccgtgcgcgaccctcagaccctggagatcctggacatcacaccatgcagcttcggcggcgtgtccgtgatcacaccaggcaccaatacatccaaccaggtggccgtgctgtatcaggacgtgaattgtaccgaggtgcccaatgcaatccacgcagatcagctgacccctacatggcgggtgtactctaccggcagcaacgtgttccagacaagagccggatgcctgatcggagcagagcacgtgaacaatagctatgagtgcgacatccctatcggcgccggcatctgtgccagctaccagacccagacaaactccccatctggagcaggctccgtggccagccagtccatcatcgcctataccatgagcctgggcgccgagaacagcgtggcctactccaacaattctatcgccatccctaccaacttcacaatcagcgtgaccacagagatcctgccagtgtctatgaccaagacaagcgtggactgcacaatgtatatctgtggcgatagcaccgagtgctccaacctgctgctgcagtacggctccttttgtacccagctgaatagagccctgacaggcatcgccgtggagcaggataagaacacacaggaggtgttcgcccaggtgaagcagatctacaagaccccacccatcaaggactttggcggcttcaacttcagccagatcctgcctgatccaagcaagccctccaagaggtcttttatcgaggacctgctgttcaacaaggtgaccctggccgatgccggcttcatcaagcagtatggagattgcctgggagacatcgcagcccgcgacctgatctgtgcccagaagtttaatggcctgaccgtgctgcctccactgctgacagatgagatgatcgcccagtacacatctgccctgctggccggcaccatcacaagcggatggaccttcggcgcaggagccgccctgcagatcccttttgccatgcagatggcctataggttcaacggcatcggcgtgacccagaatgtgctgtacgagaaccagaagctgatcgccaatcagtttaacagcgccatcggcaagatccaggactctctgtcctctacagccagcgccctgggcaagctgcaggatgtggtgaatcagaacgcccaggccctgaataccctggtgaagcagctgagctccaacttcggcgccatctctagcgtgctgaatgacatcctgagccggctggacccccctgaggcagaggtgcagatcgacaggctgatcacaggccgcctgcagagcctgcagacctacgtgacacagcagctgatcagggcagcagagatcagagcctccgccaatctggccgccaccaagatgagcgagtgcgtgctgggacagtccaagagggtggacttttgtggcaagggctatcacctgatgtctttcccacagagcgcccctcacggcgtggtgtttctgcacgtgacctacgtgccagcccaggagaagaacttcaccacagcaccagccatctgccacgatggaaaggcacactttcctagggagggcgtgttcgtgtctaacggcacccactggtttgtgacacagcgcaatttctacgagccacagatcatcaccacagacaatacattcgtgagcggcaactgtgatgtggtgatcggcatcgtgaacaataccgtgtatgatccactgcagcccgagctggactcctttaaggaggagctggataagtacttcaagaatcacacctctcccgacgtggatctgggcgacatctccggcatcaatgcctctgtggtgaacatccagaaggagatcgaccggctgaacgaggtggccaagaatctgaacgagagcctgatcgatctgcaggagctgggcaagtatgagcagtacatcaagggctctggcagagagaacctgtatttccagggaggaggaggcagcggatacatccctgaggcaccaagggacggacaggcctacgtgcgcaaggatggcgagtgggtgctgctgtccacctttctgggccatcatcaccaccaccaccaccactga

SEQ ID NO: 1594 - DNA, 3846 bp, Artificial Sequence
  Description of Artificial Sequence: Synthetic polynucleotide
atgggcatcctgccaagcccaggaatgcccgccctgctgtctctggtgagcctgctgtccgtgctgctgatgggatgcgtggcagagacaggcacacagtgcgtgaacctgaccacaaggacccagctgccccctgcctataccaattctttcacacggggcgtgtactatcccgacaaggtgtttagaagctccgtgctgcactccacacaggatctgtttctgcctttcttttctaacgtgacctggttccacgccatccacgtgtccggcaccaatggcacaaagcggttcgacaatcccgtgctgccttttaacgatggcgtgtacttcgccagcaccgagaagtccaacatcatcagaggctggatctttggcaccacactggactctaagacacagagcctgctgatcgtgaacaatgccaccaacgtggtgatcaaggtgtgcgagttccagttttgtaatgatccattcctgggcgtgtactatcacaagaacaataagtcctggatggagtctgagtttcgcgtgtattctagcgccaacaattgcacatttgagtacgtgagccagcccttcctgatggacctggagggcaagcagggcaatttcaagaacctgagggagttcgtgtttaagaatatcgatggctacttcaagatctacagcaagcacaccccaatcaacctggtgcgcgacctgccacagggattctccgccctggagccaatagtggatctgcccatcggcatcaacatcacccggtttcagacactgctggccctgcacagatcctacctgacaccaggcgactcctctagcggatggaccgcaggagctgccgcctactatgtgggctatctgcagccccggaccttcctgctgaagtacaacgagaatggcaccatcacagacgcagtggattgcgccctggaccccctgtctgagacaaagtgtacactgaagagctttaccgtggagaagggcatctatcagacaagcaatttcagggtgcagcctaccgagtccatcgtgcgctttcccaatatcacaaacctgtgcccttttggcgaggtgttcaacgccaccagattcgccagcgtgtacgcctggaatcggaagagaatctccaactgcgtggccgactattctgtgctgtacaactccgcctctttcagcacctttaagtgctatggcgtgtctcccacaaagctgaatgatctgtgctttaccaacgtgtacgccgatagcttcgtgatcaggggagacgaagtgagacagatcgcaccaggacagacaggaaagatcgcagactacaattataagctgcctgacgatttcaccggctgcgtgatcgcctggaactccaacaatctggattctaaagtgggcggcaactacaattatctgtacaggctgtttcgcaagtccaatctgaagccattcgagcgggacatctccacagagatctaccaggccggctctaccccctgcaatggcgtggagggctttaactgttatttccctctgcagtcttacggcttccagccaacaaacggcgtgggctatcagccctacagagtggtggtgctgtcctttgagctgctgcacgcaccagcaacagtgtgcggcccaaagaagtctaccaatctggtgaagaacaagtgcgtgaacttcaacttcaacggactgaccggcacaggcgtgctgaccgagagcaataagaagttcctgccttttcagcagttcggcagggacatcgcagataccacagacgccgtgcgcgaccctcagaccctggagatcctggacatcacaccatgcagcttcggcggcgtgtccgtgatcacaccaggcaccaatacatccaaccaggtggccgtgctgtatcaggacgtgaattgtaccgaggtgcccgtggcaatccacgcagatcagctgacccctacatggcgggtgtactctaccggcagcaacgtgttccagacaagagccggatgcctgatcggagcagagcacgtgaacaatagctatgagtgcgacatccctatcggcgccggcatctgtgccagctaccagacccagacaaactccccatctggagcaggctccgtggccagccagtccatcatcgcctataccatgagcctgggcgccgagaacagcgtggcctactccaacaattctatcgccatccctaccaacttcacaatcagcgtgaccacagagatcctgccagtgtctatgaccaagacaagcgtggactgcacaatgtatatctgtggcgatagcaccgagtgctccaacctgctgctgcagtacggctccttttgtacccagctgaatagagccctgacaggcatcgccgtggagcaggataagaacacacaggaggtgttcgcccaggtgaagcagatctacaagaccccacccatcaaggactttggcggcttcaacttcagccagatcctgcctgatccaagcaagccctccaagaggtcttttatcgaggacctgctgttcaacaaggtgaccctggccgatgccggcttcatcaagcagtatggagattgcctgggagacatcgcagcccgcgacctgatctgtgcccagaagtttaatggcctgaccgtgctgcctccactgctgacagatgagatgatcgcccagtacacatctgccctgctggccggcaccatcacaagcggatggaccttcggcgcaggagccgccctgcagatcccttttgccatgcagatggcctataggttcaacggcatcggcgtgacccagaatgtgctgtacgagaaccagaagctgatcgccaatcagtttaacagcgccatcggcaagatccaggactctctgtcctctacagccagcgccctgggcaagctgcaggatgtggtgaatcagaacgcccaggccctgaataccctggtgaagcagctgagctccaacttcggcgccatctctagcgtgctgaatgacatcctgagccggctggacccccctgaggcagaggtgcagatcgacaggctgatcacaggccgcctgcagagcctgcagacctacgtgacacagcagctgatcagggcagcagagatcagagcctccgccaatctggccgccaccaagatgagcgagtgcgtgctgggacagtccaagagggtggacttttgtggcaagggctatcacctgatgtctttcccacagagcgcccctcacggcgtggtgtttctgcacgtgacctacgtgccagcccaggagaagaacttcaccacagcaccagccatctgccacgatggaaaggcacactttcctagggagggcgtgttcgtgtctaacggcacccactggtttgtgacacagcgcaatttctacgagccacagatcatcaccacagacaatacattcgtgagcggcaactgtgatgtggtgatcggcatcgtgaacaataccgtgtatgatccactgcagcccgagctggactcctttaaggaggagctggataagtacttcaagaatcacacctctcccgacgtggatctgggcgacatctccggcatcaatgcctctgtggtgaacatccagaaggagatcgaccggctgaacgaggtggccaagaatctgaacgagagcctgatcgatctgcaggagctgggcaagtatgagcagtacatcaagggctctggcagagagaacctgtatttccagggaggaggaggcagcggatacatccctgaggcaccaagggacggacaggcctacgtgcgcaaggatggcgagtgggtgctgctgtccacctttctgggccatcatcaccaccaccaccaccactga

SEQ ID NO: 1595 - DNA, 3846 bp, Artificial Sequence
  Description of Artificial Sequence: Synthetic polynucleotide
atgggcatcctgccaagcccaggaatgcccgccctgctgtctctggtgagcctgctgtccgtgctgctgatgggatgcgtggcagagacaggcacacagtgcgtgaacctgaccacaaggacccagctgccccctgcctataccaattctttcacacggggcgtgtactatcccgacaaggtgtttagaagctccgtgctgcactccacacaggatctgtttctgcctttcttttctaacgtgacctggttccacgccatccacgtgtccggcaccaatggcacaaagcggttcgacaatcccgtgctgccttttaacgatggcgtgtacttcgccagcaccgagaagtccaacatcatcagaggctggatctttggcaccacactggactctaagacacagagcctgctgatcgtgaacaatgccaccaacgtggtgatcaaggtgtgcgagttccagttttgtaatgatccattcctgggcgtgtactatcacaagaacaataagtcctggatggagtctgagtttcgcgtgtattctagcgccaacaattgcacatttgagtacgcgagccagcccttcctgatggacctggagggcaagcagggcaatttcaagaacctgagggagttcgtgtttaagaatatcgatggctacttcaagatctacagcaagcacaccccaatcaacctggtgcgcgacctgccacagggattctccgccctggagccactggtggatctgcccatcggcatcaacatcacccggtttcagacactgctggccctgcacagatcctacctgacaccaggcgactcctctagcggatggaccgcaggagctgccgcctactatgtgggctatctgcagccccggaccttcctgctgaagtacaacgagaatggcaccatcacagacgcagtggattgcgccctggaccccctgtctgagacaaagtgtacactgaagagctttaccgtggagaagggcatctatcagacaagcaatttcagggtgcagcctaccgagtccatcgtgcgctttcccaatatcacaaacctgtgcccttttggcgaggtgttcaacgccaccagattcgccagcgtgtacgcctggaatcggaagagaatctccaactgcgtggccgactattctgtgctgtacaactccgcctctttcagcacctttaagtgctatggcgtgtctcccacaaagctgaatgatctgtgctttaccaacgtgtacgccgatagcttcgtgatcaggggagacgaagtgagacagatcgcaccaggacagacaggaaagatcgcagactacaattataagctgcctgacgatttcaccggctgcgtgatcgcctggaactccaacaatctggattctaaagtgggcggcaactacaattatctgtacaggctgtttcgcaagtccaatctgaagccattcgagcgggacatctccacagagatctaccaggccggctctaccccctgcaatggcgtggagggctttaactgttatttccctctgcagtcttacggcttccagccaacaaacggcgtgggctatcagccctacagagtggtggtgctgtcctttgagctgctgcacgcaccagcaacagtgtgcggcccaaagaagtctaccaatctggtgaagaacaagtgcgtgaacttcaacttcaacggactgaccggcacaggcgtgctgaccgagagcaataagaagttcctgccttttcagcagttcggcagggacatcgcagataccacagacgccgtgcgcgaccctcagaccctggagatcctggacatcacaccatgcagcttcggcggcgtgtccgtgatcacaccaggcaccaatacatccaaccaggtggccgtgctgtatcaggacgtgaattgtaccgaggtgcccgtggcaatccacgcagatcagctgacccctacatggcgggtgtactctaccggcagcaacgtgttccagacaagagccggatgcctgatcggagcagagcacgtgaacaatagctatgagtgcgacatccctatcggcgccggcatctgtgccagctaccagacccagacaaactccccatctggagcaggctccgtggccagccagtccatcatcgcctataccatgagcctgggcgccgagaacagcgtggcctactccaacaattctatcgccatccctaccaacttcacaatcagcgtgaccacagagatcctgccagtgtctatgaccaagacaagcgtggactgcacaatgtatatctgtggcgatagcaccgagtgctccaacctgctgctgcagtacggctccttttgtacccagctgaatagagccctgacaggcatcgccgtggagcaggataagaacacacaggaggtgttcgcccaggtgaagcagatctacaagaccccacccatcaaggactttggcggcttcaacttcagccagatcctgcctgatccaagcaagccctccaagaggtcttttatcgaggacctgctgttcaacaaggtgaccctggccgatgccggcttcatcaagcagtatggagattgcctgggagacatcgcagcccgcgacctgatctgtgcccagaagtttaatggcctgaccgtgctgcctccactgctgacagatgagatgatcgcccagtacacatctgccctgctggccggcaccatcacaagcggatggaccttcggcgcaggagccgccctgcagatcccttttgccatgcagatggcctataggttcaacggcatcggcgtgacccagaatgtgctgtacgagaaccagaagctgatcgccaatcagtttaacagcgccatcggcaagatccaggactctctgtcctctacagccagcgccctgggcaagctgcaggatgtggtgaatcagaacgcccaggccctgaataccctggtgaagcagctgagctccaacttcggcgccatctctagcgtgctgaatgacatcctgagccggctggacccccctgaggcagaggtgcagatcgacaggctgatcacaggccgcctgcagagcctgcagacctacgtgacacagcagctgatcagggcagcagagatcagagcctccgccaatctggccgccaccaagatgagcgagtgcgtgctgggacagtccaagagggtggacttttgtggcaagggctatcacctgatgtctttcccacagagcgcccctcacggcgtggtgtttctgcacgtgacctacgtgccagcccaggagaagaacttcaccacagcaccagccatctgccacgatggaaaggcacactttcctagggagggcgtgttcgtgtctaacggcacccactggtttgtgacacagcgcaatttctacgagccacagatcatcaccacagacaatacattcgtgagcggcaactgtgatgtggtgatcggcatcgtgaacaataccgtgtatgatccactgcagcccgagctggactcctttaaggaggagctggataagtacttcaagaatcacacctctcccgacgtggatctgggcgacatctccggcatcaatgcctctgtggtgaacatccagaaggagatcgaccggctgaacgaggtggccaagaatctgaacgagagcctgatcgatctgcaggagctgggcaagtatgagcagtacatcaagggctctggcagagagaacctgtatttccagggaggaggaggcagcggatacatccctgaggcaccaagggacggacaggcctacgtgcgcaaggatggcgagtgggtgctgctgtccacctttctgggccatcatcaccaccaccaccaccactga

SEQ ID NO: 1596 - DNA, 3846 bp, Artificial Sequence
  Description of Artificial Sequence: Synthetic polynucleotide
atgggcatcctgccaagcccaggaatgcccgccctgctgtctctggtgagcctgctgtccgtgctgctgatgggatgcgtggcagagacaggcacacagtgcgtgaacctgaccacaaggacccagctgccccctgcctataccaattctttcacacggggcgtgtactatcccgacaaggtgtttagaagctccgtgctgcactccacacaggatctgtttctgcctttcttttctaacgtgacctggttccacgccatccacgtgtccggcaccaatggcacaaagcggttcgacaatcccgtgctgccttttaacgatggcgtgtacttcgccagcaccgagaagtccaacatcatcagaggctggatctttggcaccacactggactctaagacacagagcctgctgatcgtgaacaatgccaccaacgtggtgatcaaggtgtgcgagttccagttttgtaatgatccattcctgggcgtgtactatcacaagaacaataagtcctggatggagtctgagtttcgcgtgtattctagcgccaacaattgcacatttgagtacgtgagccagcccaatctgatggacctggagggcaagcagggcaatttcaagaacctgagggagttcgtgtttaagaatatcgatggctacttcaagatctacagcaagcacaccccaatcaacctggtgcgcgacctgccacagggattctccgccctggagccactggtggatctgcccatcggcatcaacatcacccggtttcagacactgctggccctgcacagatcctacctgacaccaggcgactcctctagcggatggaccgcaggagctgccgcctactatgtgggctatctgcagccccggaccttcctgctgaagtacaacgagaatggcaccatcacagacgcagtggattgcgccctggaccccctgtctgagacaaagtgtacactgaagagctttaccgtggagaagggcatctatcagacaagcaatttcagggtgcagcctaccgagtccatcgtgcgctttcccaatatcacaaacctgtgcccttttggcgaggtgttcaacgccaccagattcgccagcgtgtacgcctggaatcggaagagaatctccaactgcgtggccgactattctgtgctgtacaactccgcctctttcagcacctttaagtgctatggcgtgtctcccacaaagctgaatgatctgtgctttaccaacgtgtacgccgatagcttcgtgatcaggggagacgaagtgagacagatcgcaccaggacagacaggaaagatcgcagactacaattataagctgcctgacgatttcaccggctgcgtgatcgcctggaactccaacaatctggattctaaagtgggcggcaactacaattatctgtacaggctgtttcgcaagtccaatctgaagccattcgagcgggacatctccacagagatctaccaggccggctctaccccctgcaatggcgtggagggctttaactgttatttccctctgcagtcttacggcttccagccaacaaacggcgtgggctatcagccctacagagtggtggtgctgtcctttgagctgctgcacgcaccagcaacagtgtgcggcccaaagaagtctaccaatctggtgaagaacaagtgcgtgaacttcaacttcaacggactgaccggcacaggcgtgctgaccgagagcaataagaagttcctgccttttcagcagttcggcagggacatcgcagataccacagacgccgtgcgcgaccctcagaccctggagatcctggacatcacaccatgcagcttcggcggcgtgtccgtgatcacaccaggcaccaatacatccaaccaggtggccgtgctgtatcaggacgtgaattgtaccgaggtgcccgtggcaatccacgcagatcagctgacccctacatggcgggtgtactctaccggcagcaacgtgttccagacaagagccggatgcctgatcggagcagagcacgtgaacaatagctatgagtgcgacatccctatcggcgccggcatctgtgccagctaccagacccagacaaactccccatctggagcaggctccgtggccagccagtccatcatcgcctataccatgagcctgggcgccgagaacagcgtggcctactccaacaattctatcgccatccctaccaacttcacaatcagcgtgaccacagagatcctgccagtgtctatgaccaagacaagcgtggactgcacaatgtatatctgtggcgatagcaccgagtgctccaacctgctgctgcagtacggctccttttgtacccagctgaatagagccctgacaggcatcgccgtggagcaggataagaacacacaggaggtgttcgcccaggtgaagcagatctacaagaccccacccatcaaggactttggcggcttcaacttcagccagatcctgcctgatccaagcaagccctccaagaggtcttttatcgaggacctgctgttcaacaaggtgaccctggccgatgccggcttcatcaagcagtatggagattgcctgggagacatcgcagcccgcgacctgatctgtgcccagaagtttaatggcctgaccgtgctgcctccactgctgacagatgagatgatcgcccagtacacatctgccctgctggccggcaccatcacaagcggatggaccttcggcgcaggagccgccctgcagatcccttttgccatgcagatggcctataggttcaacggcatcggcgtgacccagaatgtgctgtacgagaaccagaagctgatcgccaatcagtttaacagcgccatcggcaagatccaggactctctgtcctctacagccagcgccctgggcaagctgcaggatgtggtgaatcagaacgcccaggccctgaataccctggtgaagcagctgagctccaacttcggcgccatctctagcgtgctgaatgacatcctgagccggctggacccccctgaggcagaggtgcagatcgacaggctgatcacaggccgcctgcagagcctgcagacctacgtgacacagcagctgatcagggcagcagagatcagagcctccgccaatctggccgccaccaagatgagcgagtgcgtgctgggacagtccaagagggtggacttttgtggcaagggctatcacctgatgtctttcccacagagcgcccctcacggcgtggtgtttctgcacgtgacctacgtgccagcccaggagaagaacttcaccacagcaccagccatctgccacgatggaaaggcacactttcctagggagggcgtgttcgtgtctaacggcacccactggtttgtgacacagcgcaatttctacgagccacagatcatcaccacagacaatacattcgtgagcggcaactgtgatgtggtgatcggcatcgtgaacaataccgtgtatgatccactgcagcccgagctggactcctttaaggaggagctggataagtacttcaagaatcacacctctcccgacgtggatctgggcgacatctccggcatcaatgcctctgtggtgaacatccagaaggagatcgaccggctgaacgaggtggccaagaatctgaacgagagcctgatcgatctgcaggagctgggcaagtatgagcagtacatcaagggctctggcagagagaacctgtatttccagggaggaggaggcagcggatacatccctgaggcaccaagggacggacaggcctacgtgcgcaaggatggcgagtgggtgctgctgtccacctttctgggccatcatcaccaccaccaccaccactga

SEQ ID NO: 1597 - DNA, 3846 bp, Artificial Sequence
  Description of Artificial Sequence: Synthetic polynucleotide
atgggcatcctgccaagcccaggaatgcccgccctgctgtctctggtgagcctgctgtccgtgctgctgatgggatgcgtggcagagacaggcacacagtgcgtgaacctgaccacaaggacccagctgccccctgcctataccaattctttcacacggggcgtgtactatcccgacaaggtgtttagaagctccgtgctgcactccacacaggatctgtttctgcctttcttttctaacgtgacctggttccacgccatccacgtgtccggcaccaatggcacaaagcggttcgacaatcccgtgctgccttttaacgatggcgtgtacttcgccagcaccgagaagtccaacatcatcagaggctggatctttggcaccacactggactctaagacacagagcctgctgatcgtgaacaatgccaccaacgtggtgatcaaggtgtgcgagttccagttttgtaatgatccattcctgggcgtgtactatcacaagaacaataagtcctggatggagtctgagtttcgcgtgtattctagcgccaacaattgcacatttgagtacgtgagccagcccttcctgatggacctggagggcaagcagggcaatttcaagaacctgagggagttcgtgtttaagaatatcgatggctacttcaagatctacagcaagcacaccccaatcaacctggtgcgcgacctgccacagggattctccgccctggagccactggtggatctgcccatcggcatcaacatcacccggtttcagacactgctggccctgcacagatcctacctgacaccaggcgactcctctagcggatggaccgcaggagctgccgcctactatgtgggctatctgcagccccggaccttcctgctgaagtacaacgagaatggcaccatcacagacgcagtggattgcgccctggaccccctgtctgagacaaagtgtacactgaagagctttaccgtggagaagggcatctatcagacaagcaatttcagggtgcagcctaccgagtccatcgtgcgctttcccaatatcacaaacctgtgcccttttggcgaggtgttcaacgccaccagattcgccagcgtgtacgcctggaatcggaagagaatctccaactgcgtggccgactattctgtgctgtacaactccgcctctttcagcacctttaagtgctatggcgtgtctcccacaaagctgaatgatctgtgctttaccaacgtgtacgccgatagcttcgtgatcaggggagacgaagtgagacagatcgcaccaggacagacaggaaagatcgcagactacaattataagctgcctgacgatttcaccggctgcgtgatcgcctggaactccaacaatctggattctaaagtgggcggcaactacaattatctgtacaggctgtttcgcaagtccaatctgaagccattcgagcgggacatctccacagagatctaccaggccggctctaccccctgcaatggcgtggagggctttaactgttatttccctctgcagtcttacggcttccagccaacaaacggcgtgggctatcagccctacagagtggtggtgctgtcctttgagctgctgcacgcaccagcaacagtgtgcggcccaaagaagtctaccaatctggtgaagaacaagtgcgtgaacttcaacttcaacggactgaccggcacaggcgtgctgaccgagagcaataagaagttcctgccttttcagcagttcggcagggacatcgcagataccacagacgccgtgcgcgaccctcagaccctggagatcctggacatcacaccatgcagcttcggcggcgtgtccgtgatcacaccaggcaccaatacatccaaccaggtggccgtgctgtatcaggacgtgaattgtaccgaggtgcccgtggcaatccacgcagatcagctgacccctacatggcgggtgtactctaccggcagcaacgtgttccagacaagagccggatgcctgatcggagcagagcacgtgaacaatagctatgagtgcgacatccctatcggcgccggcatctgtgccagctaccagacccagacaaactccccatctggagcaggctccgtggccagccagtccatcatcgcctataccatgagcctgggcgccgagaacagcgtggcctactccaacaattctatcgccatccctaccaacttcacaatcagcgtgaccacagagatcatgccagtgtctatgaccaagacaagcgtggactgcacaatgtatatctgtggcgatagcaccgagtgctccaacctgctgctgcagtacggctccttttgtacccagctgaatagagccctgacaggcatcgccgtggagcaggataagaacacacaggaggtgttcgcccaggtgaagcagatctacaagaccccacccatcaaggactttggcggcttcaacttcagccagatcctgcctgatccaagcaagccctccaagaggtcttttatcgaggacctgctgttcaacaaggtgaccctggccgatgccggcttcatcaagcagtatggagattgcctgggagacatcgcagcccgcgacctgatctgtgcccagaagtttaatggcctgaccgtgctgcctccactgctgacagatgagatgatcgcccagtacacatctgccctgctggccggcaccatcacaagcggatggaccttcggcgcaggagccgccctgcagatcccttttgccatgcagatggcctataggttcaacggcatcggcgtgacccagaatgtgctgtacgagaaccagaagctgatcgccaatcagtttaacagcgccatcggcaagatccaggactctctgtcctctacagccagcgccctgggcaagctgcaggatgtggtgaatcagaacgcccaggccctgaataccctggtgaagcagctgagctccaacttcggcgccatctctagcgtgctgaatgacatcctgagccggctggacccccctgaggcagaggtgcagatcgacaggctgatcacaggccgcctgcagagcctgcagacctacgtgacacagcagctgatcagggcagcagagatcagagcctccgccaatctggccgccaccaagatgagcgagtgcgtgctgggacagtccaagagggtggacttttgtggcaagggctatcacctgatgtctttcccacagagcgcccctcacggcgtggtgtttctgcacgtgacctacgtgccagcccaggagaagaacttcaccacagcaccagccatctgccacgatggaaaggcacactttcctagggagggcgtgttcgtgtctaacggcacccactggtttgtgacacagcgcaatttctacgagccacagatcatcaccacagacaatacattcgtgagcggcaactgtgatgtggtgatcggcatcgtgaacaataccgtgtatgatccactgcagcccgagctggactcctttaaggaggagctggataagtacttcaagaatcacacctctcccgacgtggatctgggcgacatctccggcatcaatgcctctgtggtgaacatccagaaggagatcgaccggctgaacgaggtggccaagaatctgaacgagagcctgatcgatctgcaggagctgggcaagtatgagcagtacatcaagggctctggcagagagaacctgtatttccagggaggaggaggcagcggatacatccctgaggcaccaagggacggacaggcctacgtgcgcaaggatggcgagtgggtgctgctgtccacctttctgggccatcatcaccaccaccaccaccactga

SEQ ID NO: 1598 - DNA, 3846 bp, Artificial Sequence
  Description of Artificial Sequence: Synthetic polynucleotide
atgggcatcctgccaagcccaggaatgcccgccctgctgtctctggtgagcctgctgtccgtgctgctgatgggatgcgtggcagagacaggcacacagtgcgtgaacctgaccacaaggacccagctgccccctgcctataccaattctttcacacggggcgtgtactatcccgacaaggtgtttagaagctccgtgctgcactccacacaggatctgtttctgcctttcttttctaacgtgacctggttccacgccatccacgtgtccggcaccaatggcacaaagcggttcgacaatcccgtgctgccttttaacgatggcgtgtacttcgccagcaccgagaagtccaacatcatcagaggctggatctttggcaccacactggactctaagacacagagcctgctgatcgtgaacaatgccaccaacgtggtgatcaaggtgtgcgagttccagttttgtaatgatccattcctgggcgtgtactatcacaagaacaataagtcctggatggagtctgagtttcgcgtgtattctagcgccaacaattgcacatttgagtacgtgagccagcccttcctgatggacctggagggcaagcagggcaatttcaagaacctgagggagttcgtgtttaagaatatcgatggctacttcaagatctacagcaagcacaccccaatcaacctggtgcgcgacctgccacagggattctccgccctggagccactggtggatctgcccatcggcatcaacatcacccggtttcagacactgctggccctgcacagatcctacctgacaccaggcgactcctctagcggatggaccgcaggagctgccgcctactatgtgggctatctgcagccccggaccttcctgctgaagtacaacgagaatggcaccatcacagacgcagtggattgcgccctggaccccctgtctgagacaaagtgtacactgaagagctttaccgtggagaagggcatctatcagacaagcaatttcagggtgcagcctaccgagtccatcgtgcgctttcccaatatcacaaacctgtgcccttttggcgaggtgttcaacgccaccagattcgccagcgtgtacgcctggaatcggaagagaatctccaactgcgtggccgactattctgtgctgtacaactccgcctctttcagcacctttaagtgctatggcgtgtctcccacaaagctgaatgatctgtgctttaccaacgtgtacgccgatagcttcgtgatcaggggagacgaagtgagacagatcgcaccaggacagacaggaaagatcgcagactacaattataagctgcctgacgatttcaccggctgcgtgatcgcctggaactccaacaatctggattctaaagtgggcggcaactacaattatctgtacaggctgtttcgcaagtccaatctgaagccattcgagcgggacatctccacagagatctaccaggccggctctaccccctgcaatggcgtggagggctttaactgttatttccctctgcagtcttacggcttccagccaacaaacggcgtgggctatcagccctacagagtggtggtgctgtcctttgagctgctgcacgcaccagcaacagtgtgcggcccaaagaagtctaccaatctggtgaagaacaagtgcgtgaacttcaacttcaacggactgaccggcacaggcgtgctgaccgagagcaataagaagttcctgccttttcagcagttcggcagggacatcgcagataccacagacgccgtgcgcgaccctcagaccctggagatcctggacatcacaccatgcagcttcggcggcgtgtccgtgatcacaccaggcaccaatacatccaaccaggtggccgtgctgtatcaggacgtgaattgtaccgaggtgcccgtggcaatccacgcagatcagctgacccctacatggcgggtgtactctaccggcagcaacgtgttccagacaagagccggatgcctgatcggagcagagcacgtgaacaatagctatgagtgcgacatccctatcggcgccggcatctgtgccagctaccagacccagacaaactccccatctggagcaggctccgtggccagccagtccatcatcgcctataccatgagcctgggcgccgagaacagcgtggcctactccaacaattctatcgccatccctaccaacttcacaatcagcgtgaccacagagatcctgccagtgtctatgaccaagacaagcgtggactgcacaatgtatatctgtggcgatagcaccgagtgctccaacctgctgctgcagtacggctccttttgtacccagctgaatagagccctgacaggcatcgccgtggagcaggataagaacacacaggaggtgttcgcccaggtgaagcagatctacaagaccccacccatcaaggactttggcggcttcaacttcagccagatcctgcctgatccaagcaagccctccaagaggtcttttatcgaggacctgctgttcaacaaggtgaccctggccgatgccggcttcatcaagcagtatggagattgcctgggagacatcgcagcccgcgacctgatctgtgcccagaagtttaatggcctgaccgtgctgcctccactgctgacagatgagatgatcgcccagtacacatctgccctgctggccggcaccatcacaagcggatggaccttcggcgcaggagccgccctgcagatcccttttgccatgcagatggcctataggttcaacggcatcggcgtgacccagaatgtgctgtacgagaaccagaagctgatcgccaatcagtttaacgctgccatcggcaagatccaggactctctgtcctctacagccagcgccctgggcaagctgcaggatgtggtgaatcagaacgcccaggccctgaataccctggtgaagcagctgagctccaacttcggcgccatctctagcgtgctgaatgacatcctgagccggctggacccccctgaggcagaggtgcagatcgacaggctgatcacaggccgcctgcagagcctgcagacctacgtgacacagcagctgatcagggcagcagagatcagagcctccgccaatctggccgccaccaagatgagcgagtgcgtgctgggacagtccaagagggtggacttttgtggcaagggctatcacctgatgtctttcccacagagcgcccctcacggcgtggtgtttctgcacgtgacctacgtgccagcccaggagaagaacttcaccacagcaccagccatctgccacgatggaaaggcacactttcctagggagggcgtgttcgtgtctaacggcacccactggtttgtgacacagcgcaatttctacgagccacagatcatcaccacagacaatacattcgtgagcggcaactgtgatgtggtgatcggcatcgtgaacaataccgtgtatgatccactgcagcccgagctggactcctttaaggaggagctggataagtacttcaagaatcacacctctcccgacgtggatctgggcgacatctccggcatcaatgcctctgtggtgaacatccagaaggagatcgaccggctgaacgaggtggccaagaatctgaacgagagcctgatcgatctgcaggagctgggcaagtatgagcagtacatcaagggctctggcagagagaacctgtatttccagggaggaggaggcagcggatacatccctgaggcaccaagggacggacaggcctacgtgcgcaaggatggcgagtgggtgctgctgtccacctttctgggccatcatcaccaccaccaccaccactga

SEQ ID NO: 1599 - DNA, 3846 bp, Artificial Sequence
  Description of Artificial Sequence: Synthetic polynucleotide
atgggcatcctgccaagcccaggaatgcccgccctgctgtctctggtgagcctgctgtccgtgctgctgatgggatgcgtggcagagacaggcacacagtgcgtgaacctgaccacaaggacccagctgccccctgcctataccaattctttcacacggggcgtgtactatcccgacaaggtgtttagaagctccgtgctgcactccacacaggatctgtttctgcctttcttttctaacgtgacctggttccacgccatccacgtgtccggcaccaatggcacaaagcggttcgacaatcccgtgctgccttttaacgatggcgtgtacttcgccagcaccgagaagtccaacatcatcagaggctggatctttggcaccacactggactctaagacacagagcctgctgatcgtgaacaatgccaccaacgtggtgatcaaggtgtgcgagttccagttttgtaatgatccattcctgggcgtgtactatcacaagaacaataagtcctggatggagtctgagtttcgcgtgtattctagcgccaacaattgcacatttgagtacgtgagccagcccttcctgatggacctggagggcaagcagggcaatttcaagaacctgagggagttcgtgtttaagaatatcgatggctacttcaagatctacagcaagcacaccccaatcaacctggtgcgcgacctgccacagggattctccgccctggagccactggtggatctgcccatcggcatcaacatcacccggtttcagacactgctggccctgcacagatcctacctgacaccaggcgactcctctagcggatggaccgcaggagctgccgcctactatgtgggctatctgcagccccggaccttcctgctgaagtacaacgagaatggcaccatcacagacgcagtggattgcgccctggaccccctgtctgagacaaagtgtacactgaagagctttaccgtggagaagggcatctatcagacaagcaatttcagggtgcagcctaccgagtccatcgtgcgctttcccaatatcacaaacctgtgcccttttggcgaggtgttcaacgccaccagattcgccagcgtgtacgcctggaatcggaagagaatctccaactgcgtggccgactattctgtgctgtacaactccgcctctttcagcacctttaagtgctatggcgtgtctcccacaaagctgaatgatctgtgctttaccaacgtgtacgccgatagcttcgtgatcaggggagacgaagtgagacagatcgcaccaggacagacaggaaagatcgcagactacaattataagctgcctgacgatttcaccggctgcgtgatcgcctggaactccaacaatctggattctaaagtgggcggcaactacaattatctgtacaggctgtttcgcaagtccaatctgaagccattcgagcgggacatctccacagagatctaccaggccggctctaccccctgcaatggcgtggagggctttaactgttatttccctctgcagtcttacggcttccagccaacaaacggcgtgggctatcagccctacagagtggtggtgctgtcctttgagctgctgcacgcaccagcaacagtgtgcggcccaaagaagtctaccaatctggtgaagaacaagtgcgtgaacttcaacttcaacggactgaccggcacaggcgtgctgaccgagagcaataagaagttcctgccttttcagcagttcggcagggacatcgcagataccacagacgccgtgcgcgaccctcagaccctggagatcctggacatcacaccatgcagcttcggcggcgtgtccgtgatcacaccaggcaccaatacatccaaccaggtggccgtgctgtatcaggacgtgaattgtaccgaggtgcccgtggcaatccacgcagatcagctgacccctacatggcgggtgtactctaccggcagcaacgtgttccagacaagagccggatgcctgatcggagcagagcacgtgaacaatagctatgagtgcgacatccctatcggcgccggcatctgtgccagctaccagacccagacaaactccccatctggagcaggctccgtggccagccagtccatcatcgcctataccatgagcctgggcgccgagaacagcgtggcctactccaacaattctatcgccatccctaccaacttcacaatcagcgtgaccacagagatcctgccagtgtctatgaccaagacaagcgtggactgcacaatgtatatctgtggcgatagcaccgagtgctccaacctgctgctgcagtacggctccttttgtacccagctgaatagagccctgacaggcatcgccgtggagcaggataagaacacacaggaggtgttcgcccaggtgaagcagatctacaagaccccacccatcaaggactttggcggcttcaacttcagccagatcctgcctgatccaagcaagccctccaagaggtcttttatcgaggacctgctgttcaacaaggaaaccctggccgatgccggcttcatcaagcagtatggagattgcctgggagacatcgcagcccgcgacctgatctgtgcccagaagtttaatggcctgaccgtgctgcctccactgctgacagatgagatgatcgcccagtacacatctgccctgctggccggcaccatcacaagcggatggaccttcggcgcaggagccgccctgcagatcccttttgccatgcagatggcctataggttcaacggcatcggcgtgacccagaatgtgctgtacgagaaccagaagctgatcgccaatcagtttaacagcgccatcggcaagatccaggactctctgtcctctacagccagcgccctgggcaagctgcaggatgtggtgaatcagaacgcccaggccctgaataccctggtgaagcagctgagctccaacttcggcgccatctctagcgtgctgaatgacatcctgagccggctggacccccctgaggcagaggtgcagatcgacaggctgatcacaggccgcctgcagagcctgcagacctacgtgacacagcagctgatcagggcagcagagatcagagcctccgccaatctggccgccaccaagatgagcgagtgcgtgctgggacagtccaagagggtggacttttgtggcaagggctatcacctgatgtctttcccacagagcgcccctcacggcgtggtgtttctgcacgtgacctacgtgccagcccaggagaagaacttcaccacagcaccagccatctgccacgatggaaaggcacactttcctagggagggcgtgttcgtgtctaacggcacccactggtttgtgacacagcgcaatttctacgagccacagatcatcaccacagacaatacattcgtgagcggcaactgtgatgtggtgatcggcatcgtgaacaataccgtgtatgatccactgcagcccgagctggactcctttaaggaggagctggataagtacttcaagaatcacacctctcccgacgtggatctgggcgacatctccggcatcaatgcctctgtggtgaacatccagaaggagatcgaccggctgaacgaggtggccaagaatctgaacgagagcctgatcgatctgcaggagctgggcaagtatgagcagtacatcaagggctctggcagagagaacctgtatttccagggaggaggaggcagcggatacatccctgaggcaccaagggacggacaggcctacgtgcgcaaggatggcgagtgggtgctgctgtccacctttctgggccatcatcaccaccaccaccaccactga

SEQ ID NO: 1600 - DNA, 3846 bp, Artificial Sequence
  Description of Artificial Sequence: Synthetic polynucleotide
atgggcatcctgccaagcccaggaatgcccgccctgctgtctctggtgagcctgctgtccgtgctgctgatgggatgcgtggcagagacaggcacacagtgcgtgaacctgaccacaaggacccagctgccccctgcctataccaattctttcacacggggcgtgtactatcccgacaaggtgtttagaagctccgtgctgcactccacacaggatctgtttctgcctttcttttctaacgtgacctggttccacgccatccacgtgtccggcaccaatggcacaaagcggttcgacaatcccgtgctgccttttaacgatggcgtgtacttcgccagcaccgagaagtccaacatcatcagaggctggatctttggcaccacactggactctaagacacagagcctgctgatcgtgaacaatgccaccaacgtggtgatcaaggtgtgcgagttccagttttgtaatgatccattcctgggcgtgtactatcacaagaacaataagtcctggatggagtctgagtttcgcgtgtattctagcgccaacaattgcacatttgagtacgtgagccagcccttcctgatggacctggagggcaagcagggcaatttcaagaacctgagggagttcgtgtttaagaatatcgatggctacttcaagatctacagcaagcacaccccaatcaacctggtgcgcgacctgccacagggattctccgccctggagccactggtggatctgcccatcggcatcaacatcacccggtttcagacactgctggccctgcacagatcctacctgacaccaggcgactcctctagcggatggaccgcaggagctgccgcctactatgtgggctatctgcagccccggaccttcctgctgaagtacaacgagaatggcaccatcacagacgcagtggattgcgccctggaccccctgtctgagacaaagtgtacactgaagagctttaccgtggagaagggcatctatcagacaagcaatttcagggtgcagcctaccgagtccatcgtgcgctttcccaatatcacaaacctgtgcccttttggcgaggtgttcaacgccaccagattcgccagcgtgtacgcctggaatcggaagagaatctccaactgcgtggccgactattctgtgctgtacaactccgcctctttcagcacctttaagtgctatggcgtgtctcccacaaagctgaatgatctgtgctttaccaacgtgtacgccgatagcttcgtgatcaggggagacgaagtgagacagatcgcaccaggacagacaggaaagatcgcagactacaattataagctgcctgacgatttcaccggctgcgtgatcgcctggaactccaacaatctggattctaaagtgggcggcaactacaattatctgtacaggctgtttcgcaagtccaatctgaagccattcgagcgggacatctccacagagatctaccaggccggctctaccccctgcaatggcgtggagggctttaactgttatttccctctgcagtcttacggcttccagccaacaaacggcgtgggctatcagccctacagagtggtggtgctgtcctttgagctgctgcacgcaccagcaacagtgtgcggcccaaagaagtctaccaatctggtgaagaacaagtgcgtgaacttcaacttcaacggactgaccggcacaggcgtgctgaccgagagcaataagaagttcctgccttttcagcagttcggcagggacatcgcagataccacagacgccgtgcgcgaccctcagaccctggagatcctggacatcacaccatgcagcttcggcggcgtgtccgtgatcacaccaggcaccaatacatccaaccaggtggccgtgctgtatcaggacgtgaattgtaccgaggtgcccgcggcaatccacgcagatcagctgacccctacatggcgggtgtactctaccggcagcaacgtgttccagacaagagccggatgcctgatcggagcagagcacgtgaacaatagctatgagtgcgacatccctatcggcgccggcatctgtgccagctaccagacccagacaaactccccatctggagcaggctccgtggccagccagtccatcatcgcctataccatgagcctgggcgccgagaacagcgtggcctactccaacaattctatcgccatccctaccaacttcacaatcagcgtgaccacagagatcctgccagtgtctatgaccaagacaagcgtggactgcacaatgtatatctgtggcgatagcaccgagtgctccaacctgctgctgcagtacggctccttttgtacccagctgaatagagccctgacaggcatcgccgtggagcaggataagaacacacaggaggtgttcgcccaggtgaagcagatctacaagaccccacccatcaaggactttggcggcttcaacttcagccagatcctgcctgatccaagcaagccctccaagaggtcttttatcgaggacctgctgttcaacaaggtgaccctggccgatgccggcttcatcaagcagtatggagattgcctgggagacatcgcagcccgcgacctgatctgtgcccagaagtttaatggcctgaccgtgctgcctccactgctgacagatgagatgatcgcccagtacacatctgccctgctggccggcaccatcacaagcggatggaccttcggcgcaggagccgccctgcagatcccttttgccatgcagatggcctataggttcaacggcatcggcgtgacccagaatgtgctgtacgagaaccagaagctgatcgccaatcagtttaacagcgccatcggcaagatccaggactctctgtcctctacagccagcgccctgggcaagctgcaggatgtggtgaatcagaacgcccaggccctgaataccctggtgaagcagctgagctccaacttcggcgccatctctagcgtgctgaatgacatcctgagccggctggacccccctgaggcagaggtgcagatcgacaggctgatcacaggccgcctgcagagcctgcagacctacgtgacacagcagctgatcagggcagcagagatcagagcctccgccaatctggccgccaccaagatgagcgagtgcgtgctgggacagtccaagagggtggacttttgtggcaagggctatcacctgatgtctttcccacagagcgcccctcacggcgtggtgtttctgcacgtgacctacgtgccagcccaggagaagaacttcaccacagcaccagccatctgccacgatggaaaggcacactttcctagggagggcgtgttcgtgtctaacggcacccactggtttgtgacacagcgcaatttctacgagccacagatcatcaccacagacaatacattcgtgagcggcaactgtgatgtggtgatcggcatcgtgaacaataccgtgtatgatccactgcagcccgagctggactcctttaaggaggagctggataagtacttcaagaatcacacctctcccgacgtggatctgggcgacatctccggcatcaatgcctctgtggtgaacatccagaaggagatcgaccggctgaacgaggtggccaagaatctgaacgagagcctgatcgatctgcaggagctgggcaagtatgagcagtacatcaagggctctggcagagagaacctgtatttccagggaggaggaggcagcggatacatccctgaggcaccaagggacggacaggcctacgtgcgcaaggatggcgagtgggtgctgctgtccacctttctgggccatcatcaccaccaccaccaccactga

SEQ ID NO: 1601 - DNA, 3846 bp, Artificial Sequence
  Description of Artificial Sequence: Synthetic polynucleotide
atgggcatcctgccaagcccaggaatgcccgccctgctgtctctggtgagcctgctgtccgtgctgctgatgggatgcgtggcagagacaggcacacagtgcgtgaacctgaccacaaggacccagctgccccctgcctataccaattctttcacacggggcgtgtactatcccgacaaggtgtttagaagctccgtgctgcactccacacaggatctgtttctgcctttcttttctaacgtgacctggttccacgccatccacgtgtccggcaccaatggcacaaagcggttcgacaatcccgtgctgccttttaacgatggcgtgtacttcgccagcaccgagaagtccaacatcatcagaggctggatctttggcaccacactggactctaagacacagagcctgctgatcgtgaacaatgccaccaacgtggtgatcaaggtgtgcgagttccagttttgtaatgatccattcctgggcgtgtactatcacaagaacaataagtcctggatggagtctgagtttcgcgtgtattctagcgccaacaattgcacatttgagtacgtgagccagcccttcctgatggacctggagggcaagcagggcaatttcaagaacctgagggagttcgtgtttaagaatatcgatggctacttcaagatctacagcaagcacaccccaatcaacctggtgcgcgacctgccacagggattctccgccctggagccactggtggatctgcccatcggcatcaacatcacccggtttcagacactgctggccctgcacagatcctacctgacaccaggcgactcctctagcggatggaccgcaggagctgccgcctactatgtgggctatctgcagccccggaccttcctgctgaagtacaacgagaatggcaccatcacagacgcagtggattgcgccctggaccccctgtctgagacaaagtgtacactgaagagctttaccgtggagaagggcatctatcagacaagcaatttcagggtgcagcctaccgagtccatcgtgcgctttcccaatatcacaaacctgtgcccttttggcgaggtgttcaacgccaccagattcgccagcgtgtacgcctggaatcggaagagaatctccaactgcgtggccgactattctgtgctgtacaactccgcctctttcagcacctttaagtgctatggcgtgtctcccacaaagctgaatgatctgtgctttaccaacgtgtacgccgatagcttcgtgatcaggggagacgaagtgagacagatcgcaccaggacagacaggaaagatcgcagactacaattataagctgcctgacgatttcaccggctgcgtgatcgcctggaactccaacaatctggattctaaagtgggcggcaactacaattatctgtacaggctgtttcgcaagtccaatctgaagccattcgagcgggacatctccacagagatctaccaggccggctctaccccctgcaatggcgtggagggctttaactgttatttccctctgcagtcttacggcttccagccaacaaacggcgtgggctatcagccctacagagtggtggtgctgtcctttgagctgctgcacgcaccagcaacagtgtgcggcccaaaggactctaccaatctggtgaagaacaagtgcgtgaacttcaacttcaacggactgaccggcacaggcgtgctgaccgagagcaataagaagttcctgccttttcagcagttcggcagggacatcgcagataccacagacgccgtgcgcgaccctcagaccctggagatcctggacatcacaccatgcagcttcggcggcgtgtccgtgatcacaccaggcaccaatacatccaaccaggtggccgtgctgtatcaggacgtgaattgtaccgaggtgcccgtggcaatccacgcagatcagctgacccctacatggcgggtgtactctaccggcagcaacgtgttccagacaagagccggatgcctgatcggagcagagcacgtgaacaatagctatgagtgcgacatccctatcggcgccggcatctgtgccagctaccagacccagacaaactccccatctggagcaggctccgtggccagccagtccatcatcgcctataccatgagcctgggcgccgagaacagcgtggcctactccaacaattctatcgccatccctaccaacttcacaatcagcgtgaccacagagatcctgccagtgtctatgaccaagacaagcgtggactgcacaatgtatatctgtggcgatagcaccgagtgctccaacctgctgctgcagtacggctccttttgtacccagctgaatagagccctgacaggcatcgccgtggagcaggataagaacacacaggaggtgttcgcccaggtgaagcagatctacaagaccccacccatcaaggactttggcggcttcaacttcagccagatcctgcctgatccaagcaagccctccaagaggtcttttatcgaggacctgctgttcaacaaggtgaccctggccgatgccggcttcatcaagcagtatggagattgcctgggagacatcgcagcccgcgacctgatctgtgcccagaagtttaatggcctgaccgtgctgcctccactgctgacagatgagatgatcgcccagtacacatctgccctgctggccggcaccatcacaagcggatggaccttcggcgcaggagccgccctgcagatcccttttgccatgcagatggcctataggttcaacggcatcggcgtgacccagaatgtgctgtacgagaaccagaagctgatcgccaatcagtttaacagcgccatcggcaagatccaggactctctgtcctctacagccagcgccctgggcaagctgcaggatgtggtgaatcagaacgcccaggccctgaataccctggtgaagcagctgagctccaacttcggcgccatctctagcgtgctgaatgacatcctgagccggctggacccccctgaggcagaggtgcagatcgacaggctgatcacaggccgcctgcagagcctgcagacctacgtgacacagcagctgatcagggcagcagagatcagagcctccgccaatctggccgccaccaagatgagcgagtgcgtgctgggacagtccaagagggtggacttttgtggcaagggctatcacctgatgtctttcccacagagcgcccctcacggcgtggtgtttctgcacgtgacctacgtgccagcccaggagaagaacttcaccacagcaccagccatctgccacgatggaaaggcacactttcctagggagggcgtgttcgtgtctaacggcacccactggtttgtgacacagcgcaatttctacgagccacagatcatcaccacagacaatacattcgtgagcggcaactgtgatgtggtgatcggcatcgtgaacaataccgtgtatgatccactgcagcccgagctggactcctttaaggaggagctggataagtacttcaagaatcacacctctcccgacgtggatctgggcgacatctccggcatcaatgcctctgtggtgaacatccagaaggagatcgaccggctgaacgaggtggccaagaatctgaacgagagcctgatcgatctgcaggagctgggcaagtatgagcagtacatcaagggctctggcagagagaacctgtatttccagggaggaggaggcagcggatacatccctgaggcaccaagggacggacaggcctacgtgcgcaaggatggcgagtgggtgctgctgtccacctttctgggccatcatcaccaccaccaccaccactga

SEQ ID NO: 1602 - DNA, 3846 bp, Artificial Sequence
  Description of Artificial Sequence: Synthetic polynucleotide
atgggcatcctgccaagcccaggaatgcccgccctgctgtctctggtgagcctgctgtccgtgctgctgatgggatgcgtggcagagacaggcacacagtgcgtgaacctgaccacaaggacccagctgccccctgcctataccaattctttcacacggggcgtgtactatcccgacaaggtgtttagaagctccgtgctgcactccacacaggatctgtttctgcctttcttttctaacgtgacctggttccacgccatccacgtgtccggcaccaatggcacaaagcggttcgacaatcccgtgctgccttttaacgatggcgtgtacttcgccagcaccgagaagtccaacatcatcagaggctggatctttggcaccacactggactctaagacacagagcctgctgatcgtgaacaatgccaccaacgtggtgatcaaggtgtgcgagttccagttttgtaatgatccattcctgggcgtgtactatcacaagaacaataagtcctggatggagtctgagtttcgcgtgtattctagcgccaacaattgcacatttgagtacgtgagccagcccttcctgatggacctggagggcaagcagggcaatttcaagaacctgagggagttcgtgtttaagaatatcgatggctacttcaagatctacagcaagcacaccccaatcaacctggtgcgcgacctgccacagggattctccgccctggagccactggtggatctgcccatcggcatcaacatcacccggtttcagacactgctggccctgcacagatcctacctgacaccaggcgactcctctagcggatggaccgcaggagctgccgcctactatgtgggctatctgcagccccggaccttcctgctgaagtacaacgagaatggcaccatcacagacgcagtggattgcgccctggaccccctgtctgagacaaagtgtacactgaagagctttaccgtggagaagggcatctatcagacaagcaatttcagggtgcagcctaccgagtccatcgtgcgctttcccaatatcacaaacctgtgcccttttggcgaggtgttcaacgccaccagattcgccagcgtgtacgcctggaatcggaagagaatctccaactgcgtggccgactattctgtgctgtacaactccgcctctttcagcacctttaagtgctatggcgtgtctcccacaaagctgaatgatctgtgctttaccaacgtgtacgccgatagcttcgtgatcaggggagacgaagtgagacagatcgcaccaggacagacaggaaagatcgcagactacaattataagctgcctgacgatttcaccggctgcgtgatcgcctggaactccaacaatctggattctaaagtgggcggcaactacaattatctgtacaggctgtttcgcaagtccaatctgaagccattcgagcgggacatctccacagagatctaccaggccggctctaccccctgcaatggcgtggagggctttaactgttatttccctctgcagtcttacggcttccagccaacaaacggcgtgggctatcagccctacagagtggtggtgctgtcctttgagctgctgcacgcaccagcaacagtgtgcggcccaaagaagtctaccaatctggtgaagaacaagtgcgtgaacttcaacttcaacggactgaccggcacaggcgtgctgaccgagagcaataagaagttcctgccttttcagcagttcggcagggacatcgcagataccacagacgccgtgcgcgaccctcagaccctggagatcctggacatcacaccatgcagcttcggcggcgtgtccgtgatcacaccaggcaccaatacatccaaccaggtggccgtgctgtatcaggacgtgaattgtaccgaggtgcccgtggcaatccacgcagatcagctgacccctacatggcgggtgtactctaccggcagcaacgtgttccagacaagagccggatgcctgatcggagcagagcacgtgaacaatagctatgagtgcgacatccctatcggcgccggcatctgtgccagctaccagacccagacaaactccccatctggagcaggctccgtggccagccagtccatcatcgcctataccatgagcctgggcgccgagaacagcgtggcctactccaacaattctatcgccatccctaccaacttcacaatcagcgtgaccacagagatcctgccagtgtctatgaccaagacaagcgtggactgcacaatgtatatctgtggcgatagcaccgagtgctccaacctgctgctgcagtacggctccttttgtacccagctgaatagagccctgacaggcatcgccgtggagcaggataagaacacacaggaggtgttcgcccaggtgaagcagatctacaagaccccacccatcaaggactttggcggcttcaacttcagccagatcctgcctgatccaagcaagccctccaagaggtcttttatcgaggacctgctgttcaacaaggtgaccctggccgatgccggcttcatcaagcagtatggagattgcctgggagacatcgcagcccgcgacctgatctgtgcccagaagtttaatggcctgaccgtgctgcctccactgctgacagatgagatgatcgcccagtacacatctgccctgctggccggcaccatcacaagcggatggaccttcggcgcaggagccgccctgcagatcccttttgccatgcagatggcctataggttcaacggcatcggcgtgacccagaatgtgctgtacgagaaccagaagctgatcgccaatcagtttaacagcgccatcggccatatccaggactctctgtcctctacagccagcgccctgggcaagctgcaggatgtggtgaatcagaacgcccaggccctgaataccctggtgaagcagctgagctccaacttcggcgccatctctagcgtgctgaatgacatcctgagccggctggacccccctgaggcagaggtgcagatcgacaggctgatcacaggccgcctgcagagcctgcagacctacgtgacacagcagctgatcagggcagcagagatcagagcctccgccaatctggccgccaccaagatgagcgagtgcgtgctgggacagtccaagagggtggacttttgtggcaagggctatcacctgatgtctttcccacagagcgcccctcacggcgtggtgtttctgcacgtgacctacgtgccagcccaggagaagaacttcaccacagcaccagccatctgccacgatggaaaggcacactttcctagggagggcgtgttcgtgtctaacggcacccactggtttgtgacacagcgcaatttctacgagccacagatcatcaccacagacaatacattcgtgagcggcaactgtgatgtggtgatcggcatcgtgaacaataccgtgtatgatccactgcagcccgagctggactcctttaaggaggagctggataagtacttcaagaatcacacctctcccgacgtggatctgggcgacatctccggcatcaatgcctctgtggtgaacatccagaaggagatcgaccggctgaacgaggtggccaagaatctgaacgagagcctgatcgatctgcaggagctgggcaagtatgagcagtacatcaagggctctggcagagagaacctgtatttccagggaggaggaggcagcggatacatccctgaggcaccaagggacggacaggcctacgtgcgcaaggatggcgagtgggtgctgctgtccacctttctgggccatcatcaccaccaccaccaccactga

SEQ ID NO: 1603 - DNA, 3846 bp, Artificial Sequence
  Description of Artificial Sequence: Synthetic polynucleotide
atgggcatcctgccaagcccaggaatgcccgccctgctgtctctggtgagcctgctgtccgtgctgctgatgggatgcgtggcagagacaggcacacagtgcgtgaacctgaccacaaggacccagctgccccctgcctataccaattctttcacacggggcgtgtactatcccgacaaggtgtttagaagctccgtgctgcactccacacaggatctgtttctgcctttcttttctaacgtgacctggttccacgccatccacgtgtccggcaccaatggcacaaagcggttcgacaatcccgtgctgccttttaacgatggcgtgtacttcgccagcaccgagaagtccaacatcatcagaggctggatctttggcaccacactggactctaagacacagagcctgctgatcgtgaacaatgccaccaacgtggtgatcaaggtgtgcgagttccagttttgtaatgatccattcctgggcgtgtactatcacaagaacaataagtcctggatggagtctgagtttcgcgtgtattctagcgccaacaattgcacatttgagtacgtgagccagcccttcctgatggacctggagggcaagcagggcaatttcaagaacctgagggagttcgtgtttaagaatatcgatggctacttcaagatctacagcaagcacaccccaatcaacctggtgcgcgacctgccacagggattctccgccctggagccactggtggatctgcccatcggcatcaacatcacccggtttcagacactgctggccctgcacagatcctacctgacaccaggcgactcctctagcggatggaccgcaggagctgccgcctactatgtgggctatctgcagccccggaccttcctgctgaagtacaacgagaatggcaccatcacagacgcagtggattgcgccctggaccccctgtctgagacaaagtgtacactgaagagctttaccgtggagaagggcatctatcagacaagcaatttcagggtgcagcctaccgagtccatcgtgcgctttcccaatatcacaaacctgtgcccttttggcgaggtgttcaacgccaccagattcgccagcgtgtacgcctggaatcggaagagaatctccaactgcgtggccgactattctgtgctgtacaactccgcctctttcagcacctttaagtgctatggcgtgtctcccacaaagctgaatgatctgtgctttaccaacgtgtacgccgatagcttcgtgatcaggggagacgaagtgagacagatcgcaccaggacagacaggaaagatcgcagactacaattataagctgcctgacgatttcaccggctgcgtgatcgcctggaactccaacaatctggattctaaagtgggcggcaactacaattatctgtacaggctgtttcgcaagtccaatctgaagccattcgagcgggacatctccacagagatctaccaggccggctctaccccctgcaatggcgtggagggctttaactgttatttccctctgcagtcttacggcttccagccaacaaacggcgtgggctatcagccctacagagtggtggtgctgtcctttgagctgctgcacgcaccagcaacagtgtgcggcccaaagaagtctaccaatctggtgaagaacaagtgcgtgaacttcaacttcaacggactgaccggcacaggcgtgctgaccgagagcaataagaagttcctgccttttcagcagttcggcagggacatcgcagataatacagacgccgtgcgcgaccctcagaccctggagatcctggacatcacaccatgcagcttcggcggcgtgtccgtgatcacaccaggcaccaatacatccaaccaggtggccgtgctgtatcaggacgtgaattgtaccgaggtgcccgtggcaatccacgcagatcagctgacccctacatggcgggtgtactctaccggcagcaacgtgttccagacaagagccggatgcctgatcggagcagagcacgtgaacaatagctatgagtgcgacatccctatcggcgccggcatctgtgccagctaccagacccagacaaactccccatctggagcaggctccgtggccagccagtccatcatcgcctataccatgagcctgggcgccgagaacagcgtggcctactccaacaattctatcgccatccctaccaacttcacaatcagcgtgaccacagagatcctgccagtgtctatgaccaagacaagcgtggactgcacaatgtatatctgtggcgatagcaccgagtgctccaacctgctgctgcagtacggctccttttgtacccagctgaatagagccctgacaggcatcgccgtggagcaggataagaacacacaggaggtgttcgcccaggtgaagcagatctacaagaccccacccatcaaggactttggcggcttcaacttcagccagatcctgcctgatccaagcaagccctccaagaggtcttttatcgaggacctgctgttcaacaaggtgaccctggccgatgccggcttcatcaagcagtatggagattgcctgggagacatcgcagcccgcgacctgatctgtgcccagaagtttaatggcctgaccgtgctgcctccactgctgacagatgagatgatcgcccagtacacatctgccctgctggccggcaccatcacaagcggatggaccttcggcgcaggagccgccctgcagatcccttttgccatgcagatggcctataggttcaacggcatcggcgtgacccagaatgtgctgtacgagaaccagaagctgatcgccaatcagtttaacagcgccatcggcaagatccaggactctctgtcctctacagccagcgccctgggcaagctgcaggatgtggtgaatcagaacgcccaggccctgaataccctggtgaagcagctgagctccaacttcggcgccatctctagcgtgctgaatgacatcctgagccggctggacccccctgaggcagaggtgcagatcgacaggctgatcacaggccgcctgcagagcctgcagacctacgtgacacagcagctgatcagggcagcagagatcagagcctccgccaatctggccgccaccaagatgagcgagtgcgtgctgggacagtccaagagggtggacttttgtggcaagggctatcacctgatgtctttcccacagagcgcccctcacggcgtggtgtttctgcacgtgacctacgtgccagcccaggagaagaacttcaccacagcaccagccatctgccacgatggaaaggcacactttcctagggagggcgtgttcgtgtctaacggcacccactggtttgtgacacagcgcaatttctacgagccacagatcatcaccacagacaatacattcgtgagcggcaactgtgatgtggtgatcggcatcgtgaacaataccgtgtatgatccactgcagcccgagctggactcctttaaggaggagctggataagtacttcaagaatcacacctctcccgacgtggatctgggcgacatctccggcatcaatgcctctgtggtgaacatccagaaggagatcgaccggctgaacgaggtggccaagaatctgaacgagagcctgatcgatctgcaggagctgggcaagtatgagcagtacatcaagggctctggcagagagaacctgtatttccagggaggaggaggcagcggatacatccctgaggcaccaagggacggacaggcctacgtgcgcaaggatggcgagtgggtgctgctgtccacctttctgggccatcatcaccaccaccaccaccactga

SEQ ID NO: 1604 - DNA, 3846 bp, Artificial Sequence
  Description of Artificial Sequence: Synthetic polynucleotide
atgggcatcctgccaagcccaggaatgcccgccctgctgtctctggtgagcctgctgtccgtgctgctgatgggatgcgtggcagagacaggcacacagtgcgtgaacctgaccacaaggacccagctgccccctgcctataccaattctttcacacggggcgtgtactatcccgacaaggtgtttagaagctccgtgctgcactccacacaggatctgtttctgcctttcttttctaacgtgacctggttccacgccatccacgtgtccggcaccaatggcacaaagcggttcgacaatcccgtgctgccttttaacgatggcgtgtacttcgccagcaccgagaagtccaacatcatcagaggctggatctttggcaccacactggactctaagtcacagagcctgctgatcgtgaacaatgccaccaacgtggtgatcaaggtgtgcgagttccagttttgtaatgatccattcctgggcgtgtactatcacaagaacaataagtcctggatggagtctgagtttcgcgtgtattctagcgccaacaattgcacatttgagtacgtgagccagcccttcctgatggacctggagggcaagcagggcaatttcaagaacctgagggagttcgtgtttaagaatatcgatggctacttcaagatctacagcaagcacaccccaatcaacctggtgcgcgacctgccacagggattctccgccctggagccactggtggatctgcccatcggcatcaacatcacccggtttcagacactgctggccctgcacagatcctacctgacaccaggcgactcctctagcggatggaccgcaggagctgccgcctactatgtgggctatctgcagccccggaccttcctgctgaagtacaacgagaatggcaccatcacagacgcagtggattgcgccctggaccccctgtctgagacaaagtgtacactgaagagctttaccgtggagaagggcatctatcagacaagcaatttcagggtgcagcctaccgagtccatcgtgcgctttcccaatatcacaaacctgtgcccttttggcgaggtgttcaacgccaccagattcgccagcgtgtacgcctggaatcggaagagaatctccaactgcgtggccgactattctgtgctgtacaactccgcctctttcagcacctttaagtgctatggcgtgtctcccacaaagctgaatgatctgtgctttaccaacgtgtacgccgatagcttcgtgatcaggggagacgaagtgagacagatcgcaccaggacagacaggaaagatcgcagactacaattataagctgcctgacgatttcaccggctgcgtgatcgcctggaactccaacaatctggattctaaagtgggcggcaactacaattatctgtacaggctgtttcgcaagtccaatctgaagccattcgagcgggacatctccacagagatctaccaggccggctctaccccctgcaatggcgtggagggctttaactgttatttccctctgcagtcttacggcttccagccaacaaacggcgtgggctatcagccctacagagtggtggtgctgtcctttgagctgctgcacgcaccagcaacagtgtgcggcccaaagaagtctaccaatctggtgaagaacaagtgcgtgaacttcaacttcaacggactgaccggcacaggcgtgctgaccgagagcaataagaagttcctgccttttcagcagttcggcagggacatcgcagataccacagacgccgtgcgcgaccctcagaccctggagatcctggacatcacaccatgcagcttcggcggcgtgtccgtgatcacaccaggcaccaatacatccaaccaggtggccgtgctgtatcaggacgtgaattgtaccgaggtgcccgtggcaatccacgcagatcagctgacccctacatggcgggtgtactctaccggcagcaacgtgttccagacaagagccggatgcctgatcggagcagagcacgtgaacaatagctatgagtgcgacatccctatcggcgccggcatctgtgccagctaccagacccagacaaactccccatctggagcaggctccgtggccagccagtccatcatcgcctataccatgagcctgggcgccgagaacagcgtggcctactccaacaattctatcgccatccctaccaacttcacaatcagcgtgaccacagagatcctgccagtgtctatgaccaagacaagcgtggactgcacaatgtatatctgtggcgatagcaccgagtgctccaacctgctgctgcagtacggctccttttgtacccagctgaatagagccctgacaggcatcgccgtggagcaggataagaacacacaggaggtgttcgcccaggtgaagcagatctacaagaccccacccatcaaggactttggcggcttcaacttcagccagatcctgcctgatccaagcaagccctccaagaggtcttttatcgaggacctgctgttcaacaaggtgaccctggccgatgccggcttcatcaagcagtatggagattgcctgggagacatcgcagcccgcgacctgatctgtgcccagaagtttaatggcctgaccgtgctgcctccactgctgacagatgagatgatcgcccagtacacatctgccctgctggccggcaccatcacaagcggatggaccttcggcgcaggagccgccctgcagatcccttttgccatgcagatggcctataggttcaacggcatcggcgtgacccagaatgtgctgtacgagaaccagaagctgatcgccaatcagtttaacagcgccatcggcaagatccaggactctctgtcctctacagccagcgccctgggcaagctgcaggatgtggtgaatcagaacgcccaggccctgaataccctggtgaagcagctgagctccaacttcggcgccatctctagcgtgctgaatgacatcctgagccggctggacccccctgaggcagaggtgcagatcgacaggctgatcacaggccgcctgcagagcctgcagacctacgtgacacagcagctgatcagggcagcagagatcagagcctccgccaatctggccgccaccaagatgagcgagtgcgtgctgggacagtccaagagggtggacttttgtggcaagggctatcacctgatgtctttcccacagagcgcccctcacggcgtggtgtttctgcacgtgacctacgtgccagcccaggagaagaacttcaccacagcaccagccatctgccacgatggaaaggcacactttcctagggagggcgtgttcgtgtctaacggcacccactggtttgtgacacagcgcaatttctacgagccacagatcatcaccacagacaatacattcgtgagcggcaactgtgatgtggtgatcggcatcgtgaacaataccgtgtatgatccactgcagcccgagctggactcctttaaggaggagctggataagtacttcaagaatcacacctctcccgacgtggatctgggcgacatctccggcatcaatgcctctgtggtgaacatccagaaggagatcgaccggctgaacgaggtggccaagaatctgaacgagagcctgatcgatctgcaggagctgggcaagtatgagcagtacatcaagggctctggcagagagaacctgtatttccagggaggaggaggcagcggatacatccctgaggcaccaagggacggacaggcctacgtgcgcaaggatggcgagtgggtgctgctgtccacctttctgggccatcatcaccaccaccaccaccactga

SEQ ID NO: 1605 - DNA, 3846 bp, Artificial Sequence
  Description of Artificial Sequence: Synthetic polynucleotide
atgggcatcctgccaagcccaggaatgcccgccctgctgtctctggtgagcctgctgtccgtgctgctgatgggatgcgtggcagagacaggcacacagtgcgtgaacctgaccacaaggacccagctgccccctgcctataccaattctttcacacggggcgtgtactatcccgacaaggtgtttagaagctccgtgctgcactccacacaggatctgtttctgcctttcttttctaacgtgacctggttccacgccatccacgtgtccggcaccaatggcacaaagcggttcgacaatcccgtgctgccttttaacgatggcgtgtacttcgccagcaccgagaagtccaacatcatcagaggctggatctttggcaccacactggactctaagacacagagcctgctgatcgtgaacaatgccaccaacgtggtgatcaaggtgtgcgagttccagttttgtaatgatccattcctgggcgtgtactatcacaagaacaataagtcctggatggagtctgagtttcgcgtgtattctagcgccaacaattgcacatttgagtacgtgagccagcccttcccaatggacctggagggcaagcagggcaatttcaagaacctgagggagttcgtgtttaagaatatcgatggctacttcaagatctacagcaagcacaccccaatcaacctggtgcgcgacctgccacagggattctccgccctggagccactggtggatctgcccatcggcatcaacatcacccggtttcagacactgctggccctgcacagatcctacctgacaccaggcgactcctctagcggatggaccgcaggagctgccgcctactatgtgggctatctgcagccccggaccttcctgctgaagtacaacgagaatggcaccatcacagacgcagtggattgcgccctggaccccctgtctgagacaaagtgtacactgaagagctttaccgtggagaagggcatctatcagacaagcaatttcagggtgcagcctaccgagtccatcgtgcgctttcccaatatcacaaacctgtgcccttttggcgaggtgttcaacgccaccagattcgccagcgtgtacgcctggaatcggaagagaatctccaactgcgtggccgactattctgtgctgtacaactccgcctctttcagcacctttaagtgctatggcgtgtctcccacaaagctgaatgatctgtgctttaccaacgtgtacgccgatagcttcgtgatcaggggagacgaagtgagacagatcgcaccaggacagacaggaaagatcgcagactacaattataagctgcctgacgatttcaccggctgcgtgatcgcctggaactccaacaatctggattctaaagtgggcggcaactacaattatctgtacaggctgtttcgcaagtccaatctgaagccattcgagcgggacatctccacagagatctaccaggccggctctaccccctgcaatggcgtggagggctttaactgttatttccctctgcagtcttacggcttccagccaacaaacggcgtgggctatcagccctacagagtggtggtgctgtcctttgagctgctgcacgcaccagcaacagtgtgcggcccaaagaagtctaccaatctggtgaagaacaagtgcgtgaacttcaacttcaacggactgaccggcacaggcgtgctgaccgagagcaataagaagttcctgccttttcagcagttcggcagggacatcgcagataccacagacgccgtgcgcgaccctcagaccctggagatcctggacatcacaccatgcagcttcggcggcgtgtccgtgatcacaccaggcaccaatacatccaaccaggtggccgtgctgtatcaggacgtgaattgtaccgaggtgcccgtggcaatccacgcagatcagctgacccctacatggcgggtgtactctaccggcagcaacgtgttccagacaagagccggatgcctgatcggagcagagcacgtgaacaatagctatgagtgcgacatccctatcggcgccggcatctgtgccagctaccagacccagacaaactccccatctggagcaggctccgtggccagccagtccatcatcgcctataccatgagcctgggcgccgagaacagcgtggcctactccaacaattctatcgccatccctaccaacttcacaatcagcgtgaccacagagatcctgccagtgtctatgaccaagacaagcgtggactgcacaatgtatatctgtggcgatagcaccgagtgctccaacctgctgctgcagtacggctccttttgtacccagctgaatagagccctgacaggcatcgccgtggagcaggataagaacacacaggaggtgttcgcccaggtgaagcagatctacaagaccccacccatcaaggactttggcggcttcaacttcagccagatcctgcctgatccaagcaagccctccaagaggtcttttatcgaggacctgctgttcaacaaggtgaccctggccgatgccggcttcatcaagcagtatggagattgcctgggagacatcgcagcccgcgacctgatctgtgcccagaagtttaatggcctgaccgtgctgcctccactgctgacagatgagatgatcgcccagtacacatctgccctgctggccggcaccatcacaagcggatggaccttcggcgcaggagccgccctgcagatcccttttgccatgcagatggcctataggttcaacggcatcggcgtgacccagaatgtgctgtacgagaaccagaagctgatcgccaatcagtttaacagcgccatcggcaagatccaggactctctgtcctctacagccagcgccctgggcaagctgcaggatgtggtgaatcagaacgcccaggccctgaataccctggtgaagcagctgagctccaacttcggcgccatctctagcgtgctgaatgacatcctgagccggctggacccccctgaggcagaggtgcagatcgacaggctgatcacaggccgcctgcagagcctgcagacctacgtgacacagcagctgatcagggcagcagagatcagagcctccgccaatctggccgccaccaagatgagcgagtgcgtgctgggacagtccaagagggtggacttttgtggcaagggctatcacctgatgtctttcccacagagcgcccctcacggcgtggtgtttctgcacgtgacctacgtgccagcccaggagaagaacttcaccacagcaccagccatctgccacgatggaaaggcacactttcctagggagggcgtgttcgtgtctaacggcacccactggtttgtgacacagcgcaatttctacgagccacagatcatcaccacagacaatacattcgtgagcggcaactgtgatgtggtgatcggcatcgtgaacaataccgtgtatgatccactgcagcccgagctggactcctttaaggaggagctggataagtacttcaagaatcacacctctcccgacgtggatctgggcgacatctccggcatcaatgcctctgtggtgaacatccagaaggagatcgaccggctgaacgaggtggccaagaatctgaacgagagcctgatcgatctgcaggagctgggcaagtatgagcagtacatcaagggctctggcagagagaacctgtatttccagggaggaggaggcagcggatacatccctgaggcaccaagggacggacaggcctacgtgcgcaaggatggcgagtgggtgctgctgtccacctttctgggccatcatcaccaccaccaccaccactga

SEQ ID NO: 1606 - DNA, 3846 bp, Artificial Sequence
  Description of Artificial Sequence: Synthetic polynucleotide
atgggcatcctgccaagcccaggaatgcccgccctgctgtctctggtgagcctgctgtccgtgctgctgatgggatgcgtggcagagacaggcacacagtgcgtgaacctgaccacaaggacccagctgccccctgcctataccaattctttcacacggggcgtgtactatcccgacaaggtgtttagaagctccgtgctgcactccacacaggatctgtttctgcctttcttttctaacgtgacctggttccacgccatccacgtgtccggcaccaatggcacaaagaacttcgacaatcccgtgctgccttttaacgatggcgtgtacttcgccagcaccgagaagtccaacatcatcagaggctggatctttggcaccacactggactctaagacacagagcctgctgatcgtgaacaatgccaccaacgtggtgatcaaggtgtgcgagttccagttttgtaatgatccattcctgggcgtgtactatcacaagaacaataagtcctggatggagtctgagtttcgcgtgtattctagcgccaacaattgcacatttgagtacgtgagccagcccttcctgatggacctggagggcaagcagggcaatttcaagaacctgagggagttcgtgtttaagaatatcgatggctacttcaagatctacagcaagcacaccccaatcaacctggtgcgcgacctgccacagggattctccgccctggagccactggtggatctgcccatcggcatcaacatcacccggtttcagacactgctggccctgcacagatcctacctgacaccaggcgactcctctagcggatggaccgcaggagctgccgcctactatgtgggctatctgcagccccggaccttcctgctgaagtacaacgagaatggcaccatcacagacgcagtggattgcgccctggaccccctgtctgagacaaagtgtacactgaagagctttaccgtggagaagggcatctatcagacaagcaatttcagggtgcagcctaccgagtccatcgtgcgctttcccaatatcacaaacctgtgcccttttggcgaggtgttcaacgccaccagattcgccagcgtgtacgcctggaatcggaagagaatctccaactgcgtggccgactattctgtgctgtacaactccgcctctttcagcacctttaagtgctatggcgtgtctcccacaaagctgaatgatctgtgctttaccaacgtgtacgccgatagcttcgtgatcaggggagacgaagtgagacagatcgcaccaggacagacaggaaagatcgcagactacaattataagctgcctgacgatttcaccggctgcgtgatcgcctggaactccaacaatctggattctaaagtgggcggcaactacaattatctgtacaggctgtttcgcaagtccaatctgaagccattcgagcgggacatctccacagagatctaccaggccggctctaccccctgcaatggcgtggagggctttaactgttatttccctctgcagtcttacggcttccagccaacaaacggcgtgggctatcagccctacagagtggtggtgctgtcctttgagctgctgcacgcaccagcaacagtgtgcggcccaaagaagtctaccaatctggtgaagaacaagtgcgtgaacttcaacttcaacggactgaccggcacaggcgtgctgaccgagagcaataagaagttcctgccttttcagcagttcggcagggacatcgcagataccacagacgccgtgcgcgaccctcagaccctggagatcctggacatcacaccatgcagcttcggcggcgtgtccgtgatcacaccaggcaccaatacatccaaccaggtggccgtgctgtatcaggacgtgaattgtaccgaggtgcccgtggcaatccacgcagatcagctgacccctacatggcgggtgtactctaccggcagcaacgtgttccagacaagagccggatgcctgatcggagcagagcacgtgaacaatagctatgagtgcgacatccctatcggcgccggcatctgtgccagctaccagacccagacaaactccccatctggagcaggctccgtggccagccagtccatcatcgcctataccatgagcctgggcgccgagaacagcgtggcctactccaacaattctatcgccatccctaccaacttcacaatcagcgtgaccacagagatcctgccagtgtctatgaccaagacaagcgtggactgcacaatgtatatctgtggcgatagcaccgagtgctccaacctgctgctgcagtacggctccttttgtacccagctgaatagagccctgacaggcatcgccgtggagcaggataagaacacacaggaggtgttcgcccaggtgaagcagatctacaagaccccacccatcaaggactttggcggcttcaacttcagccagatcctgcctgatccaagcaagccctccaagaggtcttttatcgaggacctgctgttcaacaaggtgaccctggccgatgccggcttcatcaagcagtatggagattgcctgggagacatcgcagcccgcgacctgatctgtgcccagaagtttaatggcctgaccgtgctgcctccactgctgacagatgagatgatcgcccagtacacatctgccctgctggccggcaccatcacaagcggatggaccttcggcgcaggagccgccctgcagatcccttttgccatgcagatggcctataggttcaacggcatcggcgtgacccagaatgtgctgtacgagaaccagaagctgatcgccaatcagtttaacagcgccatcggcaagatccaggactctctgtcctctacagccagcgccctgggcaagctgcaggatgtggtgaatcagaacgcccaggccctgaataccctggtgaagcagctgagctccaacttcggcgccatctctagcgtgctgaatgacatcctgagccggctggacccccctgaggcagaggtgcagatcgacaggctgatcacaggccgcctgcagagcctgcagacctacgtgacacagcagctgatcagggcagcagagatcagagcctccgccaatctggccgccaccaagatgagcgagtgcgtgctgggacagtccaagagggtggacttttgtggcaagggctatcacctgatgtctttcccacagagcgcccctcacggcgtggtgtttctgcacgtgacctacgtgccagcccaggagaagaacttcaccacagcaccagccatctgccacgatggaaaggcacactttcctagggagggcgtgttcgtgtctaacggcacccactggtttgtgacacagcgcaatttctacgagccacagatcatcaccacagacaatacattcgtgagcggcaactgtgatgtggtgatcggcatcgtgaacaataccgtgtatgatccactgcagcccgagctggactcctttaaggaggagctggataagtacttcaagaatcacacctctcccgacgtggatctgggcgacatctccggcatcaatgcctctgtggtgaacatccagaaggagatcgaccggctgaacgaggtggccaagaatctgaacgagagcctgatcgatctgcaggagctgggcaagtatgagcagtacatcaagggctctggcagagagaacctgtatttccagggaggaggaggcagcggatacatccctgaggcaccaagggacggacaggcctacgtgcgcaaggatggcgagtgggtgctgctgtccacctttctgggccatcatcaccaccaccaccaccactga

SEQ ID NO: 1607 - DNA, 3846 bp, Artificial Sequence
  Description of Artificial Sequence: Synthetic polynucleotide
atgggcatcctgccaagcccaggaatgcccgccctgctgtctctggtgagcctgctgtccgtgctgctgatgggatgcgtggcagagacaggcacacagtgcgtgaacctgaccacaaggacccagctgccccctgcctataccaattctttcacacggggcgtgtactatcccgacaaggtgtttagaagctccgtgctgcactccacacaggatctgtttctgcctttcttttctaacgtgacctggttccacgccatccacgtgtccggcaccaatggcacaaagcggttcgacaatcccgtgctgccttttaacgatggcgtgtacttcgccagcaccgagaagtccaacatcatcagaggctggatctttggcaccacactggactctaagacacagagcctgctgatcgtgaacaatgccaccaacgtggtgatcaaggtgtgcgagttccagttttgtaatgatccattcctgggcgtgtactatcacaagaacaataagtcctggatggagtctgagtttcgcgtgtattctagcgccaacaattgcacatttgagtacgtgagccagcccttcctgatggacctggagggcaagcagggcaatttcaagaacctgagggagttcgtgtttaagaatatcgatggctacttcaagatctacagcaagcacaccccaatcaacctggtgcgcgacctgccacagggattctccgccctggagccactggtggatctgcccatcggcatcaacatcacccggtttcagacactgctggccctgcacagatcctacctgacaccaggcgactcctctagcggatggaccgcaggagctgccgcctactatgtgggctatctgcagccccggaccttcctgctgaagtacaacgagaatggcaccatcacagacgcagtggattgcgccctggaccccctgtctgagacaaagtgtacactgaagagctttaccgtggagaagggcatctatcagacaagcaatttcagggtgcagcctaccgagtccatcgtgcgctttcccaatatcacaaacctgtgcccttttggcgaggtgttcaacgccaccagattcgccagcgtgtacgcctggaatcggaagagaatctccaactgcgtggccgactattctgtgctgtacaactccgcctctttcagcacctttaagtgctatggcgtgtctcccacaaagctgaatgatctgtgctttaccaacgtgtacgccgatagcttcgtgatcaggggagacgaagtgagacagatcgcaccaggacagacaggaaagatcgcagactacaattataagctgcctgacgatttcaccggctgcgtgatcgcctggaactccaacaatctggattctaaagtgggcggcaactacaattatctgtacaggctgtttcgcaagtccaatctgaagccattcgagcgggacatctccacagagatctaccaggccggctctaccccctgcaatggcgtggagggctttaactgttatttccctctgcagtcttacggcttccagccaacaaacggcgtgggctatcagccctacagagtggtggtgctgtcctttgagctgctgcacgcaccagcaacagtgtgcggcccaaagaagtctaccaatctggtgaagaacaagtgcgtgaacttcaacttcaacggactgaccggcacaggcgtgctgaccgagagcaataagaagttcctgccttttcagcagttcggcagggacatcgcagataccacagacgccgtgcgcgaccctcagaccctggagatcctggacatcacaccatgcagcttcggcggcgtgtccgtgatcacaccaggcaccaatacatccaaccaggtggccgtgctgtatcaggacgtgaattgtaccgaggtgcccgtggcaatccacgcagatcagctgacccctacatggcgggtgtactctaccggcagcaacgtgttccagacaagagccggatgcctgatcggagcagagcacgtgaacaatagctatgagtgcgacatccctatcggcgccggcatctgtgccagctaccagacccagacaaactccccatctggagcaggctccgtggccagccagtccatcatcgcctataccatgagcctgggcgccgagaacagcgtggcctactccaacaattctatcgccatccctaccaacttcacaatcagcgtgaccacagagatcctgccagtgtctatgaccaagacaagcgtggactgcacaatgtatatctgtggcgatagcaccgagtgctccaacctgctgctgcagtacggctccttttgtacccagctgaatagagccctgacaggcatcgccgtggagcaggataagaacacacaggaggtgttcgcccaggtgaagcagatctacaagaccccacccatcaaggactttggcggcttcaacttcagccagatcctgcctgatccaagcaagccctccaagaggtcttttatcgaggacctgctgttcaacaaggtgaccctggccgatgccggcttcatcaagcagtatggagattgcctgggagacatcgcagcccgcgacctgatctgtgcccagaagtttaatggcctgaccgtgctgcctccactgctgacagatgagatgatcgcccagtacacatctgccctgctggccggcaccatcacaagcggatggaccttcggcgcaggagccgccctgcagatcccttttgccatgcagatggcctataggttcaacggcatcggcgtgacccagaatgtgctgtacgagaaccagaagctgatcgccaatcagtttaacagcgccatcggcaagatccaggactctctgcgatctacagccagcgccctgggcaagctgcaggatgtggtgaatcagaacgcccaggccctgaataccctggtgaagcagctgagctccaacttcggcgccatctctagcgtgctgaatgacatcctgagccggctggacccccctgaggcagaggtgcagatcgacaggctgatcacaggccgcctgcagagcctgcagacctacgtgacacagcagctgatcagggcagcagagatcagagcctccgccaatctggccgccaccaagatgagcgagtgcgtgctgggacagtccaagagggtggacttttgtggcaagggctatcacctgatgtctttcccacagagcgcccctcacggcgtggtgtttctgcacgtgacctacgtgccagcccaggagaagaacttcaccacagcaccagccatctgccacgatggaaaggcacactttcctagggagggcgtgttcgtgtctaacggcacccactggtttgtgacacagcgcaatttctacgagccacagatcatcaccacagacaatacattcgtgagcggcaactgtgatgtggtgatcggcatcgtgaacaataccgtgtatgatccactgcagcccgagctggactcctttaaggaggagctggataagtacttcaagaatcacacctctcccgacgtggatctgggcgacatctccggcatcaatgcctctgtggtgaacatccagaaggagatcgaccggctgaacgaggtggccaagaatctgaacgagagcctgatcgatctgcaggagctgggcaagtatgagcagtacatcaagggctctggcagagagaacctgtatttccagggaggaggaggcagcggatacatccctgaggcaccaagggacggacaggcctacgtgcgcaaggatggcgagtgggtgctgctgtccacctttctgggccatcatcaccaccaccaccaccactga

SEQ ID NO: 1608 - DNA, 3846 bp, Artificial Sequence
  Description of Artificial Sequence: Synthetic polynucleotide
atgggcatcctgccaagcccaggaatgcccgccctgctgtctctggtgagcctgctgtccgtgctgctgatgggatgcgtggcagagacaggcacacagtgcgtgaacctgaccacaaggacccagctgccccctgcctataccaattctttcacacggggcgtgtactatcccgacaaggtgtttagaagctccgtgctgcactccacacaggatctgtttctgcctttcttttctaacgtgacctggttccacgccatccacgtgtccggcaccaatggcacaaagcggttcgacaatcccgtgctgccttttaacgatggcgtgtacttcgccagcaccgagaagtccaacatcatcagaggctggatctttggcaccacactggactctaagacacagagcctgctgatcgtgaacaatgccaccaacgtggtgatcaaggtgtgcgagttccagttttgtaatgatccattcctgggcgtgtactatcacaagaacaataagtcctggatggagtctgagtttcgcgtgtattctagcgccaacaattgcacatttgagtacgtgagccagcccttcctgatggacctggagggcaagcagggcaatttcaagaacctgagggagttcgtgtttaagaatatcgatggctacttcaagatctacagcaagcacaccccaatcaacctggtgcgcgacctgccacagggattctccgccctggagccactggtggatctgcccatcggcatcaacatcacccggtttcagacactgctggccctgcacagatcctacctgacaccaggcgactcctctagcggatggaccgcaggagctgccgcctactatgtgggctatctgcagccccggaccttcctgctgaagtacaacgagaatggcaccatcacagacgcagtggattgcgccctggaccccctgtctgagacaaagtgtacactgaagagctttaccgtggagaagggcatctatcagacaagcaatttcagggtgcagcctaccgagtccatcgtgcgctttcccaatatcacaaacctgtgcccttttggcgaggtgttcaacgccaccagattcgccagcgtgtacgcctggaatcggaagagaatctccaactgcgtggccgactattctgtgctgtacaactccgcctctttcagcacctttaagtgctatggcgtgtctcccacaaagctgaatgatctgtgctttaccaacgtgtacgccgatagcttcgtgatcaggggagacgaagtgagacagatcgcaccaggacagacaggaaagatcgcagactacaattataagctgcctgacgatttcaccggctgcgtgatcgcctggaactccaacaatctggattctaaagtgggcggcaactacaattatctgtacaggctgtttcgcaagtccaatctgaagccattcgagcgggacatctccacagagatctaccaggccggctctaccccctgcaatggcgtggagggctttaactgttatttccctctgcagtcttacggcttccagccaacaaacggcgtgggctatcagccctacagagtggtggtgctgtcctttgagctgctgcacgcaccagcaacagtgtgcggcccaaagaagtctaccaatctggtgaagaacaagtgcgtgaacttcaacttcaacggactgaccggcacaggcgtgctgaccgagagcaataagaagttcctgccttttcagcagttcggcagggacatcgcagataccacagacgccgtgcgcgaccctcagaccctggagatcctggacatcacaccatgcagcttcggcggcgtgtccgtgatcacaccaggcaccaatacatccaaccaggtggccgtgctgtatcaggacgtgaattgtaccgaggtgcccgtggcaatccacgcagatcagctgacccctacatggcgggtgtactctaccggcagcaacgtgttccagacaagagccggatgcctgatcggagcagagcacgtgaacaatagctatgagtgcgacatccctatcggcgccggcatctgtgccagctaccagacccagacaaactccccatctggagcaggctccgtggccagccagtccatcatcgcctataccatgagcctgggcgccgagaacagcgtggcctactccaacaattctatcgccatccctaccaacttcacaatcagcgtgaccacagagatcctgccagtgtctatgaccaagacaagcgtggactgctcaatgtatatctgtggcgatagcaccgagtgctccaacctgctgctgcagtacggctccttttgtacccagctgaatagagccctgacaggcatcgccgtggagcaggataagaacacacaggaggtgttcgcccaggtgaagcagatctacaagaccccacccatcaaggactttggcggcttcaacttcagccagatcctgcctgatccaagcaagccctccaagaggtcttttatcgaggacctgctgttcaacaaggtgaccctggccgatgccggcttcatcaagcagtatggagattgcctgggagacatcgcagcccgcgacctgatctgtgcccagaagtttaatggcctgaccgtgctgcctccactgctgacagatgagatgatcgcccagtacacatctgccctgctggccggcaccatcacaagcggatggaccttcggcgcaggagccgccctgcagatcccttttgccatgcagatggcctataggttcaacggcatcggcgtgacccagaatgtgctgtacgagaaccagaagctgatcgccaatcagtttaacagcgccatcggcaagatccaggactctctgtcctctacagccagcgccctgggcaagctgcaggatgtggtgaatcagaacgcccaggccctgaataccctggtgaagcagctgagctccaacttcggcgccatctctagcgtgctgaatgacatcctgagccggctggacccccctgaggcagaggtgcagatcgacaggctgatcacaggccgcctgcagagcctgcagacctacgtgacacagcagctgatcagggcagcagagatcagagcctccgccaatctggccgccaccaagatgagcgagtgcgtgctgggacagtccaagagggtggacttttgtggcaagggctatcacctgatgtctttcccacagagcgcccctcacggcgtggtgtttctgcacgtgacctacgtgccagcccaggagaagaacttcaccacagcaccagccatctgccacgatggaaaggcacactttcctagggagggcgtgttcgtgtctaacggcacccactggtttgtgacacagcgcaatttctacgagccacagatcatcaccacagacaatacattcgtgagcggcaactgtgatgtggtgatcggcatcgtgaacaataccgtgtatgatccactgcagcccgagctggactcctttaaggaggagctggataagtacttcaagaatcacacctctcccgacgtggatctgggcgacatctccggcatcaatgcctctgtggtgaacatccagaaggagatcgaccggctgaacgaggtggccaagaatctgaacgagagcctgatcgatctgcaggagctgggcaagtatgagcagtacatcaagggctctggcagagagaacctgtatttccagggaggaggaggcagcggatacatccctgaggcaccaagggacggacaggcctacgtgcgcaaggatggcgagtgggtgctgctgtccacctttctgggccatcatcaccaccaccaccaccactga

SEQ ID NO: 1609 - DNA, 3846 bp, Artificial Sequence
  Description of Artificial Sequence: Synthetic polynucleotide
atgggcatcctgccaagcccaggaatgcccgccctgctgtctctggtgagcctgctgtccgtgctgctgatgggatgcgtggcagagacaggcacacagtgcgtgaacctgaccacaaggacccagctgccccctgcctataccaattctttcacacggggcgtgtactatcccgacaaggtgtttagaagctccgtgctgcactccacacaggatctgtttctgcctttcttttctaacgtgacctggttccacgccatccacgtgtccggcaccaatggcacaaagcggttcgacaatcccgtgctgccttttaacgatggcgtgtacttcgccagcaccgagaagtccaacatcatcagaggctggatctttggcaccacactggactctaagacacagagcctgctgatcgtgaacaatgccaccaacgtggtgatcaaggtgtgcgagttccagttttgtaatgatccattcctgggcgtgtactatcacaagaacaataagtcctggatggagtctgagtttcgcgtgtattctagcgccaacaattgcacatttgagtacgtgagccagcccttcctgatggacctggagggcaagcagggcaatttcaagaacctgagggagttcgtgtttaagaatatcgatggctacttcaagatctacagcaagcacaccccaatcaacctggtgcgcgacctgccacagggattctccgccctggagccactggtggatctgcccatcggcatcaacatcacccggtttcagacactgctggccctgcacagatcctacctgacaccaggcgactcctctagcggatggaccgcaggagctgccgcctactatgtgggctatctgcagccccggaccttcctgctgaagtacaacgagaatggcaccatcacagacgcagtggattgcgccctggaccccctgtctgagacaaagtgtacactgaagagctttaccgtggagaagggcatctatcagacaagcaatttcagggtgcagcctaccgagtccatcgtgcgctttcccaatatcacaaacctgtgcccttttggcgaggtgttcaacgccaccagattcgccagcgtgtacgcctggaatcggaagagaatctccaactgcgtggccgactattctgtgctgtacaactccgcctctttcagcacctttaagtgctatggcgtgtctcccacaaagctgaatgatctgtgctttaccaacgtgtacgccgatagcttcgtgatcaggggagacgaagtgagacagatcgcaccaggacagacaggaaagatcgcagactacaattataagctgcctgacgatttcaccggctgcgtgatcgcctggaactccaacaatctggattctaaagtgggcggcaactacaattatctgtacaggctgtttcgcaagtccaatctgaagccattcgagcgggacatctccacagagatctaccaggccggctctaccccctgcaatggcgtggagggctttaactgttatttccctctgcagtcttacggcttccagccaacaaacggcgtgggctatcagccctacagagtggtggtgctgtcctttgagctgctgcacgcaccagcaacagtgtgcggcccaaagaagtctaccaatctggtgaagaacaagtgcgtgaacttcaacttcaacggactgaccggcacaggcgtgctgaccgagagcaataagaagttcctgccttttcagcagttcggcagggacatcgcagataccacagacgccgtgcgcgaccctcagaccctggagatcctggacatcacaccatgcagcttcggcggcgtgtccgtgatcacaccaggcaccaatacatccaaccaggtggccgtgctgtatcaggacgtgaattgtaccgaggtgcccgtggcaatccacgcagatcagctgacccctacatggcgggtgtactctaccggcagcaacgtgttccagacaagagccggatgcctgatcggagcagagcacgtgaacaatagctatgagtgcgacatccctatcggcgccggcatctgtgccagctaccagacccagacaaactccccatctggagcaggctccgtggccagccagtccatcatcgcctataccatgagcctgggcgccgagaacagcgtggcctactccaacaattctatcgccatccctaccaacttcacaatcagcgtgaccacagagatcctgccagtgtctatgaccaagacaagcgtggactgcacaatgtatatctgtggcgatagcaccgagtgctccaacctgctgctgcagtacggctccttttgtacccagctgaatagagccctgacaggcatcgccgtggagcaggataagaacacacaggaggtgttcgcccaggtgaagcagatctacaagaccccacccatcaaggactttggcggcttcaacttcagccagatcctgcctgatccaagcaagccctccaagaggtcttttatcgaggacctgctgttcaacaaggtgaccctggccgatgccggcttcatcaagcagtatggagattgcctgggagacatcgcagcccgcgacctgatctgtgcccagaagtttaatggcctgaccgtgctgcctccactgctgacagatgagatgatcgcccagtacacatctgccctgctggccggcaccatcacaggtggatggaccttcggcgcaggagccgccctgcagatcccttttgccatgcagatggcctataggttcaacggcatcggcgtgacccagaatgtgctgtacgagaaccagaagctgatcgccaatcagtttaacagcgccatcggcaagatccaggactctctgtcctctacagccagcgccctgggcaagctgcaggatgtggtgaatcagaacgcccaggccctgaataccctggtgaagcagctgagctccaacttcggcgccatctctagcgtgctgaatgacatcctgagccggctggacccccctgaggcagaggtgcagatcgacaggctgatcacaggccgcctgcagagcctgcagacctacgtgacacagcagctgatcagggcagcagagatcagagcctccgccaatctggccgccaccaagatgagcgagtgcgtgctgggacagtccaagagggtggacttttgtggcaagggctatcacctgatgtctttcccacagagcgcccctcacggcgtggtgtttctgcacgtgacctacgtgccagcccaggagaagaacttcaccacagcaccagccatctgccacgatggaaaggcacactttcctagggagggcgtgttcgtgtctaacggcacccactggtttgtgacacagcgcaatttctacgagccacagatcatcaccacagacaatacattcgtgagcggcaactgtgatgtggtgatcggcatcgtgaacaataccgtgtatgatccactgcagcccgagctggactcctttaaggaggagctggataagtacttcaagaatcacacctctcccgacgtggatctgggcgacatctccggcatcaatgcctctgtggtgaacatccagaaggagatcgaccggctgaacgaggtggccaagaatctgaacgagagcctgatcgatctgcaggagctgggcaagtatgagcagtacatcaagggctctggcagagagaacctgtatttccagggaggaggaggcagcggatacatccctgaggcaccaagggacggacaggcctacgtgcgcaaggatggcgagtgggtgctgctgtccacctttctgggccatcatcaccaccaccaccaccactga

SEQ ID NO: 1610 - DNA, 3846 bp, Artificial Sequence
  Description of Artificial Sequence: Synthetic polynucleotide
atgggcatcctgccaagcccaggaatgcccgccctgctgtctctggtgagcctgctgtccgtgctgctgatgggatgcgtggcagagacaggcacacagtgcgtgaacctgaccacaaggacccagctgccccctgcctataccaattctttcacacggggcgtgtactatcccgacaaggtgtttagaagctccgtgctgcactccacacaggatctgtttctgcctttcttttctaacgtgacctggttccacgccatccacgtgtccggcaccaatggcacaaagcggttcgacaatcccgtgctgccttttaacgatggcgtgtacttcgccagcaccgagaagtccaacatcatcagaggctggatctttggcaccacactggactctaagacacagagcctgctgatcgtgaacaatgccaccaacgtggtgatcaaggtgtgcgagttccagttttgtaatgatccattcctgggcgtgtactatcacaagaacaataagtcctggatggagtctgagtttcgcgtgtattctagcgccaacaattgcacatttgagtacgtgagccagcccttcctgatggacctggctggcaagcagggcaatttcaagaacctgagggagttcgtgtttaagaatatcgatggctacttcaagatctacagcaagcacaccccaatcaacctggtgcgcgacctgccacagggattctccgccctggagccactggtggatctgcccatcggcatcaacatcacccggtttcagacactgctggccctgcacagatcctacctgacaccaggcgactcctctagcggatggaccgcaggagctgccgcctactatgtgggctatctgcagccccggaccttcctgctgaagtacaacgagaatggcaccatcacagacgcagtggattgcgccctggaccccctgtctgagacaaagtgtacactgaagagctttaccgtggagaagggcatctatcagacaagcaatttcagggtgcagcctaccgagtccatcgtgcgctttcccaatatcacaaacctgtgcccttttggcgaggtgttcaacgccaccagattcgccagcgtgtacgcctggaatcggaagagaatctccaactgcgtggccgactattctgtgctgtacaactccgcctctttcagcacctttaagtgctatggcgtgtctcccacaaagctgaatgatctgtgctttaccaacgtgtacgccgatagcttcgtgatcaggggagacgaagtgagacagatcgcaccaggacagacaggaaagatcgcagactacaattataagctgcctgacgatttcaccggctgcgtgatcgcctggaactccaacaatctggattctaaagtgggcggcaactacaattatctgtacaggctgtttcgcaagtccaatctgaagccattcgagcgggacatctccacagagatctaccaggccggctctaccccctgcaatggcgtggagggctttaactgttatttccctctgcagtcttacggcttccagccaacaaacggcgtgggctatcagccctacagagtggtggtgctgtcctttgagctgctgcacgcaccagcaacagtgtgcggcccaaagaagtctaccaatctggtgaagaacaagtgcgtgaacttcaacttcaacggactgaccggcacaggcgtgctgaccgagagcaataagaagttcctgccttttcagcagttcggcagggacatcgcagataccacagacgccgtgcgcgaccctcagaccctggagatcctggacatcacaccatgcagcttcggcggcgtgtccgtgatcacaccaggcaccaatacatccaaccaggtggccgtgctgtatcaggacgtgaattgtaccgaggtgcccgtggcaatccacgcagatcagctgacccctacatggcgggtgtactctaccggcagcaacgtgttccagacaagagccggatgcctgatcggagcagagcacgtgaacaatagctatgagtgcgacatccctatcggcgccggcatctgtgccagctaccagacccagacaaactccccatctggagcaggctccgtggccagccagtccatcatcgcctataccatgagcctgggcgccgagaacagcgtggcctactccaacaattctatcgccatccctaccaacttcacaatcagcgtgaccacagagatcctgccagtgtctatgaccaagacaagcgtggactgcacaatgtatatctgtggcgatagcaccgagtgctccaacctgctgctgcagtacggctccttttgtacccagctgaatagagccctgacaggcatcgccgtggagcaggataagaacacacaggaggtgttcgcccaggtgaagcagatctacaagaccccacccatcaaggactttggcggcttcaacttcagccagatcctgcctgatccaagcaagccctccaagaggtcttttatcgaggacctgctgttcaacaaggtgaccctggccgatgccggcttcatcaagcagtatggagattgcctgggagacatcgcagcccgcgacctgatctgtgcccagaagtttaatggcctgaccgtgctgcctccactgctgacagatgagatgatcgcccagtacacatctgccctgctggccggcaccatcacaagcggatggaccttcggcgcaggagccgccctgcagatcccttttgccatgcagatggcctataggttcaacggcatcggcgtgacccagaatgtgctgtacgagaaccagaagctgatcgccaatcagtttaacagcgccatcggcaagatccaggactctctgtcctctacagccagcgccctgggcaagctgcaggatgtggtgaatcagaacgcccaggccctgaataccctggtgaagcagctgagctccaacttcggcgccatctctagcgtgctgaatgacatcctgagccggctggacccccctgaggcagaggtgcagatcgacaggctgatcacaggccgcctgcagagcctgcagacctacgtgacacagcagctgatcagggcagcagagatcagagcctccgccaatctggccgccaccaagatgagcgagtgcgtgctgggacagtccaagagggtggacttttgtggcaagggctatcacctgatgtctttcccacagagcgcccctcacggcgtggtgtttctgcacgtgacctacgtgccagcccaggagaagaacttcaccacagcaccagccatctgccacgatggaaaggcacactttcctagggagggcgtgttcgtgtctaacggcacccactggtttgtgacacagcgcaatttctacgagccacagatcatcaccacagacaatacattcgtgagcggcaactgtgatgtggtgatcggcatcgtgaacaataccgtgtatgatccactgcagcccgagctggactcctttaaggaggagctggataagtacttcaagaatcacacctctcccgacgtggatctgggcgacatctccggcatcaatgcctctgtggtgaacatccagaaggagatcgaccggctgaacgaggtggccaagaatctgaacgagagcctgatcgatctgcaggagctgggcaagtatgagcagtacatcaagggctctggcagagagaacctgtatttccagggaggaggaggcagcggatacatccctgaggcaccaagggacggacaggcctacgtgcgcaaggatggcgagtgggtgctgctgtccacctttctgggccatcatcaccaccaccaccaccactga

SEQ ID NO: 1611 - DNA, 3846 bp, Artificial Sequence
  Description of Artificial Sequence: Synthetic polynucleotide
atgggcatcctgccaagcccaggaatgcccgccctgctgtctctggtgagcctgctgtccgtgctgctgatgggatgcgtggcagagacaggcacacagtgcgtgaacctgaccacaaggacccagctgccccctgcctataccaattctttcacacggggcgtgtactatcccgacaaggtgtttagaagcgatgtgctgcactccacacaggatctgtttctgcctttcttttctaacgtgacctggttccacgccatccacgtgtccggcaccaatggcacaaagcggttcgacaatcccgtgctgccttttaacgatggcgtgtacttcgccagcaccgagaagtccaacatcatcagaggctggatctttggcaccacactggactctaagacacagagcctgctgatcgtgaacaatgccaccaacgtggtgatcaaggtgtgcgagttccagttttgtgaagatccattcctgggcgtgtactatcacaagaacaataagtcctggatggagaaagagtttcgcgtgtattctagcgccaacaattgcacatttgagtacgtgagccagcccttcctgatggacctggggggcaagcagggcaatttcaagtggctgagggagttcgtgtttaagaatatcgatggctacttcaagatctacagcaagcacaccccaatcaacctggtgcgcgacctgccacagggattctccgccctggagccactgatggatctgcccatcggcatcaacatcacccggtttcagacactgctggccctgcacagatcctacctgacaccaggcgactcctctagcggatggaccgcaggagctgccgcctactatgtgggctatctgcagccccggaccttcctgctgaagtacaacgagaatggcaccatcacagacgcagtggattgcgccctggaccccctgtctgagacaaagtgtacactgaagagctttaccgtggagaagggcatctatcagacaagcaatttcagggtgcagcctaccgagtccatcgtgcgctttcccaatatcacaaacctgtgcccttttggcgaggtgttcaacgccaccagattcgccagcgtgtacgcctggaatcggaagagaatctccaactgcgtggccgactattctgtgctgtacaactccgcctctttcagcacctttaagtgctatggcgtgtctcccacaaagctgaatgatctgtgctttaccaacgtgtacgccgatagcttcgtgatcaggggagacgaagtgagacagatcgcaccaggacagacaggaaagatcgcagactacaattataagctgcctgacgatttcaccggctgcgtgatcgcctggaactccaacaatctggattctaaagtgggcggcaactacaattatctgtacaggctgtttcgcaagtccaatctgaagccattcgagcgggacatctccacagagatctaccaggccggctctaccccctgcaatggcgtggagggctttaactgttatttccctctgcagtcttacggcttccagccaacaaacggcgtgggctatcagccctacagagtggtggtgctgtcctttgagctgctgcacgcaccagcaacagtgtgcggcccaaagaagtctaccaatctggtgaagaacaagtgcgtgaacttcaacttcaacggactgaccggcacaggcgtgctgaccgagagcaataagaagttcctgccttttcagcagttcggcagggacatcgcagataatacagacgccgtgcgcgaccctcagaccctggagatcctggacatcacaccatgcagcttcggcggcgtgtccgtgatcacaccaggcaccaatacatccaaccaggtggccgtgctgtatcaggacgtgaattgtaccgaggtgcccaatgcaatccacgcagatcagctgacccctacatggcgggtgtactctaccggcagcaacgtgttccagacaagagccggatgcctgatcggagcagagcacgtgaacaatagctatgagtgcgacatccctatcggcgccggcatctgtgccagctaccagacccagacaaactccccatctggagcaggctccgtggccagccagtccatcatcgcctataccatgagcctgggcgccgagaacagcgtggcctactccaacaattctatcgccatccctaccaacttcacaatcagcgtgaccacagagatcctgccagtgtctatgaccaagacaagcgtggactgcacaatgtatatctgtggcgatagcaccgagtgctccaacctgctgctgcagtacggctccttttgtacccagctgaatagagccctgcaaggcatcgcccgtgagcaggataagaacacacaggaggtgttcgcccaggtgaagcagatctacaagaccccacccatcaaggactttggcggcttcaacttcagccagatcctgcctgatccaagcaagccctccaagaggtcttttatcgaggacctgctgttcaacaaggtgaccctggccgatgccggcttcatcaagcagtatggagattgcctgggagacatcgcagcccgcgacctgatctgtgcccagaagtttaatggcctgaccgtgctgcctccactgctgacagatgagatgatcgcccagtacacatctgccctgctggccggcaccatcacaagcggatggaccttcggcgcaggagccgccctgcagatcccttttgccatgcagatggcctataggttcaacggcatcggcgtgacccagaatgtgctgtacgagaaccagaagctgatcgccaatcagtttaacaaagccatcggcaagatccaggactctctgtcctctacagccagcgccctgggcaagctgcaggatgtggtgaatcagaacgcccaggccctgaataccctggtgaagcagctgagctccaacttcggcgccatctctagcgtgctgaatgacatcctgagccggctggacccccctgaggcagaggtgcagatcgacaggctgatcacaggccgcctgcagagcctgcagacctacgtgacacagcagctgatcagggcagcagagatcagagcctccgccaatctggccgccaccaagatgagcgagtgcgtgctgggacagtccaagagggtggacttttgtggcaagggctatcacctgatgtctttcccacagagcgcccctcacggcgtggtgtttctgcacgtgacctacgtgccagcccaggagaagaacttcaccacagcaccagccatctgccacgatggaaaggcattttttcctagggagggcgtgttcgtgtctaacggcacccaatggtttgtgacacagcgcaatttctacgagccacagatcatcaccacagacaatacattcgtgagcggcaactgtgatgtggtgatcggcatcgtgaacaataccgtgtatgatccactgcagcccgagctggactcctttaaggaggagctggataagtacttcaagaatcacacctctcccgacgtggatctgggcgacatctccggcatcaatgcctctgtggtgaacatccagaaggagatcgaccggctgaacgaggtggccaagaatctgaacgagagcctgatcgatctgcaggagctgggcaagtatgagcagtacatcaagggctctggcagagagaacctgtatttccagggaggaggaggcagcggatacatccctgaggcaccaagggacggacaggcctacgtgcgcaaggatggcgagtgggtgctgctgtccacctttctgggccatcatcaccaccaccaccaccactga

SEQ ID NO: 1612 - DNA, 3846 bp, Artificial Sequence
  Description of Artificial Sequence: Synthetic polynucleotide
atgggcatcctgccaagcccaggaatgcccgccctgctgtctctggtgagcctgctgtccgtgctgctgatgggatgcgtggcagagacaggcacacagtgcgtgaacctgaccacaaggacccagctgccccctgcctataccaattctttcacacggggcgtgtactatcccgacaaggtgtttagaagctccgtgctgcactccacacaggatctgtttctgcctttcttttctaacgtgacctggttccacgccatccacgtgtccggcaccaatggcacaaagcggttcgacaatcccgtgctgccttttaacgatggcgtgtacttcgccagcaccgagaagtccaacatcatcagaggctggatctttggcaccacactggactctaagacacagagcctgctgatcgtgaacaatgccaccaacgtggtgatcaaggtgtgcgagttccagttttgtaatgatccattcctgggcgtgtactatcacaagaacaataagtcctggatggagtctgagtttcgcgtgtattctagcgccaacaattgcacatttgagtacgtgagccagcccttcctgatggacctggagggcaagcagggcaatttcaagaacctgagggagttcgtgtttaagaatatcgatggctacttcaagatctacagcaagcacaccccaatcaacctggtgcgcgacctgccacagggattctccgccctggagccactggtggatctgcccatcggcatcaacatcacccggtttcagacactgctggccctgcacagatcctacctgacaccaggcgactcctctagcggatggaccgcaggagctgccgcctactatgtgggctatctgcagccccggaccttcctgctgaagtacaacgagaatggcaccatcacagacgcagtggattgcgccctggaccccctggcggagacaaagtgtacactgaagagctttaccgtggagaagggcatctatcagacaagcaatttcagggtgcagcctaccgagtccatcgtgcgctttcccaatatcacaaacctgtgcccttttggcgaggtgttcaacgccaccagattcgccagcgtgtacgcctggaatcggaagagaatctccaactgcgtggccgactattctgtgctgtacaactccgcctctttcagcacctttaagtgctatggcgtgtctcccacaaagctgaatgatctgtgctttaccaacgtgtacgccgatagcttcgtgatcaggggagacgaagtgagacagatcgcaccaggacagacaggaaagatcgcagactacaattataagctgcctgacgatttcaccggctgcgtgatcgcctggaactccaacaatctggattctaaagtgggcggcaactacaattatctgtacaggctgtttcgcaagtccaatctgaagccattcgagcgggacatctccacagagatctaccaggccggctctaccccctgcaatggcgtggagggctttaactgttatttccctctgcagtcttacggcttccagccaacaaacggcgtgggctatcagccctacagagtggtggtgctgtcctttgagctgctgcacgcaccagcaacagtgtgcggcccaaagaagtctaccaatctggtgaagaacaagtgcgtgaacttcaacttcaacggactgaccggcacaggcgtgctgaccgagagcaataagaagttcctgccttttcagcagttcggcagggacatcgcagataccacagacgccgtgcgcgaccctcagaccctggagatcctggacatcacaccatgcagcttcggcggcgtgtccgtgatcacaccaggcaccaatacatccaaccaggtggccgtgctgtatcaggacgtgaattgtaccgaggtgcccgtggcaatccacgcagatcagctgacccctacatggcgggtgtactctaccggcagcaacgtgttccagacaagagccggatgcctgatcggagcagagcacgtgaacaatagctatgagtgcgacatccctatcggcgccggcatctgtgccagctaccagacccagacaaactccccatctggagcaggctccgtggccagccagtccatcatcgcctataccatgagcctgggcgccgagaacagcgtggcctactccaacaattctatcgccatccctaccaacttcacaatcagcgtgaccacagagatcctgccagtgtctatgaccaagacaagcgtggactgcacaatgtatatctgtggcgatagcaccgagtgctccaacctgctgctgcagtacggctccttttgtacccagctgaatagagccctgacaggcatcgccgtggagcaggataagaacacacaggaggtgttcgcccaggtgaagcagatctacaagaccccacccatcaaggactttggcggcttcaacttcagccagatcctgcctgatccaagcaagccctccaagaggtcttttatcgaggacctgctgttcaacaaggtgaccctggccgatgccggcttcatcaagcagtatggagattgcctgggagacatcgcagcccgcgacctgatctgtgcccagaagtttaatggcctgaccgtgctgcctccactgctgacagatgagatgatcgcccagtacacatctgccctgctggccggcaccatcacaagcggatggaccttcggcgcaggagccgccctgcagatcccttttgccatgcagatggcctataggttcaacggcatcggcgtgacccagaatgtgctgtacgagaaccagaagctgatcgccaatcagtttaacagcgccatcggcaagatccaggactctctgtcctctacagccagcgccctgggcaagctgcaggatgtggtgaatcagaacgcccaggccctgaataccctggtgaagcagctgagctccaacttcggcgccatctctagcgtgctgaatgacatcctgagccggctggacccccctgaggcagaggtgcagatcgacaggctgatcacaggccgcctgcagagcctgcagacctacgtgacacagcagctgatcagggcagcagagatcagagcctccgccaatctggccgccaccaagatgagcgagtgcgtgctgggacagtccaagagggtggacttttgtggcaagggctatcacctgatgtctttcccacagagcgcccctcacggcgtggtgtttctgcacgtgacctacgtgccagcccaggagaagaacttcaccacagcaccagccatctgccacgatggaaaggcacactttcctagggagggcgtgttcgtgtctaacggcacccactggtttgtgacacagcgcaatttctacgagccacagatcatcaccacagacaatacattcgtgagcggcaactgtgatgtggtgatcggcatcgtgaacaataccgtgtatgatccactgcagcccgagctggactcctttaaggaggagctggataagtacttcaagaatcacacctctcccgacgtggatctgggcgacatctccggcatcaatgcctctgtggtgaacatccagaaggagatcgaccggctgaacgaggtggccaagaatctgaacgagagcctgatcgatctgcaggagctgggcaagtatgagcagtacatcaagggctctggcagagagaacctgtatttccagggaggaggaggcagcggatacatccctgaggcaccaagggacggacaggcctacgtgcgcaaggatggcgagtgggtgctgctgtccacctttctgggccatcatcaccaccaccaccaccactga

SEQ ID NO: 1613 - DNA, 3846 bp, Artificial Sequence
  Description of Artificial Sequence: Synthetic polynucleotide
atgggcatcctgccaagcccaggaatgcccgccctgctgtctctggtgagcctgctgtccgtgctgctgatgggatgcgtggcagagacaggcacacagtgcgtgaacctgaccacaaggacccagctgccccctgcctataccaattctttcaagcggggcgtgtactatcccgacaaggtgtttagaagctccgtgctgcactccacacaggatctgtttctgcctttcttttctaacgtgacctggttccacgccatccacgtgtccggcaccaatggcacaaagcggttcgacaatcccgtgctgccttttaacgatggcgtgtacttcgccagcaccgagaagtccaacatcatcagaggctggatctttggcaccacactggactctaagacacagagcctgctgatcgtgaacaatgccaccaacgtggtgatcaaggtgtgcgagttccagttttgtaatgatccattcctgggcgtgtactatcacaagaacaataagtcctggatggagtctgagtttcgcgtgtattctagcgccaacaattgcacatttgagtacgtgagccagcccttcctgatggacctggagggcaagcagggcaatttcaagaacctgagggagttcgtgtttaagaatatcgatggctacttcaagatctacagcaagcacaccccaatcaacctggtgcgcgacctgccacagggattctccgccctggagccactggtggatctgcccatcggcatcaacatcacccggtttcagacactgctggccctgcacagatcctacctgacaccaggcgactcctctagcggatggaccgcaggagctgccgcctactatgtgggctatctgcagccccggaccttcctgctgaagtacaacgagaatggcaccatcacagacgcagtggattgcgccctggaccccctgtctgagacaaagtgtacactgaagagctttaccgtggagaagggcatctatcagacaagcaatttcagggtgcagcctaccgagtccatcgtgcgctttcccaatatcacaaacctgtgcccttttggcgaggtgttcaacgccaccagattcgccagcgtgtacgcctggaatcggaagagaatctccaactgcgtggccgactattctgtgctgtacaactccgcctctttcagcacctttaagtgctatggcgtgtctcccacaaagctgaatgatctgtgctttaccaacgtgtacgccgatagcttcgtgatcaggggagacgaagtgagacagatcgcaccaggacagacaggaaagatcgcagactacaattataagctgcctgacgatttcaccggctgcgtgatcgcctggaactccaacaatctggattctaaagtgggcggcaactacaattatctgtacaggctgtttcgcaagtccaatctgaagccattcgagcgggacatctccacagagatctaccaggccggctctaccccctgcaatggcgtggagggctttaactgttatttccctctgcagtcttacggcttccagccaacaaacggcgtgggctatcagccctacagagtggtggtgctgtcctttgagctgctgcacgcaccagcaacagtgtgcggcccaaagaagtctaccaatctggtgaagaacaagtgcgtgaacttcaacttcaacggactgaccggcacaggcgtgctgaccgagagcaataagaagttcctgccttttcagcagttcggcagggacatcgcagataccacagacgccgtgcgcgaccctcagaccctggagatcctggacatcacaccatgcagcttcggcggcgtgtccgtgatcacaccaggcaccaatacatccaaccaggtggccgtgctgtatcaggacgtgaattgtaccgaggtgcccgtggcaatccacgcagatcagctgacccctacatggcgggtgtactctaccggcagcaacgtgttccagacaagagccggatgcctgatcggagcagagcacgtgaacaatagctatgagtgcgacatccctatcggcgccggcatctgtgccagctaccagacccagacaaactccccatctggagcaggctccgtggccagccagtccatcatcgcctataccatgagcctgggcgccgagaacagcgtggcctactccaacaattctatcgccatccctaccaacttcacaatcagcgtgaccacagagatcctgccagtgtctatgaccaagacaagcgtggactgcacaatgtatatctgtggcgatagcaccgagtgctccaacctgctgctgcagtacggctccttttgtacccagctgaatagagccctgacaggcatcgccgtggagcaggataagaacacacaggaggtgttcgcccaggtgaagcagatctacaagaccccacccatcaaggactttggcggcttcaacttcagccagatcctgcctgatccaagcaagccctccaagaggtcttttatcgaggacctgctgttcaacaaggtgaccctggccgatgccggcttcatcaagcagtatggagattgcctgggagacatcgcagcccgcgacctgatctgtgcccagaagtttaatggcctgaccgtgctgcctccactgctgacagatgagatgatcgcccagtacacatctgccctgctggccggcaccatcacaagcggatggaccttcggcgcaggagccgccctgcagatcccttttgccatgcagatggcctataggttcaacggcatcggcgtgacccagaatgtgctgtacgagaaccagaagctgatcgccaatcagtttaacagcgccatcggcaagatccaggactctctgtcctctacagccagcgccctgggcaagctgcaggatgtggtgaatcagaacgcccaggccctgaataccctggtgaagcagctgagctccaacttcggcgccatctctagcgtgctgaatgacatcctgagccggctggacccccctgaggcagaggtgcagatcgacaggctgatcacaggccgcctgcagagcctgcagacctacgtgacacagcagctgatcagggcagcagagatcagagcctccgccaatctggccgccaccaagatgagcgagtgcgtgctgggacagtccaagagggtggacttttgtggcaagggctatcacctgatgtctttcccacagagcgcccctcacggcgtggtgtttctgcacgtgacctacgtgccagcccaggagaagaacttcaccacagcaccagccatctgccacgatggaaaggcacactttcctagggagggcgtgttcgtgtctaacggcacccactggtttgtgacacagcgcaatttctacgagccacagatcatcaccacagacaatacattcgtgagcggcaactgtgatgtggtgatcggcatcgtgaacaataccgtgtatgatccactgcagcccgagctggactcctttaaggaggagctggataagtacttcaagaatcacacctctcccgacgtggatctgggcgacatctccggcatcaatgcctctgtggtgaacatccagaaggagatcgaccggctgaacgaggtggccaagaatctgaacgagagcctgatcgatctgcaggagctgggcaagtatgagcagtacatcaagggctctggcagagagaacctgtatttccagggaggaggaggcagcggatacatccctgaggcaccaagggacggacaggcctacgtgcgcaaggatggcgagtgggtgctgctgtccacctttctgggccatcatcaccaccaccaccaccactga

SEQ ID NO: 1614 - DNA, 3846 bp, Artificial Sequence
  Description of Artificial Sequence: Synthetic polynucleotide
atgggcatcctgccaagcccaggaatgcccgccctgctgtctctggtgagcctgctgtccgtgctgctgatgggatgcgtggcagagacaggcacacagtgcgtgaacctgaccacaaggacccagctgccccctgcctataccaattctttcacacggggcgtgtactatcccgacaaggtgtttagaagctccgtgctgcactccacacaggatctgtttctgcctttcttttctaacgtgacctggttccacgccatccacgtgtccggcaccaatggcacaaagcggttcgacaatcccgtgctgccttttaacgatggcgtgtacttcgccagcaccgagaagtccaacatcatcagaggctggatctttggcaccacactggactctaagacacagagcctgctgatcgtgaacaatgccaccaacgtggtgatcaaggtgtgcgagttccagttttgtaatgatccattcctgggcgtgtactatcacaagaacaataagtcctggatggagtctgagtttcgcgtgtattctagcgccaacaattgcacatttgagtacgtgagccagcccttcctgatggacctggagggcaagcagggcaatttcaagaacctgagggagttcgtgtttaagaatatcgatggctacttcaagatctacagcaagcacaccccaatcaacctggtgcgcgacctgccacagggattctccgccctggagccactggtggatctgcccatcggcatcaacatcacccggtttcagacactgctggccctgcacagatcctacctgacaccaggcgactcctctagcggatggaccgcaggagctgccgcctactatgtgggctatctgcagccccggaccttcctgctgaagtacaacgagaatggcaccatcacagacgcagtggattgcgccctggaccccctgtctgagacaaagtgtacactgaagagctttaccgtggagaagggcatctatcagacaagcaatttcagggtgcagcctaccgagtccatcgtgcgctttcccaatatcacaaacctgtgcccttttggcgaggtgttcaacgccaccagattcgccagcgtgtacgcctggaatcggaagagaatctccaactgcgtggccgactattctgtgctgtacaactccgcctctttcagcacctttaagtgctatggcgtgtctcccacaaagctgaatgatctgtgctttaccaacgtgtacgccgatagcttcgtgatcaggggagacgaagtgagacagatcgcaccaggacagacaggaaagatcgcagactacaattataagctgcctgacgatttcaccggctgcgtgatcgcctggaactccaacaatctggattctaaagtgggcggcaactacaattatctgtacaggctgtttcgcaagtccaatctgaagccattcgagcgggacatctccacagagatctaccaggccggctctaccccctgcaatggcgtggagggctttaactgttatttccctctgcagtcttacggcttccagccaacaaacggcgtgggctatcagccctacagagtggtggtgctgtcctttgagctgctgcacgcaccagcaacagtgtgcggcccaaagaagtctaccaatctggtgaagaaccgatgcgtgaacttcaacttcaacggactgaccggcacaggcgtgctgaccgagagcaataagaagttcctgccttttcagcagttcggcagggacatcgcagataccacagacgccgtgcgcgaccctcagaccctggagatcctggacatcacaccatgcagcttcggcggcgtgtccgtgatcacaccaggcaccaatacatccaaccaggtggccgtgctgtatcaggacgtgaattgtaccgaggtgcccgtggcaatccacgcagatcagctgacccctacatggcgggtgtactctaccggcagcaacgtgttccagacaagagccggatgcctgatcggagcagagcacgtgaacaatagctatgagtgcgacatccctatcggcgccggcatctgtgccagctaccagacccagacaaactccccatctggagcaggctccgtggccagccagtccatcatcgcctataccatgagcctgggcgccgagaacagcgtggcctactccaacaattctatcgccatccctaccaacttcacaatcagcgtgaccacagagatcctgccagtgtctatgaccaagacaagcgtggactgcacaatgtatatctgtggcgatagcaccgagtgctccaacctgctgctgcagtacggctccttttgtacccagctgaatagagccctgacaggcatcgccgtggagcaggataagaacacacaggaggtgttcgcccaggtgaagcagatctacaagaccccacccatcaaggactttggcggcttcaacttcagccagatcctgcctgatccaagcaagccctccaagaggtcttttatcgaggacctgctgttcaacaaggtgaccctggccgatgccggcttcatcaagcagtatggagattgcctgggagacatcgcagcccgcgacctgatctgtgcccagaagtttaatggcctgaccgtgctgcctccactgctgacagatgagatgatcgcccagtacacatctgccctgctggccggcaccatcacaagcggatggaccttcggcgcaggagccgccctgcagatcccttttgccatgcagatggcctataggttcaacggcatcggcgtgacccagaatgtgctgtacgagaaccagaagctgatcgccaatcagtttaacagcgccatcggcaagatccaggactctctgtcctctacagccagcgccctgggcaagctgcaggatgtggtgaatcagaacgcccaggccctgaataccctggtgaagcagctgagctccaacttcggcgccatctctagcgtgctgaatgacatcctgagccggctggacccccctgaggcagaggtgcagatcgacaggctgatcacaggccgcctgcagagcctgcagacctacgtgacacagcagctgatcagggcagcagagatcagagcctccgccaatctggccgccaccaagatgagcgagtgcgtgctgggacagtccaagagggtggacttttgtggcaagggctatcacctgatgtctttcccacagagcgcccctcacggcgtggtgtttctgcacgtgacctacgtgccagcccaggagaagaacttcaccacagcaccagccatctgccacgatggaaaggcacactttcctagggagggcgtgttcgtgtctaacggcacccactggtttgtgacacagcgcaatttctacgagccacagatcatcaccacagacaatacattcgtgagcggcaactgtgatgtggtgatcggcatcgtgaacaataccgtgtatgatccactgcagcccgagctggactcctttaaggaggagctggataagtacttcaagaatcacacctctcccgacgtggatctgggcgacatctccggcatcaatgcctctgtggtgaacatccagaaggagatcgaccggctgaacgaggtggccaagaatctgaacgagagcctgatcgatctgcaggagctgggcaagtatgagcagtacatcaagggctctggcagagagaacctgtatttccagggaggaggaggcagcggatacatccctgaggcaccaagggacggacaggcctacgtgcgcaaggatggcgagtgggtgctgctgtccacctttctgggccatcatcaccaccaccaccaccactga

SEQ ID NO: 1615 - DNA, 3846 bp, Artificial Sequence
  Description of Artificial Sequence: Synthetic polynucleotide
atgggcatcctgccaagcccaggaatgcccgccctgctgtctctggtgagcctgctgtccgtgctgctgatgggatgcgtggcagagacaggcacacagtgcgtgaacctgaccacaaggacccagctgccccctgcctataccaattctttcacacggggcgtgtactatcccgacaaggtgtttagaagctccgtgctgcactccacacaggatctgtttctgcctttcttttctaacgtgacctggttccacgccatccacgtgtccggcaccaatggcacaaagcggttcgacaatcccgtgctgccttttaacgatggcgtgtacttcgccagcaccgagaagtccaacatcatcagaggctggatctttggcaccacactggactctaagacacagagcctgctgatcgtgaacaatgccaccaacgtggtgatcaaggtgtgcgagttccagttttgtaatgatccattcctgggcgtgtactatcacaagaacaataagtcctggatggagtctgagtttcgcgtgtattctagcgccaacaattgcacatttgagtacgtgagccagcccttcctgatggacctggagggcaagcagggcaatttcaagaacctgagggagttcgtgtttaagaatatcgatggctacttcaagatctacagcaagcacaccccaatcaacctggtgcgcgacctgccacagggattctccgccctggagccactggtggatctgcccatcggcatcaacatcacccggtttcagacactgctggccctgcacagatcctacctgacaccaggcgactcctctagcggatggaccgcaggagctgccgcctactatgtgggctatctgcagccccggaccttcctgctgaagtacaacgagaatggcaccatcacagacgcagtggattgcgccctggaccccctgtctgagacaaagtgtacactgaagagctttaccgtggagaagggcatctatcagacaagcaatttcagggtgcagcctaccgagtccatcgtgcgctttcccaatatcacaaacctgtgcccttttggcgaggtgttcaacgccaccagattcgccagcgtgtacgcctggaatcggaagagaatctccaactgcgtggccgactattctgtgctgtacaactccgcctctttcagcacctttaagtgctatggcgtgtctcccacaaagctgaatgatctgtgctttaccaacgtgtacgccgatagcttcgtgatcaggggagacgaagtgagacagatcgcaccaggacagacaggaaagatcgcagactacaattataagctgcctgacgatttcaccggctgcgtgatcgcctggaactccaacaatctggattctaaagtgggcggcaactacaattatctgtacaggctgtttcgcaagtccaatctgaagccattcgagcgggacatctccacagagatctaccaggccggctctaccccctgcaatggcgtggagggctttaactgttatttccctctgcagtcttacggcttccagccaacaaacggcgtgggctatcagccctacagagtggtggtgctgtcctttgagctgctgcacgcaccagcaacagtgtgcggcccaaagaagtctaccaatctggtgaagaacaagtgcgtgaacttcaacttcaacggactgaccggcacaggcgtgctgaccgagagcaataagaagttcctgccttttcagcagttcggcagggacatcgcagataccacagacgccgtgcgcgaccctcagaccctggagatcctggacatcacaccatgcagcttcggcggcgtgtccgtgatcacaccaggcaccaatacatccaaccaggtggccgtgctgtatcaggacgtgaattgtaccgaggtgcccgtggcaatccacgcagatcagctgacccctacatggcgggtgtactctaccggcagcaacgtgttccagacaagagccggatgcctgatcggagcagagcacgtgaacaatagctatgagtgcgacatccctatcggcgccggcatctgtgccagctaccagacccagacaaactccccatctggagcaggctccgtggccagccagtccatcatcgcctataccatgagcctgggcgccgagaacccggtgccgtactccaacaataatatcgccatccctaccaacttcacaatcagcgtgaccacagagatcctgccagtgtctatgaccaagacaagcgtggactgcacaatgtatatctgtggcgatagcaccgagtgctccaacctgctgctgcagtacggctccttttgtacccagctgaatagagccctgacaggcatcgccgtggagcaggataagaacacacaggaggtgttcgcccaggtgaagcagatctacaagaccccacccatcaaggactttggcggcttcaacttcagccagatcctgcctgatccaagcaagccctccaagaggtcttttatcgaggacctgctgttcaacaaggtgaccctggccgatgccggcttcatcaagcagtatggagattgcctgggagacatcgcagcccgcgacctgatctgtgcccagaagtttaatggcctgaccgtgctgcctccactgctgacagatgagatgatcgcccagtacacatctgccctgctggccggcaccatcacaagcggatggaccttcggcgcaggagccgccctgcagatcccttttgccatgcagatggcctataggttcaacggcatcggcgtgacccagaatgtgctgtacgagaaccagaagctgatcgccaatcagtttaacagcgccatcggcaagatccaggactctctgtcctctacagccagcgccctgggcaagctgcaggatgtggtgaatcagaacgcccaggccctgaataccctggtgaagcagctgagctccaacttcggcgccatctctagcgtgctgaatgacatcctgagccggctggacccccctgaggcagaggtgcagatcgacaggctgatcacaggccgcctgcagagcctgcagacctacgtgacacagcagctgatcagggcagcagagatcagagcctccgccaatctggccgccaccaagatgagcgagtgcgtgctgggacagtccaagagggtggacttttgtggcaagggctatcacctgatgtctttcccacagagcgcccctcacggcgtggtgtttctgcacgtgacctacgtgccagcccaggagaagaacttcaccacagcaccaggaatctgccacgatggaaaggcatactttcctagggagggcgtgttcgtgtctaacggcaccgaatggtatattacacagcgcaatttctacgagccacgaccgatcaccacagacaatacattcgtgagcggcaactgtgatgtggtgatcggcatcgtgaacaataccgtgtatgatccactgcagcccgagctggactcctttaaggaggagctggataagtacttcaagaatcacacctctcccgacgtggatctgggcgacatctccggcatcaatgcctctgtggtgaacatccagaaggagatcgaccggctgaacgaggtggccaagaatctgaacgagagcctgatcgatctgcaggagctgggcaagtatgagcagtacatcaagggctctggcagagagaacctgtatttccagggaggaggaggcagcggatacatccctgaggcaccaagggacggacaggcctacgtgcgcaaggatggcgagtgggtgctgctgtccacctttctgggccatcatcaccaccaccaccaccactga

SEQ ID NO: 1616 - DNA, 3846 bp, Artificial Sequence
  Description of Artificial Sequence: Synthetic polynucleotide
atgggcatcctgccaagcccaggaatgcccgccctgctgtctctggtgagcctgctgtccgtgctgctgatgggatgcgtggcagagacaggcacacagtgcgtgaacctgaccacaaggacccagctgccccctgcctataccaattctttcacacggggcgtgtactatcccgacaaggtgtttagaagcgatgtgctgcactccacacaggatctgtttctgcctttcttttctaacgtgacctggttccacgccatccacgtgtccggcaccaatggcacaaagcggttcgacaatcccgtgctgccttttaacgatggcgtgtacttcgccagcaccgagaagtccaacatcatcagaggctggatctttggcaccacactggactctaagacacagagcctgctgatcgtgaacaatgccaccaacgtggtgatcaaggtgtgcgagttccagttttgtgaaaatccattcctgggcgtgtactatcacaagaacaataagtcctggatggagaaagagtttcgcgtgtattctagcgccaacaattgcacatttgagtacgtgagccagcccttcctgatggacctgggtggcaagcagggcaatttcaagaacctgagggagttcgtgtttaagaatatcgatggctacttcaagatctacagcaagcacaccccaatcaacctggtgcgcgacctgccacagggattctccgccctggagccactgatggatctgcccatcggcatcaacatcacccggtttcagacactgctggccctgcacagatcctacctgacaccaggcgactcctctagcggatggaccgcaggagctgccgcctactatgtgggctatctgcagccccggaccttcctgctgaagtacaacgagaatggcaccatcacagacgcagtggattgcgccctggaccccctgtctgagacaaagtgtacactgaagagctttaccgtggagaagggcatctatcagacaagcaatttcagggtgcagcctaccgagtccatcgtgcgctttcccaatatcacaaacctgtgcccttttggcgaggtgttcaacgccaccagattcgccagcgtgtacgcctggaatcggaagagaatctccaactgcgtggccgactattctgtgctgtacaactccgcctctttcagcacctttaagtgctatggcgtgtctcccacaaagctgaatgatctgtgctttaccaacgtgtacgccgatagcttcgtgatcaggggagacgaagtgagacagatcgcaccaggacagacaggaaagatcgcagactacaattataagctgcctgacgatttcaccggctgcgtgatcgcctggaactccaacaatctggattctaaagtgggcggcaactacaattatctgtacaggctgtttcgcaagtccaatctgaagccattcgagcgggacatctccacagagatctaccaggccggctctaccccctgcaatggcgtggagggctttaactgttatttccctctgcagtcttacggcttccagccaacaaacggcgtgggctatcagccctacagagtggtggtgctgtcctttgagctgctgcacgcaccagcaacagtgtgcggcccaaagaagtctaccaatctggtgaagaacaagtgcgtgaacttcaacttcaacggactgaccggcacaggcgtgctgaccgagagcaataagaagttcctgccttttcagcagttcggcagggacatcgcagataatacagacgccgtgcgcgaccctcagaccctggagatcctggacatcacaccatgcagcttcggcggcgtgtccgtgatcacaccaggcaccaatacatccaaccaggtggccgtgctgtatcaggacgtgaattgtaccgaggtgcccaatgcaatccacgcagatcagctgacccctacatggcgggtgtactctaccggcagcaacgtgttccagacaagagccggatgcctgatcggagcagagcacgtgaacaatagctatgagtgcgacatccctatcggcgccggcatctgtgccagctaccagacccagacaaactccccatctggagcaggctccgtggccagccagtccatcatcgcctataccatgagcctgggcgccgagaacagcgtggcctactccaacaattctatcgccatccctaccaacttcacaatcagcgtgaccacagagatcctgccagtgtctatgaccaagacaagcgtggactgcacaatgtatatctgtggcgatagcaccgagtgctccaacctgctgctgcagtacggctccttttgtacccagctgaatagagccctgcaaggcatcgcccgagagcaggataagaacacacaggaggtgttcgcccaggtgaagcagatctacaagaccccacccatcaaggactttggcggcttcaacttcagccagatcctgcctgatccaagcaagccctccaagaggtcttttatcgaggacctgctgttcaacaaggtgaccctggccgatgccggcttcatcaagcagtatggagattgcctgggagacatcgcagcccgcgacctgatctgtgcccagaagtttaatggcctgaccgtgctgcctccactgctgacagatgagatgatcgcccagtacacatctgccctgctggccggcaccatcacaagcggatggaccttcggcgcaggagccgccctgcagatcccttttgccatgcagatggcctataggttcaacggcatcggcgtgacccagaatgtgctgtacgagaaccagaagctgatcgccaatcagtttaacaaagccatcggcaagatccaggactctctgtcctctacagccagcgccctgggcaagctgcaggatgtggtgaatcagaacgcccaggccctgaataccctggtgaagcagctgagctccaacttcggcgccatctctagcgtgctgaatgacatcctgagccggctggacccccctgaggcagaggtgcagatcgacaggctgatcacaggccgcctgcagagcctgcagacctacgtgacacagcagctgatcagggcagcagagatcagagcctccgccaatctggccgccaccaagatgagcgagtgcgtgctgggacagtccaagagggtggacttttgtggcaagggctatcacctgatgtctttcccacagagcgcccctcacggcgtggtgtttctgcacgtgacctacgtgccagcccaggagaagaacttcaccacagcaccagccatctgccacgatggaaaggcattttttcctagggagggcgtgttcgtgtctaacggcacccaatggtttgtgacacagcgcaatttctacgagccacagatcatcaccacagacaatacattcgtgagcggcaactgtgatgtggtgatcggcatcgtgaacaataccgtgtatgatccactgcagcccgagctggactcctttaaggaggagctggataagtacttcaagaatcacacctctcccgacgtggatctgggcgacatctccggcatcaatgcctctgtggtgaacatccagaaggagatcgaccggctgaacgaggtggccaagaatctgaacgagagcctgatcgatctgcaggagctgggcaagtatgagcagtacatcaagggctctggcagagagaacctgtatttccagggaggaggaggcagcggatacatccctgaggcaccaagggacggacaggcctacgtgcgcaaggatggcgagtgggtgctgctgtccacctttctgggccatcatcaccaccaccaccaccactga

SEQ ID NO: 1617 - DNA, 3846 bp, Artificial Sequence
  Description of Artificial Sequence: Synthetic polynucleotide
atgggcatcctgccaagcccaggaatgcccgccctgctgtctctggtgagcctgctgtccgtgctgctgatgggatgcgtggcagagacaggcacacagtgcgtgaacctgaccacaaggacccagctgccccctgcctataccaattctttcacacggggcgtgtactatcccgacaaggtgtttagaagctccgtgctgcactccacacaggatctgtttctgcctttcttttctaacgtgacctggttccacgccatccacgtgtccggcaccaatggcacaaagcggttcgacaatcccgtgctgccttttaacgatggcgtgtacttcgccagcaccgagaagtccaacatcatcagaggctggatctttggcaccacactggactctaagacacagagcctgctgatcgtgaacaatgccaccaacgtggtgatcaaggtgtgcgagttccagttttgtaatgatccattcctgggcgtgtactatcacaagaacaataagtcctggatggaggaagagtttcgcgtgtattctagcgccaacaattgcacatttgagtacgtgagccagcccttcctgatggacctggagggcaagcagggcaatttcaagaacctgagggagttcgtgtttaagaatatcgatggctacttcaagatctacagcaagcacaccccaatcaacctggtgcgcgacctgccacagggattctccgccctggagccactggtggatctgcccatcggcatcaacatcacccggtttcagacactgctggccctgcacagatcctacctgacaccaggcgactcctctagcggatggaccgcaggagctgccgcctactatgtgggctatctgcagccccggaccttcctgctgaagtacaacgagaatggcaccatcacagacgcagtggattgcgccctggaccccctgtctgagacaaagtgtacactgaagagctttaccgtggagaagggcatctatcagacaagcaatttcagggtgcagcctaccgagtccatcgtgcgctttcccaatatcacaaacctgtgcccttttggcgaggtgttcaacgccaccagattcgccagcgtgtacgcctggaatcggaagagaatctccaactgcgtggccgactattctgtgctgtacaactccgcctctttcagcacctttaagtgctatggcgtgtctcccacaaagctgaatgatctgtgctttaccaacgtgtacgccgatagcttcgtgatcaggggagacgaagtgagacagatcgcaccaggacagacaggaaagatcgcagactacaattataagctgcctgacgatttcaccggctgcgtgatcgcctggaactccaacaatctggattctaaagtgggcggcaactacaattatctgtacaggctgtttcgcaagtccaatctgaagccattcgagcgggacatctccacagagatctaccaggccggctctaccccctgcaatggcgtggagggctttaactgttatttccctctgcagtcttacggcttccagccaacaaacggcgtgggctatcagccctacagagtggtggtgctgtcctttgagctgctgcacgcaccagcaacagtgtgcggcccaaagaagtctaccaatctggtgaagaacaagtgcgtgaacttcaacttcaacggactgaccggcacaggcgtgctgaccgagagcaataagaagttcctgccttttcagcagttcggcagggacatcgcagataccacagacgccgtgcgcgaccctcagaccctggagatcctggacatcacaccatgcagcttcggcggcgtgtccgtgatcacaccaggcaccaatacatccaaccaggtggccgtgctgtatcaggacgtgaattgtaccgaggtgcccgtggcaatccacgcagatcagctgacccctacatggcgggtgtactctaccggcagcaacgtgttccagacaagagccggatgcctgatcggagcagagcacgtgaacaatagctatgagtgcgacatccctatcggcgccggcatctgtgccagctaccagacccagacaaactccccatctggagcaggctccgtggccagccagtccatcatcgcctataccatgagcctgggcgccgagaacagcgtggcctactccaacaattctatcgccatccctaccaacttcacaatcagcgtgaccacagagatcctgccagtgtctatgaccaagacaagcgtggactgcacaatgtatatctgtggcgatagcaccgagtgctccaacctgctgctgcagtacggctccttttgtacccagctgaatagagccctgacaggcatcgccgtggagcaggataagaacacacaggaggtgttcgcccaggtgaagcagatctacaagaccccacccatcaaggactttggcggcttcaacttcagccagatcctgcctgatccaagcaagccctccaagaggtcttttatcgaggacctgctgttcaacaaggtgaccctggccgatgccggcttcatcaagcagtatggagattgcctgggagacatcgcagcccgcgacctgatctgtgcccagaagtttaatggcctgaccgtgctgcctccactgctgacagatgagatgatcgcccagtacacatctgccctgctggccggcaccatcacaagcggatggaccttcggcgcaggagccgccctgcagatcccttttgccatgcagatggcctataggttcaacggcatcggcgtgacccagaatgtgctgtacgagaaccagaagctgatcgccaatcagtttaacagcgccatcggcaagatccaggactctctgtcctctacagccagcgccctgggcaagctgcaggatgtggtgaatcagaacgcccaggccctgaataccctggtgaagcagctgagctccaacttcggcgccatctctagcgtgctgaatgacatcctgagccggctggacccccctgaggcagaggtgcagatcgacaggctgatcacaggccgcctgcagagcctgcagacctacgtgacacagcagctgatcagggcagcagagatcagagcctccgccaatctggccgccaccaagatgagcgagtgcgtgctgggacagtccaagagggtggacttttgtggcaagggctatcacctgatgtctttcccacagagcgcccctcacggcgtggtgtttctgcacgtgacctacgtgccagcccaggagaagaacttcaccacagcaccagccatctgccacgatggaaaggcacactttcctagggagggcgtgttcgtgtctaacggcacccactggtttgtgacacagcgcaatttctacgagccacagatcatcaccacagacaatacattcgtgagcggcaactgtgatgtggtgatcggcatcgtgaacaataccgtgtatgatccactgcagcccgagctggactcctttaaggaggagctggataagtacttcaagaatcacacctctcccgacgtggatctgggcgacatctccggcatcaatgcctctgtggtgaacatccagaaggagatcgaccggctgaacgaggtggccaagaatctgaacgagagcctgatcgatctgcaggagctgggcaagtatgagcagtacatcaagggctctggcagagagaacctgtatttccagggaggaggaggcagcggatacatccctgaggcaccaagggacggacaggcctacgtgcgcaaggatggcgagtgggtgctgctgtccacctttctgggccatcatcaccaccaccaccaccactga

SEQ ID NO: 1618 - DNA, 3846 bp, Artificial Sequence
  Description of Artificial Sequence: Synthetic polynucleotide
atgggcatcctgccaagcccaggaatgcccgccctgctgtctctggtgagcctgctgtccgtgctgctgatgggatgcgtggcagagacaggcacacagtgcgtgaacctgaccacaaggacccagctgccccctgcctataccaattctttcacacggggcgtgtactatcccgacaagatatttagaagctccgtgctgcaccttacacaggatctgtttctgcctttcttttctaacgtgacctggttccacgccatccacgtgtccggcaccaatggcacaaagcggttcgacaatcccgtgctgccttttaacgatggcgtgtacttcgccgcaaccgagaagtccaacatcatcagaggctggatctttggcaccacactggactctaagacacagagcctgctgatcgtgaacaatgccaccaacgtggtgatcaaggtgtgcgagttccagttttgtaatgatccattcctgggcgtgtactatcacaagaacaataagtcctggatggagtctgagtttcgcgtgtattctagcgccaacaattgcacatttgagtacgtgagccagcccttcctgatggacctggagggcaagcagggcaatttcaagaacctgagggagttcgtgtttaagaatatcgatggctacttcaagatctacagcaagcacaccccaatcaacctggtgcgcgacctgccacagggattctccgccctgaaaccactggtgaaactgcccatcggcatcaacatcacccggtttcagacactgctggccctgcacagatcctacctgacaccaggcgactcctctagcggatggaccgcaggagctgccgcctactatgtgggctatctgcagccccggaccttcctgctgaagtacaacgagaatggcaccatcacagacgcagtggattgcgccctggaccccctgtctgagacaaagtgtacactgaagagctttaccgtggagaagggcatctatcagacaagcaatttcagggtgcagcctaccgagtccatcgtgcgctttcccaatatcacaaacctgtgcccttttggcgaggtgttcaacgccaccagattcgccagcgtgtacgcctggaatcggaagagaatctccaactgcgtggccgactattctgtgctgtacaactccgcctctttcagcacctttaagtgctatggcgtgtctcccacaaagctgaatgatctgtgctttaccaacgtgtacgccgatagcttcgtgatcaggggagacgaagtgagacagatcgcaccaggacagacaggaaagatcgcagactacaattataagctgcctgacgatttcaccggctgcgtgatcgcctggaactccaacaatctggattctaaagtgggcggcaactacaattatctgtacaggctgtttcgcaagtccaatctgaagccattcgagcgggacatctccacagagatctaccaggccggctctaccccctgcaatggcgtggagggctttaactgttatttccctctgcagtcttacggcttccagccaacaaacggcgtgggctatcagccctacagagtggtggtgctgtcctttgagctgctgcacgcaccagcaacagtgtgcggcccaaagaagtctaccaatctggtgaagaacaagtgcgtgaacttcaacttcaacggactgaccggcacaggcgtgctgaccgagagcaataagaagttcctgccttttcagcagttcggcagggacatctcagataccacagacgccgtgcgcgaccctcagaccctggagatcctggacatcacaccatgcagcttcggcggcgtgtccgtgatcacaccaggcaccaatacatccaaccaggtggccgtgctgtatcaggacgtgaattgtaccgatgtgcccgtggcaatccacgcagatcagctgacccctacatggcgggtgtactctaccggcagcaacgtgttccagacacaagccggatgcctgatcggagcagagcacgtgaacaatagctatgagtgcgacatccctatcggcgccggcatctgtgccagctaccagacccagacaaactccccatctggagcaggctccgtggccagccagtccatcatcgcctataccatgagcctgggcgccgagaacagcgtggcctactccaacaattctatcgccatccctaccaacttcacaatcagcgtgaccacagagatcctgccagtgtctatgaccaagacaagcgtggactgcacaatgtatatctgtggcgatagcaccgagtgctccaacctgctgctgcagtacggctccttttgtacccagctgaatagagccctgacaggcatcgccgtggagcaggataagaacacacaggaggtgttcgcccaggtgaagcagatctacaagaccccacccatcaaggactttggcggcttcaacttcagccagatcctgcctgatccaagcaagccctccaagaggtcttttatcgaggacctgctgttcaacaaggtgaccctggccgatgccggcttcatcaagcagtatggagattgcctgggagacatcgcagcccgcgacctgatctgtgcccagaagtttaatggcctgaccgtgctgcctccactgctgacagatgagatgatcgcccagtacacagcggccctgctggccggcaccgcgacagctggatggaccttcggcgcaggagccgccctgcagatcccttttgccatgcagatggcctataggttcaacggcatcggcgtgacccagaatgtgctgtacgagaaccagaagctgatcgccaatcagtttaacagcgccatcggcaagatccaggactctctgtcctctacagccagcgccctgggcaagctgcaggatgtggtgaatcagaacgcccaggccctgaataccctggtgaagcagctgagctccaacttcggcgccatctctagcgtgctgaatgacatcctgagccggctggacccccctgaggcagaggtgcagatcgacaggctgatcacaggccgcctgcagagcctgcagacctacgtgacacagcagctgatcagggcagcagagatcagagcctccgccaatctggccgccaccaagatgagcgagtgcgtgctgggacagtccaagagggtggacttttgtggcaagggctatcacctgatgtctttcccacagagcgcccctcacggcgtggtgtttctgcacgtgacctacgtgccagcccaggagaagaacttcaccacagcaccagccatctgccacgatggaaaggcacactttcctagggagggcgtgttcgtgtctaacggcacccactggtttgtgacacagcgcaatttctacgagccacagatcatcaccacagacaatacattcgtgagcggcaactgtgatgtggtgatcggcatcgtgaacaataccgtgtatgatccactgcagcccgagctggactcctttaaggaggagctggataagtacttcaagaatcacacctctcccgacgtggatctgggcgacatctccggcatcaatgcctctgtggtgaacatccagaaggagatcgaccggctgaacgaggtggccaagaatctgaacgagagcctgatcgatctgcaggagctgggcaagtatgagcagtacatcaagggctctggcagagagaacctgtatttccagggaggaggaggcagcggatacatccctgaggcaccaagggacggacaggcctacgtgcgcaaggatggcgagtgggtgctgctgtccacctttctgggccatcatcaccaccaccaccaccactga

SEQ ID NO: 1619 - DNA, 3846 bp, Artificial Sequence
  Description of Artificial Sequence: Synthetic polynucleotide
atgggcatcctgccaagcccaggaatgcccgccctgctgtctctggtgagcctgctgtccgtgctgctgatgggatgcgtggcagagacaggcacacagtgcgtgaacctgaccacaaggacccagctgccccctgcctataccaattctttcacacggggcgtgtactatcccgacaaggtgtttagaagctccgtgctgcactccacacaggatctgtttctgcctttcttttctaacgtgacctggttccacgccatccacgtgtccggcaccaatggcacaaagcggttcgacaatcccgtgctgccttttaacgatggcgtgtacttcgccagcaccgagaagtccaacatcatcagaggctggatctttggcaccacactggactctaagacacagagcctgctgatcgtgaacaatgccaccaacgtggtgatcaaggtgtgcgagttccagttttgtaatgatccattcctgggcgtgtactatcacaagaacaataagtcctggatggagtctgagtttcgcgtgtattctagcgccaacaattgcacatttgagtacgtgagccagcccttcctgatggacctggagggcaagcagggcaatttcaagaacctgagggagttcgtgtttaagaatatcgatggctacttcaagatctacagcaagcacaccccaatcaacctggtgcgcgacctgccacagggattctccgccctggagccactggtggatctgcccatcggcatcaacatcacccggtttcagacactgctggccctgcacagatcctacctgacaccaggcgactcctctagcggatggaccgcaggagctgccgcctactatgtgggctatctgcagccccggaccttcctgctgaagtacaacgagaatggcaccatcacagacgcagtggattgcgccctggaccccctgtctgagacaaagtgtacactgaagagctttaccgtggagaagggcatctatcagacaagcaatttcagggtgcagcctaccgagtccatcgtgcgctttcccaatatcacaaacctgtgcccttttggcgaggtgttcaacgccaccagattcgccagcgtgtacgcctggaatcggaagagaatctccaactgcgtggccgactattctgtgctgtacaactccgcctctttcagcacctttaagtgctatggcgtgtctcccacaaagctgaatgatctgtgctttaccaacgtgtacgccgatagcttcgtgatcaggggagacgaagtgagacagatcgcaccaggacagacaggaaagatcgcagactacaattataagctgcctgacgatttcaccggctgcgtgatcgcctggaactccaacaatctggattctaaagtgggcggcaactacaattatctgtacaggctgtttcgcaagtccaatctgaagccattcgagcgggacatctccacagagatctaccaggccggctctaccccctgcaatggcgtggagggctttaactgttatttccctctgcagtcttacggcttccagccaacaaacggcgtgggctatcagccctacagagtggtggtgctgtcctttgagctgctgcacgcaccagcaacagtgtgcggcccaaagaagtctaccaatctggtgaagaacaagtgcgtgaacttcaacttcaacggactgaccggcacaggcgtgctgaccgagagcaataagaagttcctgccttttcagcagttcggcagggacatcgcagataccacagacgccgtgcgcgaccctcagaccctggagatcctggacatcacaccatgcagcttcggcggcgtgtccgtgatcacaccaggcaccaatacatccaaccaggtggccgtgctgtatcaggacgtgaattgtaccgaggtgcccgtggcaatccacgcagatcagctgacccctacatggcgggtgtactctaccggcagcaacgtgttccagacaagagccggatgcctgatcggagcagagcacgtgaacaatagctatgagtgcgacatccctatcggcgccggcatctgtgccagctaccagacccagacaaactccccatctggagcaggctccgtggccagccagtccatcatcgcctataccatgagcctgggcgccgagaacagcgtggcctactccaacaattctatcgccatccctaccaacttcacaatcagcgtgaccacagagatcctgccagtgtctatgaccaaggttagcgtggactgcacaatgtatatctgtggcgatagcacccgttgcctcaacctgctgagtcagtacggctccttttgttcacagctggaaagagccctgaatggcatcgccgtggagcaggataagaacacacaggaggtgttcgcccaggtgaagcagatctacaagaccccacccatcaaggactttggcggcttcaacttcagccagatcctgcctgatccaagcaagccctccaagaggtcttttatcgaggacctgctgttcaacaaggtgaccctggccgatgccggcttcatcaagcagtatggagattgcctgggagacatcgcagcccgcgacctgatctgtgcccagaagtataatggcataatggtgctgcctccactgctgacagatgagatgatcgcccagtacacatctgccctgctggccggcaccatcacaagcggatggaccttcggcgcaggagccgccctgcagatcccttttgccatgcagatggcctataggttcaacggcatcggcgtgacccagaatgtgctgtacgagaaccagaagctgatcgccaatcagtttaacagcgccatcggcaagatccaggactctctgtcctctacagccagcgccctgggcaagctgcaggatgtggtgaatcagcaagcccaggccctgaatgaactggtgaagcagctgagctccaacttcggcgccatctctagcgtgataaatgacatctataaccggctggacccccctgaggcagaggctcagatcgacaggctgatcacaggccgcctgcagagcctgcagacctacgtgacacagcagctgatcagggcagcagagatcagagcctccgccaatctggccgccaccaagatgagcgagtgcgtgctgggacagtccaagagggtggacttttgtggcaagggctatcacctgatgtctttcccacagagcgcccctcacggcgtggtgtttctgcacgtgacctacgtgccagcccaggagaagaacttcaccacagcaccagccatctgccacgatggaaaggcacactttcctagggagggcgtgttcgtgtctaacggcacccactggtttgtgacacagcgcaatttctacgagccacagatcatcaccacagacaatacattcgtgagcggcaactgtgatgtggtgatcggcatcgtgaacaataccgtgtatgatccactgcagcccgagctggactcctttaaggaggagctggataagtacttcaagaatcacacctctcccgacgtggatctgggcgacatctccggcatcaatgcctctgtggtgaacatccagaaggagatcgaccggctgaacgaggtggccaagaatctgaacgagagcctgatcgatctgcaggagctgggcaagtatgagcagtacatcaagggctctggcagagagaacctgtatttccagggaggaggaggcagcggatacatccctgaggcaccaagggacggacaggcctacgtgcgcaaggatggcgagtgggtgctgctgtccacctttctgggccatcatcaccaccaccaccaccactga

SEQ ID NO: 1620 - DNA, 3846 bp, Artificial Sequence
  Description of Artificial Sequence: Synthetic polynucleotide
atgggcatcctgccaagcccaggaatgcccgccctgctgtctctggtgagcctgctgtccgtgctgctgatgggatgcgtggcagagacaggcacacagtgcgtgaacctgaccacaaggacccagctgccccctgcctataccaattctttcacacggggcgtgtactatcccgacaaggtgtttagaagcgatgtgctgcactccacacaggatctgtttctgcctttcttttctaacgtgacctggttccacgccatccacgtgtccggcaccaatggcacaaagcggttcgacaatcccgtgctgccttttaacgatggcgtgtacttcgccagcaccgagaagtccaacatcatcagaggctggatctttggcaccacactggactctaagacacagagcctgctgatcgtgaacaatgccaccaacgtggtgatcaaggtgtgcgagttccagttttgtgaaaatccattcctgggcgtgtactatcacaagaacaataagtcctggatggagaaagagtttcgcgtgtattctagcgccaacaattgcacatttgagtacgtgagccagcccttcctgatggacctgggaggcaagcagggcaatttcaagtggctgagggagttcgtgtttaagaatatcgatggctacttcaagatctacagcaagcacaccccaatcaacctggtgcgcgacctgccacagggattctccgccctggagccactgatggatctgcccatcggcatcaacatcacccggtttcagacactgctggccctgcacagatcctacctgacaccaggcgactcctctagcggatggaccgcaggagctgccgcctactatgtgggctatctgcagccccggaccttcctgctgaagtacaacgagaatggcaccatcacagacgcagtggattgcgcctatgaccccctgtctgagacaaagtgtacactgaagagctttaccgtggagaagggcatctatcagacaagcaatttcagggtgcagcctaccgagtccatcgtgcgctttcccaatatcacaaacctgtgcccttttggcgaggtgttcaacgccaccagattcgccagcgtgtacgcctggaatcggaagagaatctccaactgcgtggccgactattctgtgctgtacaactccgcctctttcagcacctttaagtgctatggcgtgtctcccacaaagctgaatgatctgtgctttaccaacgtgtacgccgatagcttcgtgatcaggggagacgaagtgagacagatcgcaccaggacagacaggaaagatcgcagactacaattataagctgcctgacgatttcaccggctgcgtgatcgcctggaactccaacaatctggattctaaagtgggcggcaactacaattatctgtacaggctgtttcgcaagtccaatctgaagccattcgagcgggacatctccacagagatctaccaggccggctctaccccctgcaatggcgtggagggctttaactgttatttccctctgcagtcttacggcttccagccaacaaacggcgtgggctatcagccctacagagtggtggtgctgtcctttgagctgctgcacgcaccagcaacagtgtgcggcccaaagaagtctaccaatctggtgaagaacaagtgcgtgaacttcaacttcaacggactgaccggcacaggcgtgctgaccgagagcaataagaagttcctgccttttcagcagttcggcagggacatcgcagataacacagacgccgtgcgcgaccctcagaccctggagatcctggacatcacaccatgcagcttcggcggcgtgtccgtgatcacaccaggcaccaatacatccaaccaggtggccgtgctgtatcaggacgtgaattgtaccgaggtgcccaatgcaatccacgcagatcagctgacccctacatggcgggtgtactctaccggcagcaacgtgttccagacaagagccggatgcctgatcggagcagagcacgtgaacaatagctatgagtgcgacatccctatcggcgccggcatctgtgccagctaccagacccagacaaactccccatctggagcaggctccgtggccagccagtccatcatcgcctataccatgagcctgggcgccgagaacagcgtggcctactccaacaattctatcgccatccctaccaacttcacaatcagcgtgaccacagagatcctgccagtgtctatgaccaagacaagcgtggactgcacaatgtatatctgtggcgatagcaccgagtgctccaacctgctgctgcagtacggctccttttgtacccagctgaatagagccctgcaaggcatcgcccgagagcaggataagaacacacaggaggtgttcgcccaggtgaagcagatctacaagaccccacccatcaaggactttggcggcttcaacttcagccagatcctgcctgatccaagcaagccctccaagaggtcttttatcgaggacctgctgttcaacaaggtgaccctggccgatgccggcttcatcaagcagtatggagattgcctgggagacatcgcagcccgcgacctgatctgtgcccagaagtttaatggcctgaccgtgctgcctccactgctgacagatgagatgatcgcccagtacacatctgccctgctggccggcaccatcacaagcggatggaccttcggcgcaggagccgccctgcagatcccttttgccatgcagatggcctataggttcaacggcatcggcgtgacccagaatgtgctgtacgagaaccagaagctgatcgccaatcagtttaacaaagccatcggcaagatccaggactctctgtcctctacagccagcgccctgggcaagctgcaggatgtggtgaatcagaacgcccaggccctgaataccctggtgaagcagctgagctccaacttcggcgccatctctagcgtgctgaatgacatcctgagccggctggacccccctgaggcagaggtgcagatcgacaggctgatcacaggccgcctgcagagcctgcagacctacgtgacacagcagctgatcagggcagcagagatcagagcctccgccaatctggccgccaccaagatgagcgagtgcgtgctgggacagtccaagagggtggacttttgtggcaagggctatcacctgatgtctttcccacagagcgcccctcacggcgtggtgtttctgcacgtgacctacgtgccagcccaggagaagaacttcaccacagcaccagccatctgccacgatggaaaggcattttttcctagggagggcgtgttcgtgtctaacggcacccaatggtttgtgacacagcgcaatttctacgagccacagatcatcaccacagacaatacattcgtgagcggcaactgtgatgtggtgatcggcatcgtgaacaataccgtgtatgatccactgcagcccgagctggactcctttaaggaggagctggataagtacttcaagaatcacacctctcccgacgtggatctgggcgacatctccggcatcaatgcctctgtggtgaacatccagaaggagatcgaccggctgaacgaggtggccaagaatctgaacgagagcctgatcgatctgcaggagctgggcaagtatgagcagtacatcaagggctctggcagagagaacctgtatttccagggaggaggaggcagcggatacatccctgaggcaccaagggacggacaggcctacgtgcgcaaggatggcgagtgggtgctgctgtccacctttctgggccatcatcaccaccaccaccaccactga

SEQ ID NO: 1621 - DNA, 3846 bp, Artificial Sequence
  Description of Artificial Sequence: Synthetic polynucleotide
atgggcatcctgccaagcccaggaatgcccgccctgctgtctctggtgagcctgctgtccgtgctgctgatgggatgcgtggcagagacaggcacacagtgcgtgaacctgaccacaaggacccagctgccccctgcctataccaattctttcacacggggcgtgtactatcccgacaaggtgtttagaagctccgtgctgcactccacacaggatctgtttctgcctttcttttctaacgtgacctggttccacgccatccacgtgtccggcaccaatggcacaaagcggttcgacaatcccgtgctgccttttaacgatggcgtgtacttcgccagcaccgagaagtccaacatcatcagaggctggatctttggcaccacactggactctaagacacagagcctgctgatcgtgaacaatgccaccaacgtggtgatcaaggtgtgcgagttcaatttttgtaatgatccattcctgggcgtgtactatcacaagaacaataagtcctggatggagtctgagtttcgcgtgtattctagcgccaacaattgcacatttgagtacgtgagccagcccttcctgatggacctggagggcaagcagggcaatttcaagaacctgagggagttcgtgtttaagaatatcgatggctacttcaagatctacagcaagcacaccccaatcaacctggtgcgcgacctgccacagggattctccgccctggagccactggtggatctgcccatcggcatcaacatcacccggtttcagacactgctggccctgcacagatcctacctgacaccaggcgactcctctagcggatggaccgcaggagctgccgcctactatgtgggctatctgcagccccggaccttcctgctgaagtacaacgagaatggcaccatcacagacgcagtggattgcgccctggaccccctgtctgagacaaagtgtacactgaagagctttaccgtggagaagggcatctatcagacaagcaatttcagggtgcagcctaccgagtccatcgtgcgctttcccaatatcacaaacctgtgcccttttggcgaggtgttcaacgccaccagattcgccagcgtgtacgcctggaatcggaagagaatctccaactgcgtggccgactattctgtgctgtacaactccgcctctttcagcacctttaagtgctatggcgtgtctcccacaaagctgaatgatctgtgctttaccaacgtgtacgccgatagcttcgtgatcaggggagacgaagtgagacagatcgcaccaggacagacaggaaagatcgcagactacaattataagctgcctgacgatttcaccggctgcgtgatcgcctggaactccaacaatctggattctaaagtgggcggcaactacaattatctgtacaggctgtttcgcaagtccaatctgaagccattcgagcgggacatctccacagagatctaccaggccggctctaccccctgcaatggcgtggagggctttaactgttatttccctctgcagtcttacggcttccagccaacaaacggcgtgggctatcagccctacagagtggtggtgctgtcctttgagctgctgcacgcaccagcaacagtgtgcggcccaaagaagtctaccaatctggtgaagaacaagtgcgtgaacttcaacttcaacggactgaccggcacaggcgtgctgaccgagagcaataagaagttcctgccttttcagcagttcggcagggacatcgcagataccacagacgccgtgcgcgaccctcagaccctggagatcctggacatcacaccatgcagcttcggcggcgtgtccgtgatcacaccaggcaccaatacatccaaccaggtggccgtgctgtatcaggacgtgaattgtaccgaggtgcccgtggcaatccacgcagatcagctgacccctacatggcgggtgtactctaccggcagcaacgtgttccagacaagagccggatgcctgatcggagcagagcacgtgaacaatagctatgagtgcgacatccctatcggcgccggcatctgtgccagctaccagacccagacaaactccccatctggagcaggctccgtggccagccagtccatcatcgcctataccatgagcctgggcgccgagaacagcgtggcctactccaacaattctatcgccatccctaccaacttcacaatcagcgtgaccacagagatcctgccagtgtctatgaccaagacaagcgtggactgcacaatgtatatctgtggcgatagcaccgagtgctccaacctgctgctgcagtacggctccttttgtacccagctgaatagagccctgacaggcatcgccgtggagcaggataagaacacacaggaggtgttcgcccaggtgaagcagatctacaagaccccacccatcaaggactttggcggcttcaacttcagccagatcctgcctgatccaagcaagccctccaagaggtcttttatcgaggacctgctgttcaacaaggtgaccctggccgatgccggcttcatcaagcagtatggagattgcctgggagacatcgcagcccgcgacctgatctgtgcccagaagtttaatggcctgaccgtgctgcctccactgctgacagatgagatgatcgcccagtacacatctgccctgctggccggcaccatcacaagcggatggaccttcggcgcaggagccgccctgcagatcccttttgccatgcagatggcctataggttcaacggcatcggcgtgacccagaatgtgctgtacgagaaccagaagctgatcgccaatcagtttaacagcgccatcggcaagatccaggactctctgtcctctacagccagcgccctgggcaagctgcaggatgtggtgaatcagaacgcccaggccctgaataccctggtgaagcagctgagctccaacttcggcgccatctctagcgtgctgaatgacatcctgagccggctggacccccctgaggcagaggtgcagatcgacaggctgatcacaggccgcctgcagagcctgcagacctacgtgacacagcagctgatcagggcagcagagatcagagcctccgccaatctggccgccaccaagatgagcgagtgcgtgctgggacagtccaagagggtggacttttgtggcaagggctatcacctgatgtctttcccacagagcgcccctcacggcgtggtgtttctgcacgtgacctacgtgccagcccaggagaagaacttcaccacagcaccagccatctgccacgatggaaaggcacactttcctagggagggcgtgttcgtgtctaacggcacccactggtttgtgacacagcgcaatttctacgagccacagatcatcaccacagacaatacattcgtgagcggcaactgtgatgtggtgatcggcatcgtgaacaataccgtgtatgatccactgcagcccgagctggactcctttaaggaggagctggataagtacttcaagaatcacacctctcccgacgtggatctgggcgacatctccggcatcaatgcctctgtggtgaacatccagaaggagatcgaccggctgaacgaggtggccaagaatctgaacgagagcctgatcgatctgcaggagctgggcaagtatgagcagtacatcaagggctctggcagagagaacctgtatttccagggaggaggaggcagcggatacatccctgaggcaccaagggacggacaggcctacgtgcgcaaggatggcgagtgggtgctgctgtccacctttctgggccatcatcaccaccaccaccaccactga

SEQ ID NO: 1622 - DNA, 3846 bp, Artificial Sequence
  Description of Artificial Sequence: Synthetic polynucleotide
atgggcatcctgccaagcccaggaatgcccgccctgctgtctctggtgagcctgctgtccgtgctgctgatgggatgcgtggcagagacaggcacacagtgcgtgaacctgaccacaaggacccagctgccccctgcctataccaattctttcacacggggcgtgtactatcccgacaaggtgtttagaagctccgtgctgcactccacacaggatctgtttctgcctttcttttctaacgtgacctggttccacgccatccacgtgtccggcaccaatggcacaaagcggttcgacaatcccgtgctgccttttaacgatggcgtgtacttcgccagcaccgagaagtccaacatcatcagaggctggatctttggcaccacactggactctaagacacagagcctgctgatcgtgaacaatgccaccaacgtggtgatcaaggtgtgcgagttccagttttgtaatgatccattcctgggcgtgtactatcacaagaacaataagtcctggatggagtctgagtttcgcgtgtattctagcgccaacaattgcacatttgagtacgtgagccagcccttcctgatggacctggagggcaagcagggcaatttcaagaacctgagggagttcgtgtttaagaatatcgatggctacttcaagatctacagcaagcacaccccaatcaacctggtgcgcgacctgccacagggattctccgccctggagccactggtggatctgcccatcggcatcaacatcacccggtttcagacactgctggccctgcacagatcctacctgacaccaggcgactcctctagcggatggaccgcaggagctgccgcctactatgtgggctatctgcagccccggaccttcctgctgaagtacaacgagaatggcaccatcacagacgcagtggattgcgccctggaccccctgtctgagacaaagtgtacactgaagagctttaccgtggagaagggcatctatcagacaagcaatttcagggtgcagcctaccgagtccatcgtgcgctttcccaatatcacaaacctgtgcccttttggcgaggtgttcaacgccaccagattcgccagcgtgtacgcctggaatcggaagagaatctccaactgcgtggccgactattctgtgctgtacaactccgcctctttcagcacctttaagtgctatggcgtgtctcccacaaagctgaatgatctgtgctttaccaacgtgtacgccgatagcttcgtgatcaggggagacgaagtgagacagatcgcaccaggacagacaggaaagatcgcagactacaattataagctgcctgacgatttcaccggctgcgtgatcgcctggaactccaacaatctggattctaaagtgggcggcaactacaattatctgtacaggctgtttcgcaagtccaatctgaagccattcgagcgggacatctccacagagatctaccaggccggctctaccccctgcaatggcgtggagggctttaactgttatttccctctgcagtcttacggcttccagccaacaaacggcgtgggctatcagccctacagagtggtggtgctgtcctttgagctgctgcacgcaccagcaacagtgtgcggcccaaagaagtctaccaatctggtgaagaacaagtgcgtgaacttcaacttcaacggactgaccggcacaggcgtgctgaccgagagcaataagaagttcctgccttttcagcagttcggcagggacatcgcagataccacagacgccgtgcgcgaccctcagaccctggagatcctggacatcacaccatgcagcttcggcggcgtgtccgtgatcacaccaggcaccaatacatccaaccaggtggccgtgctgtatcaggacgtgaattgtaccgaggtgcccgtggcaatccacgcagatcagctgacccctacatggcgggtgtactctaccggcagcaacgtgttccagacaagagccggatgcctgatcggagcagagcacgtgaacaatagctatgagtgcgacatccctatcggcgccggcatctgtgccagctaccagacccagacaaactccccatctggagcaggctccgtggccagccagtccatcatcgcctataccatgagcctgggcgccgagaacagcgtggcctactccaacaattctatcgccatccctaccaacttcacaatcagcgtgaccacagagatcctgccagtgtctatgaccaagacaagcgtggactgcacaatgtatatctgtggcgatagcaccgagtgctccaacctgctgctgcagtacggctccttttgtacccagctgaatagagccctgacaggcatcgccgtggagcaggataagaacacacaggaggtgttcgcccaggtgaagcagatctacaagaccccacccatcaaggactttggcggcttcaacttcagccagatcctgcctgatccaagcaagccctccaagaggtcttttatcgaggacctgctgttcaacaaggtgaccctggccgatgccggcttcatcaagcagtatggagattgcctgggagacatcgcagcccgcgacctgatctgtgcccagaagtacaatggcctgaccgtgctgcctccactgctgacagatgagatgatcgcccagtacacatctgccctgctggccggcaccatcacaagcggatggaccttcggcgcaggagccgccctgcagatcccttttgccatgcagatggcctataggttcaacggcatcggcgtgacccagaatgtgctgtacgagaaccagaagctgatcgccaatcagtttaacagcgccatcggcaagatccaggactctctgtcctctacagccagcgccctgggcaagctgcaggatgtggtgaatcagaacgcccaggccctgaataccctggtgaagcagctgagctccaacttcggcgccatctctagcgtgctgaatgacatcctgagccggctggacccccctgaggcagaggtgcagatcgacaggctgatcacaggccgcctgcagagcctgcagacctacgtgacacagcagctgatcagggcagcagagatcagagcctccgccaatctggccgccaccaagatgagcgagtgcgtgctgggacagtccaagagggtggacttttgtggcaagggctatcacctgatgtctttcccacagagcgcccctcacggcgtggtgtttctgcacgtgacctacgtgccagcccaggagaagaacttcaccacagcaccagccatctgccacgatggaaaggcacactttcctagggagggcgtgttcgtgtctaacggcacccactggtttgtgacacagcgcaatttctacgagccacagatcatcaccacagacaatacattcgtgagcggcaactgtgatgtggtgatcggcatcgtgaacaataccgtgtatgatccactgcagcccgagctggactcctttaaggaggagctggataagtacttcaagaatcacacctctcccgacgtggatctgggcgacatctccggcatcaatgcctctgtggtgaacatccagaaggagatcgaccggctgaacgaggtggccaagaatctgaacgagagcctgatcgatctgcaggagctgggcaagtatgagcagtacatcaagggctctggcagagagaacctgtatttccagggaggaggaggcagcggatacatccctgaggcaccaagggacggacaggcctacgtgcgcaaggatggcgagtgggtgctgctgtccacctttctgggccatcatcaccaccaccaccaccactga

SEQ ID NO: 1623 - DNA, 3846 bp, Artificial Sequence
  Description of Artificial Sequence: Synthetic polynucleotide
atgggcatcctgccaagcccaggaatgcccgccctgctgtctctggtgagcctgctgtccgtgctgctgatgggatgcgtggcagagacaggcacacagtgcgtgaacctgaccacaaggacccagctgccccctgcctataccaattctttcacacggggcgtgtactatcccgacaaggtgtttagaagctccgtgctgcactccacacaggatctgtttctgcctttcttttctaacgtgacctggttccacgccatccacgtgtccggcaccaatggcacaaagcggttcgacaatcccgtgctgccttttaacgatggcgtgtacttcgccagcaccgagaagtccaacatcatcagaggctggatctttggcaccacactggactctaagacacagagcctgctgatcgtgaacaatgccaccaacgtggtgatcaaggtgtgcgagttccagttttgtaatgatccattcctgggcgtgtactatcacaagaacaataagtcctggatggagtctgagtttcgcgtgtattctagcgccaacaattgcacatttgagtacgtgagccagcccttcctgatggacctggagggcaagcagggcaatttcaagaacctgagggagttcgtgtttaagaatatcgatggctacttcaagatctacagcaagcacaccccaatcaacctggtgcgcgacctgccacagggattctccgccctggagccactggtggatctgcccatcggcatcaacatcacccggtttcagacactgctggccctgcacagatcctacctgacaccaggcgactcctctagcggatggaccgcaggagctgccgcctactatgtgggctatctgcagccccggaccttcctgctgaagtacaacgagaatggcaccatcacagacgcagtggattgcgccctggaccccctgtctgagacaaagtgtacactgaagagctttaccgtggagaagggcatctatcagacaagcaatttcagggtgcagcctaccgagtccatcgtgcgctttcccaatatcacaaacctgtgcccttttggcgaggtgttcaacgccaccagattcgccagcgtgtacgcctggaatcggaagagaatctccaactgcgtggccgactattctgtgctgtacaactccgcctctttcagcacctttaagtgctatggcgtgtctcccacaaagctgaatgatctgtgctttaccaacgtgtacgccgatagcttcgtgatcaggggagacgaagtgagacagatcgcaccaggacagacaggaaagatcgcagactacaattataagctgcctgacgatttcaccggctgcgtgatcgcctggaactccaacaatctggattctaaagtgggcggcaactacaattatctgtacaggctgtttcgcaagtccaatctgaagccattcgagcgggacatctccacagagatctaccaggccggctctaccccctgcaatggcgtggagggctttaactgttatttccctctgcagtcttacggcttccagccaacaaacggcgtgggctatcagccctacagagtggtggtgctgtcctttgagctgctgcacgcaccagcaacagtgtgcggcccaaagaagtctaccaatctggtgaagaacaagtgcgtgaacttcaacttcaacggactgaccggcacaggcgtgctgaccgagagcaataagaagttcctgccttttcagcagttcggcagggacatcgcagataccacagacgccgtgcgcgaccctcagaccctggagatcctggacatcacaccatgcagcttcggcggcgtgtccgtgatcacaccaggcaccaatacatccaaccaggtggccgtgctgtatcaggacgtgaattgtaccgaggtgcccgtggcaatccacgcagatcagctgacccctacatggcgggtgtactctaccggcagcaacgtgttccagacaagagccggatgcctgatcggagcagagcacgtgaacaatagctatgagtgcgacatccctatcggcgccggcatctgtgccagctaccagacccagacaaactccccatctggagcaggctccgtggccagccagtccatcatcgcctataccatgagcctgggcgccgagaacagcgtggcctactccaacaattctatcgccatccctaccaacttcacaatcagcgtgaccacagagatcctgccagtgtctatgaccaagacaagcgtggactgcacaatgtatatctgtggcgatagcaccgagtgctccaacctgctgctgcagtacggctccttttgtacccagctgaatagagccctgacaggcatcgccgtggagcaggataagaacacacaggaggtgttcgcccaggtgaagcagatctacaagaccccacccatcaaggactttggcggcttcaacttcagccagatcctgcctgatccaagcaagccctccaagaggtcttttatcgaggacctgctgttcaacaaggtgaccctggccgatgccggcttcatcaagcagtatggagattgcctgggagacatcgcagcccgcgacctgatctgtgcccagaagtttaatggcctgaccgtgctgcctccactgctgacagatgagatgatcgcccagtacacatctgccctgctggccggcaccatcacaagcggatggaccttcggcgcaggagccgccctgcagatcccttttgccatgcagatggcctataggttcaacggcatcggcgtgacccagaatgtgctgtacgagaaccagaagctgatcgccaatcagtttaaccaagccatcggcaagatccaggactctctgtcctctacagccagcgccctgggcaagctgcaggatgtggtgaatcagaacgcccaggccctgaataccctggtgaagcagctgagctccaacttcggcgccatctctagcgtgctgaatgacatcctgagccggctggacccccctgaggcagaggtgcagatcgacaggctgatcacaggccgcctgcagagcctgcagacctacgtgacacagcagctgatcagggcagcagagatcagagcctccgccaatctggccgccaccaagatgagcgagtgcgtgctgggacagtccaagagggtggacttttgtggcaagggctatcacctgatgtctttcccacagagcgcccctcacggcgtggtgtttctgcacgtgacctacgtgccagcccaggagaagaacttcaccacagcaccagccatctgccacgatggaaaggcacactttcctagggagggcgtgttcgtgtctaacggcacccactggtttgtgacacagcgcaatttctacgagccacagatcatcaccacagacaatacattcgtgagcggcaactgtgatgtggtgatcggcatcgtgaacaataccgtgtatgatccactgcagcccgagctggactcctttaaggaggagctggataagtacttcaagaatcacacctctcccgacgtggatctgggcgacatctccggcatcaatgcctctgtggtgaacatccagaaggagatcgaccggctgaacgaggtggccaagaatctgaacgagagcctgatcgatctgcaggagctgggcaagtatgagcagtacatcaagggctctggcagagagaacctgtatttccagggaggaggaggcagcggatacatccctgaggcaccaagggacggacaggcctacgtgcgcaaggatggcgagtgggtgctgctgtccacctttctgggccatcatcaccaccaccaccaccactga

SEQ ID NO: 1624 - DNA, 3846 bp, Artificial Sequence
  Description of Artificial Sequence: Synthetic polynucleotide
atgggcatcctgccaagcccaggaatgcccgccctgctgtctctggtgagcctgctgtccgtgctgctgatgggatgcgtggcagagacaggcacacagtgcgtgaacctgaccacaaggacccagctgccccctgcctataccaattctttcacacggggcgtgtactatcccgacaaggtgtttagaagctccgtgctgcactccacacaggatctgtttctgcctttcttttctaacgtgacctggttccacgccatccacgtgtccggcaccaatggcacaaagcggttcgacaatcccgtgctgccttttaacgatggcgtgtacttcgccagcaccgagaagtccaacatcatcagaggctggatctttggcaccacactggactctaagacacagagcctgctgatcgtgaacaatgccaccaacgtggtgatcaaggtgtgcgagttccagttttgtaatgatccattcctgggcgtgtactatcacaagaacaataagtcctggatggagtctgagtttcgcgtgtattctagcgccaacaattgcacatttgagtacgtgagccagcccttcctgatggacctggagggcaagcagggcaatttcaagaacctgagggagttcgtgtttaagaatatcgatggctacttcaagatctacagcaagcacaccccaatcaacctggtgcgcgacctgccacagggattctccgccctggagccactggtggatctgcccatcggcatcaacatcacccggtttcagacactgctggccctgcacagatcctacctgacaccaggcgactcctctagcggatggaccgcaggagctgccgcctactatgtgggctatctgcagccccggaccttcctgctgaagtacaacgagaatggcaccatcacagacgcagtggattgcgccctggaccccctgtctgagacaaagtgtacactgaagagctttaccgtggagaagggcatctatcagacaagcaatttcagggtgcagcctaccgagtccatcgtgcgctttcccaatatcacaaacctgtgcccttttggcgaggtgttcaacgccaccagattcgccagcgtgtacgcctggaatcggaagagaatctccaactgcgtggccgactattctgtgctgtacaactccgcctctttcagcacctttaagtgctatggcgtgtctcccacaaagctgaatgatctgtgctttaccaacgtgtacgccgatagcttcgtgatcaggggagacgaagtgagacagatcgcaccaggacagacaggaaagatcgcagactacaattataagctgcctgacgatttcaccggctgcgtgatcgcctggaactccaacaatctggattctaaagtgggcggcaactacaattatctgtacaggctgtttcgcaagtccaatctgaagccattcgagcgggacatctccacagagatctaccaggccggctctaccccctgcaatggcgtggagggctttaactgttatttccctctgcagtcttacggcttccagccaacaaacggcgtgggctatcagccctacagagtggtggtgctgtcctttgagctgctgcacgcaccagcaacagtgtgcggcccaaagaagtctaccaatctggtgaagaacaagtgcgtgaacttcaacttcaacggactgaccggcacaggcgtgctgaccgagagcaataagaagttcctgccttttcagcagttcggcagggacatcgcagataccacagacgccgtgcgcgaccctcagaccctggagatcctggacatcacaccatgcagcttcggcggcgtgtccgtgatcacaccaggcaccaatacatccaaccaggtggccgtgctgtatcaggacgtgaattgtaccgaggtgcccgtggcaatccacgcagatcagctgacccctacatggcgggtgtactctaccggcagcaacgtgttccagacaagagccggatgcctgatcggagcagagcacgtgaacaatagctatgagtgcgacatccctatcggcgccggcatctgtgccagctaccagacccagacaaactccccatctggagcaggctccgtggccagccagtccatcatcgcctataccatgagcctgggcgccgagaacagcgtggcctactccaacaattctatcgccatccctaccaacttcacaatcagcgtgaccacagagatcctgccagtgtctatgaccaagacaagcgtggactgcgaaatgtatatctgtggcgatagcaccgagtgctccaacctgctgctgcagtacggctccttttgtacccagctgaatagagccctgacaggcatcgccgtggagcaggataagaacacacaggaggtgttcgcccaggtgaagcagatctacaagaccccacccatcaaggactttggcggcttcaacttcagccagatcctgcctgatccaagcaagccctccaagaggtcttttatcgaggacctgctgttcaacaaggtgaccctggccgatgccggcttcatcaagcagtatggagattgcctgggagacatcgcagcccgcgacctgatctgtgcccagaagtttaatggcctgaccgtgctgcctccactgctgacagatgagatgatcgcccagtacacatctgccctgctggccggcaccatcacaagcggatggaccttcggcgcaggagccgccctgcagatcccttttgccatgcagatggcctataggttcaacggcatcggcgtgacccagaatgtgctgtacgagaaccagaagctgatcgccaatcagtttaacagcgccatcggcaagatccaggactctctgtcctctacagccagcgccctgggcaagctgcaggatgtggtgaatcagaacgcccaggccctgaataccctggtgaagcagctgagctccaacttcggcgccatctctagcgtgctgaatgacatcctgagccggctggacccccctgaggcagaggtgcagatcgacaggctgatcacaggccgcctgcagagcctgcagacctacgtgacacagcagctgatcagggcagcagagatcagagcctccgccaatctggccgccaccaagatgagcgagtgcgtgctgggacagtccaagagggtggacttttgtggcaagggctatcacctgatgtctttcccacagagcgcccctcacggcgtggtgtttctgcacgtgacctacgtgccagcccaggagaagaacttcaccacagcaccagccatctgccacgatggaaaggcacactttcctagggagggcgtgttcgtgtctaacggcacccactggtttgtgacacagcgcaatttctacgagccacagatcatcaccacagacaatacattcgtgagcggcaactgtgatgtggtgatcggcatcgtgaacaataccgtgtatgatccactgcagcccgagctggactcctttaaggaggagctggataagtacttcaagaatcacacctctcccgacgtggatctgggcgacatctccggcatcaatgcctctgtggtgaacatccagaaggagatcgaccggctgaacgaggtggccaagaatctgaacgagagcctgatcgatctgcaggagctgggcaagtatgagcagtacatcaagggctctggcagagagaacctgtatttccagggaggaggaggcagcggatacatccctgaggcaccaagggacggacaggcctacgtgcgcaaggatggcgagtgggtgctgctgtccacctttctgggccatcatcaccaccaccaccaccactga

SEQ ID NO: 1625 - DNA, 3846 bp, Artificial Sequence
  Description of Artificial Sequence: Synthetic polynucleotide
atgggcatcctgccaagcccaggaatgcccgccctgctgtctctggtgagcctgctgtccgtgctgctgatgggatgcgtggcagagacaggcacacagtgcgtgaacctgaccacaaggacccagctgccccctgcctataccaattctttcacacggggcgtgtactatcccgacaaggtgtttagaagctccgtgctgcactccacacaggatctgtttctgcctttcttttctaacgtgacctggttccacgccatccacgtgtccggcaccaatggcacaaagcggttcgacaatcccgtgctgccttttaacgatggcgtgtacttcgccagcaccgagaagtccaacatcatcagaggctggatctttggcaccacactggactctaagacacagagcctgctgatcgtgaacaatgccaccaacgtggtgatcaaggtgtgcgagttccagttttgtaatgatccattcctgggcgtgtactatcacaagaacaataagtcctggatggagtctgagtttcgcgtgtattctagcgccaacaattgcacatttgagtacgtgagccagcccttcctgatggacctggagggcaagcagggcaatttcaagaacctgagggagttcgtgtttaagaatatcgatggctacttcaagatctacagcaagcacaccccaatcaacctggtgcgcgacctgccacagggattctccgccctggagccactggtggatctgcccatcggcatcaacatcacccggtttcagacactgctggccctgcacagatcctacctgacaccaggcgactcctctagcggatggaccgcaggagctgccgcctactatgtgggctatctgcagccccggaccttcctgctgaagtacaacgagaatggcaccatcacagacgcagtggattgcgccctggaccccctgtctgagacaaagtgtacactgaagagctttaccgtggagaagggcatctatcagacaagcaatttcagggtgcagcctaccgagtccatcgtgcgctttcccaatatcacaaacctgtgcccttttggcgaggtgttcaacgccaccagattcgccagcgtgtacgcctggaatcggaagagaatctccaactgcgtggccgactattctgtgctgtacaactccgcctctttcagcacctttaagtgctatggcgtgtctcccacaaagctgaatgatctgtgctttaccaacgtgtacgccgatagcttcgtgatcaggggagacgaagtgagacagatcgcaccaggacagacaggaaagatcgcagactacaattataagctgcctgacgatttcaccggctgcgtgatcgcctggaactccaacaatctggattctaaagtgggcggcaactacaattatctgtacaggctgtttcgcaagtccaatctgaagccattcgagcgggacatctccacagagatctaccaggccggctctaccccctgcaatggcgtggagggctttaactgttatttccctctgcagtcttacggcttccagccaacaaacggcgtgggctatcagccctacagagtggtggtgctgtcctttgagctgctgcacgcaccagcaacagtgtgcggcccaaagaagtctaccaatctggtgaagaacaagtgcgtgaacttcaacttcaacggactgaccggcacaggcgtgctgaccgagagcaataagaagttcctgccttttcagcagttcggcagggacatcgcagataccacagacgccgtgcgcgaccctcagaccctggagatcctggacatcacaccatgcagcttcggcggcgtgtccgtgatcacaccaggcaccaatacatccaaccaggtggccgtgctgtatcaggacgtgaattgtaccgaggtgcccgtggcaatccacgcagatcagctgacccctacatggcgggtgtactctaccggcagcaacgtgttccagacaagagccggatgcctgatcggagcagagcacgtgaacaatagctatgagtgcgacatccctatcggcgccggcatctgtgccagctaccagacccagacaaactccccatctggagcaggctccgtggccagccagtccatcatcgcctataccatgagcctgggcgccgagaacagcgtggcctactccaacaattctatcgccatccctaccaacttcacaatcagcgtgaccacagagatcctgccagtgtctatgaccaagacaagcgtggactgcacaatgtatatctgtggcgatagcaccgagtgctccaacctgctgctgcagtacggctccttttgtacccagctgaatagagccctgacaggcatcgccgtggagcaggataagaacacacaggaggtgttcgcccaggtgaagcagatctacaagaccccacccatcaaggactttggcggcttcaacttcagccagatcctgcctgatccaagcaagccctccaagaggtcttttatcgaggacctgctgttcaacaaggtgaccctggccgatgccggcttcatcaagcagtatggagattgcctgggagacatcgcagcccgcgacctgatctgtgcccagaagtttaatggcctgaccgtgctgcctccactgctgacagatgagatgatcgccatgtacacatctgccctgctggccggcaccatcacaagcggatggaccttcggcgcaggagccgccctgcagatcccttttgccatgcagatggcctataggttcaacggcatcggcgtgacccagaatgtgctgtacgagaaccagaagctgatcgccaatcagtttaacagcgccatcggcaagatccaggactctctgtcctctacagccagcgccctgggcaagctgcaggatgtggtgaatcagaacgcccaggccctgaataccctggtgaagcagctgagctccaacttcggcgccatctctagcgtgctgaatgacatcctgagccggctggacccccctgaggcagaggtgcagatcgacaggctgatcacaggccgcctgcagagcctgcagacctacgtgacacagcagctgatcagggcagcagagatcagagcctccgccaatctggccgccaccaagatgagcgagtgcgtgctgggacagtccaagagggtggacttttgtggcaagggctatcacctgatgtctttcccacagagcgcccctcacggcgtggtgtttctgcacgtgacctacgtgccagcccaggagaagaacttcaccacagcaccagccatctgccacgatggaaaggcacactttcctagggagggcgtgttcgtgtctaacggcacccactggtttgtgacacagcgcaatttctacgagccacagatcatcaccacagacaatacattcgtgagcggcaactgtgatgtggtgatcggcatcgtgaacaataccgtgtatgatccactgcagcccgagctggactcctttaaggaggagctggataagtacttcaagaatcacacctctcccgacgtggatctgggcgacatctccggcatcaatgcctctgtggtgaacatccagaaggagatcgaccggctgaacgaggtggccaagaatctgaacgagagcctgatcgatctgcaggagctgggcaagtatgagcagtacatcaagggctctggcagagagaacctgtatttccagggaggaggaggcagcggatacatccctgaggcaccaagggacggacaggcctacgtgcgcaaggatggcgagtgggtgctgctgtccacctttctgggccatcatcaccaccaccaccaccactga

SEQ ID NO: 1626 - DNA, 3846 bp, Artificial Sequence
  Description of Artificial Sequence: Synthetic polynucleotide
atgggcatcctgccaagcccaggaatgcccgccctgctgtctctggtgagcctgctgtccgtgctgctgatgggatgcgtggcagagacaggcacacagtgcgtgaacctgaccacaaggacccagctgccccctgcctataccaattctttcacacggggcgtgtactatcccgacaaggtgtttagaagctccgtgctgcactccacacaggatctgtttctgcctttcttttctaacgtgacctggttccacgccatccacgtgtccggcaccaatggcacaaagcggttcgacaatcccgtgctgccttttaacgatggcgtgtacttcgccagcaccgagaagtccaacatcatcagaggctggatctttggcaccacactggactctaagacacagagcctgctgatcgtgaacaatgccaccaacgtggtgatcaaggtgtgcgagttccagttttgtaatgatccattcctgggcgtgtactatcacaagaacaataagtcctggatggagtctgagtttcgcgtgtattctagcgccaacaattgcacatttgagtacgtgagccagcccttcctgatggacctggagggcaagcagggcaatttcaagaacctgagggagttcgtgtttaagaatatcgatggctacttcaagatctacagcaagcacaccccaatcaacctggtgcgcgacctgccacagggattctccgccctggagccactggtggatctgcccatcggcatcaacatcacccggtttcagacactgctggccctgcacagatcctacctgacaccaggcgactcctctagcggatggaccgcaggagctgccgcctactatgtgggctatctgcagccccggaccttcctgctgaagtacaacgagaatggcaccatcacagacgcagtggattgcgccctggaccccctgtctgagacaaagtgtacactgaagagctttaccgtggagaagggcatctatcagacaagcaatttcagggtgcagcctaccgagtccatcgtgcgctttcccaatatcacaaacctgtgcccttttggcgaggtgttcaacgccaccagattcgccagcgtgtacgcctggaatcggaagagaatctccaactgcgtggccgactattctgtgctgtacaactccgcctctttcagcacctttaagtgctatggcgtgtctcccacaaagctgaatgatctgtgctttaccaacgtgtacgccgatagcttcgtgatcaggggagacgaagtgagacagatcgcaccaggacagacaggaaagatcgcagactacaattataagctgcctgacgatttcaccggctgcgtgatcgcctggaactccaacaatctggattctaaagtgggcggcaactacaattatctgtacaggctgtttcgcaagtccaatctgaagccattcgagcgggacatctccacagagatctaccaggccggctctaccccctgcaatggcgtggagggctttaactgttatttccctctgcagtcttacggcttccagccaacaaacggcgtgggctatcagccctacagagtggtggtgctgtcctttgagctgctgcacgcaccagcaacagtgtgcggcccaaagaagtctaccaatctggtgaagaacaagtgcgtgaacttcaacttcaacggactgaccggcacaggcgtgctgaccgagagcaataagaagttcctgccttttcagcagttcggcagggacatcgcagataccacagacgccgtgcgcgaccctcagaccctggagatcctggacatcacaccatgcagcttcggcggcgtgtccgtgatcacaccaggcaccaatacatccaaccaggtggccgtgctgtatcaggacgtgaattgtaccgaggtgcccgtggcaatccacgcagatcagctgacccctacatggcgggtgtactctaccggcagcaacgtgttccagacaagagccggatgcctgatcggagcagagcacgtgaacaatagctatgagtgcgacatccctatcggcgccggcatctgtgccagctaccagacccagacaaactccccatctggagcaggctccgtggccagccagtccatcatcgcctataccatgagcctgggcgccgagaacagcgtggcctactccaacaattctatcgccatccctaccaacttcacaatcagcgtgaccacagagatcctgccagtgtctatgaccaagacaagcgtggactgcacaatgtatatctgtggcgatagcaccgagtgctccaacctgctgctgcagtacggctccttttgtacccagctgaatagagccctgacaggcatcgccgtggagcaggataagaacacacaggaggtgttcgcccaggtgaagcagatctacaagaccccacccatcaaggactttggcggcttcaacttcagccagatcctgcctgatccaagcaagccctccaagaggtcttttatcgaggacctgctgttcaacaaggtgaccctggccgatgccggcttcatcaagcagtatggagattgcctgggagacatcgcagcccgcgacctgatctgtgcccagaagtttaatggcctgaccgtgctgcctccactgctgacagatgagatgatcgcccagtacacatctgccctgctggccggcaccatcacaagcggatggaccttcggcgcaggagccgccctgcagatcccttttgccatgcagatggcctataggttcaacggcatcggcgtgacccagaatgtgctgtacgagaaccagaagctgatcgccaatcagtttaacagcgccatcggcaagatccaggactctctgtcctctacagccagcgccctgggcaagctgcaggatgtggtgaatcagaacgcccaggccctgaataccctggtgaagcagctgagctccaacttcggcgccatctctagcgtgctgaatgacatcctgagccggctggacccccctgaggcagaggtgcagatcgacaggctgatcacaggccgcctgcagagcctgcagacctacgtgacacagcagctgatcagggcagcagagatcagagcctccgccaatctggccgccaccaagatgagcgagtgcgtgctgggacagtccaagagggtggacttttgtggcaagggctatcacctgatgtctttcccacagagcgcccctcacggcgtggtgtttctgcacgtgacctacgtgccagcccaggagaagaacttcaccacagcaccagccatctgccacgatggaaaggcacactttcctagggagggcgtgttcgtgtctaacggcacccactggtttgtgacacagcgcaatttctacgagccacagttgatcaccacagacaatacattcgtgagcggcaactgtgatgtggtgatcggcatcgtgaacaataccgtgtatgatccactgcagcccgagctggactcctttaaggaggagctggataagtacttcaagaatcacacctctcccgacgtggatctgggcgacatctccggcatcaatgcctctgtggtgaacatccagaaggagatcgaccggctgaacgaggtggccaagaatctgaacgagagcctgatcgatctgcaggagctgggcaagtatgagcagtacatcaagggctctggcagagagaacctgtatttccagggaggaggaggcagcggatacatccctgaggcaccaagggacggacaggcctacgtgcgcaaggatggcgagtgggtgctgctgtccacctttctgggccatcatcaccaccaccaccaccactga

SEQ ID NO: 1627 - DNA, 3846 bp, Artificial Sequence
  Description of Artificial Sequence: Synthetic polynucleotide
atgggcatcctgccaagcccaggaatgcccgccctgctgtctctggtgagcctgctgtccgtgctgctgatgggatgcgtggcagagacaggcacacagtgcgtgaacctgaccacaaggacccagctgccccctgcctataccaattctttcacacggggcgtgtactatcccgacaaggtgtttagaagctccgtgctgcactccacacaggatctgtttctgcctttcttttctaacgtgacctggttccacgccatccacgtgtccggcaccaatggcacaaagcggttcgacaatcccgtgctgccttttaacgatggcgtgtacttcgccagcaccgagaagtccaacatcatcagaggctggatctttggcaccacactggactctaagacacagagcctgctgatcgtgaacaatgccaccaacgtggtgatcaaggtgtgcgagttccagttttgtaatgatccattcctgggcgtgtactatcacaagaacaataagtcctggatggagtctgagtttcgcgtgtattctagcgccaacaattgcacatttgagtacgtgagccagcccttcctgatggacctggagggcaagcagggcaatttcaagaacctgagggagttcgtgtttaagaatatcgatggctacttcaagatctacagcaagcacaccccaatcaacctggtgcgcgacctgccacagggattctccgccctggagccactggtggatctgcccatcggcatcaacatcacccggtttcagacactgctggccctgcacagatcctacctgacaccaggcgactcctctagcggatggaccgcaggagctgccgcctactatgtgggctatctgcagccccggaccttcctgctgaagtacaacgagaatggcaccatcacagacgcagtggattgcgccctggaccccctgtctgagacaaagtgtacactgaagagctttaccgtggagaagggcatctatcagacaagcaatttcagggtgcagcctaccgagtccatcgtgcgctttcccaatatcacaaacctgtgcccttttggcgaggtgttcaacgccaccagattcgccagcgtgtacgcctggaatcggaagagaatctccaactgcgtggccgactattctgtgctgtacaactccgcctctttcagcacctttaagtgctatggcgtgtctcccacaaagctgaatgatctgtgctttaccaacgtgtacgccgatagcttcgtgatcaggggagacgaagtgagacagatcgcaccaggacagacaggaaagatcgcagactacaattataagctgcctgacgatttcaccggctgcgtgatcgcctggaactccaacaatctggattctaaagtgggcggcaactacaattatctgtacaggctgtttcgcaagtccaatctgaagccattcgagcgggacatctccacagagatctaccaggccggctctaccccctgcaatggcgtggagggctttaactgttatttccctctgcagtcttacggcttccagccaacaaacggcgtgggctatcagccctacagagtggtggtgctgtcctttgagctgctgcacgcaccagcaacagtgtgcggcccaaagaagtctaccaatctggtgaagaacaagtgcgtgaacttcaacttcaacggactgaccggcacaggcgtgctgaccgagagcaataagaagttcctgccttttcagcagttcggcagggacatcgcagataccacagacgccgtgcgcgaccctcagaccggggagatcctggacatcacaccatgcagcttcggcggcgtgtccgtgatcacaccaggcaccaatacatccaaccaggtggccgtgctgtatcaggacgtgaattgtaccgaggtgcccgtggcaatccacgcagatcagctgacccctacatggcgggtgtactctaccggcagcaacgtgttccagacaagagccggatgcctgatcggagcagagcacgtgaacaatagctatgagtgcgacatccctatcggcgccggcatctgtgccagctaccagacccagacaaactccccatctggagcaggctccgtggccagccagtccatcatcgcctataccatgagcctgggcgccgagaacagcgtggcctactccaacaattctatcgccatccctaccaacttcacaatcagcgtgaccacagagatcctgccagtgtctatgaccaagacaagcgtggactgcacaatgtatatctgtggcgatagcaccgagtgctccaacctgctgctgcagtacggctccttttgtacccagctgaatagagccctgacaggcatcgccgtggagcaggataagaacacacaggaggtgttcgcccaggtgaagcagatctacaagaccccacccatcaaggactttggcggcttcaacttcagccagatcctgcctgatccaagcaagccctccaagaggtcttttatcgaggacctgctgttcaacaaggtgaccctggccgatgccggcttcatcaagcagtatggagattgcctgggagacatcgcagcccgcgacctgatctgtgcccagaagtttaatggcctgaccgtgctgcctccactgctgacagatgagatgatcgcccagtacacatctgccctgctggccggcaccatcacaagcggatggaccttcggcgcaggagccgccctgcagatcccttttgccatgcagatggcctataggttcaacggcatcggcgtgacccagaatgtgctgtacgagaaccagaagctgatcgccaatcagtttaacagcgccatcggcaagatccaggactctctgtcctctacagccagcgccctgggcaagctgcaggatgtggtgaatcagaacgcccaggccctgaataccctggtgaagcagctgagctccaacttcggcgccatctctagcgtgctgaatgacatcctgagccggctggacccccctgaggcagaggtgcagatcgacaggctgatcacaggccgcctgcagagcctgcagacctacgtgacacagcagctgatcagggcagcagagatcagagcctccgccaatctggccgccaccaagatgagcgagtgcgtgctgggacagtccaagagggtggacttttgtggcaagggctatcacctgatgtctttcccacagagcgcccctcacggcgtggtgtttctgcacgtgacctacgtgccagcccaggagaagaacttcaccacagcaccagccatctgccacgatggaaaggcacactttcctagggagggcgtgttcgtgtctaacggcacccactggtttgtgacacagcgcaatttctacgagccacagatcatcaccacagacaatacattcgtgagcggcaactgtgatgtggtgatcggcatcgtgaacaataccgtgtatgatccactgcagcccgagctggactcctttaaggaggagctggataagtacttcaagaatcacacctctcccgacgtggatctgggcgacatctccggcatcaatgcctctgtggtgaacatccagaaggagatcgaccggctgaacgaggtggccaagaatctgaacgagagcctgatcgatctgcaggagctgggcaagtatgagcagtacatcaagggctctggcagagagaacctgtatttccagggaggaggaggcagcggatacatccctgaggcaccaagggacggacaggcctacgtgcgcaaggatggcgagtgggtgctgctgtccacctttctgggccatcatcaccaccaccaccaccactga

SEQ ID NO: 1628 - DNA, 3846 bp, Artificial Sequence
  Description of Artificial Sequence: Synthetic polynucleotide
atgggcatcctgccaagcccaggaatgcccgccctgctgtctctggtgagcctgctgtccgtgctgctgatgggatgcgtggcagagacaggcacacagtgcgtgaacctgaccacaaggacccagctgccccctgcctataccaattctttcacacggggcgtgtactatcccgacaaggtgtttagaagctccgtgctgcactccacacaggatctgtttctgcctttcttttctaacgtgacctggttccacgccatccacgtgtccggcaccaatggcacaaagcggttcgacaatcccgtgctgccttttaacgatggcgtgtacttcgccagcaccgagaagtccaacatcatcagaggctggatctttggcaccacactggactctactacacagagcctgctgatcgtgaacaatgccaccaacgtggtgatcaaggtgtgcgagttccagttttgtaatgatccattcctgggcgtgtactatcacaagaacaataagtcctggatggagtctgagtttcgcgtgtattctagcgccaacaattgcacatttgagtacgtgagccagcccttcctgatggacctggagggcaagcagggcaatttcaagaacctgagggagttcgtgtttaagaatatcgatggctacttcaagatctacagcaagcacaccccaatcaacctggtgcgcgacctgccacagggattctccgccctggagccactggtggatctgcccatcggcatcaacatcacccggtttcagacactgctggccctgcacagatcctacctgacaccaggcgactcctctagcggatggaccgcaggagctgccgcctactatgtgggctatctgcagccccggaccttcctgctgaagtacaacgagaatggcaccatcacagacgcagtggattgcgccctggaccccctgtctgagacaaagtgtacactgaagagctttaccgtggagaagggcatctatcagacaagcaatttcagggtgcagcctaccgagtccatcgtgcgctttcccaatatcacaaacctgtgcccttttggcgaggtgttcaacgccaccagattcgccagcgtgtacgcctggaatcggaagagaatctccaactgcgtggccgactattctgtgctgtacaactccgcctctttcagcacctttaagtgctatggcgtgtctcccacaaagctgaatgatctgtgctttaccaacgtgtacgccgatagcttcgtgatcaggggagacgaagtgagacagatcgcaccaggacagacaggaaagatcgcagactacaattataagctgcctgacgatttcaccggctgcgtgatcgcctggaactccaacaatctggattctaaagtgggcggcaactacaattatctgtacaggctgtttcgcaagtccaatctgaagccattcgagcgggacatctccacagagatctaccaggccggctctaccccctgcaatggcgtggagggctttaactgttatttccctctgcagtcttacggcttccagccaacaaacggcgtgggctatcagccctacagagtggtggtgctgtcctttgagctgctgcacgcaccagcaacagtgtgcggcccaaagaagtctaccaatctggtgaagaacaagtgcgtgaacttcaacttcaacggactgaccggcacaggcgtgctgaccgagagcaataagaagttcctgccttttcagcagttcggcagggacatcgcagataccacagacgccgtgcgcgaccctcagaccctggagatcctggacatcacaccatgcagcttcggcggcgtgtccgtgatcacaccaggcaccaatacatccaaccaggtggccgtgctgtatcaggacgtgaattgtaccgaggtgcccgtggcaatccacgcagatcagctgacccctacatggcgggtgtactctaccggcagcaacgtgttccagacaagagccggatgcctgatcggagcagagcacgtgaacaatagctatgagtgcgacatccctatcggcgccggcatctgtgccagctaccagacccagacaaactccccatctggagcaggctccgtggccagccagtccatcatcgcctataccatgagcctgggcgccgagaacagcgtggcctactccaacaattctatcgccatccctaccaacttcacaatcagcgtgaccacagagatcctgccagtgtctatgaccaagacaagcgtggactgcacaatgtatatctgtggcgatagcaccgagtgctccaacctgctgctgcagtacggctccttttgtacccagctgaatagagccctgacaggcatcgccgtggagcaggataagaacacacaggaggtgttcgcccaggtgaagcagatctacaagaccccacccatcaaggactttggcggcttcaacttcagccagatcctgcctgatccaagcaagccctccaagaggtcttttatcgaggacctgctgttcaacaaggtgaccctggccgatgccggcttcatcaagcagtatggagattgcctgggagacatcgcagcccgcgacctgatctgtgcccagaagtttaatggcctgaccgtgctgcctccactgctgacagatgagatgatcgcccagtacacatctgccctgctggccggcaccatcacaagcggatggaccttcggcgcaggagccgccctgcagatcccttttgccatgcagatggcctataggttcaacggcatcggcgtgacccagaatgtgctgtacgagaaccagaagctgatcgccaatcagtttaacagcgccatcggcaagatccaggactctctgtcctctacagccagcgccctgggcaagctgcaggatgtggtgaatcagaacgcccaggccctgaataccctggtgaagcagctgagctccaacttcggcgccatctctagcgtgctgaatgacatcctgagccggctggacccccctgaggcagaggtgcagatcgacaggctgatcacaggccgcctgcagagcctgcagacctacgtgacacagcagctgatcagggcagcagagatcagagcctccgccaatctggccgccaccaagatgagcgagtgcgtgctgggacagtccaagagggtggacttttgtggcaagggctatcacctgatgtctttcccacagagcgcccctcacggcgtggtgtttctgcacgtgacctacgtgccagcccaggagaagaacttcaccacagcaccagccatctgccacgatggaaaggcacactttcctagggagggcgtgttcgtgtctaacggcacccactggtttgtgacacagcgcaatttctacgagccacagatcatcaccacagacaatacattcgtgagcggcaactgtgatgtggtgatcggcatcgtgaacaataccgtgtatgatccactgcagcccgagctggactcctttaaggaggagctggataagtacttcaagaatcacacctctcccgacgtggatctgggcgacatctccggcatcaatgcctctgtggtgaacatccagaaggagatcgaccggctgaacgaggtggccaagaatctgaacgagagcctgatcgatctgcaggagctgggcaagtatgagcagtacatcaagggctctggcagagagaacctgtatttccagggaggaggaggcagcggatacatccctgaggcaccaagggacggacaggcctacgtgcgcaaggatggcgagtgggtgctgctgtccacctttctgggccatcatcaccaccaccaccaccactga

SEQ ID NO: 1629 - DNA, 3846 bp, Artificial Sequence
  Description of Artificial Sequence: Synthetic polynucleotide
atgggcatcctgccaagcccaggaatgcccgccctgctgtctctggtgagcctgctgtccgtgctgctgatgggatgcgtggcagagacaggcacacagtgcgtgaacctgaccacaaggacccagctgccccctgcctataccaattctttcacacggggcgtgtactatcccgacaaggtgtttagaagctccgtgctgcactccacacaggatctgtttctgcctttcttttctaacgtgacctggttccacgccatccacgtgtccggcaccaatggcacaaaggcgttcgacaatcccgtgctgccttttaacgatggcgtgtacttcgccagcaccgagaagtccaacatcatcagaggctggatctttggcaccacactggactctaagacacagagcctgctgatcgtgaacaatgccaccaacgtggtgatcaaggtgtgcgagttccagttttgtaatgatccattcctgggcgtgtactatcacaagaacaataagtcctggatggagtctgagtttcgcgtgtattctagcgccaacaattgcacatttgagtacgtgagccagcccttcctgatggacctggagggcaagcagggcaatttcaagaacctgagggagttcgtgtttaagaatatcgatggctacttcaagatctacagcaagcacaccccaatcaacctggtgcgcgacctgccacagggattctccgccctggagccactggtggatctgcccatcggcatcaacatcacccggtttcagacactgctggccctgcacagatcctacctgacaccaggcgactcctctagcggatggaccgcaggagctgccgcctactatgtgggctatctgcagccccggaccttcctgctgaagtacaacgagaatggcaccatcacagacgcagtggattgcgccctggaccccctgtctgagacaaagtgtacactgaagagctttaccgtggagaagggcatctatcagacaagcaatttcagggtgcagcctaccgagtccatcgtgcgctttcccaatatcacaaacctgtgcccttttggcgaggtgttcaacgccaccagattcgccagcgtgtacgcctggaatcggaagagaatctccaactgcgtggccgactattctgtgctgtacaactccgcctctttcagcacctttaagtgctatggcgtgtctcccacaaagctgaatgatctgtgctttaccaacgtgtacgccgatagcttcgtgatcaggggagacgaagtgagacagatcgcaccaggacagacaggaaagatcgcagactacaattataagctgcctgacgatttcaccggctgcgtgatcgcctggaactccaacaatctggattctaaagtgggcggcaactacaattatctgtacaggctgtttcgcaagtccaatctgaagccattcgagcgggacatctccacagagatctaccaggccggctctaccccctgcaatggcgtggagggctttaactgttatttccctctgcagtcttacggcttccagccaacaaacggcgtgggctatcagccctacagagtggtggtgctgtcctttgagctgctgcacgcaccagcaacagtgtgcggcccaaagaagtctaccaatctggtgaagaacaagtgcgtgaacttcaacttcaacggactgaccggcacaggcgtgctgaccgagagcaataagaagttcctgccttttcagcagttcggcagggacatcgcagataccacagacgccgtgcgcgaccctcagaccctggagatcctggacatcacaccatgcagcttcggcggcgtgtccgtgatcacaccaggcaccaatacatccaaccaggtggccgtgctgtatcaggacgtgaattgtaccgaggtgcccgtggcaatccacgcagatcagctgacccctacatggcgggtgtactctaccggcagcaacgtgttccagacaagagccggatgcctgatcggagcagagcacgtgaacaatagctatgagtgcgacatccctatcggcgccggcatctgtgccagctaccagacccagacaaactccccatctggagcaggctccgtggccagccagtccatcatcgcctataccatgagcctgggcgccgagaacagcgtggcctactccaacaattctatcgccatccctaccaacttcacaatcagcgtgaccacagagatcctgccagtgtctatgaccaagacaagcgtggactgcacaatgtatatctgtggcgatagcaccgagtgctccaacctgctgctgcagtacggctccttttgtacccagctgaatagagccctgacaggcatcgccgtggagcaggataagaacacacaggaggtgttcgcccaggtgaagcagatctacaagaccccacccatcaaggactttggcggcttcaacttcagccagatcctgcctgatccaagcaagccctccaagaggtcttttatcgaggacctgctgttcaacaaggtgaccctggccgatgccggcttcatcaagcagtatggagattgcctgggagacatcgcagcccgcgacctgatctgtgcccagaagtttaatggcctgaccgtgctgcctccactgctgacagatgagatgatcgcccagtacacatctgccctgctggccggcaccatcacaagcggatggaccttcggcgcaggagccgccctgcagatcccttttgccatgcagatggcctataggttcaacggcatcggcgtgacccagaatgtgctgtacgagaaccagaagctgatcgccaatcagtttaacagcgccatcggcaagatccaggactctctgtcctctacagccagcgccctgggcaagctgcaggatgtggtgaatcagaacgcccaggccctgaataccctggtgaagcagctgagctccaacttcggcgccatctctagcgtgctgaatgacatcctgagccggctggacccccctgaggcagaggtgcagatcgacaggctgatcacaggccgcctgcagagcctgcagacctacgtgacacagcagctgatcagggcagcagagatcagagcctccgccaatctggccgccaccaagatgagcgagtgcgtgctgggacagtccaagagggtggacttttgtggcaagggctatcacctgatgtctttcccacagagcgcccctcacggcgtggtgtttctgcacgtgacctacgtgccagcccaggagaagaacttcaccacagcaccagccatctgccacgatggaaaggcacactttcctagggagggcgtgttcgtgtctaacggcacccactggtttgtgacacagcgcaatttctacgagccacagatcatcaccacagacaatacattcgtgagcggcaactgtgatgtggtgatcggcatcgtgaacaataccgtgtatgatccactgcagcccgagctggactcctttaaggaggagctggataagtacttcaagaatcacacctctcccgacgtggatctgggcgacatctccggcatcaatgcctctgtggtgaacatccagaaggagatcgaccggctgaacgaggtggccaagaatctgaacgagagcctgatcgatctgcaggagctgggcaagtatgagcagtacatcaagggctctggcagagagaacctgtatttccagggaggaggaggcagcggatacatccctgaggcaccaagggacggacaggcctacgtgcgcaaggatggcgagtgggtgctgctgtccacctttctgggccatcatcaccaccaccaccaccactga

SEQ ID NO: 1630 - DNA, 3846 bp, Artificial Sequence
  Description of Artificial Sequence: Synthetic polynucleotide
atgggcatcctgccaagcccaggaatgcccgccctgctgtctctggtgagcctgctgtccgtgctgctgatgggatgcgtggcagagacaggcacacagtgcgtgaacctgaccacaaggacccagctgccccctgcctataccaattctttcacacggggcgtgtactatcccgacaaggtgtttagaagctccgtgctgcactccacacaggatctgtttctgcctttcttttctaacgtgacctggttccacgccatccacgtgtccggcaccaatggcacaaagcggttcgacaatcccgtgctgccttttaaagatggcgtgtacttcgccagcaccgagaagtccaacatcatcagaggctggatctttggcaccacactggactctaagacacagagcctgctgatcgtgaacaatgccaccaacgtggtgatcaaggtgtgcgagttccagttttgtaatgatccattcctgggcgtgtactatcacaagaacaataagtcctggatggagtctgagtttcgcgtgtattctagcgccaacaattgcacatttgagtacgtgagccagcccttcctgatggacctggagggcaagcagggcaatttcaagaacctgagggagttcgtgtttaagaatatcgatggctacttcaagatctacagcaagcacaccccaatcaacctggtgcgcgacctgccacagggattctccgccctggagccactggtggatctgcccatcggcatcaacatcacccggtttcagacactgctggccctgcacagatcctacctgacaccaggcgactcctctagcggatggaccgcaggagctgccgcctactatgtgggctatctgcagccccggaccttcctgctgaagtacaacgagaatggcaccatcacagacgcagtggattgcgccctggaccccctgtctgagacaaagtgtacactgaagagctttaccgtggagaagggcatctatcagacaagcaatttcagggtgcagcctaccgagtccatcgtgcgctttcccaatatcacaaacctgtgcccttttggcgaggtgttcaacgccaccagattcgccagcgtgtacgcctggaatcggaagagaatctccaactgcgtggccgactattctgtgctgtacaactccgcctctttcagcacctttaagtgctatggcgtgtctcccacaaagctgaatgatctgtgctttaccaacgtgtacgccgatagcttcgtgatcaggggagacgaagtgagacagatcgcaccaggacagacaggaaagatcgcagactacaattataagctgcctgacgatttcaccggctgcgtgatcgcctggaactccaacaatctggattctaaagtgggcggcaactacaattatctgtacaggctgtttcgcaagtccaatctgaagccattcgagcgggacatctccacagagatctaccaggccggctctaccccctgcaatggcgtggagggctttaactgttatttccctctgcagtcttacggcttccagccaacaaacggcgtgggctatcagccctacagagtggtggtgctgtcctttgagctgctgcacgcaccagcaacagtgtgcggcccaaagaagtctaccaatctggtgaagaacaagtgcgtgaacttcaacttcaacggactgaccggcacaggcgtgctgaccgagagcaataagaagttcctgccttttcagcagttcggcagggacatcgcagataccacagacgccgtgcgcgaccctcagaccctggagatcctggacatcacaccatgcagcttcggcggcgtgtccgtgatcacaccaggcaccaatacatccaaccaggtggccgtgctgtatcaggacgtgaattgtaccgaggtgcccgtggcaatccacgcagatcagctgacccctacatggcgggtgtactctaccggcagcaacgtgttccagacaagagccggatgcctgatcggagcagagcacgtgaacaatagctatgagtgcgacatccctatcggcgccggcatctgtgccagctaccagacccagacaaactccccatctggagcaggctccgtggccagccagtccatcatcgcctataccatgagcctgggcgccgagaacagcgtggcctactccaacaattctatcgccatccctaccaacttcacaatcagcgtgaccacagagatcctgccagtgtctatgaccaagacaagcgtggactgcacaatgtatatctgtggcgatagcaccgagtgctccaacctgctgctgcagtacggctccttttgtacccagctgaatagagccctgacaggcatcgccgtggagcaggataagaacacacaggaggtgttcgcccaggtgaagcagatctacaagaccccacccatcaaggactttggcggcttcaacttcagccagatcctgcctgatccaagcaagccctccaagaggtcttttatcgaggacctgctgttcaacaaggtgaccctggccgatgccggcttcatcaagcagtatggagattgcctgggagacatcgcagcccgcgacctgatctgtgcccagaagtttaatggcctgaccgtgctgcctccactgctgacagatgagatgatcgcccagtacacatctgccctgctggccggcaccatcacaagcggatggaccttcggcgcaggagccgccctgcagatcccttttgccatgcagatggcctataggttcaacggcatcggcgtgacccagaatgtgctgtacgagaaccagaagctgatcgccaatcagtttaacagcgccatcggcaagatccaggactctctgtcctctacagccagcgccctgggcaagctgcaggatgtggtgaatcagaacgcccaggccctgaataccctggtgaagcagctgagctccaacttcggcgccatctctagcgtgctgaatgacatcctgagccggctggacccccctgaggcagaggtgcagatcgacaggctgatcacaggccgcctgcagagcctgcagacctacgtgacacagcagctgatcagggcagcagagatcagagcctccgccaatctggccgccaccaagatgagcgagtgcgtgctgggacagtccaagagggtggacttttgtggcaagggctatcacctgatgtctttcccacagagcgcccctcacggcgtggtgtttctgcacgtgacctacgtgccagcccaggagaagaacttcaccacagcaccagccatctgccacgatggaaaggcacactttcctagggagggcgtgttcgtgtctaacggcacccactggtttgtgacacagcgcaatttctacgagccacagatcatcaccacagacaatacattcgtgagcggcaactgtgatgtggtgatcggcatcgtgaacaataccgtgtatgatccactgcagcccgagctggactcctttaaggaggagctggataagtacttcaagaatcacacctctcccgacgtggatctgggcgacatctccggcatcaatgcctctgtggtgaacatccagaaggagatcgaccggctgaacgaggtggccaagaatctgaacgagagcctgatcgatctgcaggagctgggcaagtatgagcagtacatcaagggctctggcagagagaacctgtatttccagggaggaggaggcagcggatacatccctgaggcaccaagggacggacaggcctacgtgcgcaaggatggcgagtgggtgctgctgtccacctttctgggccatcatcaccaccaccaccaccactga

SEQ ID NO: 1631 - DNA, 3846 bp, Artificial Sequence
  Description of Artificial Sequence: Synthetic polynucleotide
atgggcatcctgccaagcccaggaatgcccgccctgctgtctctggtgagcctgctgtccgtgctgctgatgggatgcgtggcagagacaggcacacagtgcgtgaacctgaccacaaggacccagctgccccctgcctataccaattctttcacacggggcgtgtactatcccgacaaggtgtttagaagctccgtgctgcactccacacaggatctgtttctgcctttcttttctaacgtgacctggttccacgccatccacgtgtccggcaccaatggcacaaagcggttcgacaatcccgtgctgccttttaacgatggcgtgtacttcgccagcaccgagaagtccaacatcatcagaggctggatctttggcaccacactggactctaagacacagagcctgctgatcgtgaacaatgccaccaacgtggtgatcaaggtgtgcgagttccagttttgtaatgatccattcctgggcgtgtactatcacaagaacaataagtcctggatggagtctgagtttcgcgtgtattctagcgccaacaattgcacatttgagtacgtgagccagcccttccatatggacctggagggcaagcagggcaatttcaagaacctgagggagttcgtgtttaagaatatcgatggctacttcaagatctacagcaagcacaccccaatcaacctggtgcgcgacctgccacagggattctccgccctggagccactggtggatctgcccatcggcatcaacatcacccggtttcagacactgctggccctgcacagatcctacctgacaccaggcgactcctctagcggatggaccgcaggagctgccgcctactatgtgggctatctgcagccccggaccttcctgctgaagtacaacgagaatggcaccatcacagacgcagtggattgcgccctggaccccctgtctgagacaaagtgtacactgaagagctttaccgtggagaagggcatctatcagacaagcaatttcagggtgcagcctaccgagtccatcgtgcgctttcccaatatcacaaacctgtgcccttttggcgaggtgttcaacgccaccagattcgccagcgtgtacgcctggaatcggaagagaatctccaactgcgtggccgactattctgtgctgtacaactccgcctctttcagcacctttaagtgctatggcgtgtctcccacaaagctgaatgatctgtgctttaccaacgtgtacgccgatagcttcgtgatcaggggagacgaagtgagacagatcgcaccaggacagacaggaaagatcgcagactacaattataagctgcctgacgatttcaccggctgcgtgatcgcctggaactccaacaatctggattctaaagtgggcggcaactacaattatctgtacaggctgtttcgcaagtccaatctgaagccattcgagcgggacatctccacagagatctaccaggccggctctaccccctgcaatggcgtggagggctttaactgttatttccctctgcagtcttacggcttccagccaacaaacggcgtgggctatcagccctacagagtggtggtgctgtcctttgagctgctgcacgcaccagcaacagtgtgcggcccaaagaagtctaccaatctggtgaagaacaagtgcgtgaacttcaacttcaacggactgaccggcacaggcgtgctgaccgagagcaataagaagttcctgccttttcagcagttcggcagggacatcgcagataccacagacgccgtgcgcgaccctcagaccctggagatcctggacatcacaccatgcagcttcggcggcgtgtccgtgatcacaccaggcaccaatacatccaaccaggtggccgtgctgtatcaggacgtgaattgtaccgaggtgcccgtggcaatccacgcagatcagctgacccctacatggcgggtgtactctaccggcagcaacgtgttccagacaagagccggatgcctgatcggagcagagcacgtgaacaatagctatgagtgcgacatccctatcggcgccggcatctgtgccagctaccagacccagacaaactccccatctggagcaggctccgtggccagccagtccatcatcgcctataccatgagcctgggcgccgagaacagcgtggcctactccaacaattctatcgccatccctaccaacttcacaatcagcgtgaccacagagatcctgccagtgtctatgaccaagacaagcgtggactgcacaatgtatatctgtggcgatagcaccgagtgctccaacctgctgctgcagtacggctccttttgtacccagctgaatagagccctgacaggcatcgccgtggagcaggataagaacacacaggaggtgttcgcccaggtgaagcagatctacaagaccccacccatcaaggactttggcggcttcaacttcagccagatcctgcctgatccaagcaagccctccaagaggtcttttatcgaggacctgctgttcaacaaggtgaccctggccgatgccggcttcatcaagcagtatggagattgcctgggagacatcgcagcccgcgacctgatctgtgcccagaagtttaatggcctgaccgtgctgcctccactgctgacagatgagatgatcgcccagtacacatctgccctgctggccggcaccatcacaagcggatggaccttcggcgcaggagccgccctgcagatcccttttgccatgcagatggcctataggttcaacggcatcggcgtgacccagaatgtgctgtacgagaaccagaagctgatcgccaatcagtttaacagcgccatcggcaagatccaggactctctgtcctctacagccagcgccctgggcaagctgcaggatgtggtgaatcagaacgcccaggccctgaataccctggtgaagcagctgagctccaacttcggcgccatctctagcgtgctgaatgacatcctgagccggctggacccccctgaggcagaggtgcagatcgacaggctgatcacaggccgcctgcagagcctgcagacctacgtgacacagcagctgatcagggcagcagagatcagagcctccgccaatctggccgccaccaagatgagcgagtgcgtgctgggacagtccaagagggtggacttttgtggcaagggctatcacctgatgtctttcccacagagcgcccctcacggcgtggtgtttctgcacgtgacctacgtgccagcccaggagaagaacttcaccacagcaccagccatctgccacgatggaaaggcacactttcctagggagggcgtgttcgtgtctaacggcacccactggtttgtgacacagcgcaatttctacgagccacagatcatcaccacagacaatacattcgtgagcggcaactgtgatgtggtgatcggcatcgtgaacaataccgtgtatgatccactgcagcccgagctggactcctttaaggaggagctggataagtacttcaagaatcacacctctcccgacgtggatctgggcgacatctccggcatcaatgcctctgtggtgaacatccagaaggagatcgaccggctgaacgaggtggccaagaatctgaacgagagcctgatcgatctgcaggagctgggcaagtatgagcagtacatcaagggctctggcagagagaacctgtatttccagggaggaggaggcagcggatacatccctgaggcaccaagggacggacaggcctacgtgcgcaaggatggcgagtgggtgctgctgtccacctttctgggccatcatcaccaccaccaccaccactga

SEQ ID NO: 1632 - DNA, 3846 bp, Artificial Sequence
  Description of Artificial Sequence: Synthetic polynucleotide
atgggcatcctgccaagcccaggaatgcccgccctgctgtctctggtgagcctgctgtccgtgctgctgatgggatgcgtggcagagacaggcacacagtgcgtgaacctgaccacaaggacccagctgccccctgcctataccaattctttcacacggggcgtgtactatcccgacaaggtgtttagaagctccgtgctgcactccacacaggatctgtttctgcctttcttttctaacgtgacctggttccacgccatccacgtgtccggcaccaatggcacaaagcggttcgacaatcccgtgctgccttttaacgatggcgtgtacttcgccagcaccgagaagtccaacatcatcagaggctggatctttggcaccacactggactctaagacacagagcctgctgatcgtgaacaatgccaccaacgtggtgatcaaggtgtgcgagttccagttttgtaatgatccattcctgggcgtgtactatcacaagaacaataagtcctggatggagtctgagtttcgcgtgtattctagcgccaacaattgcacatttgagtacgtgagccagcccttcctgatggacctggagccgaagcagggcaatttcaagaacctgagggagttcgtgtttaagaatatcgatggctacttcaagatctacagcaagcacaccccaatcaacctggtgcgcgacctgccacagggattctccgccctggagccactggtggatctgcccatcggcatcaacatcacccggtttcagacactgctggccctgcacagatcctacctgacaccaggcgactcctctagcggatggaccgcaggagctgccgcctactatgtgggctatctgcagccccggaccttcctgctgaagtacaacgagaatggcaccatcacagacgcagtggattgcgccctggaccccctgtctgagacaaagtgtacactgaagagctttaccgtggagaagggcatctatcagacaagcaatttcagggtgcagcctaccgagtccatcgtgcgctttcccaatatcacaaacctgtgcccttttggcgaggtgttcaacgccaccagattcgccagcgtgtacgcctggaatcggaagagaatctccaactgcgtggccgactattctgtgctgtacaactccgcctctttcagcacctttaagtgctatggcgtgtctcccacaaagctgaatgatctgtgctttaccaacgtgtacgccgatagcttcgtgatcaggggagacgaagtgagacagatcgcaccaggacagacaggaaagatcgcagactacaattataagctgcctgacgatttcaccggctgcgtgatcgcctggaactccaacaatctggattctaaagtgggcggcaactacaattatctgtacaggctgtttcgcaagtccaatctgaagccattcgagcgggacatctccacagagatctaccaggccggctctaccccctgcaatggcgtggagggctttaactgttatttccctctgcagtcttacggcttccagccaacaaacggcgtgggctatcagccctacagagtggtggtgctgtcctttgagctgctgcacgcaccagcaacagtgtgcggcccaaagaagtctaccaatctggtgaagaacaagtgcgtgaacttcaacttcaacggactgaccggcacaggcgtgctgaccgagagcaataagaagttcctgccttttcagcagttcggcagggacatcgcagataccacagacgccgtgcgcgaccctcagaccctggagatcctggacatcacaccatgcagcttcggcggcgtgtccgtgatcacaccaggcaccaatacatccaaccaggtggccgtgctgtatcaggacgtgaattgtaccgaggtgcccgtggcaatccacgcagatcagctgacccctacatggcgggtgtactctaccggcagcaacgtgttccagacaagagccggatgcctgatcggagcagagcacgtgaacaatagctatgagtgcgacatccctatcggcgccggcatctgtgccagctaccagacccagacaaactccccatctggagcaggctccgtggccagccagtccatcatcgcctataccatgagcctgggcgccgagaacagcgtggcctactccaacaattctatcgccatccctaccaacttcacaatcagcgtgaccacagagatcctgccagtgtctatgaccaagacaagcgtggactgcacaatgtatatctgtggcgatagcaccgagtgctccaacctgctgctgcagtacggctccttttgtacccagctgaatagagccctgacaggcatcgccgtggagcaggataagaacacacaggaggtgttcgcccaggtgaagcagatctacaagaccccacccatcaaggactttggcggcttcaacttcagccagatcctgcctgatccaagcaagccctccaagaggtcttttatcgaggacctgctgttcaacaaggtgaccctggccgatgccggcttcatcaagcagtatggagattgcctgggagacatcgcagcccgcgacctgatctgtgcccagaagtttaatggcctgaccgtgctgcctccactgctgacagatgagatgatcgcccagtacacatctgccctgctggccggcaccatcacaagcggatggaccttcggcgcaggagccgccctgcagatcccttttgccatgcagatggcctataggttcaacggcatcggcgtgacccagaatgtgctgtacgagaaccagaagctgatcgccaatcagtttaacagcgccatcggcaagatccaggactctctgtcctctacagccagcgccctgggcaagctgcaggatgtggtgaatcagaacgcccaggccctgaataccctggtgaagcagctgagctccaacttcggcgccatctctagcgtgctgaatgacatcctgagccggctggacccccctgaggcagaggtgcagatcgacaggctgatcacaggccgcctgcagagcctgcagacctacgtgacacagcagctgatcagggcagcagagatcagagcctccgccaatctggccgccaccaagatgagcgagtgcgtgctgggacagtccaagagggtggacttttgtggcaagggctatcacctgatgtctttcccacagagcgcccctcacggcgtggtgtttctgcacgtgacctacgtgccagcccaggagaagaacttcaccacagcaccagccatctgccacgatggaaaggcacactttcctagggagggcgtgttcgtgtctaacggcacccactggtttgtgacacagcgcaatttctacgagccacagatcatcaccacagacaatacattcgtgagcggcaactgtgatgtggtgatcggcatcgtgaacaataccgtgtatgatccactgcagcccgagctggactcctttaaggaggagctggataagtacttcaagaatcacacctctcccgacgtggatctgggcgacatctccggcatcaatgcctctgtggtgaacatccagaaggagatcgaccggctgaacgaggtggccaagaatctgaacgagagcctgatcgatctgcaggagctgggcaagtatgagcagtacatcaagggctctggcagagagaacctgtatttccagggaggaggaggcagcggatacatccctgaggcaccaagggacggacaggcctacgtgcgcaaggatggcgagtgggtgctgctgtccacctttctgggccatcatcaccaccaccaccaccactga

SEQ ID NO: 1633 - DNA, 3846 bp, Artificial Sequence
  Description of Artificial Sequence: Synthetic polynucleotide
atgggcatcctgccaagcccaggaatgcccgccctgctgtctctggtgagcctgctgtccgtgctgctgatgggatgcgtggcagagacaggcacacagtgcgtgaacctgaccacaaggacccagctgccccctgcctataccaattctttcacacggggcgtgtactatcccgacaaggtgtttagaagctccgtgctgcactccacacaggatctgtttctgcctttcttttctaacgtgacctggttccacgccatccacgtgtccggcaccaatggcacaaagcggttcgacaatcccgtgctgccttttaacgatggcgtgtacttcgccagcaccgagaagtccaacatcatcagaggctggatctttggcaccacactggactctaagacacagagcctgctgatcgtgaacaatgccaccaacgtggtgatcaaggtgtgcgagttccagttttgtaatgatccattcctggcggtgtactatcacaagaacaataagtcctggatggagtctgagtttcgcgtgtattctagcgccaacaattgcacatttgagtacgtgagccagcccttcctgatggacctggagggcaagcagggcaatttcaagaacctgagggagttcgtgtttaagaatatcgatggctacttcaagatctacagcaagcacaccccaatcaacctggtgcgcgacctgccacagggattctccgccctggagccactggtggatctgcccatcggcatcaacatcacccggtttcagacactgctggccctgcacagatcctacctgacaccaggcgactcctctagcggatggaccgcaggagctgccgcctactatgtgggctatctgcagccccggaccttcctgctgaagtacaacgagaatggcaccatcacagacgcagtggattgcgccctggaccccctgtctgagacaaagtgtacactgaagagctttaccgtggagaagggcatctatcagacaagcaatttcagggtgcagcctaccgagtccatcgtgcgctttcccaatatcacaaacctgtgcccttttggcgaggtgttcaacgccaccagattcgccagcgtgtacgcctggaatcggaagagaatctccaactgcgtggccgactattctgtgctgtacaactccgcctctttcagcacctttaagtgctatggcgtgtctcccacaaagctgaatgatctgtgctttaccaacgtgtacgccgatagcttcgtgatcaggggagacgaagtgagacagatcgcaccaggacagacaggaaagatcgcagactacaattataagctgcctgacgatttcaccggctgcgtgatcgcctggaactccaacaatctggattctaaagtgggcggcaactacaattatctgtacaggctgtttcgcaagtccaatctgaagccattcgagcgggacatctccacagagatctaccaggccggctctaccccctgcaatggcgtggagggctttaactgttatttccctctgcagtcttacggcttccagccaacaaacggcgtgggctatcagccctacagagtggtggtgctgtcctttgagctgctgcacgcaccagcaacagtgtgcggcccaaagaagtctaccaatctggtgaagaacaagtgcgtgaacttcaacttcaacggactgaccggcacaggcgtgctgaccgagagcaataagaagttcctgccttttcagcagttcggcagggacatcgcagataccacagacgccgtgcgcgaccctcagaccctggagatcctggacatcacaccatgcagcttcggcggcgtgtccgtgatcacaccaggcaccaatacatccaaccaggtggccgtgctgtatcaggacgtgaattgtaccgaggtgcccgtggcaatccacgcagatcagctgacccctacatggcgggtgtactctaccggcagcaacgtgttccagacaagagccggatgcctgatcggagcagagcacgtgaacaatagctatgagtgcgacatccctatcggcgccggcatctgtgccagctaccagacccagacaaactccccatctggagcaggctccgtggccagccagtccatcatcgcctataccatgagcctgggcgccgagaacagcgtggcctactccaacaattctatcgccatccctaccaacttcacaatcagcgtgaccacagagatcctgccagtgtctatgaccaagacaagcgtggactgcacaatgtatatctgtggcgatagcaccgagtgctccaacctgctgctgcagtacggctccttttgtacccagctgaatagagccctgacaggcatcgccgtggagcaggataagaacacacaggaggtgttcgcccaggtgaagcagatctacaagaccccacccatcaaggactttggcggcttcaacttcagccagatcctgcctgatccaagcaagccctccaagaggtcttttatcgaggacctgctgttcaacaaggtgaccctggccgatgccggcttcatcaagcagtatggagattgcctgggagacatcgcagcccgcgacctgatctgtgcccagaagtttaatggcctgaccgtgctgcctccactgctgacagatgagatgatcgcccagtacacatctgccctgctggccggcaccatcacaagcggatggaccttcggcgcaggagccgccctgcagatcccttttgccatgcagatggcctataggttcaacggcatcggcgtgacccagaatgtgctgtacgagaaccagaagctgatcgccaatcagtttaacagcgccatcggcaagatccaggactctctgtcctctacagccagcgccctgggcaagctgcaggatgtggtgaatcagaacgcccaggccctgaataccctggtgaagcagctgagctccaacttcggcgccatctctagcgtgctgaatgacatcctgagccggctggacccccctgaggcagaggtgcagatcgacaggctgatcacaggccgcctgcagagcctgcagacctacgtgacacagcagctgatcagggcagcagagatcagagcctccgccaatctggccgccaccaagatgagcgagtgcgtgctgggacagtccaagagggtggacttttgtggcaagggctatcacctgatgtctttcccacagagcgcccctcacggcgtggtgtttctgcacgtgacctacgtgccagcccaggagaagaacttcaccacagcaccagccatctgccacgatggaaaggcacactttcctagggagggcgtgttcgtgtctaacggcacccactggtttgtgacacagcgcaatttctacgagccacagatcatcaccacagacaatacattcgtgagcggcaactgtgatgtggtgatcggcatcgtgaacaataccgtgtatgatccactgcagcccgagctggactcctttaaggaggagctggataagtacttcaagaatcacacctctcccgacgtggatctgggcgacatctccggcatcaatgcctctgtggtgaacatccagaaggagatcgaccggctgaacgaggtggccaagaatctgaacgagagcctgatcgatctgcaggagctgggcaagtatgagcagtacatcaagggctctggcagagagaacctgtatttccagggaggaggaggcagcggatacatccctgaggcaccaagggacggacaggcctacgtgcgcaaggatggcgagtgggtgctgctgtccacctttctgggccatcatcaccaccaccaccaccactga

SEQ ID NO: 1634 - DNA, 3846 bp, Artificial Sequence
  Description of Artificial Sequence: Synthetic polynucleotide
atgggcatcctgccaagcccaggaatgcccgccctgctgtctctggtgagcctgctgtccgtgctgctgatgggatgcgtggcagagacaggcacacagtgcgtgaacctgaccacaaggacccagctgccccctgcctataccaattctttcacacggggcgtgtactatcccgacaaggtgtttagaagctccgtgctgcactccacacaggatctgtttctgcctttcttttctaacgtgacctggttccacgccatccacgtgtccggcaccaatggcacaaagcggttcgacaatcccgtgctgccttttaacgatggcgtgtacttcgccagcaccgagaagtccaacatcatcagaggctggatctttggcaccacactggactctaagacacagagcctgctgatcgtgaacaatgccaccaacgtggtgatcaaggtgtgcgagttccagttttgtaatgatccattcctgggcgtgtactatcacaagaacaataagtcctggatggagtctgagtttcgcgtgtattctagcgccaacaattgcacatttgagtacgtgagccagcccttcctgatggacctggagggcaagcagggcaatttcaagaacctgagggagttcgtgtttaagaatatcgatggctacttcaagatctacagcaagcacaccccaatcaacctggtgcgcgacctgccacagggattctccgccctggagccactggtggatctgcccatcggcatcaacatcacccggtttcagacactgctggccctgcacagatcctacctgacaccaggcgactcctctagcggatggaccgcaggagctgccgcctactatgtgggctatctgcagccccggaccttcctgctgaagtacaacgagaatggcaccatcacagacgcagtggattgcgccctggaccccctgtctgagacaaagtgtacactgaagagctttaccgtggagaagggcatctatcagacaagcaatttcagggtgcagcctaccgagtccatcgtgcgctttcccaatatcacaaacctgtgcccttttggcgaggtgttcaacgccaccagattcgccagcgtgtacgcctggaatcggaagagaatctccaactgcgtggccgactattctgtgctgtacaactccgcctctttcagcacctttaagtgctatggcgtgtctcccacaaagctgaatgatctgtgctttaccaacgtgtacgccgatagcttcgtgatcaggggagacgaagtgagacagatcgcaccaggacagacaggaaagatcgcagactacaattataagctgcctgacgatttcaccggctgcgtgatcgcctggaactccaacaatctggattctaaagtgggcggcaactacaattatctgtacaggctgtttcgcaagtccaatctgaagccattcgagcgggacatctccacagagatctaccaggccggctctaccccctgcaatggcgtggagggctttaactgttatttccctctgcagtcttacggcttccagccaacaaacggcgtgggctatcagccctacagagtggtggtgctgtcctttgagctgctgcacgcaccagcaacagtgtgcggcccaaagaagtctaccaatctggtgaagaacaagtgcgtgaacttcaacttcaacggactgaccggcacaggcgtgctgaccgagagcaataagaagttcctgccttttcagcagttcggcagggacatcgcagataccacagacgccgtgcgcgaccctcagaccctggagatcctggacatcacaccatgcagcttcggcggcgtgtccgtgatcacaccaggcaccaatacatccaaccaggtggccgtgctgtatcaggacgtgaattgtaccgaggtgcccgtggcaatccacgcagatcagctgacccctacatggcgggtgtactctaccggcagcaacgtgttccagacaagagccggatgcctgatcggagcagagcacgtgaacaatagctatgagtgcgacatccctatcggcgccggcatctgtgccagctaccagacccagacaaactccccatctggagcaggctccgtggccagccagtccatcatcgcctataccatgagcctgggcgccgagaacagcgtggcctactccaacaatgaaatcgccatccctaccaacttcacaatcagcgtgaccacagagatcctgccagtgtctatgaccaagacaagcgtggactgcacaatgtatatctgtggcgatagcaccgagtgctccaacctgctgctgcagtacggctccttttgtacccagctgaatagagccctgacaggcatcgccgtggagcaggataagaacacacaggaggtgttcgcccaggtgaagcagatctacaagaccccacccatcaaggactttggcggcttcaacttcagccagatcctgcctgatccaagcaagccctccaagaggtcttttatcgaggacctgctgttcaacaaggtgaccctggccgatgccggcttcatcaagcagtatggagattgcctgggagacatcgcagcccgcgacctgatctgtgcccagaagtttaatggcctgaccgtgctgcctccactgctgacagatgagatgatcgcccagtacacatctgccctgctggccggcaccatcacaagcggatggaccttcggcgcaggagccgccctgcagatcccttttgccatgcagatggcctataggttcaacggcatcggcgtgacccagaatgtgctgtacgagaaccagaagctgatcgccaatcagtttaacagcgccatcggcaagatccaggactctctgtcctctacagccagcgccctgggcaagctgcaggatgtggtgaatcagaacgcccaggccctgaataccctggtgaagcagctgagctccaacttcggcgccatctctagcgtgctgaatgacatcctgagccggctggacccccctgaggcagaggtgcagatcgacaggctgatcacaggccgcctgcagagcctgcagacctacgtgacacagcagctgatcagggcagcagagatcagagcctccgccaatctggccgccaccaagatgagcgagtgcgtgctgggacagtccaagagggtggacttttgtggcaagggctatcacctgatgtctttcccacagagcgcccctcacggcgtggtgtttctgcacgtgacctacgtgccagcccaggagaagaacttcaccacagcaccagccatctgccacgatggaaaggcacactttcctagggagggcgtgttcgtgtctaacggcacccactggtttgtgacacagcgcaatttctacgagccacagatcatcaccacagacaatacattcgtgagcggcaactgtgatgtggtgatcggcatcgtgaacaataccgtgtatgatccactgcagcccgagctggactcctttaaggaggagctggataagtacttcaagaatcacacctctcccgacgtggatctgggcgacatctccggcatcaatgcctctgtggtgaacatccagaaggagatcgaccggctgaacgaggtggccaagaatctgaacgagagcctgatcgatctgcaggagctgggcaagtatgagcagtacatcaagggctctggcagagagaacctgtatttccagggaggaggaggcagcggatacatccctgaggcaccaagggacggacaggcctacgtgcgcaaggatggcgagtgggtgctgctgtccacctttctgggccatcatcaccaccaccaccaccactga

SEQ ID NO: 1635 - DNA, 3846 bp, Artificial Sequence
  Description of Artificial Sequence: Synthetic polynucleotide
atgggcatcctgccaagcccaggaatgcccgccctgctgtctctggtgagcctgctgtccgtgctgctgatgggatgcgtggcagagacaggcacacagtgcgtgaacctgaccacaaggacccagctgccccctgcctataccaattctttcacacggggcgtgtactatcccgacaaggtgtttagaagctccgtgctgcactccacacaggatctgtttctgcctttcttttctaacgtgacctggttccacgccatccacgtgtccggcaccaatggcacaaagcggttcgacaatcccgtgctgccttttaacgatggcgtgtacttcgccagcaccgagaagtccaacatcatcagaggctggatctttggcaccacactggactctaagacacagagcctgctgatcgtgaacaatgccaccaacgtggtgatcaaggtgtgcgagttccagttttgtaatgatccattcctgggcgtgtactatcacaagaacaataagtcctggatggagtctgagtttcgcgtgtattctagcgccaacaattgcacatttgagtacgtgagccagcccttcctgatggacctggagggcaagcagggcaatttcaagaacctgagggagttcgtgtttaagaatatcgatggctacttcaagatctacagcaagcacaccccaatcaacctggtgcgcgacctgccacagggattctccgccctggagccactggtggatctgcccatcggcatcaacatcacccggtttcagacactgctggccctgcacagatcctacctgacaccaggcgactcctctagcggatggaccgcaggagctgccgcctactatgtgggctatctgcagccccggaccttcctgctgaagtacaacgagaatggcaccatcacagacgcagtggattgcgccctggaccccctgtctgagacaaagtgtacactgaagagctttaccgtggagaagggcatctatcagacaagcaatttcagggtgcagcctaccgagtccatcgtgcgctttcccaatatcacaaacctgtgcccttttggcgaggtgttcaacgccaccagattcgccagcgtgtacgcctggaatcggaagagaatctccaactgcgtggccgactattctgtgctgtacaactccgcctctttcagcacctttaagtgctatggcgtgtctcccacaaagctgaatgatctgtgctttaccaacgtgtacgccgatagcttcgtgatcaggggagacgaagtgagacagatcgcaccaggacagacaggaaagatcgcagactacaattataagctgcctgacgatttcaccggctgcgtgatcgcctggaactccaacaatctggattctaaagtgggcggcaactacaattatctgtacaggctgtttcgcaagtccaatctgaagccattcgagcgggacatctccacagagatctaccaggccggctctaccccctgcaatggcgtggagggctttaactgttatttccctctgcagtcttacggcttccagccaacaaacggcgtgggctatcagccctacagagtggtggtgctgtcctttgagctgctgcacgcaccagcaacagtgtgcggcccaaagaagtctaccaatctggtgaagaacaagtgcgtgaacttcaacttcaacggactgaccggcacaggcgtgctgaccgagagcaataagaagttcctgccttttcagcagttcggcagggacatcgcagataccacagacgccgtgcgcgaccctcagaccctggagatcctggacatcacaccatgcagcttcggcggcgtgtccgtgatcacaccaggcaccaatacatccaaccaggtggccgtgctgtatcaggacgtgaattgtaccgaggtgcccgtggcaatccacgcagatcagctgacccctacatggcgggtgtactctaccggcagcaacgtgttccagacaagagccggatgcctgatcggagcagagcacgtgaacaatagctatgagtgcgacatccctatcggcgccggcatctgtgccagctaccagacccagacaaactccccatctggagcaggctccgtggccagccagtccatcatcgcctataccatgagcctgggcgccgagaacagcgtggcctactccaacaattctatcgccatccctaccaacttcatgatcagcgtgaccacagagatcctgccagtgtctatgaccaagacaagcgtggactgcacaatgtatatctgtggcgatagcaccgagtgctccaacctgctgctgcagtacggctccttttgtacccagctgaatagagccctgacaggcatcgccgtggagcaggataagaacacacaggaggtgttcgcccaggtgaagcagatctacaagaccccacccatcaaggactttggcggcttcaacttcagccagatcctgcctgatccaagcaagccctccaagaggtcttttatcgaggacctgctgttcaacaaggtgaccctggccgatgccggcttcatcaagcagtatggagattgcctgggagacatcgcagcccgcgacctgatctgtgcccagaagtttaatggcctgaccgtgctgcctccactgctgacagatgagatgatcgcccagtacacatctgccctgctggccggcaccatcacaagcggatggaccttcggcgcaggagccgccctgcagatcccttttgccatgcagatggcctataggttcaacggcatcggcgtgacccagaatgtgctgtacgagaaccagaagctgatcgccaatcagtttaacagcgccatcggcaagatccaggactctctgtcctctacagccagcgccctgggcaagctgcaggatgtggtgaatcagaacgcccaggccctgaataccctggtgaagcagctgagctccaacttcggcgccatctctagcgtgctgaatgacatcctgagccggctggacccccctgaggcagaggtgcagatcgacaggctgatcacaggccgcctgcagagcctgcagacctacgtgacacagcagctgatcagggcagcagagatcagagcctccgccaatctggccgccaccaagatgagcgagtgcgtgctgggacagtccaagagggtggacttttgtggcaagggctatcacctgatgtctttcccacagagcgcccctcacggcgtggtgtttctgcacgtgacctacgtgccagcccaggagaagaacttcaccacagcaccagccatctgccacgatggaaaggcacactttcctagggagggcgtgttcgtgtctaacggcacccactggtttgtgacacagcgcaatttctacgagccacagatcatcaccacagacaatacattcgtgagcggcaactgtgatgtggtgatcggcatcgtgaacaataccgtgtatgatccactgcagcccgagctggactcctttaaggaggagctggataagtacttcaagaatcacacctctcccgacgtggatctgggcgacatctccggcatcaatgcctctgtggtgaacatccagaaggagatcgaccggctgaacgaggtggccaagaatctgaacgagagcctgatcgatctgcaggagctgggcaagtatgagcagtacatcaagggctctggcagagagaacctgtatttccagggaggaggaggcagcggatacatccctgaggcaccaagggacggacaggcctacgtgcgcaaggatggcgagtgggtgctgctgtccacctttctgggccatcatcaccaccaccaccaccactga

SEQ ID NO: 1636 - DNA, 3846 bp, Artificial Sequence
  Description of Artificial Sequence: Synthetic polynucleotide
atgggcatcctgccaagcccaggaatgcccgccctgctgtctctggtgagcctgctgtccgtgctgctgatgggatgcgtggcagagacaggcacacagtgcgtgaacctgaccacaaggacccagctgccccctgcctataccaattctttcacacggggcgtgtactatcccgacaagatttttagaagctccgtgctgcacctaacacaggatctgtttctgcctttcttttctaacgtgacctggttccacgccatccacgtgtccggcaccaatggcacaaagcggttcgacaatcccgtgctgccttttaacgatggcgtgtacttcgccgctaccgagaagtccaacatcatcagaggctggatctttggcaccacactggactctaagacacagagcctgctgatcgtgaacaatgccaccaacgtggtgatcaaggtgtgcgagttccagttttgtaatgatccattcctgggcgtgtactatcacaagaacaataagtcctggatggagtctgagtttcgcgtgtattctagcgccaacaattgcacatttgagtacgtgagccagcccttcctgatggacctggagggcaagcagggcaatttcaagaacctgagggagttcgtgtttaagaatatcgatggctacttcaagatctacagcaagtacaccccaatcaacctggtgcgcgacctgccacagggattctccgccctggagccactggtgaaactgcccatcggcatcaacatcacccggtttcagacactgctggccctgcacagatcctacctgacaccaggcgactcctctagcggatggaccgcaggagctgccgcctactatgtgggctatctgcagccccggaccttcctgctgaagtacaacgagaatggcaccatcacagacgcagtggattgcgccctggaccccctgtctgagacaaagtgtacactgaagagctttaccgtggagaagggcatctatcagacaagcaatttcagggtgcagcctaccgagtccatcgtgcgctttcccaatatcacaaacctgtgcccttttggcgaggtgttcaacgccaccagattcgccagcgtgtacgcctggaatcggaagagaatctccaactgcgtggccgactattctgtgctgtacaactccgcctctttcagcacctttaagtgctatggcgtgtctcccacaaagctgaatgatctgtgctttaccaacgtgtacgccgatagcttcgtgatcaggggagacgaagtgagacagatcgcaccaggacagacaggaaagatcgcagactacaattataagctgcctgacgatttcaccggctgcgtgatcgcctggaactccaacaatctggattctaaagtgggcggcaactacaattatctgtacaggctgtttcgcaagtccaatctgaagccattcgagcgggacatctccacagagatctaccaggccggctctaccccctgcaatggcgtggagggctttaactgttatttccctctgcagtcttacggcttccagccaacaaacggcgtgggctatcagccctacagagtggtggtgctgtcctttgagctgctgcacgcaccagcaacagtgtgcggcccaaagaagtctaccaatctggtgaagaacaagtgcgtgaacttcaacttcaacggactgaccggcacaggcgtgctgaccgagagcaataagaagttcctgccttttcagcagttcggcagggacatcagtgataccacagacgccgtgcgcgaccctcagaccctggagatcctggacatcacaccatgcagcttcggcggcgtgtccgtgatcacaccaggcaccaatacatccaaccaggtggccgtgctgtatcaggacgtgaattgtaccgatgtgcccgtggcaatccacgcagatcagctgacccctacatggcgggtgtactctaccggcagcaacgtgttccagacacaagccggatgcctgatcggagcagagcacgtgaacaatagctatgagtgcgacatccctatcggcgccggcatctgtgccagctaccagacccagacaaactccccatctggagcaggctccgtggccagccagtccatcatcgcctataccatgagcctgggcgccgagaacagcgtggcctactccaacaattctatcgccatccctaccaacttcacaatcagcgtgaccacagagatcctgccagtgtctatgaccaagacaagcgtggactgcacaatgtatatctgtggcgatagcaccgagtgctccaacctgctgctgcagtacggctccttttgtacccagctgaatagagccctgacaggcatcgccgtggagcaggataagaacacacaggaggtgttcgcccaggtgaagcagatctacaagaccccacccatcaaggactttggcggcttcaacttcagccagatcctgcctgatccaagcaagccctccaagaggtcttttatcgaggacctgctgttcaacaaggtgaccctggccgatgccggcttcatcaagcagtatggagattgcctgggagacatcgcagcccgcgacctgatctgtgcccagaagtttaatggcctgaccgtgctgcctccactgctgacagatgagatgatcgccgcgtacacagctgccctgctggccggcaccgctacagcgggatggaccttcggcgcaggagccgccctgcagatcccttttgccatgcagatggcctataggttcaacggcatcggcgtgacccagaatgtgctgtacgagaaccagaagctgatcgccaatcagtttaacagcgccatcggcaagatccaggactctctgtcctctacagccagcgccctgggcaagctgcaggatgtggtgaatcagaacgcccaggccctgaataccctggtgaagcagctgagctccaacttcggcgccatctctagcgtgctgaatgacatcctgagccggctggacccccctgaggcagaggtgcagatcgacaggctgatcacaggccgcctgcagagcctgcagacctacgtgacacagcagctgatcagggcagcagagatcagagcctccgccaatctggccgccaccaagatgagcgagtgcgtgctgggacagtccaagagggtggacttttgtggcaagggctatcacctgatgtctttcccacagagcgcccctcacggcgtggtgtttctgcacgtgacctacgtgccagcccaggagaagaacttcaccacagcaccagccatctgccacgatggaaaggcacactttcctagggagggcgtgttcgtgtctaacggcacccactggtttgtgacacagcgcaatttctacgagccacagatcatcaccacagacaatacattcgtgagcggcaactgtgatgtggtgatcggcatcgtgaacaataccgtgtatgatccactgcagcccgagctggactcctttaaggaggagctggataagtacttcaagaatcacacctctcccgacgtggatctgggcgacatctccggcatcaatgcctctgtggtgaacatccagaaggagatcgaccggctgaacgaggtggccaagaatctgaacgagagcctgatcgatctgcaggagctgggcaagtatgagcagtacatcaagggctctggcagagagaacctgtatttccagggaggaggaggcagcggatacatccctgaggcaccaagggacggacaggcctacgtgcgcaaggatggcgagtgggtgctgctgtccacctttctgggccatcatcaccaccaccaccaccactga

SEQ ID NO: 1637 - DNA, 3846 bp, Artificial Sequence
  Description of Artificial Sequence: Synthetic polynucleotide
atgggcatcctgccaagcccaggaatgcccgccctgctgtctctggtgagcctgctgtccgtgctgctgatgggatgcgtggcagagacaggcacacagtgcgtgaacctgaccacaaggacccagctgccccctgcctataccaattctttcacacggggcgtgtactatcccgacaaggtgtttagaagctccgtgctgcactccacacaggatctgtttctgcctttcttttctaacgtgacctggttccacgccatccacgtgtccggcaccaatggcacaaagcggttcgacaatcccgtgctgccttttaacgatggcgtgtacttcgccagcaccgagaagtccaacatcatcagaggctggatctttggcaccacactggactctaagacacagagcctgctgatcgtgaacaatgccaccaacgtggtgatcaaggtgtgcgagttccagttttgtaatgatccattcctgggcgtgtactatcacaagaacaataagtcctggatggagtctgagtggcgcgtgtattctagcgccaacaattgcacatttgagtacgtgagccagcccttcctgatggacctggagggcaagcagggcaatttcaagaacctgagggagttcgtgtttaagaatatcgatggctacttcaagatctacagcaagcacaccccaatcaacctggtgcgcgacctgccacagggattctccgccctggagccactggtggatctgcccatcggcatcaacatcacccggtttcagacactgctggccctgcacagatcctacctgacaccaggcgactcctctagcggatggaccgcaggagctgccgcctactatgtgggctatctgcagccccggaccttcctgctgaagtacaacgagaatggcaccatcacagacgcagtggattgcgccctggaccccctgtctgagacaaagtgtacactgaagagctttaccgtggagaagggcatctatcagacaagcaatttcagggtgcagcctaccgagtccatcgtgcgctttcccaatatcacaaacctgtgcccttttggcgaggtgttcaacgccaccagattcgccagcgtgtacgcctggaatcggaagagaatctccaactgcgtggccgactattctgtgctgtacaactccgcctctttcagcacctttaagtgctatggcgtgtctcccacaaagctgaatgatctgtgctttaccaacgtgtacgccgatagcttcgtgatcaggggagacgaagtgagacagatcgcaccaggacagacaggaaagatcgcagactacaattataagctgcctgacgatttcaccggctgcgtgatcgcctggaactccaacaatctggattctaaagtgggcggcaactacaattatctgtacaggctgtttcgcaagtccaatctgaagccattcgagcgggacatctccacagagatctaccaggccggctctaccccctgcaatggcgtggagggctttaactgttatttccctctgcagtcttacggcttccagccaacaaacggcgtgggctatcagccctacagagtggtggtgctgtcctttgagctgctgcacgcaccagcaacagtgtgcggcccaaagaagtctaccaatctggtgaagaacaagtgcgtgaacttcaacttcaacggactgaccggcacaggcgtgctgaccgagagcaataagaagttcctgccttttcagcagttcggcagggacatcgcagataccacagacgccgtgcgcgaccctcagaccctggagatcctggacatcacaccatgcagcttcggcggcgtgtccgtgatcacaccaggcaccaatacatccaaccaggtggccgtgctgtatcaggacgtgaattgtaccgaggtgcccgtggcaatccacgcagatcagctgacccctacatggcgggtgtactctaccggcagcaacgtgttccagacaagagccggatgcctgatcggagcagagcacgtgaacaatagctatgagtgcgacatccctatcggcgccggcatctgtgccagctaccagacccagacaaactccccatctggagcaggctccgtggccagccagtccatcatcgcctataccatgagcctgggcgccgagaacagcgtggcctactccaacaattctatcgccatccctaccaacttcacaatcagcgtgaccacagagatcctgccagtgtctatgaccaagacaagcgtggactgcacaatgtatatctgtggcgatagcaccgagtgctccaacctgctgctgcagtacggctccttttgtacccagctgaatagagccctgacaggcatcgccgtggagcaggataagaacacacaggaggtgttcgcccaggtgaagcagatctacaagaccccacccatcaaggactttggcggcttcaacttcagccagatcctgcctgatccaagcaagccctccaagaggtcttttatcgaggacctgctgttcaacaaggtgaccctggccgatgccggcttcatcaagcagtatggagattgcctgggagacatcgcagcccgcgacctgatctgtgcccagaagtttaatggcctgaccgtgctgcctccactgctgacagatgagatgatcgcccagtacacatctgccctgctggccggcaccatcacaagcggatggaccttcggcgcaggagccgccctgcagatcccttttgccatgcagatggcctataggttcaacggcatcggcgtgacccagaatgtgctgtacgagaaccagaagctgatcgccaatcagtttaacagcgccatcggcaagatccaggactctctgtcctctacagccagcgccctgggcaagctgcaggatgtggtgaatcagaacgcccaggccctgaataccctggtgaagcagctgagctccaacttcggcgccatctctagcgtgctgaatgacatcctgagccggctggacccccctgaggcagaggtgcagatcgacaggctgatcacaggccgcctgcagagcctgcagacctacgtgacacagcagctgatcagggcagcagagatcagagcctccgccaatctggccgccaccaagatgagcgagtgcgtgctgggacagtccaagagggtggacttttgtggcaagggctatcacctgatgtctttcccacagagcgcccctcacggcgtggtgtttctgcacgtgacctacgtgccagcccaggagaagaacttcaccacagcaccagccatctgccacgatggaaaggcacactttcctagggagggcgtgttcgtgtctaacggcacccactggtttgtgacacagcgcaatttctacgagccacagatcatcaccacagacaatacattcgtgagcggcaactgtgatgtggtgatcggcatcgtgaacaataccgtgtatgatccactgcagcccgagctggactcctttaaggaggagctggataagtacttcaagaatcacacctctcccgacgtggatctgggcgacatctccggcatcaatgcctctgtggtgaacatccagaaggagatcgaccggctgaacgaggtggccaagaatctgaacgagagcctgatcgatctgcaggagctgggcaagtatgagcagtacatcaagggctctggcagagagaacctgtatttccagggaggaggaggcagcggatacatccctgaggcaccaagggacggacaggcctacgtgcgcaaggatggcgagtgggtgctgctgtccacctttctgggccatcatcaccaccaccaccaccactga

SEQ ID NO: 1638 - DNA, 3846 bp, Artificial Sequence
  Description of Artificial Sequence: Synthetic polynucleotide
atgggcatcctgccaagcccaggaatgcccgccctgctgtctctggtgagcctgctgtccgtgctgctgatgggatgcgtggcagagacaggcacacagtgcgtgaacctgaccacaaggacccagctgccccctgcctataccaattctttcacacggggcgtgtactatcccgacaaggtgtttagaagctccgtgctgcactccacacaggatctgtttctgcctttcttttctaacgtgacctggttccacgccatccacgtgtccggcaccaatggcacaaagcggttcgacaatcccgtgctgccttttaacgatggcgtgtacttcgccagcaccgagaagtccaacatcatcagaggctggatctttggcaccacactggactctaagacacagagcctgctgatcgtgaacaatgccaccaacgtggtgatcaaggtgtgcgagttccagttttgtaatgatccattcctgggcgtgtactatcacaagaacaataagtcctggatggagtctgagtttcgcgtgtattctagcgccaacaattgcacatttgagtacgtgagccagcccttcctgatggacctggagggcaagcagggcaatttcaagaacctgagggagttcgtgtttaagaatatcgatggctacttcaagatctacagcaagcacaccccaatcaacctggtgcgcgacctgccacagggattctccgccctggagccactgatggatctgcccatcggcatcaacatcacccggtttcagacactgctggccctgcacagatcctacctgacaccaggcgactcctctagcggatggaccgcaggagctgccgcctactatgtgggctatctgcagccccggaccttcctgctgaagtacaacgagaatggcaccatcacagacgcagtggattgcgccctggaccccctgtctgagacaaagtgtacactgaagagctttaccgtggagaagggcatctatcagacaagcaatttcagggtgcagcctaccgagtccatcgtgcgctttcccaatatcacaaacctgtgcccttttggcgaggtgttcaacgccaccagattcgccagcgtgtacgcctggaatcggaagagaatctccaactgcgtggccgactattctgtgctgtacaactccgcctctttcagcacctttaagtgctatggcgtgtctcccacaaagctgaatgatctgtgctttaccaacgtgtacgccgatagcttcgtgatcaggggagacgaagtgagacagatcgcaccaggacagacaggaaagatcgcagactacaattataagctgcctgacgatttcaccggctgcgtgatcgcctggaactccaacaatctggattctaaagtgggcggcaactacaattatctgtacaggctgtttcgcaagtccaatctgaagccattcgagcgggacatctccacagagatctaccaggccggctctaccccctgcaatggcgtggagggctttaactgttatttccctctgcagtcttacggcttccagccaacaaacggcgtgggctatcagccctacagagtggtggtgctgtcctttgagctgctgcacgcaccagcaacagtgtgcggcccaaagaagtctaccaatctggtgaagaacaagtgcgtgaacttcaacttcaacggactgaccggcacaggcgtgctgaccgagagcaataagaagttcctgccttttcagcagttcggcagggacatcgcagataccacagacgccgtgcgcgaccctcagaccctggagatcctggacatcacaccatgcagcttcggcggcgtgtccgtgatcacaccaggcaccaatacatccaaccaggtggccgtgctgtatcaggacgtgaattgtaccgaggtgcccgtggcaatccacgcagatcagctgacccctacatggcgggtgtactctaccggcagcaacgtgttccagacaagagccggatgcctgatcggagcagagcacgtgaacaatagctatgagtgcgacatccctatcggcgccggcatctgtgccagctaccagacccagacaaactccccatctggagcaggctccgtggccagccagtccatcatcgcctataccatgagcctgggcgccgagaacagcgtggcctactccaacaattctatcgccatccctaccaacttcacaatcagcgtgaccacagagatcctgccagtgtctatgaccaagacaagcgtggactgcacaatgtatatctgtggcgatagcaccgagtgctccaacctgctgctgcagtacggctccttttgtacccagctgaatagagccctgacaggcatcgccgtggagcaggataagaacacacaggaggtgttcgcccaggtgaagcagatctacaagaccccacccatcaaggactttggcggcttcaacttcagccagatcctgcctgatccaagcaagccctccaagaggtcttttatcgaggacctgctgttcaacaaggtgaccctggccgatgccggcttcatcaagcagtatggagattgcctgggagacatcgcagcccgcgacctgatctgtgcccagaagtttaatggcctgaccgtgctgcctccactgctgacagatgagatgatcgcccagtacacatctgccctgctggccggcaccatcacaagcggatggaccttcggcgcaggagccgccctgcagatcccttttgccatgcagatggcctataggttcaacggcatcggcgtgacccagaatgtgctgtacgagaaccagaagctgatcgccaatcagtttaacagcgccatcggcaagatccaggactctctgtcctctacagccagcgccctgggcaagctgcaggatgtggtgaatcagaacgcccaggccctgaataccctggtgaagcagctgagctccaacttcggcgccatctctagcgtgctgaatgacatcctgagccggctggacccccctgaggcagaggtgcagatcgacaggctgatcacaggccgcctgcagagcctgcagacctacgtgacacagcagctgatcagggcagcagagatcagagcctccgccaatctggccgccaccaagatgagcgagtgcgtgctgggacagtccaagagggtggacttttgtggcaagggctatcacctgatgtctttcccacagagcgcccctcacggcgtggtgtttctgcacgtgacctacgtgccagcccaggagaagaacttcaccacagcaccagccatctgccacgatggaaaggcacactttcctagggagggcgtgttcgtgtctaacggcacccactggtttgtgacacagcgcaatttctacgagccacagatcatcaccacagacaatacattcgtgagcggcaactgtgatgtggtgatcggcatcgtgaacaataccgtgtatgatccactgcagcccgagctggactcctttaaggaggagctggataagtacttcaagaatcacacctctcccgacgtggatctgggcgacatctccggcatcaatgcctctgtggtgaacatccagaaggagatcgaccggctgaacgaggtggccaagaatctgaacgagagcctgatcgatctgcaggagctgggcaagtatgagcagtacatcaagggctctggcagagagaacctgtatttccagggaggaggaggcagcggatacatccctgaggcaccaagggacggacaggcctacgtgcgcaaggatggcgagtgggtgctgctgtccacctttctgggccatcatcaccaccaccaccaccactga

SEQ ID NO: 1639 - DNA, 3846 bp, Artificial Sequence
  Description of Artificial Sequence: Synthetic polynucleotide
atgggcatcctgccaagcccaggaatgcccgccctgctgtctctggtgagcctgctgtccgtgctgctgatgggatgcgtggcagagacaggcacacagtgcgtgaacctgaccacaaggacccagctgccccctgcctataccaattctttcacacggggcgtgtactatcccgacaaggtgtttagaagctccgtgctgcactccacacaggatctgtttctgcctttcttttctaacgtgacctggttccacgccatccacgtgtccggcaccaatggcacaaagcggttcgacaatcccgtgctgccttttaacgatggcgtgtacttcgccagcaccgagaagtccaacatcatcagaggctggatctttggcaccacactggactctaagacacagagcctgctgatcgtgaacaatgccaccaacgtggtgatcaaggtgtgcgagttccagttttgtaatgatccattcctgggcgtgtactatcacaagaacaataagtcctggatggagtctgagtttcgcgtgtattctagcgccaacaattgcacatttgagtacgtgagccagcccttcctgatggacctggagggcaagcagggcaatttcaagaacctgagggagttcgtgtttaagaatatcgatggctacttcaagatctacagcaagcacaccccaatcaacctggtgcgcgacctgccacagggattctccgccctggagccactggtggatctgcccatcggcatcaacatcacccggtttcagacactgctggccctgcacagatcctaccgaacaccaggcgactcctctagcggatggaccgcaggagctgccgcctactatgtgggctatctgcagccccggaccttcctgctgaagtacaacgagaatggcaccatcacagacgcagtggattgcgccctggaccccctgtctgagacaaagtgtacactgaagagctttaccgtggagaagggcatctatcagacaagcaatttcagggtgcagcctaccgagtccatcgtgcgctttcccaatatcacaaacctgtgcccttttggcgaggtgttcaacgccaccagattcgccagcgtgtacgcctggaatcggaagagaatctccaactgcgtggccgactattctgtgctgtacaactccgcctctttcagcacctttaagtgctatggcgtgtctcccacaaagctgaatgatctgtgctttaccaacgtgtacgccgatagcttcgtgatcaggggagacgaagtgagacagatcgcaccaggacagacaggaaagatcgcagactacaattataagctgcctgacgatttcaccggctgcgtgatcgcctggaactccaacaatctggattctaaagtgggcggcaactacaattatctgtacaggctgtttcgcaagtccaatctgaagccattcgagcgggacatctccacagagatctaccaggccggctctaccccctgcaatggcgtggagggctttaactgttatttccctctgcagtcttacggcttccagccaacaaacggcgtgggctatcagccctacagagtggtggtgctgtcctttgagctgctgcacgcaccagcaacagtgtgcggcccaaagaagtctaccaatctggtgaagaacaagtgcgtgaacttcaacttcaacggactgaccggcacaggcgtgctgaccgagagcaataagaagttcctgccttttcagcagttcggcagggacatcgcagataccacagacgccgtgcgcgaccctcagaccctggagatcctggacatcacaccatgcagcttcggcggcgtgtccgtgatcacaccaggcaccaatacatccaaccaggtggccgtgctgtatcaggacgtgaattgtaccgaggtgcccgtggcaatccacgcagatcagctgacccctacatggcgggtgtactctaccggcagcaacgtgttccagacaagagccggatgcctgatcggagcagagcacgtgaacaatagctatgagtgcgacatccctatcggcgccggcatctgtgccagctaccagacccagacaaactccccatctggagcaggctccgtggccagccagtccatcatcgcctataccatgagcctgggcgccgagaacagcgtggcctactccaacaattctatcgccatccctaccaacttcacaatcagcgtgaccacagagatcctgccagtgtctatgaccaagacaagcgtggactgcacaatgtatatctgtggcgatagcaccgagtgctccaacctgctgctgcagtacggctccttttgtacccagctgaatagagccctgacaggcatcgccgtggagcaggataagaacacacaggaggtgttcgcccaggtgaagcagatctacaagaccccacccatcaaggactttggcggcttcaacttcagccagatcctgcctgatccaagcaagccctccaagaggtcttttatcgaggacctgctgttcaacaaggtgaccctggccgatgccggcttcatcaagcagtatggagattgcctgggagacatcgcagcccgcgacctgatctgtgcccagaagtttaatggcctgaccgtgctgcctccactgctgacagatgagatgatcgcccagtacacatctgccctgctggccggcaccatcacaagcggatggaccttcggcgcaggagccgccctgcagatcccttttgccatgcagatggcctataggttcaacggcatcggcgtgacccagaatgtgctgtacgagaaccagaagctgatcgccaatcagtttaacagcgccatcggcaagatccaggactctctgtcctctacagccagcgccctgggcaagctgcaggatgtggtgaatcagaacgcccaggccctgaataccctggtgaagcagctgagctccaacttcggcgccatctctagcgtgctgaatgacatcctgagccggctggacccccctgaggcagaggtgcagatcgacaggctgatcacaggccgcctgcagagcctgcagacctacgtgacacagcagctgatcagggcagcagagatcagagcctccgccaatctggccgccaccaagatgagcgagtgcgtgctgggacagtccaagagggtggacttttgtggcaagggctatcacctgatgtctttcccacagagcgcccctcacggcgtggtgtttctgcacgtgacctacgtgccagcccaggagaagaacttcaccacagcaccagccatctgccacgatggaaaggcacactttcctagggagggcgtgttcgtgtctaacggcacccactggtttgtgacacagcgcaatttctacgagccacagatcatcaccacagacaatacattcgtgagcggcaactgtgatgtggtgatcggcatcgtgaacaataccgtgtatgatccactgcagcccgagctggactcctttaaggaggagctggataagtacttcaagaatcacacctctcccgacgtggatctgggcgacatctccggcatcaatgcctctgtggtgaacatccagaaggagatcgaccggctgaacgaggtggccaagaatctgaacgagagcctgatcgatctgcaggagctgggcaagtatgagcagtacatcaagggctctggcagagagaacctgtatttccagggaggaggaggcagcggatacatccctgaggcaccaagggacggacaggcctacgtgcgcaaggatggcgagtgggtgctgctgtccacctttctgggccatcatcaccaccaccaccaccactga

SEQ ID NO: 1640 - DNA, 3846 bp, Artificial Sequence
  Description of Artificial Sequence: Synthetic polynucleotide
atgggcatcctgccaagcccaggaatgcccgccctgctgtctctggtgagcctgctgtccgtgctgctgatgggatgcgtggcagagacaggcacacagtgcgtgaacctgaccacaaggacccagctgccccctgcctataccaattctttcacacggggcgtgtactatcccgacaaggtgtttagaagctccgtgctgcactccacacaggatctgtttctgcctttcttttctaacgtgacctggttccacgccatccacgtgtccggcaccaatggcacaaagcggttcgacaatcccgtgctgccttttaacgatggcgtgtacttcgccagcaccgagaagtccaacatcatcagaggctggatctttggcaccacactggactctaagacacagagcctgctgatcgtgaacaatgccaccaacgtggtgatcaaggtgtgcgagttccagttttgtaatgatccattcctgggcgtgtactatcacaagaacaataagtcctggatggagtctgagtttcgcgtgtattctagcgccaacaattgcacatttgagtacgtgagccagcccttcctgatggacctggagggcaagcagggcaatttcaagaacctgagggagttcgtgtttaagaatatcgatggctacttcaagatctacagcaagcacaccccaatcaacctggtgcgcgacctgccacagggattctccgccctggagccactggtggatctgcccatcggcatcaacatcacccggtttcagacactgctggccctgcacagatcctacctgacaccaggcgactcctctagcggatggaccgcaggagctgccgcctactatgtgggctatctgcagccccggaccttcctgctgaagtacaacgagaatggcaccatcacagacgcagtggattgcgccctggaccccctgtctgagacaaagtgtacactgaagagctttaccgtggagaagggcatctatcagacaagcaatttcagggtgcagcctaccgagtccatcgtgcgctttcccaatatcacaaacctgtgcccttttggcgaggtgttcaacgccaccagattcgccagcgtgtacgcctggaatcggaagagaatctccaactgcgtggccgactattctgtgctgtacaactccgcctctttcagcacctttaagtgctatggcgtgtctcccacaaagctgaatgatctgtgctttaccaacgtgtacgccgatagcttcgtgatcaggggagacgaagtgagacagatcgcaccaggacagacaggaaagatcgcagactacaattataagctgcctgacgatttcaccggctgcgtgatcgcctggaactccaacaatctggattctaaagtgggcggcaactacaattatctgtacaggctgtttcgcaagtccaatctgaagccattcgagcgggacatctccacagagatctaccaggccggctctaccccctgcaatggcgtggagggctttaactgttatttccctctgcagtcttacggcttccagccaacaaacggcgtgggctatcagccctacagagtggtggtgctgtcctttgagctgctgcacgcaccagcaacagtgtgcggcccaaagaagtctaccaatctggtgaagaacaagtgcgtgaacttcaacttcaacggactgaccggcacaggcgtgctgaccgagagcaataagaagttcctgccttttcagcagttcggcagggacatcgcagataccacagacgccgtgcgcgaccctcagaccctggagatcctggacatcacaccatgcagcttcggcggcgtgtccgtgatcacaccaggcaccaatacatccaaccaggtggccgtgctgtatcaggacgtgaattgtaccgaggtgcccgtggcaatccacgcagatcagctgacccctacatggcgggtgtactctaccggcagcaacgtgttccagacaagagccggatgcctgatcggagcagagcacgtgaacaatagctatgagtgcgacatccctatcggcgccggcatctgtgccagctaccagacccagacaaactccccatctggagcaggctccgtggccagccagtccatcatcgcctataccatgagcctgggcgccgagaacagcgtggcctactccaacaattctatcgccatccctaccaacttcacaatcagcgtgaccacagagatcctgccagtgtctatgaccaagacaagcgtggactgcacaatgtatatctgtggcgatagcaccgagtgctccaacctgctgctgcagtacggctccttttgtacccagctgaatagagccctgacaggcatcgccgtggagcaggataagaacacacaggaggtgttcgcccaggtgaagcagatctacaagaccccacccatcaaggactttggcggcttcaacttcagccagatcctgcctgatccaagcaagccctccaagaggtcttttatcgaggacctgctgttcaacaaggtgaccctggccgatgccggcttcatcaagcagtatggagattgcctgggagacatcgcagcccgcgacctgatctgtgcccagaagtttaatggcctgaccgtgctgcctccactgctgacagatgagatgatcgcccagtacacatctgccctgctggccggcaccatcacaagcggatggaccttcggcgcaggagccgccctgcagatcccttttgccatgcagatggcctataggttcaacggcatcggcgtgacccagaatgtgctgtacgagaaccagaagctgatcgccaatcagtttaacagcgccatcggcaagatccaggactctctgtcctctacagccactgccctgggcaagctgcaggatgtggtgaatcagaacgcccaggccctgaataccctggtgaagcagctgagctccaacttcggcgccatctctagcgtgctgaatgacatcctgagccggctggacccccctgaggcagaggtgcagatcgacaggctgatcacaggccgcctgcagagcctgcagacctacgtgacacagcagctgatcagggcagcagagatcagagcctccgccaatctggccgccaccaagatgagcgagtgcgtgctgggacagtccaagagggtggacttttgtggcaagggctatcacctgatgtctttcccacagagcgcccctcacggcgtggtgtttctgcacgtgacctacgtgccagcccaggagaagaacttcaccacagcaccagccatctgccacgatggaaaggcacactttcctagggagggcgtgttcgtgtctaacggcacccactggtttgtgacacagcgcaatttctacgagccacagatcatcaccacagacaatacattcgtgagcggcaactgtgatgtggtgatcggcatcgtgaacaataccgtgtatgatccactgcagcccgagctggactcctttaaggaggagctggataagtacttcaagaatcacacctctcccgacgtggatctgggcgacatctccggcatcaatgcctctgtggtgaacatccagaaggagatcgaccggctgaacgaggtggccaagaatctgaacgagagcctgatcgatctgcaggagctgggcaagtatgagcagtacatcaagggctctggcagagagaacctgtatttccagggaggaggaggcagcggatacatccctgaggcaccaagggacggacaggcctacgtgcgcaaggatggcgagtgggtgctgctgtccacctttctgggccatcatcaccaccaccaccaccactga

SEQ ID NO: 1641 - DNA, 3846 bp, Artificial Sequence
  Description of Artificial Sequence: Synthetic polynucleotide
atgggcatcctgccaagcccaggaatgcccgccctgctgtctctggtgagcctgctgtccgtgctgctgatgggatgcgtggcagagacaggcacacagtgcgtgaacctgaccacaaggacccagctgccccctgcctataccaattctttcacacggggcgtgtactatcccgacaaggtgtttagaagctccgtgctgcactccacacaggatctgtttctgcctttcttttctaacgtgacctggttccacgccatccacgtgtccggcaccaatggcacaaagcggttcgacaatcccgtgctgccttttaacgatggcgtgtacttcgccagcaccgagaagtccaacatcatcagaggctggatctttggcaccacactggactctaagacacagagcctgctgatcgtgaacaatgccaccaacgtggtgatcaaggtgtgcgagttccagttttgtaatgatccattcctgggcgtgtactatcacaagaacaataagtcctggatggagtctgagtttcgcgtgtattctagcgccaacaattgcacatttgagtacgtgagccagcccttcctgatggacctggagggcaagcagggcaatttcaagaacctgagggagttcgtgtttaagaatatcgatggctacttcaagatctacagcaagcacaccccaatcaacctggtgcgcgacctgccacagggattctccgccctggagccactggtggatctgcccatcggcatcaacatcacccggtttcagacactgctggccctgcacagatcctacctgacaccaggcgactcctctagcggatggaccgcaggagctgccgcctactatgtgggctatctgcagccccggaccttcctgctgaagtacaacgagaatggcaccatcacagacgcagtggattgcgccctggaccccctgtctgagacaaagtgtacactgaagagctttaccgtggagaagggcatctatcagacaagcaatttcagggtgcagcctaccgagtccatcgtgcgctttcccaatatcacaaacctgtgcccttttggcgaggtgttcaacgccaccagattcgccagcgtgtacgcctggaatcggaagagaatctccaactgcgtggccgactattctgtgctgtacaactccgcctctttcagcacctttaagtgctatggcgtgtctcccacaaagctgaatgatctgtgctttaccaacgtgtacgccgatagcttcgtgatcaggggagacgaagtgagacagatcgcaccaggacagacaggaaagatcgcagactacaattataagctgcctgacgatttcaccggctgcgtgatcgcctggaactccaacaatctggattctaaagtgggcggcaactacaattatctgtacaggctgtttcgcaagtccaatctgaagccattcgagcgggacatctccacagagatctaccaggccggctctaccccctgcaatggcgtggagggctttaactgttatttccctctgcagtcttacggcttccagccaacaaacggcgtgggctatcagccctacagagtggtggtgctgtcctttgagctgctgcacgcaccagcaacagtgtgcggcccaaagaagtctaccaatctggtgaagaacaagtgcgtgaacttcaacttcaacggactgaccggcacaggcgtgctgaccgagagcaataagaagttcctgccttttcagcagttcggcagggacatcgcagataccacagacgccgtgcgcgaccctcagaccctggagatcctggacatcacaccatgcagcttcggcggcgtgtccgtgatcacaccaggcaccaatacatccaaccaggtggccgtgctgtatcaggacgtgaattgtaccgaggtgcccgtggcaatccacgcagatcagctgacccctacatggcgggtgtactctaccggcagcaacgtgttccagacaagagccggatgcctgatcggagcagagcacgtgaacaatagctatgagtgcgacatccctatcggcgccggcatctgtgccagctaccagacccagacaaactccccatctggagcaggctccgtggccagccagtccatcatcgcctataccatgagcctgggcgccgagaacagcgtggcctactccaacaattctatcgccatccctaccaacttcacaatcagcgtgaccacagagatcctgccagtgtctatgaccaagacaagcgtggactgcacaatgtatatctgtggcgatagcaccgagtgctccaacctgctgctgcagtacggctccttttgtacccagctgaatagagccctgacaggcatcgccgtggagcaggataagaacttgcaggaggtgttcgcccaggtgaagcagatctacaagaccccacccatcaaggactttggcggcttcaacttcagccagatcctgcctgatccaagcaagccctccaagaggtcttttatcgaggacctgctgttcaacaaggtgaccctggccgatgccggcttcatcaagcagtatggagattgcctgggagacatcgcagcccgcgacctgatctgtgcccagaagtttaatggcctgaccgtgctgcctccactgctgacagatgagatgatcgcccagtacacatctgccctgctggccggcaccatcacaagcggatggaccttcggcgcaggagccgccctgcagatcccttttgccatgcagatggcctataggttcaacggcatcggcgtgacccagaatgtgctgtacgagaaccagaagctgatcgccaatcagtttaacagcgccatcggcaagatccaggactctctgtcctctacagccagcgccctgggcaagctgcaggatgtggtgaatcagaacgcccaggccctgaataccctggtgaagcagctgagctccaacttcggcgccatctctagcgtgctgaatgacatcctgagccggctggacccccctgaggcagaggtgcagatcgacaggctgatcacaggccgcctgcagagcctgcagacctacgtgacacagcagctgatcagggcagcagagatcagagcctccgccaatctggccgccaccaagatgagcgagtgcgtgctgggacagtccaagagggtggacttttgtggcaagggctatcacctgatgtctttcccacagagcgcccctcacggcgtggtgtttctgcacgtgacctacgtgccagcccaggagaagaacttcaccacagcaccagccatctgccacgatggaaaggcacactttcctagggagggcgtgttcgtgtctaacggcacccactggtttgtgacacagcgcaatttctacgagccacagatcatcaccacagacaatacattcgtgagcggcaactgtgatgtggtgatcggcatcgtgaacaataccgtgtatgatccactgcagcccgagctggactcctttaaggaggagctggataagtacttcaagaatcacacctctcccgacgtggatctgggcgacatctccggcatcaatgcctctgtggtgaacatccagaaggagatcgaccggctgaacgaggtggccaagaatctgaacgagagcctgatcgatctgcaggagctgggcaagtatgagcagtacatcaagggctctggcagagagaacctgtatttccagggaggaggaggcagcggatacatccctgaggcaccaagggacggacaggcctacgtgcgcaaggatggcgagtgggtgctgctgtccacctttctgggccatcatcaccaccaccaccaccactga

SEQ ID NO: 1642 - DNA, 3846 bp, Artificial Sequence
  Description of Artificial Sequence: Synthetic polynucleotide
atgggcatcctgccaagcccaggaatgcccgccctgctgtctctggtgagcctgctgtccgtgctgctgatgggatgcgtggcagagacaggcacacagtgcgtgaacctgaccacaaggacccagctgccccctgcctataccaattctttcacacggggcgtgtactatcccgacaaggtgtttagaagctccgtgctgcactccacacaggatctgtttctgcctttcttttctaacgtgacctggttccacgccatccacgtgtccggcaccaatggcacaaagcggttcgacaatcccgtgctgccttttaacgatggcgtgtacttcgccagcaccgagaagtccaacatcatcagaggctggatctttggcaccacactggactctaagacacagagcctgctgatcgtgaacaatgccaccaacgtggtgatcaaggtgtgcgagttccagttttgtaatgatccattcctgggcgtgtactatcacaagaacaataagtcctggatggagtctgagtttcgcgtgtattctagcgccaacaattgcacatttgagtacgtgagccagcccttcctgatggacctggagggcaagcagggcaatttcaagaacctgagggagttcgtgtttaagaatatcgatggctacttcaagatctacagcaagcacaccccaatcaacctggtgcgcgacctgccacagggattctccgccctggagccactggtggatctgcccatcggcatcaacatcacccggtttcagacactgctggccctgcacagatcctacctgacaccaggcgactcctctagcggatggaccgcaggagctgccgcctactatgtgggctatctgcagccccggaccttcctgctgaagtacaacgagaatggcaccatcacagacgcagtggattgcgccctggaccccctgtctgagacaaagtgtacactgaagagctttaccgtggagaagggcatctatcagacaagcaatttcagggtgcagcctaccgagtccatcgtgcgctttcccaatatcacaaacctgtgcccttttggcgaggtgttcaacgccaccagattcgccagcgtgtacgcctggaatcggaagagaatctccaactgcgtggccgactattctgtgctgtacaactccgcctctttcagcacctttaagtgctatggcgtgtctcccacaaagctgaatgatctgtgctttaccaacgtgtacgccgatagcttcgtgatcaggggagacgaagtgagacagatcgcaccaggacagacaggaaagatcgcagactacaattataagctgcctgacgatttcaccggctgcgtgatcgcctggaactccaacaatctggattctaaagtgggcggcaactacaattatctgtacaggctgtttcgcaagtccaatctgaagccattcgagcgggacatctccacagagatctaccaggccggctctaccccctgcaatggcgtggagggctttaactgttatttccctctgcagtcttacggcttccagccaacaaacggcgtgggctatcagccctacagagtggtggtgctgtcctttgagctgctgcacgcaccagcaacagtgtgcggcccaaagaagtctaccaatctggtgaagaacaagtgcgtgaacttcaacttcaacggactgaccggcacaggcgtgctgaccgagagcaataagaagttcctgccttttcagcagttcggcagggacatcgcagataccacagacgccgtgcgcgaccctcagaccctggagatcctggacatcacaccatgcagcttcggcggcgtgtccgtgatcacaccaggcaccaatacatccaaccaggtggccgtgctgtatcaggacgtgaattgtaccgaggtgcccgtggcaatccacgcagatcagctgacccctacatggcgggtgtactctaccggcagcaacgtgttccagacaagagccggatgcctgatcggagcagagcacgtgaacaatagctatgagtgcgacatccctatcggcgccggcatctgtgccagctaccagacccagacaaactccccatctggagcaggctccgtggccagccagtccatcatcgcctataccatgagcctgggcgccgagaacagcgtggcctactccaacaattctatcgccatccctaccaacttcacaatcagcgtgaccacagagatcctgccagtgtctatgaccaagacaagcgtggactgcacaatgtatatctgtggcgatagcaccgagtgctccaacctgctgctgcagtacggctccttttgtacccagctgaatagagccctgacaggcatcgccgtggagcaggataagaacacacagaatgtgttcgcccaggtgaagcagatctacaagaccccacccatcaaggactttggcggcttcaacttcagccagatcctgcctgatccaagcaagccctccaagaggtcttttatcgaggacctgctgttcaacaaggtgaccctggccgatgccggcttcatcaagcagtatggagattgcctgggagacatcgcagcccgcgacctgatctgtgcccagaagtttaatggcctgaccgtgctgcctccactgctgacagatgagatgatcgcccagtacacatctgccctgctggccggcaccatcacaagcggatggaccttcggcgcaggagccgccctgcagatcccttttgccatgcagatggcctataggttcaacggcatcggcgtgacccagaatgtgctgtacgagaaccagaagctgatcgccaatcagtttaacagcgccatcggcaagatccaggactctctgtcctctacagccagcgccctgggcaagctgcaggatgtggtgaatcagaacgcccaggccctgaataccctggtgaagcagctgagctccaacttcggcgccatctctagcgtgctgaatgacatcctgagccggctggacccccctgaggcagaggtgcagatcgacaggctgatcacaggccgcctgcagagcctgcagacctacgtgacacagcagctgatcagggcagcagagatcagagcctccgccaatctggccgccaccaagatgagcgagtgcgtgctgggacagtccaagagggtggacttttgtggcaagggctatcacctgatgtctttcccacagagcgcccctcacggcgtggtgtttctgcacgtgacctacgtgccagcccaggagaagaacttcaccacagcaccagccatctgccacgatggaaaggcacactttcctagggagggcgtgttcgtgtctaacggcacccactggtttgtgacacagcgcaatttctacgagccacagatcatcaccacagacaatacattcgtgagcggcaactgtgatgtggtgatcggcatcgtgaacaataccgtgtatgatccactgcagcccgagctggactcctttaaggaggagctggataagtacttcaagaatcacacctctcccgacgtggatctgggcgacatctccggcatcaatgcctctgtggtgaacatccagaaggagatcgaccggctgaacgaggtggccaagaatctgaacgagagcctgatcgatctgcaggagctgggcaagtatgagcagtacatcaagggctctggcagagagaacctgtatttccagggaggaggaggcagcggatacatccctgaggcaccaagggacggacaggcctacgtgcgcaaggatggcgagtgggtgctgctgtccacctttctgggccatcatcaccaccaccaccaccactga

SEQ ID NO: 1643 - DNA, 3846 bp, Artificial Sequence
  Description of Artificial Sequence: Synthetic polynucleotide
atgggcatcctgccaagcccaggaatgcccgccctgctgtctctggtgagcctgctgtccgtgctgctgatgggatgcgtggcagagacaggcacacagtgcgtgaacctgaccacaaggacccagctgccccctgcctataccaattctttcacacggggcgtgtactatcccgacaaggtgtttagaagctccgtgctgcactccacacaggatctgtttctgcctttcttttctaacgtgacctggttccacgccatccacgtgtccggcaccaatggcacaaagcggttcgacaatcccgtgctgccttttaacgatggcgtgtacttcgccagcaccgagaagtccaacatcatcagaggctggatctttggcaccacactggactctaagacacagagcctgctgatcgtgaacaatgccaccaacgtggtgatcaaggtgtgcgagttccagttttgtaatgatccattcctgggcgtgtactatcacaagaacaataagtcctggatggagtctgagtttcgcgtgtattctagcgccaacaattgcacatttgagtacgtgagccagcccttcctgatggacctggagggcaagcagggcaatttcaagaacctgagggagttcgtgtttaagaatatcgatggctacttcaagatctacagcaagcacaccccaatcaacctggtgcgcgacctgccacagggattctccgccctggagccactggtggatctgcccatcggcatcaacatcacccggtttcagacactgctggccctgcacagatcctacctgacaccaggcgactcctctagcggatggaccgcaggagctgccgcctactatgtgggctatctgcagccccggaccttcctgctgaagtacaacgagaatggcaccatcacagacgcagtggattgcgccctggaccccctgtctgagacaaagtgtacactgaagagctttaccgtggagaagggcatctatcagacaagcaatttcagggtgcagcctaccgagtccatcgtgcgctttcccaatatcacaaacctgtgcccttttggcgaggtgttcaacgccaccagattcgccagcgtgtacgcctggaatcggaagagaatctccaactgcgtggccgactattctgtgctgtacaactccgcctctttcagcacctttaagtgctatggcgtgtctcccacaaagctgaatgatctgtgctttaccaacgtgtacgccgatagcttcgtgatcaggggagacgaagtgagacagatcgcaccaggacagacaggaaagatcgcagactacaattataagctgcctgacgatttcaccggctgcgtgatcgcctggaactccaacaatctggattctaaagtgggcggcaactacaattatctgtacaggctgtttcgcaagtccaatctgaagccattcgagcgggacatctccacagagatctaccaggccggctctaccccctgcaatggcgtggagggctttaactgttatttccctctgcagtcttacggcttccagccaacaaacggcgtgggctatcagccctacagagtggtggtgctgtcctttgagctgctgcacgcaccagcaacagtgtgcggcccaaagaagtctaccaatctggtgaagaacaagtgcgtgaacttcaacttcaacggactgaccggcacaggcgtgctgaccgagagcaataagaagttcctgccttttcagcagttcggcagggacatcgcagataccacagacgccgtgcgcgaccctcagaccctggagatcctggacatcacaccatgcagcttcggcggcgtgtccgtgatcacaccaggcaccaatacatccaaccaggtggccgtgctgtatcaggacgtgaattgtaccgaggtgccccaagcaatccacgcagatcagctgacccctacatggcgggtgtactctaccggcagcaacgtgttccagacaagagccggatgcctgatcggagcagagcacgtgaacaatagctatgagtgcgacatccctatcggcgccggcatctgtgccagctaccagacccagacaaactccccatctggagcaggctccgtggccagccagtccatcatcgcctataccatgagcctgggcgccgagaacagcgtggcctactccaacaattctatcgccatccctaccaacttcacaatcagcgtgaccacagagatcctgccagtgtctatgaccaagacaagcgtggactgcacaatgtatatctgtggcgatagcaccgagtgctccaacctgctgctgcagtacggctccttttgtacccagctgaatagagccctgacaggcatcgccgtggagcaggataagaacacacaggaggtgttcgcccaggtgaagcagatctacaagaccccacccatcaaggactttggcggcttcaacttcagccagatcctgcctgatccaagcaagccctccaagaggtcttttatcgaggacctgctgttcaacaaggtgaccctggccgatgccggcttcatcaagcagtatggagattgcctgggagacatcgcagcccgcgacctgatctgtgcccagaagtttaatggcctgaccgtgctgcctccactgctgacagatgagatgatcgcccagtacacatctgccctgctggccggcaccatcacaagcggatggaccttcggcgcaggagccgccctgcagatcccttttgccatgcagatggcctataggttcaacggcatcggcgtgacccagaatgtgctgtacgagaaccagaagctgatcgccaatcagtttaacagcgccatcggcaagatccaggactctctgtcctctacagccagcgccctgggcaagctgcaggatgtggtgaatcagaacgcccaggccctgaataccctggtgaagcagctgagctccaacttcggcgccatctctagcgtgctgaatgacatcctgagccggctggacccccctgaggcagaggtgcagatcgacaggctgatcacaggccgcctgcagagcctgcagacctacgtgacacagcagctgatcagggcagcagagatcagagcctccgccaatctggccgccaccaagatgagcgagtgcgtgctgggacagtccaagagggtggacttttgtggcaagggctatcacctgatgtctttcccacagagcgcccctcacggcgtggtgtttctgcacgtgacctacgtgccagcccaggagaagaacttcaccacagcaccagccatctgccacgatggaaaggcacactttcctagggagggcgtgttcgtgtctaacggcacccactggtttgtgacacagcgcaatttctacgagccacagatcatcaccacagacaatacattcgtgagcggcaactgtgatgtggtgatcggcatcgtgaacaataccgtgtatgatccactgcagcccgagctggactcctttaaggaggagctggataagtacttcaagaatcacacctctcccgacgtggatctgggcgacatctccggcatcaatgcctctgtggtgaacatccagaaggagatcgaccggctgaacgaggtggccaagaatctgaacgagagcctgatcgatctgcaggagctgggcaagtatgagcagtacatcaagggctctggcagagagaacctgtatttccagggaggaggaggcagcggatacatccctgaggcaccaagggacggacaggcctacgtgcgcaaggatggcgagtgggtgctgctgtccacctttctgggccatcatcaccaccaccaccaccactga

SEQ ID NO: 1644 - DNA, 3846 bp, Artificial Sequence
  Description of Artificial Sequence: Synthetic polynucleotide
atgggcatcctgccaagcccaggaatgcccgccctgctgtctctggtgagcctgctgtccgtgctgctgatgggatgcgtggcagagacaggcacacagtgcgtgaacctgaccacaaggacccagctgccccctgcctataccaattctttcacacggggcgtgtactatcccgacaaggtgtttagaagctccgtgctgcactccacacaggatctgtttctgcctttcttttctaacgtgacctggttccacgccatccacgtgtccggcaccaatggcacaaagcggttcgacaatcccgtgctgccttttaacgatggcgtgtacttcgccagcaccgagaagtccaacatcatcagaggctggatctttggcaccacactggactctaagacacagagcctgctgatcgtgaacaatgccaccaacgtggtgatcaaggtgtgcgagttccagttttgtaatgatccattcctgggcgtgtactatcacaagaacaataagtcctggatggagtctgagtttcgcgtgtattctagcgccaacaattgcacatttgagtacgtgagccagcccttcctgatggacctggagggcaagcagggcaatttcaagaacctgagggagttcgtgtttaagaatatcgatggctacttcaagatctacagcaagcacaccccaatcaacctggtgcgcgacctgccacagggattctccgccctggagccactggtggatctgcccatcggcatcaacatcacccggtttcagacactgctggccctgcacagatcctacctgacaccaggcgactcctctagcggatggaccgcaggagctgccgcctactatgtgggctatctgcagccccggaccttcctgctgaagtacaacgagaatggcaccatcacagacgcagtggattgcgccctggaccccctgtctgagacaaagtgtacactgaagagctttaccgtggagaagggcatctatcagacaagcaatttcagggtgcagcctaccgagtccatcgtgcgctttcccaatatcacaaacctgtgcccttttggcgaggtgttcaacgccaccagattcgccagcgtgtacgcctggaatcggaagagaatctccaactgcgtggccgactattctgtgctgtacaactccgcctctttcagcacctttaagtgctatggcgtgtctcccacaaagctgaatgatctgtgctttaccaacgtgtacgccgatagcttcgtgatcaggggagacgaagtgagacagatcgcaccaggacagacaggaaagatcgcagactacaattataagctgcctgacgatttcaccggctgcgtgatcgcctggaactccaacaatctggattctaaagtgggcggcaactacaattatctgtacaggctgtttcgcaagtccaatctgaagccattcgagcgggacatctccacagagatctaccaggccggctctaccccctgcaatggcgtggagggctttaactgttatttccctctgcagtcttacggcttccagccaacaaacggcgtgggctatcagccctacagagtggtggtgctgtcctttgagctgctgcacgcaccagcaacagtgtgcggcccaaagaagtctaccaatctggtgaagaacaagtgcgtgaacttcaacttcaacggactgaccggcacaggcgtgctgaccgagagcaataagaagttcctgccttttcagcagttcggcagggacatcgcagataccacagacgccgtgcgcgaccctcagaccctggagatcctggacatcacaccatgcagcttcggcggcgtgtccgtgatcacaccaggcaccaatacatccaaccaggtggccgtgctgtatcaggacgtgaattgtaccgaggtgccccgtgcaatccacgcagatcagctgacccctacatggcgggtgtactctaccggcagcaacgtgttccagacaagagccggatgcctgatcggagcagagcacgtgaacaatagctatgagtgcgacatccctatcggcgccggcatctgtgccagctaccagacccagacaaactccccatctggagcaggctccgtggccagccagtccatcatcgcctataccatgagcctgggcgccgagaacagcgtggcctactccaacaattctatcgccatccctaccaacttcacaatcagcgtgaccacagagatcctgccagtgtctatgaccaagacaagcgtggactgcacaatgtatatctgtggcgatagcaccgagtgctccaacctgctgctgcagtacggctccttttgtacccagctgaatagagccctgacaggcatcgccgtggagcaggataagaacacacaggaggtgttcgcccaggtgaagcagatctacaagaccccacccatcaaggactttggcggcttcaacttcagccagatcctgcctgatccaagcaagccctccaagaggtcttttatcgaggacctgctgttcaacaaggtgaccctggccgatgccggcttcatcaagcagtatggagattgcctgggagacatcgcagcccgcgacctgatctgtgcccagaagtttaatggcctgaccgtgctgcctccactgctgacagatgagatgatcgcccagtacacatctgccctgctggccggcaccatcacaagcggatggaccttcggcgcaggagccgccctgcagatcccttttgccatgcagatggcctataggttcaacggcatcggcgtgacccagaatgtgctgtacgagaaccagaagctgatcgccaatcagtttaacagcgccatcggcaagatccaggactctctgtcctctacagccagcgccctgggcaagctgcaggatgtggtgaatcagaacgcccaggccctgaataccctggtgaagcagctgagctccaacttcggcgccatctctagcgtgctgaatgacatcctgagccggctggacccccctgaggcagaggtgcagatcgacaggctgatcacaggccgcctgcagagcctgcagacctacgtgacacagcagctgatcagggcagcagagatcagagcctccgccaatctggccgccaccaagatgagcgagtgcgtgctgggacagtccaagagggtggacttttgtggcaagggctatcacctgatgtctttcccacagagcgcccctcacggcgtggtgtttctgcacgtgacctacgtgccagcccaggagaagaacttcaccacagcaccagccatctgccacgatggaaaggcacactttcctagggagggcgtgttcgtgtctaacggcacccactggtttgtgacacagcgcaatttctacgagccacagatcatcaccacagacaatacattcgtgagcggcaactgtgatgtggtgatcggcatcgtgaacaataccgtgtatgatccactgcagcccgagctggactcctttaaggaggagctggataagtacttcaagaatcacacctctcccgacgtggatctgggcgacatctccggcatcaatgcctctgtggtgaacatccagaaggagatcgaccggctgaacgaggtggccaagaatctgaacgagagcctgatcgatctgcaggagctgggcaagtatgagcagtacatcaagggctctggcagagagaacctgtatttccagggaggaggaggcagcggatacatccctgaggcaccaagggacggacaggcctacgtgcgcaaggatggcgagtgggtgctgctgtccacctttctgggccatcatcaccaccaccaccaccactga

SEQ ID NO: 1645 - DNA, 3846 bp, Artificial Sequence
  Description of Artificial Sequence: Synthetic polynucleotide
atgggcatcctgccaagcccaggaatgcccgccctgctgtctctggtgagcctgctgtccgtgctgctgatgggatgcgtggcagagacaggcacacagtgcgtgaacctgaccacaaggacccagctgccccctgcctataccaattctttcacacggggcgtgtactatcccgacaaggtgtttagaagctccgtgctgcactccacacaggatctgtttctgcctttcttttctaacgtgacctggttccacgccatccacgtgtccggcaccaatggcacaaagcggttcgacaatcccgtgctgccttttaacgatggcgtgtacttcgccagcaccgagaagtccaacatcatcagaggctggatctttggcaccacactggactctaagacacagagcctgctgatcgtgaacaatgccaccaacgtggtgatcaaggtgtgcgagttccagttttgtaatgatccattcctgggcgtgtactatcacaagaacaataagtcctggatggagtctgagtttcgcgtgtattctagcgccaacaattgcacatttgagtacgtgagccagcccttcctgatggacctggagggcaagcagggcaatttcaagaacctgagggagttcgtgtttaagaatatcgatggctacttcaagatctacagcaagcacaccccaatcaacctggtgcgcgacctgccacagggattctccgccctggagccactggtggatctgcccatcggcatcaacatcacccggtttcagacactgctggccctgcacagatcctacctgacaccaggcgactcctctagcggatggaccgcaggagctgccgcctactatgtgggctatctgcagccccggaccttcctgctgaagtacaacgagaatggcaccatcacagacgcagtggattgcgccctggaccccctgtctgagacaaagtgtacactgaagagctttaccgtggagaagggcatctatcagacaagcaatttcagggtgcagcctaccgaggaaatcgtgcgctttcccaatatcacaaacctgtgcccttttggcgaggtgttcaacgccaccagattcgccagcgtgtacgcctggaatcggaagagaatctccaactgcgtggccgactattctgtgctgtacaactccgcctctttcagcacctttaagtgctatggcgtgtctcccacaaagctgaatgatctgtgctttaccaacgtgtacgccgatagcttcgtgatcaggggagacgaagtgagacagatcgcaccaggacagacaggaaagatcgcagactacaattataagctgcctgacgatttcaccggctgcgtgatcgcctggaactccaacaatctggattctaaagtgggcggcaactacaattatctgtacaggctgtttcgcaagtccaatctgaagccattcgagcgggacatctccacagagatctaccaggccggctctaccccctgcaatggcgtggagggctttaactgttatttccctctgcagtcttacggcttccagccaacaaacggcgtgggctatcagccctacagagtggtggtgctgtcctttgagctgctgcacgcaccagcaacagtgtgcggcccaaagaagtctaccaatctggtgaagaacaagtgcgtgaacttcaacttcaacggactgaccggcacaggcgtgctgaccgagagcaataagaagttcctgccttttcagcagttcggcagggacatcgcagataccacagacgccgtgcgcgaccctcagaccctggagatcctggacatcacaccatgcagcttcggcggcgtgtccgtgatcacaccaggcaccaatacatccaaccaggtggccgtgctgtatcaggacgtgaattgtaccgaggtgcccgtggcaatccacgcagatcagctgacccctacatggcgggtgtactctaccggcagcaacgtgttccagacaagagccggatgcctgatcggagcagagcacgtgaacaatagctatgagtgcgacatccctatcggcgccggcatctgtgccagctaccagacccagacaaactccccatctggagcaggctccgtggccagccagtccatcatcgcctataccatgagcctgggcgccgagaacagcgtggcctactccaacaattctatcgccatccctaccaacttcacaatcagcgtgaccacagagatcctgccagtgtctatgaccaagacaagcgtggactgcacaatgtatatctgtggcgatagcaccgagtgctccaacctgctgctgcagtacggctccttttgtacccagctgaatagagccctgacaggcatcgccgtggagcaggataagaacacacaggaggtgttcgcccaggtgaagcagatctacaagaccccacccatcaaggactttggcggcttcaacttcagccagatcctgcctgatccaagcaagccctccaagaggtcttttatcgaggacctgctgttcaacaaggtgaccctggccgatgccggcttcatcaagcagtatggagattgcctgggagacatcgcagcccgcgacctgatctgtgcccagaagtttaatggcctgaccgtgctgcctccactgctgacagatgagatgatcgcccagtacacatctgccctgctggccggcaccatcacaagcggatggaccttcggcgcaggagccgccctgcagatcccttttgccatgcagatggcctataggttcaacggcatcggcgtgacccagaatgtgctgtacgagaaccagaagctgatcgccaatcagtttaacagcgccatcggcaagatccaggactctctgtcctctacagccagcgccctgggcaagctgcaggatgtggtgaatcagaacgcccaggccctgaataccctggtgaagcagctgagctccaacttcggcgccatctctagcgtgctgaatgacatcctgagccggctggacccccctgaggcagaggtgcagatcgacaggctgatcacaggccgcctgcagagcctgcagacctacgtgacacagcagctgatcagggcagcagagatcagagcctccgccaatctggccgccaccaagatgagcgagtgcgtgctgggacagtccaagagggtggacttttgtggcaagggctatcacctgatgtctttcccacagagcgcccctcacggcgtggtgtttctgcacgtgacctacgtgccagcccaggagaagaacttcaccacagcaccagccatctgccacgatggaaaggcacactttcctagggagggcgtgttcgtgtctaacggcacccactggtttgtgacacagcgcaatttctacgagccacagatcatcaccacagacaatacattcgtgagcggcaactgtgatgtggtgatcggcatcgtgaacaataccgtgtatgatccactgcagcccgagctggactcctttaaggaggagctggataagtacttcaagaatcacacctctcccgacgtggatctgggcgacatctccggcatcaatgcctctgtggtgaacatccagaaggagatcgaccggctgaacgaggtggccaagaatctgaacgagagcctgatcgatctgcaggagctgggcaagtatgagcagtacatcaagggctctggcagagagaacctgtatttccagggaggaggaggcagcggatacatccctgaggcaccaagggacggacaggcctacgtgcgcaaggatggcgagtgggtgctgctgtccacctttctgggccatcatcaccaccaccaccaccactga

SEQ ID NO: 1646 - DNA, 3846 bp, Artificial Sequence
  Description of Artificial Sequence: Synthetic polynucleotide
atgggcatcctgccaagcccaggaatgcccgccctgctgtctctggtgagcctgctgtccgtgctgctgatgggatgcgtggcagagacaggcacacagtgcgtgaacctgaccacaaggacccagctgccccctgcctataccaattctttcacacggggcgtgtactatcccgacaaggtgtttagaagctccgtgctgcactccacacaggatctgtttctgcctttcttttctaacgtgacctggttccacgccatccacgtgtccggcaccaatggcacaaagcggttcgacaatcccgtgctgccttttaacgatggcgtgtacttcgccagcaccgagaagtccaacatcatcagaggctggatctttggcaccacactggactctaagacacagagcctgctgatcgtgaacaatgccaccaacgtggtgatcaaggtgtgcgagttccagttttgtaatgatccattcctgggcgtgtactatcacaagaacaataagtcctggatggagtctgagtttcgcgtgtattctagcgccaacaattgcacatttgagtacgtgagccagcccttcctgatggacctggagggcaagcagggcaatttcaagaacctgagggagttcgtgtttaagaatatcgatggctacttcaagatctacagcaagcacaccccaatcaacctggtgcgcgacctgccacagggattctccgccctggagccactggtggatctgcccatcggcatcaacatcacccggtttcagacactgctggccctgcacagatcctacctgacaccaggcgactcctctagcggatggaccgcaggagctgccgcctactatgtgggctatctgcagccccggaccttcctgctgaagtacaacgagaatggcaccatcacagacgcagtggattgcgccctggaccccctgtctgagacaaagtgtacactgaagagctttaccgtggagaagggcatctatcagacaagcaatttcagggtgcagcctaccgagtccatcgtgcgctttcccaatatcacaaacctgtgcccttttggcgaggtgttcaacgccaccagattcgccagcgtgtacgcctggaatcggaagagaatctccaactgcgtggccgactattctgtgctgtacaactccgcctctttcagcacctttaagtgctatggcgtgtctcccacaaagctgaatgatctgtgctttaccaacgtgtacgccgatagcttcgtgatcaggggagacgaagtgagacagatcgcaccaggacagacaggaaagatcgcagactacaattataagctgcctgacgatttcaccggctgcgtgatcgcctggaactccaacaatctggattctaaagtgggcggcaactacaattatctgtacaggctgtttcgcaagtccaatctgaagccattcgagcgggacatctccacagagatctaccaggccggctctaccccctgcaatggcgtggagggctttaactgttatttccctctgcagtcttacggcttccagccaacaaacggcgtgggctatcagccctacagagtggtggtgctgtcctttgagctgctgcacgcaccagcaacagtgtgcggcccaaagaagtctaccaatctggtgaagaacaagtgcgtgaacttcaacttcaacggactgaccggcacaggcgtgctgaccgagagcaataagaagttcctgccttttcagcagttcggcagggacatcgcagataccacagacgccgtgcgcgaccctcagaccctggagatcctggacatcacaccatgcagcttcggcggcgtgtccgtgatcacaccaggcaccaatacatccaaccaggtggccgtgctgtatcaggacgtgaattgtaccgaggtgcccgtggcaatccacgcagatcagctgacccctacatggcgggtgtactctaccggcagcaacgtgttccagacaagagccggatgcctgatcggagcagagcacgtgaacaatagctatgagtgcgacatccctatcggcgccggcatctgtgccagctaccagacccagacaaactccccatctggagcaggctccgtggccagccagtccatcatcgcctataccatgagcctgggcgccgagaacagcgtggcctactccaacaattctatcgccatccctaccaacttcacaatcagcgtgaccacagagatcctgccagtgtctatgaccaagacaagcgtggactgcacaatgtatatctgtggcgatagcaccgagtgctccaacctgctgctgcagtacggctccttttgtacccagctgaatagagccctgacaggcatcgccgtggagcaggataagaacacacaggaggtgttcgcccaggtgaagcagatctacaagaccccacccatcaaggactttggcggcttcaacttcagccagatcctgcctgatccaagcaagccctccaagaggtcttttatcgaggacctgctgttcaacaaggtgaccctggccgatgccggcttcatcaagcagtatggagattgcctgggagacatcgcagcccgcgacctgatctgtgcccagaagtttaatggcctgaccgtgctgcctccactgctgacagatgagatgatcgcccagtacacatctgccctgctggccggcaccatcacaagcggatggaccttcggcgcaggagccgccctgcagatcccttttgccatgcagatggcctataggttcaacggcatcggcgtgacccagaatgtgctgtacgagaaccagaagctgatcgccaatcagtttaacagcgccatcggcaagatccaggactctctgtcctctacagccagcgccctgggcaagctgcaggatgtggtgaatcagaacgcccaggccctgaataccctggtgaagcagctgagctccaacttcggcgccatctctagcgtgctgaatgacatcctgagccggctggacccccctgaggcagaggcgcagatcgacaggctgatcacaggccgcctgcagagcctgcagacctacgtgacacagcagctgatcagggcagcagagatcagagcctccgccaatctggccgccaccaagatgagcgagtgcgtgctgggacagtccaagagggtggacttttgtggcaagggctatcacctgatgtctttcccacagagcgcccctcacggcgtggtgtttctgcacgtgacctacgtgccagcccaggagaagaacttcaccacagcaccagccatctgccacgatggaaaggcacactttcctagggagggcgtgttcgtgtctaacggcacccactggtttgtgacacagcgcaatttctacgagccacagatcatcaccacagacaatacattcgtgagcggcaactgtgatgtggtgatcggcatcgtgaacaataccgtgtatgatccactgcagcccgagctggactcctttaaggaggagctggataagtacttcaagaatcacacctctcccgacgtggatctgggcgacatctccggcatcaatgcctctgtggtgaacatccagaaggagatcgaccggctgaacgaggtggccaagaatctgaacgagagcctgatcgatctgcaggagctgggcaagtatgagcagtacatcaagggctctggcagagagaacctgtatttccagggaggaggaggcagcggatacatccctgaggcaccaagggacggacaggcctacgtgcgcaaggatggcgagtgggtgctgctgtccacctttctgggccatcatcaccaccaccaccaccactga

SEQ ID NO: 1647 - DNA, 3846 bp, Artificial Sequence
  Description of Artificial Sequence: Synthetic polynucleotide
atgggcatcctgccaagcccaggaatgcccgccctgctgtctctggtgagcctgctgtccgtgctgctgatgggatgcgtggcagagacaggcacacagtgcgtgaacctgaccacaaggacccagctgccccctgcctataccaattctttcacacggggcgtgtactatcccgacaaggtgtttagaagctccgtgctgcactccacacaggatctgtttctgcctttcttttctaacgtgacctggttccacgccatccacgtgtccggcaccaatggcacaaagcggttcgacaatcccgtgctgccttttaacgatggcgtgtacttcgccagcaccgagaagtccaacatcatcagaggctggatctttggcaccacactggactctaagacacagagcctgctgatcgtgaacaatgccaccaacgtggtgatcaaggtgtgcgagttccagttttgtaatgatccattcctgggcgtgtactatcacaagaacaataagtcctggatggagtctgagtttcgcgtgtattctagcgccaacaattgcacatttgagtacgtgagccagcccttcctgatggacctggagggcaagcagggcaatttcaagaacctgagggagttcgtgtttaagaatatcgatggctacttcaagatctacagcaagcacaccccaatcaacctggtgcgcgacctgccacagggattctccgccctggagccactggtggatctgcccatcggcatcaacatcacccggtttcagacactgctggccctgcacagatcctacctgacaccaggcgactcctctagcggatggaccgcaggagctgccgcctactatgtgggctatctgcagccccggaccttcctgctgaagtacaacgagaatggcaccatcacagacgcagtggattgcgccctggaccccctgtctgagacaaagtgtacactgaagagctttaccgtggagaagggcatctatcagacaagcaatttcagggtgcagcctaccgagtccatcgtgcgctttcccaatatcacaaacctgtgcccttttggcgaggtgttcaacgccaccagattcgccagcgtgtacgcctggaatcggaagagaatctccaactgcgtggccgactattctgtgctgtacaactccgcctctttcagcacctttaagtgctatggcgtgtctcccacaaagctgaatgatctgtgctttaccaacgtgtacgccgatagcttcgtgatcaggggagacgaagtgagacagatcgcaccaggacagacaggaaagatcgcagactacaattataagctgcctgacgatttcaccggctgcgtgatcgcctggaactccaacaatctggattctaaagtgggcggcaactacaattatctgtacaggctgtttcgcaagtccaatctgaagccattcgagcgggacatctccacagagatctaccaggccggctctaccccctgcaatggcgtggagggctttaactgttatttccctctgcagtcttacggcttccagccaacaaacggcgtgggctatcagccctacagagtggtggtgctgtcctttgagctgctgcacgcaccagcaacagtgtgcggcccaaagaagtctaccaatctggtgaagaacaagtgcgtgaacttcaacttcaacggactgaccggcacaggcgtgctgaccgagagcaataagaagttcctgccttttcagcagttcggcagggacatcgcagataccacagacgccgtgcgcgaccctcagaccctggagatcctggacatcacaccatgcagcttcggcggcgtgtccgtgatcacaccaggcaccaatacatccaaccaggtggccgtgctgtatcaggacgtgaattgtaccgaggtgcccgtggcaatccacgcagatcagctgacccctacatggcgggtgtactctaccggcagcaacgtgttccagacaagagccggatgcctgatcggagcagagcacgtgaacaatagctatgagtgcgacatccctatcggcgccggcatctgtgccagctaccagacccagacaaactccccatctggagcaggctccgtggccagccagtccatcatcgcctataccatgagcctgggcgccgagaacagcgtggcctactccaacaattctatcgccatccctaccaacttcacaatcagcgtgaccacagagatcctgccagtgtctatgaccaagacaagcgtggactgcacaatgtatatctgtggcgatagcaccgagtgctccaacctgctgctgcagtacggctccttttgtacccagctgaatagagccctgacaggcatcgccgtggagcaggataagaacacacaggaggtgttcgcccaggtgaagcagatctacaagaccccacccatcaaggactttggcggcttcaacttcagccagatcctgcctgatccaagcaagccctccaagaggtcttttatcgaggacctgctgttcaacaaggtgaccctggccgatgccggcttcatcaagcagtatggagattgcctgggagacatcgcagcccgcgacctgatctgtgcccagaagtttaatggcctgaccgtgctgcctccactgctgacagatgagatgatcgcccagtacacatctgccctgctggccggcaccatcacaagcggatggaccttcggcgcaggagccgccctgcagatcccttttgccatgcagatggcctataggttcaacggcatcggcgtgacccagaatgtgctgtacgagaaccagaagctgatcgccaatcagtttaacagcgccatcggcaagatccaggactctctgtcctctacagccagcgccctgggcaagctgcaggatgtggtgaatcagaacgcccaggccctgacgaccctggtgaagcagctgagctccaacttcggcgccatctctagcgtgctgaatgacatcctgagccggctggacccccctgaggcagaggtgcagatcgacaggctgatcacaggccgcctgcagagcctgcagacctacgtgacacagcagctgatcagggcagcagagatcagagcctccgccaatctggccgccaccaagatgagcgagtgcgtgctgggacagtccaagagggtggacttttgtggcaagggctatcacctgatgtctttcccacagagcgcccctcacggcgtggtgtttctgcacgtgacctacgtgccagcccaggagaagaacttcaccacagcaccagccatctgccacgatggaaaggcacactttcctagggagggcgtgttcgtgtctaacggcacccactggtttgtgacacagcgcaatttctacgagccacagatcatcaccacagacaatacattcgtgagcggcaactgtgatgtggtgatcggcatcgtgaacaataccgtgtatgatccactgcagcccgagctggactcctttaaggaggagctggataagtacttcaagaatcacacctctcccgacgtggatctgggcgacatctccggcatcaatgcctctgtggtgaacatccagaaggagatcgaccggctgaacgaggtggccaagaatctgaacgagagcctgatcgatctgcaggagctgggcaagtatgagcagtacatcaagggctctggcagagagaacctgtatttccagggaggaggaggcagcggatacatccctgaggcaccaagggacggacaggcctacgtgcgcaaggatggcgagtgggtgctgctgtccacctttctgggccatcatcaccaccaccaccaccactga

SEQ ID NO: 1648 - DNA, 3846 bp, Artificial Sequence
  Description of Artificial Sequence: Synthetic polynucleotide
atgggcatcctgccaagcccaggaatgcccgccctgctgtctctggtgagcctgctgtccgtgctgctgatgggatgcgtggcagagacaggcacacagtgcgtgaacctgaccacaaggacccagctgccccctgcctataccaattctttcacacggggcgtgtactatcccgacaagatctttagaagcaacgtgctgcactccacacaggatctgtttctgcctttcttttctaacgtgacctggttccacgccatccacgtgtccggcaccaatggcacaaagcggttcgacaatcccgtgctgccttttaacgatggcgtgtacttcgccagcaccgagaagtccaacatcatcagaggctggatctttggcaccacactggactctaagacacagagcctgctgatcgtgaacaatgccaccaacgtggtgatcaaggtgtgcgagttccagttttgtaatgatccattcctgggcgtgtactatcacaagaacaataagtcctggatggagtctgagtttcgcgtgtattctagcgccaacaattgcacatttgagtacgtgagccagcccttcctgatggacctggagggcaagcagggcaatttcaagaacctgagggagttcgtgtttaagaatatcgatggctacttcaagatctacagcaagtgggaaccaatcaacctggtgcgcgacctgccacagggattctccccgctggagccactggtggatctgcccatcggcatcaacatcacccggtttcagacactgctggccctgcacagatcctacctgacaccaggcgactcctctagcggatggaccgcaggagctgccgcctactatgtgggctatctgcagccccggaccttcctgctgaagtacgatgagaatggctatatcacagacgcagtggattgcgccctggaccccctgtctgagacaaagtgtacactgaagagctttaccgtggagaagggcatctatcagacaagcaatttcagggtgcagcctaccgagtccatcgtgcgctttcccaatatcacaaacctgtgcccttttggcgaggtgttcaacgccaccagattcgccagcgtgtacgcctggaatcggaagagaatctccaactgcgtggccgactattctgtgctgtacaactccgcctctttcagcacctttaagtgctatggcgtgtctcccacaaagctgaatgatctgtgctttaccaacgtgtacgccgatagcttcgtgatcaggggagacgaagtgagacagatcgcaccaggacagacaggaaagatcgcagactacaattataagctgcctgacgatttcaccggctgcgtgatcgcctggaactccaacaatctggattctaaagtgggcggcaactacaattatctgtacaggctgtttcgcaagtccaatctgaagccattcgagcgggacatctccacagagatctaccaggccggctctaccccctgcaatggcgtggagggctttaactgttatttccctctgcagtcttacggcttccagccaacaaacggcgtgggctatcagccctacagagtggtggtgctgtcctttgagctgctgcacgcaccagcaacagtgtgcggcccaaagaagtctaccaatctggtgaagaacaagtgcgtgaacttcaacttcaacggactgaccggcacaggcgtgctgaccgagagcaataagaagttcctgccttttcagcagttcggcagggacatcgcagataccacagacgccgtgcgcgaccctcagaccctggagatcctggacatcacaccatgcagcttcggcggcgtgtccgtgatcacaccaggcaccaatacatccaaccaggtggccgtgctgtatcaggacgtgaattgtaccgaggtgcccgtggcaatccacgcagatcagctgacccctacatggcgggtgtactctaccggcagcaacgtgttccagacaagagccggatgcctgatcggagcagagcacgtgaacaatagctatgagtgcgacatccctatcggcgccggcatctgtgccagctaccagacccagacaaactccccatctggagcaggctccgtggccagccagtccatcatcgcctataccatgagcctgggcgccgagaacagcgtggcctactccaacaattctatcgccatccctaccaacttcacaatcagcgtgaccacagagatcctgccagtgtctatgaccaagacaagcgtggactgcacaatgtatatctgtggcgatagcaccgagtgctccaacctgctgctgcagtacggctccttttgtacccagctgaatagagccctgacaggcatcgccgtggagcaggataagaacacacaggaggtgttcgcccaggtgaagcagatctacaagaccccacccatcaaggactttggcggcttcaacttcagccagatcctgcctgatccaagcaagccctccaagaggtcttttatcgaggacctgctgttcaacaaggtgaccctggccgatgccggcttcatcaagcagtatggagattgcctgggagacatcgcagcccgcgacctgatctgtgcccagaagtttaatggcctgaccgtgctgcctccactgctgacagatgagatgatcgcccagtacacatctgccctgctggccggcaccatcacaagcggatggaccttcggcgcaggagccgccctgcagatcccttttgccatgcagatggcctataggttcaacggcatcggcgtgacccagaatgtgctgtacgagaaccagaagctgatcgccaatcagtttaacagcgccatcggcaagatccaggactctctgtcctctacagccagcgccctgggcaagctgcaggatgtggtgaatcagaacgcccaggccctgaataccctggtgaagcagctgagctccaacttcggcgccatctctagcgtgctgaatgacatcctgagccggctggacccccctgaggcagaggtgcagatcgacaggctgatcacaggccgcctgcagagcctgcagacctacgtgacacagcagctgatcagggcagcagagatcagagcctccgccaatctggccgccaccaagatgagcgagtgcgtgctgggacagtccaagagggtggacttttgtggcaagggctatcacctgatgtctttcccacagagcgcccctcacggcgtggtgtttctgcacgtgacctacgtgccagcccaggagaagaacttcaccacagcaccagccatctgccacgatggaaaggcacactttcctagggagggcgtgttcgtgtctaacggcacccactggtttgtgacacagcgcaatttctacgagccacagatcatcaccacagacaatacattcgtgagcggcaactgtgatgtggtgatcggcatcgtgaacaataccgtgtatgatccactgcagcccgagctggactcctttaaggaggagctggataagtacttcaagaatcacacctctcccgacgtggatctgggcgacatctccggcatcaatgcctctgtggtgaacatccagaaggagatcgaccggctgaacgaggtggccaagaatctgaacgagagcctgatcgatctgcaggagctgggcaagtatgagcagtacatcaagggctctggcagagagaacctgtatttccagggaggaggaggcagcggatacatccctgaggcaccaagggacggacaggcctacgtgcgcaaggatggcgagtgggtgctgctgtccacctttctgggccatcatcaccaccaccaccaccactga

SEQ ID NO: 1649 - DNA, 3846 bp, Artificial Sequence
  Description of Artificial Sequence: Synthetic polynucleotide
atgggcatcctgccaagcccaggaatgcccgccctgctgtctctggtgagcctgctgtccgtgctgctgatgggatgcgtggcagagacaggcacacagtgcgtgaacctgaccacaaggacccagctgccccctgcctataccaattctttcacacggggcgtgtactatcccgacaaggtgtttagaagctccgtgctgcactccacacaggatctgtttctgcctttcttttctaacgtgacctggttccacgccatccacgtgtccggcaccaatggcacaaagcggttcgacaatcccgtgctgccttttaacgatggcgtgtacttcgccagcaccgagaagtccaacatcatcagaggctggatctttggcaccacactggactctaagacacagagcctgctgatcgtgaacaatgccaccaacgtggtgatcaaggtgtgcgagttccagttttgtaatgatccattcctggttgtgtactatcacaagaacaataagtcctggatggagtctgagtttcgcgtgtattctagcgccaacaattgcacatttgagtacgtgagccagcccttcctgatggacctggagggcaagcagggcaatttcaagaacctgagggagttcgtgtttaagaatatcgatggctacttcaagatctacagcaagcacaccccaatcaacctggtgcgcgacctgccacagggattctccgccctggagccactggtggatctgcccatcggcatcaacatcacccggtttcagacactgctggccctgcacagatcctacctgacaccaggcgactcctctagcggatggaccgcaggagctgccgcctactatgtgggctatctgcagccccggaccttcctgctgaagtacaacgagaatggcaccatcacagacgcagtggattgcgccctggaccccctgtctgagacaaagtgtacactgaagagctttaccgtggagaagggcatctatcagacaagcaatttcagggtgcagcctaccgagtccatcgtgcgctttcccaatatcacaaacctgtgcccttttggcgaggtgttcaacgccaccagattcgccagcgtgtacgcctggaatcggaagagaatctccaactgcgtggccgactattctgtgctgtacaactccgcctctttcagcacctttaagtgctatggcgtgtctcccacaaagctgaatgatctgtgctttaccaacgtgtacgccgatagcttcgtgatcaggggagacgaagtgagacagatcgcaccaggacagacaggaaagatcgcagactacaattataagctgcctgacgatttcaccggctgcgtgatcgcctggaactccaacaatctggattctaaagtgggcggcaactacaattatctgtacaggctgtttcgcaagtccaatctgaagccattcgagcgggacatctccacagagatctaccaggccggctctaccccctgcaatggcgtggagggctttaactgttatttccctctgcagtcttacggcttccagccaacaaacggcgtgggctatcagccctacagagtggtggtgctgtcctttgagctgctgcacgcaccagcaacagtgtgcggcccaaagaagtctaccaatctggtgaagaacaagtgcgtgaacttcaacttcaacggactgaccggcacaggcgtgctgaccgagagcaataagaagttcctgccttttcagcagttcggcagggacatcgcagataccacagacgccgtgcgcgaccctcagaccctggagatcctggacatcacaccatgcagcttcggcggcgtgtccgtgatcacaccaggcaccaatacatccaaccaggtggccgtgctgtatcaggacgtgaattgtaccgaggtgcccgtggcaatccacgcagatcagctgacccctacatggcgggtgtactctaccggcagcaacgtgttccagacaagagccggatgcctgatcggagcagagcacgtgaacaatagctatgagtgcgacatccctatcggcgccggcatctgtgccagctaccagacccagacaaactccccatctggagcaggctccgtggccagccagtccatcatcgcctataccatgagcctgggcgccgagaacagcgtggcctactccaacaattctatcgccatccctaccaacttcacaatcagcgtgaccacagagatcctgccagtgtctatgaccaagacaagcgtggactgcacaatgtatatctgtggcgatagcaccgagtgctccaacctgctgctgcagtacggctccttttgtacccagctgaatagagccctgacaggcatcgccgtggagcaggataagaacacacaggaggtgttcgcccaggtgaagcagatctacaagaccccacccatcaaggactttggcggcttcaacttcagccagatcctgcctgatccaagcaagccctccaagaggtcttttatcgaggacctgctgttcaacaaggtgaccctggccgatgccggcttcatcaagcagtatggagattgcctgggagacatcgcagcccgcgacctgatctgtgcccagaagtttaatggcctgaccgtgctgcctccactgctgacagatgagatgatcgcccagtacacatctgccctgctggccggcaccatcacaagcggatggaccttcggcgcaggagccgccctgcagatcccttttgccatgcagatggcctataggttcaacggcatcggcgtgacccagaatgtgctgtacgagaaccagaagctgatcgccaatcagtttaacagcgccatcggcaagatccaggactctctgtcctctacagccagcgccctgggcaagctgcaggatgtggtgaatcagaacgcccaggccctgaataccctggtgaagcagctgagctccaacttcggcgccatctctagcgtgctgaatgacatcctgagccggctggacccccctgaggcagaggtgcagatcgacaggctgatcacaggccgcctgcagagcctgcagacctacgtgacacagcagctgatcagggcagcagagatcagagcctccgccaatctggccgccaccaagatgagcgagtgcgtgctgggacagtccaagagggtggacttttgtggcaagggctatcacctgatgtctttcccacagagcgcccctcacggcgtggtgtttctgcacgtgacctacgtgccagcccaggagaagaacttcaccacagcaccagccatctgccacgatggaaaggcacactttcctagggagggcgtgttcgtgtctaacggcacccactggtttgtgacacagcgcaatttctacgagccacagatcatcaccacagacaatacattcgtgagcggcaactgtgatgtggtgatcggcatcgtgaacaataccgtgtatgatccactgcagcccgagctggactcctttaaggaggagctggataagtacttcaagaatcacacctctcccgacgtggatctgggcgacatctccggcatcaatgcctctgtggtgaacatccagaaggagatcgaccggctgaacgaggtggccaagaatctgaacgagagcctgatcgatctgcaggagctgggcaagtatgagcagtacatcaagggctctggcagagagaacctgtatttccagggaggaggaggcagcggatacatccctgaggcaccaagggacggacaggcctacgtgcgcaaggatggcgagtgggtgctgctgtccacctttctgggccatcatcaccaccaccaccaccactga

SEQ ID NO: 1650 - DNA, 3846 bp, Artificial Sequence
  Description of Artificial Sequence: Synthetic polynucleotide
atgggcatcctgccaagcccaggaatgcccgccctgctgtctctggtgagcctgctgtccgtgctgctgatgggatgcgtggcagagacaggcacacagtgcgtgaacctgaccacaaggacccagctgccccctgcctataccaattctttcacacggggcgtgtactatcccgacaaggtgtttagaagctccgtgctgcactccacacaggatctgtttctgcctttcttttctaacgtgacctggttccacgccatccacgtgtccggcaccaatggcacaaagcggttcgacaatcccgtgctgccttttaacgatggcgtgtacttcgccagcaccgagaagtccaacatcatcagaggctggatctttggcaccacactggactctaagacacagagcctgctgatcgtgaacaatgccaccaacgtggtgatcaaggtgtgcgagttccagttttgtaatgatccattcctgggcgtgtactatcacaagaacaataagtcctggatggagtctgagtttcgcgtgtattctagcgccaacaattgcacatttgagtacgtgagccagcccttcctgatggacctggagggcaagcagggcaatttcaagaacctgagggagttcgtgtttaagaatatcgatggctacttcaagatctacagcaagcacaccccaatcaacctggtgcgcgacctgccacagggattctccgccctggagccactggtggatctgcccatcggcatcaacatcacccggtttcagacactgctggccctgcacagatcctacctgacaccaggcgactcctctagcggatggaccgcaggagctgccgcctactatgtgggctatctgcagccccggaccttcctgctgaagtacaacgagaatggcaccatcacagacgcagtggattgcgccctggaccccctgtctgagacaaagtgtacactgaagagctttaccgtggagaagggcatctatcagacaagcaatttcagggtgcagcctaccgagtccatcgtgcgctttcccaatatcacaaacctgtgcccttttggcgaggtgttcaacgccaccagattcgccagcgtgtacgcctggaatcggaagagaatctccaactgcgtggccgactattctgtgctgtacaactccgcctctttcagcacctttaagtgctatggcgtgtctcccacaaagctgaatgatctgtgctttaccaacgtgtacgccgatagcttcgtgatcaggggagacgaagtgagacagatcgcaccaggacagacaggaaagatcgcagactacaattataagctgcctgacgatttcaccggctgcgtgatcgcctggaactccaacaatctggattctaaagtgggcggcaactacaattatctgtacaggctgtttcgcaagtccaatctgaagccattcgagcgggacatctccacagagatctaccaggccggctctaccccctgcaatggcgtggagggctttaactgttatttccctctgcagtcttacggcttccagccaacaaacggcgtgggctatcagccctacagagtggtggtgctgtcctttgagctgctgcacgcaccagcaacagtgtgcggcccaaagaagtctaccaatctggtgaagaacaagtgcgtgaacttcaacttcaacggactgaccggcacaggcgtgctgaccgagagcaataagaagttcctgccttttcagcagttcggcagggacatcgcagataccacagacgccgtgcgcgaccctcagaccctggagatcctggacatcacaccatgcagcttcggcggcgtgtccgtgatcacaccaggcaccaatacatccaaccaggtggccgtgctgtatcaggacgtgaattgtaccgaggtgcccgtggcaatccacgcagatcagctgacccctacatggcgggtgtactctaccggcagcaacgtgttccagacaagagccggatgcctgatcggagcagagcacgtgaacaatagctatgagtgcgacatccctatcggcgccggcatctgtgccagctaccagacccagacaaactccccatctggagcaggctccgtggccagccagtccatcatcgcctataccatgagcctgggcgccgagaacagcgtggcctactccaacaattctatcgccatccctaccaacttcacaatcagcgtgaccacagagatcctgccagtgtctatgaccaagacaagcgtggactgcacaatgtatatctgtggcgatagcaccgagtgctccaacctgctgctgcagtacggctccttttgtacccagctgaatagagccctgacaggcatcgccgtggagcaggataagaacacacaggaggtgttcgcccaggtgaagcagatctacaagaccccacccatcaaggactttggcggcttcaacttcagccagatcctgcctgatccaagcaagccctccaagaggtcttttatcgaggacctgctgttcaacaaggtgaccctggccgatgccggcttcatcaagcagtatggagattgcctgggagacatcgcagcccgcgacctgatctgtgcccagaagtttaatggcctgaccgtgctgcctccactgctgacagatgagatgatcgcccagtacacatctgccctgctggccggcaccatcacaagcggatggaccttcggcgcaggagccgccctgcagatcccttttgccatgcagatggcctataggttcaacggcatcggcgtgcaacagaatgtgctgtacgagaaccagaagctgatcgccaatcagtttaacagcgccatcggcaagatccaggactctctgtcctctacagccagcgccctgggcaagctgcaggatgtggtgaatcagaacgcccaggccctgaataccctggtgaagcagctgagctccaacttcggcgccatctctagcgtgctgaatgacatcctgagccggctggacccccctgaggcagaggtgcagatcgacaggctgatcacaggccgcctgcagagcctgcagacctacgtgacacagcagctgatcagggcagcagagatcagagcctccgccaatctggccgccaccaagatgagcgagtgcgtgctgggacagtccaagagggtggacttttgtggcaagggctatcacctgatgtctttcccacagagcgcccctcacggcgtggtgtttctgcacgtgacctacgtgccagcccaggagaagaacttcaccacagcaccagccatctgccacgatggaaaggcacactttcctagggagggcgtgttcgtgtctaacggcacccactggtttgtgacacagcgcaatttctacgagccacagatcatcaccacagacaatacattcgtgagcggcaactgtgatgtggtgatcggcatcgtgaacaataccgtgtatgatccactgcagcccgagctggactcctttaaggaggagctggataagtacttcaagaatcacacctctcccgacgtggatctgggcgacatctccggcatcaatgcctctgtggtgaacatccagaaggagatcgaccggctgaacgaggtggccaagaatctgaacgagagcctgatcgatctgcaggagctgggcaagtatgagcagtacatcaagggctctggcagagagaacctgtatttccagggaggaggaggcagcggatacatccctgaggcaccaagggacggacaggcctacgtgcgcaaggatggcgagtgggtgctgctgtccacctttctgggccatcatcaccaccaccaccaccactga

SEQ ID NO: 1651 - DNA, 3846 bp, Artificial Sequence
  Description of Artificial Sequence: Synthetic polynucleotide
atgggcatcctgccaagcccaggaatgcccgccctgctgtctctggtgagcctgctgtccgtgctgctgatgggatgcgtggcagagacaggcacacagtgcgtgaacctgaccacaaggacccagctgccccctgcctataccaattctttcacacggggcgtgtactatcccgacaagatatttagaagctccgtgctgcaccttacacaggatctgtttctgcctttcttttctaacgtgacctggttccacgccatccacgtgtccggcaccaatggcacaaagcggttcgacaatcccgtgctgccttttaacgatggcgtgtacttcgccgctaccgagaagtccaacatcatcagaggctggatctttggcaccacactggactctaagacacagagcctgctgatcgtgaacaatgccaccaacgtggtgatcaaggtgtgcaatttccagttttgtaatgatccattcctgggcgtgtactatcacaagaacaataagtcctggatggagtctgagtttcgcgtgtattctagcgccaacaattgcacatttgagtacgtgagccagcccttcctgatggacctggagggcaagcagggcaatttcaagaacctgagggagttcgtgtttaagaatatcgatggctacttcaagatctacagcaagcacaccccaatcaacctggtgcgcgacctgccacagggattctccgccctggagccactggtgaaactgcccatcggcatcaacatcacccggtttcagacactgctggccctgcacagatcctacctgacaccaggcgactcctctagcggatggaccgcaggagctgccgcctactatgtgggctatctgcagccccggaccttcctgctgaagtacaacgagaatggcaccatcacagacgcagtggattgcgccctggaccccctgtctgagacaaagtgtacactgaagagctttaccgtggagaagggcatctatcagacaagcaatttcagggtgcagcctaccgagtccatcgtgcgctttcccaatatcacaaacctgtgcccttttggcgaggtgttcaacgccaccagattcgccagcgtgtacgcctggaatcggaagagaatctccaactgcgtggccgactattctgtgctgtacaactccgcctctttcagcacctttaagtgctatggcgtgtctcccacaaagctgaatgatctgtgctttaccaacgtgtacgccgatagcttcgtgatcaggggagacgaagtgagacagatcgcaccaggacagacaggaaagatcgcagactacaattataagctgcctgacgatttcaccggctgcgtgatcgcctggaactccaacaatctggattctaaagtgggcggcaactacaattatctgtacaggctgtttcgcaagtccaatctgaagccattcgagcgggacatctccacagagatctaccaggccggctctaccccctgcaatggcgtggagggctttaactgttatttccctctgcagtcttacggcttccagccaacaaacggcgtgggctatcagccctacagagtggtggtgctgtcctttgagctgctgcacgcaccagcaacagtgtgcggcccaaagaagtctaccaatctggtgaagaacaagtgcgtgaacttcaacttcaacggactgaccggcacaggcgtgctgaccgagagcaataagaagttcctgccttttcagcagttcggcagggacatctcagataccacagacgccgtgcgcgaccctcagaccctggagatcctggacatcacaccatgcagcttcggcggcgtgtccgtgatcacaccaggcaccaatacatccaaccaggtggccgtgctgtatcaggacgtgaattgtaccgatgtgcccgtggcaatccacgcagatcagctgacccctacatggcgggtgtactctaccggcagcaacgtgttccagacacaagccggatgcctgatcggagcagagcacgtgaacaatagctatgagtgcgacatccctatcggcgccggcatctgtgccagctaccagacccagacaaactccccatctggagcaggctccgtggccagccagtccatcatcgcctataccatgagcctgggcgccgagaacagcgtggcctactccaacaattctatcgccatccctaccaacttcacaatcagcgtgaccacagagatcctgccagtgtctatgaccaagacaagcgtggactgcacaatgtatatctgtggcgatagcaccgagtgctccaacctgctgctgcagtacggctccttttgtacccagctgaatagagccctgacaggcatcgccgtggagcaggataagaacacacaggaggtgttcgcccaggtgaagcagatctacaagaccccacccatcaaggactttggcggcttcaacttcagccagatcctgcctgatccaagcaagccctccaagaggtcttttatcgaggacctgctgttcaacaaggtgaccctggccgatgccggcttcatcaagcagtatggagattgcctgggagacatcgcagcccgcgacctgatctgtgcccagaagtttaatggcctgaccgtgctgcctccactgctgacagatgagatgatcgccgcttacacagctgccctgctggccggcaccgctacagctggatggaccttcggcgcaggagccgccctgcagatcccttttgccatgcagatggcctataggttcaacggcatcggcgtgacccagaatgtgctgtacgagaaccagaagctgatcgccaatcagtttaacagcgccatcggcaagatccaggactctctgtcctctacagccagcgccctgggcaagctgcaggatgtggtgaatcagaacgcccaggccctgaataccctggtgaagcagctgagctccaacttcggcgccatctctagcgtgctgaatgacatcctgagccggctggacccccctgaggcagaggtgcagatcgacaggctgatcacaggccgcctgcagagcctgcagacctacgtgacacagcagctgatcagggcagcagagatcagagcctccgccaatctggccgccaccaagatgagcgagtgcgtgctgggacagtccaagagggtggacttttgtggcaagggctatcacctgatgtctttcccacagagcgcccctcacggcgtggtgtttctgcacgtgacctacgtgccagcccaggagaagaacttcaccacagcaccagccatctgccacgatggaaaggcacactttcctagggagggcgtgttcgtgtctaacggcacccactggtttgtgacacagcgcaatttctacgagccacagatcatcaccacagacaatacattcgtgagcggcaactgtgatgtggtgatcggcatcgtgaacaataccgtgtatgatccactgcagcccgagctggactcctttaaggaggagctggataagtacttcaagaatcacacctctcccgacgtggatctgggcgacatctccggcatcaatgcctctgtggtgaacatccagaaggagatcgaccggctgaacgaggtggccaagaatctgaacgagagcctgatcgatctgcaggagctgggcaagtatgagcagtacatcaagggctctggcagagagaacctgtatttccagggaggaggaggcagcggatacatccctgaggcaccaagggacggacaggcctacgtgcgcaaggatggcgagtgggtgctgctgtccacctttctgggccatcatcaccaccaccaccaccactga

SEQ ID NO: 1652 - DNA, 3846 bp, Artificial Sequence
  Description of Artificial Sequence: Synthetic polynucleotide
atgggcatcctgccaagcccaggaatgcccgccctgctgtctctggtgagcctgctgtccgtgctgctgatgggatgcgtggcagagacaggcacacagtgcgtgaacctgaccacaaggacccagctgccccctgcctataccaattctttcacacggggcgtgtactatcccgacaaggtgtttagaagcgatgtgctgcactccacacaggatctgtttctgcctttcttttctaacgtgacctggttccacgccatccacgtgtccggcaccaatggcacaaagcggttcgacaatcccgtgctgccttttaacgatggcgtgtacttcgccagcaccgagaagtccaacatcatcagaggctggatctttggcaccacactggactctaagacacagagcctgctgatcgtgaacaatgccaccaacgtggtgatcaaggtgtgcgagttccagttttgtgaaaatccattcctgggcgtgtactatcacaagaacaataagtcctggatggagaaagagtttcgcgtgtattctagcgccaacaattgcacatttgagtacgtgagccagcccttcctgatggacctggggggcaagcagggcaatttcaagtggctgagggagttcgtgtttaagaatatcgatggctacttcaagatctacagcaagcacaccccaatcaacctggtgcgcgacctgccacagggattctccgccctggagccactgatggatctgcccatcggcatcaacatcacccggtttcagacactgctggccctgcacagatcctacctgacaccaggcgactcctctagcggatggaccgcaggagctgccgcctactatgtgggctatctgcagccccggaccttcctgctgaagtacaacgagaatggcaccatcacagacgcagtggattgcgccctggaccccctgtctgagacaaagtgtacactgaagagctttaccgtggagaagggcatctatcagacaagcaatttcagggtgcagcctaccgagtccatcgtgcgctttcccaatatcacaaacctgtgcccttttggcgaggtgttcaacgccaccagattcgccagcgtgtacgcctggaatcggaagagaatctccaactgcgtggccgactattctgtgctgtacaactccgcctctttcagcacctttaagtgctatggcgtgtctcccacaaagctgaatgatctgtgctttaccaacgtgtacgccgatagcttcgtgatcaggggagacgaagtgagacagatcgcaccaggacagacaggaaagatcgcagactacaattataagctgcctgacgatttcaccggctgcgtgatcgcctggaactccaacaatctggattctaaagtgggcggcaactacaattatctgtacaggctgtttcgcaagtccaatctgaagccattcgagcgggacatctccacagagatctaccaggccggctctaccccctgcaatggcgtggagggctttaactgttatttccctctgcagtcttacggcttccagccaacaaacggcgtgggctatcagccctacagagtggtggtgctgtcctttgagctgctgcacgcaccagcaacagtgtgcggcccaaagaagtctaccaatctggtgaagaacaagtgcgtgaacttcaacttcaacggactgaccggcacaggcgtgctgaccgagagcaataagaagttcctgccttttcagcagttcggcagggacatcgcagataatacagacgccgtgcgcgaccctcagaccctggagatcctggacatcacaccatgcagcttcggcggcgtgtccgtgatcacaccaggcaccaatacatccaaccaggtggccgtgctgtatcaggacgtgaattgtaccgaggtgcccaacgcaatccacgcagatcagctgacccctacatggcgggtgtactctaccggcagcaacgtgttccagacaagagccggatgcctgatcggagcagagcacgtgaacaatagctatgagtgcgacatccctatcggcgccggcatctgtgccagctaccagacccagacaaactccccatctggagcaggctccgtggccagccagtccatcatcgcctataccatgagcctgggcgccgagaacagcgtggcctactccaacaattctatcgccatccctaccaacttcacaatcagcgtgaccacagagatcctgccagtgtctatgaccaagacaagcgtggactgcacaatgtatatctgtggcgatagcaccgagtgctccaacctgctgctgcagtacggctccttttgtacccagctgaatagagccctgcaaggcatcgcccaagagcaggataagaacacacaggaggtgttcgcccaggtgaagcagatctacaagaccccacccatcaaggactttggcggcttcaacttcagccagatcctgcctgatccaagcaagccctccaagaggtcttttatcgaggacctgctgttcaacaaggtgaccctggccgatgccggcttcatcaagcagtatggagattgcctgggagacatcgcagcccgcgacctgatctgtgcccagaagtttaatggcctgaccgtgctgcctccactgctgacagatgagatgatcgcccagtacacatctgccctgctggccggcaccatcacaagcggatggaccttcggcgcaggagccgccctgcagatcccttttgccatgcagatggcctataggttcaacggcatcggcgtgacccagaatgtgctgtacgagaaccagaagctgatcgccaatcagtttaaccaagccatcggcaagatccaggactctctgtcctctacagccagcgccctgggcaagctgcaggatgtggtgaatcagaacgcccaggccctgaataccctggtgaagcagctgagctccaacttcggcgccatctctagcgtgctgaatgacatcctgagccggctggacccccctgaggcagaggtgcagatcgacaggctgatcacaggccgcctgcagagcctgcagacctacgtgacacagcagctgatcagggcagcagagatcagagcctccgccaatctggccgccaccaagatgagcgagtgcgtgctgggacagtccaagagggtggacttttgtggcaagggctatcacctgatgtctttcccacagagcgcccctcacggcgtggtgtttctgcacgtgacctacgtgccagcccaggagaagaacttcaccacagcaccagccatctgccacgatggaaaggcattttttcctagggagggcgtgttcgtgtctaacggcacccaatggtttgtgacacagcgcaatttctacgagccacagatcatcaccacagacaatacattcgtgagcggcaactgtgatgtggtgatcggcatcgtgaacaataccgtgtatgatccactgcagcccgagctggactcctttaaggaggagctggataagtacttcaagaatcacacctctcccgacgtggatctgggcgacatctccggcatcaatgcctctgtggtgaacatccagaaggagatcgaccggctgaacgaggtggccaagaatctgaacgagagcctgatcgatctgcaggagctgggcaagtatgagcagtacatcaagggctctggcagagagaacctgtatttccagggaggaggaggcagcggatacatccctgaggcaccaagggacggacaggcctacgtgcgcaaggatggcgagtgggtgctgctgtccacctttctgggccatcatcaccaccaccaccaccactga

SEQ ID NO: 1653 - DNA, 3846 bp, Artificial Sequence
  Description of Artificial Sequence: Synthetic polynucleotide
atgggcatcctgccaagcccaggaatgcccgccctgctgtctctggtgagcctgctgtccgtgctgctgatgggatgcgtggcagagacaggcacacagtgcgtgaacctgaccacaaggacccagctgccccctgcctataccaattctttcacacggggcgtgtactatcccgacaaggtgtttagaagctccgtgctgcactccacacaggatctgtttctgcctttcttttctaacgtgacctggttccacgccatccacgtgtccggcaccaatggcacaaagcggttcgacaatcccgtgctgccttttaacgatggcgtgtacttcgccagcaccgagaagtccaacatcatcagaggctggatctttggcaccacactggactctaagacacagagcctgctgatcgtgaacaatgccaccaacgtggtgatcaaggtgtgcgagttccagttttgtaatgatccattcctgggcgtgtactatcacaagaacaataagtcctggatggagtctgagtttcgcgtgtattctagcgccaacaattgcacatttgagtacgtgagccagcccttcctgatggacctggagggcaagcagggcaatttcaagaacctgagggagttcgtgtttaagaatatcgatggctacttcaagatctacagcaagcacaccccaatcaacctggtgcgcgacctgccacagggattctccgccctggagccatcagtggatctgcccatcggcatcaacatcacccggtttcagacactgctggccctgcacagatcctacctgacaccaggcgactcctctagcggatggaccgcaggagctgccgcctactatgtgggctatctgcagccccggaccttcctgctgaagtacaacgagaatggcaccatcacagacgcagtggattgcgccctggaccccctgtctgagacaaagtgtacactgaagagctttaccgtggagaagggcatctatcagacaagcaatttcagggtgcagcctaccgagtccatcgtgcgctttcccaatatcacaaacctgtgcccttttggcgaggtgttcaacgccaccagattcgccagcgtgtacgcctggaatcggaagagaatctccaactgcgtggccgactattctgtgctgtacaactccgcctctttcagcacctttaagtgctatggcgtgtctcccacaaagctgaatgatctgtgctttaccaacgtgtacgccgatagcttcgtgatcaggggagacgaagtgagacagatcgcaccaggacagacaggaaagatcgcagactacaattataagctgcctgacgatttcaccggctgcgtgatcgcctggaactccaacaatctggattctaaagtgggcggcaactacaattatctgtacaggctgtttcgcaagtccaatctgaagccattcgagcgggacatctccacagagatctaccaggccggctctaccccctgcaatggcgtggagggctttaactgttatttccctctgcagtcttacggcttccagccaacaaacggcgtgggctatcagccctacagagtggtggtgctgtcctttgagctgctgcacgcaccagcaacagtgtgcggcccaaagaagtctaccaatctggtgaagaacaagtgcgtgaacttcaacttcaacggactgaccggcacaggcgtgctgaccgagagcaataagaagttcctgccttttcagcagttcggcagggacatcgcagataccacagacgccgtgcgcgaccctcagaccctggagatcctggacatcacaccatgcagcttcggcggcgtgtccgtgatcacaccaggcaccaatacatccaaccaggtggccgtgctgtatcaggacgtgaattgtaccgaggtgcccgtggcaatccacgcagatcagctgacccctacatggcgggtgtactctaccggcagcaacgtgttccagacaagagccggatgcctgatcggagcagagcacgtgaacaatagctatgagtgcgacatccctatcggcgccggcatctgtgccagctaccagacccagacaaactccccatctggagcaggctccgtggccagccagtccatcatcgcctataccatgagcctgggcgccgagaacagcgtggcctactccaacaattctatcgccatccctaccaacttcacaatcagcgtgaccacagagatcctgccagtgtctatgaccaagacaagcgtggactgcacaatgtatatctgtggcgatagcaccgagtgctccaacctgctgctgcagtacggctccttttgtacccagctgaatagagccctgacaggcatcgccgtggagcaggataagaacacacaggaggtgttcgcccaggtgaagcagatctacaagaccccacccatcaaggactttggcggcttcaacttcagccagatcctgcctgatccaagcaagccctccaagaggtcttttatcgaggacctgctgttcaacaaggtgaccctggccgatgccggcttcatcaagcagtatggagattgcctgggagacatcgcagcccgcgacctgatctgtgcccagaagtttaatggcctgaccgtgctgcctccactgctgacagatgagatgatcgcccagtacacatctgccctgctggccggcaccatcacaagcggatggaccttcggcgcaggagccgccctgcagatcccttttgccatgcagatggcctataggttcaacggcatcggcgtgacccagaatgtgctgtacgagaaccagaagctgatcgccaatcagtttaacagcgccatcggcaagatccaggactctctgtcctctacagccagcgccctgggcaagctgcaggatgtggtgaatcagaacgcccaggccctgaataccctggtgaagcagctgagctccaacttcggcgccatctctagcgtgctgaatgacatcctgagccggctggacccccctgaggcagaggtgcagatcgacaggctgatcacaggccgcctgcagagcctgcagacctacgtgacacagcagctgatcagggcagcagagatcagagcctccgccaatctggccgccaccaagatgagcgagtgcgtgctgggacagtccaagagggtggacttttgtggcaagggctatcacctgatgtctttcccacagagcgcccctcacggcgtggtgtttctgcacgtgacctacgtgccagcccaggagaagaacttcaccacagcaccagccatctgccacgatggaaaggcacactttcctagggagggcgtgttcgtgtctaacggcacccactggtttgtgacacagcgcaatttctacgagccacagatcatcaccacagacaatacattcgtgagcggcaactgtgatgtggtgatcggcatcgtgaacaataccgtgtatgatccactgcagcccgagctggactcctttaaggaggagctggataagtacttcaagaatcacacctctcccgacgtggatctgggcgacatctccggcatcaatgcctctgtggtgaacatccagaaggagatcgaccggctgaacgaggtggccaagaatctgaacgagagcctgatcgatctgcaggagctgggcaagtatgagcagtacatcaagggctctggcagagagaacctgtatttccagggaggaggaggcagcggatacatccctgaggcaccaagggacggacaggcctacgtgcgcaaggatggcgagtgggtgctgctgtccacctttctgggccatcatcaccaccaccaccaccactga

SEQ ID NO: 1654 - DNA, 3846 bp, Artificial Sequence
  Description of Artificial Sequence: Synthetic polynucleotide
atgggcatcctgccaagcccaggaatgcccgccctgctgtctctggtgagcctgctgtccgtgctgctgatgggatgcgtggcagagacaggcacacagtgcgtgaacctgaccacaaggacccagctgccccctgcctataccaattctttcacacggggcgtgtactatcccgacaaggtgtttagaagctccgtgctgcactccacacaggatctgtttctgcctttcttttctaacgtgacctggttccacgccatccacgtgtccggcaccaatggcacaaagcggttcgacaatcccgtgctgccttttaacgatggcgtgtacttcgccagcaccgagaagtccaacatcatcagaggctggatctttggcaccacactggactctaagacacagagcctgctgatcgtgaacaatgccaccaacgtggtgatcaaggtgtgcgagttccagttttgtaatgatccattcctgggcgtgtactatcacaagaacaataagtcctggatggagcgcgagtttcgcgtgtattctagcgccaacaattgcacatttgagtacgtgagccagcccttcctgatggacctggagggcaagcagggcaatttcaagaacctgagggagttcgtgtttaagaatatcgatggctacttcaagatctacagcaagcacaccccaatcaacctggtgcgcgacctgccacagggattctccgccctggagccactggtggatctgcccatcggcatcaacatcacccggtttcagacactgctggccctgcacagatcctacctgacaccaggcgactcctctagcggatggaccgcaggagctgccgcctactatgtgggctatctgcagccccggaccttcctgctgaagtacaacgagaatggcaccatcacagacgcagtggattgcgccctggaccccctgtctgagacaaagtgtacactgaagagctttaccgtggagaagggcatctatcagacaagcaatttcagggtgcagcctaccgagtccatcgtgcgctttcccaatatcacaaacctgtgcccttttggcgaggtgttcaacgccaccagattcgccagcgtgtacgcctggaatcggaagagaatctccaactgcgtggccgactattctgtgctgtacaactccgcctctttcagcacctttaagtgctatggcgtgtctcccacaaagctgaatgatctgtgctttaccaacgtgtacgccgatagcttcgtgatcaggggagacgaagtgagacagatcgcaccaggacagacaggaaagatcgcagactacaattataagctgcctgacgatttcaccggctgcgtgatcgcctggaactccaacaatctggattctaaagtgggcggcaactacaattatctgtacaggctgtttcgcaagtccaatctgaagccattcgagcgggacatctccacagagatctaccaggccggctctaccccctgcaatggcgtggagggctttaactgttatttccctctgcagtcttacggcttccagccaacaaacggcgtgggctatcagccctacagagtggtggtgctgtcctttgagctgctgcacgcaccagcaacagtgtgcggcccaaagaagtctaccaatctggtgaagaacaagtgcgtgaacttcaacttcaacggactgaccggcacaggcgtgctgaccgagagcaataagaagttcctgccttttcagcagttcggcagggacatcgcagataccacagacgccgtgcgcgaccctcagaccctggagatcctggacatcacaccatgcagcttcggcggcgtgtccgtgatcacaccaggcaccaatacatccaaccaggtggccgtgctgtatcaggacgtgaattgtaccgaggtgcccgtggcaatccacgcagatcagctgacccctacatggcgggtgtactctaccggcagcaacgtgttccagacaagagccggatgcctgatcggagcagagcacgtgaacaatagctatgagtgcgacatccctatcggcgccggcatctgtgccagctaccagacccagacaaactccccatctggagcaggctccgtggccagccagtccatcatcgcctataccatgagcctgggcgccgagaacagcgtggcctactccaacaattctatcgccatccctaccaacttcacaatcagcgtgaccacagagatcctgccagtgtctatgaccaagacaagcgtggactgcacaatgtatatctgtggcgatagcaccgagtgctccaacctgctgctgcagtacggctccttttgtacccagctgaatagagccctgacaggcatcgccgtggagcaggataagaacacacaggaggtgttcgcccaggtgaagcagatctacaagaccccacccatcaaggactttggcggcttcaacttcagccagatcctgcctgatccaagcaagccctccaagaggtcttttatcgaggacctgctgttcaacaaggtgaccctggccgatgccggcttcatcaagcagtatggagattgcctgggagacatcgcagcccgcgacctgatctgtgcccagaagtttaatggcctgaccgtgctgcctccactgctgacagatgagatgatcgcccagtacacatctgccctgctggccggcaccatcacaagcggatggaccttcggcgcaggagccgccctgcagatcccttttgccatgcagatggcctataggttcaacggcatcggcgtgacccagaatgtgctgtacgagaaccagaagctgatcgccaatcagtttaacagcgccatcggcaagatccaggactctctgtcctctacagccagcgccctgggcaagctgcaggatgtggtgaatcagaacgcccaggccctgaataccctggtgaagcagctgagctccaacttcggcgccatctctagcgtgctgaatgacatcctgagccggctggacccccctgaggcagaggtgcagatcgacaggctgatcacaggccgcctgcagagcctgcagacctacgtgacacagcagctgatcagggcagcagagatcagagcctccgccaatctggccgccaccaagatgagcgagtgcgtgctgggacagtccaagagggtggacttttgtggcaagggctatcacctgatgtctttcccacagagcgcccctcacggcgtggtgtttctgcacgtgacctacgtgccagcccaggagaagaacttcaccacagcaccagccatctgccacgatggaaaggcacactttcctagggagggcgtgttcgtgtctaacggcacccactggtttgtgacacagcgcaatttctacgagccacagatcatcaccacagacaatacattcgtgagcggcaactgtgatgtggtgatcggcatcgtgaacaataccgtgtatgatccactgcagcccgagctggactcctttaaggaggagctggataagtacttcaagaatcacacctctcccgacgtggatctgggcgacatctccggcatcaatgcctctgtggtgaacatccagaaggagatcgaccggctgaacgaggtggccaagaatctgaacgagagcctgatcgatctgcaggagctgggcaagtatgagcagtacatcaagggctctggcagagagaacctgtatttccagggaggaggaggcagcggatacatccctgaggcaccaagggacggacaggcctacgtgcgcaaggatggcgagtgggtgctgctgtccacctttctgggccatcatcaccaccaccaccaccactga

SEQ ID NO: 1655 - DNA, 3846 bp, Artificial Sequence
  Description of Artificial Sequence: Synthetic polynucleotide
atgggcatcctgccaagcccaggaatgcccgccctgctgtctctggtgagcctgctgtccgtgctgctgatgggatgcgtggcagagacaggcacacagtgcgtgaacctgaccacaaggacccagctgccccctgcctataccaattctttccggcggggcgtgtactatcccgacaagatatttagaagcaacgtgctgcactccacacaggatctgtttctgcctttcttttctaacgtgacctggttccacgccatccacgtgtccggcaccaatggcacaaagcggttcgacaatcccgtgctgccttttaacgatggcgtgtacttcgccgcaaccgagaagtccaacatcatcagaggctggatctttggcaccacactggactctaagacacagagcctgctgatcgtgaacaatgccaccaacgtggtgatcaaggtgtgcgagttccagttttgtaatgatccattcctgggcgtgtactatcacaagaacaataagtcctggatggagtctgagtttcgcgtgtattctagcgccaacaattgcacatttgagtacgtgagccagcccttcctgatggacctggagggcaagcagggcaatttcaagcatctgagggagttcgtgtttaagaatatcgatggctacttcaagatctacagcaagtggaccccaatcaacctggtgcgcgacctgccacagggattctccccgctggagccactgatgaaactgcccatcggcatcaacatcacccggtttcagacactgctggccctgcacagatcctacctgacaccaggcgactcctctagcggatggaccgcaggagctgccgcctactatgtgggctatctgcagccccggaccttcctgctgaagtacaacgagaatggcaccatcacagacgcagtggattgcgccctggaccccctgtctgagacaaagtgtacactgaagagctttaccgtggagaagggcatctatcagacaagcaatttcagggtgcagcctaccgagtccatcgtgcgctttcccaatatcacaaacctgtgcccttttggcgaggtgttcaacgccaccagattcgccagcgtgtacgcctggaatcggaagagaatctccaactgcgtggccgactattctgtgctgtacaactccgcctctttcagcacctttaagtgctatggcgtgtctcccacaaagctgaatgatctgtgctttaccaacgtgtacgccgatagcttcgtgatcaggggagacgaagtgagacagatcgcaccaggacagacaggaaagatcgcagactacaattataagctgcctgacgatttcaccggctgcgtgatcgcctggaactccaacaatctggattctaaagtgggcggcaactacaattatctgtacaggctgtttcgcaagtccaatctgaagccattcgagcgggacatctccacagagatctaccaggccggctctaccccctgcaatggcgtggagggctttaactgttatttccctctgcagtcttacggcttccagccaacaaacggcgtgggctatcagccctacagagtggtggtgctgtcctttgagctgctgcacgcaccagcaacagtgtgcggcccaaagaagtctaccaatctggtgaagaacaagtgcgtgaacttcaacttcaacggactgaccggcacaggcgtgctgaccgagagcaataagaagttcctgccttttcagcagttcggcagggacatcgcagataccacagacgccgtgcgcgaccctcagaccctggagatcctggacatcacaccatgcagcttcggcggcgtgtccgtgatcacaccaggcaccaatacatccaaccaggtggccgtgctgtatcaggacgtgaattgtaccgaggtgcccgtggcaatccacgcagatcagctgacccctacatggcgggtgtactctaccggcagcaacgtgttccagacaagagccggatgcctgatcggagcagagcacgtgaacaatagctatgagtgcgacatccctatcggcgccggcatctgtgccagctaccagacccagacaaactccccatctggagcaggctccgtggccagccagtccatcatcgcctataccatgagcctgggcgccgagaacagcgtggcctactccaacaattctatcgccatccctaccaacttcacaatcagcgtgaccacagagatcctgccagtgtctatgaccaagacaagcgtggactgcacaatgtatatctgtggcgatagcaccgagtgctccaacctgctgctgcagtacggctccttttgtacccagctgaatagagccctgacaggcatcgccgtggagcaggataagaacacacaggaggtgttcgcccaggtgaagcagatctacaagaccccacccatcaaggactttggcggcttcaacttcagccagatcctgcctgatccaagcaagccctccaagaggtcttttatcgaggacctgctgttcaacaaggtgaccctggccgatgccggcttcatcaagcagtatggagattgcctgggagacatcgcagcccgcgacctgatctgtgcccagaagtttaatggcctgaccgtgctgcctccactgctgacagatgagatgatcgcccagtacacatctgccctgctggccggcaccatcacaagcggatggaccttcggcgcaggagccgccctgcagatcccttttgccatgcagatggcctataggttcaacggcatcggcgtgacccagaatgtgctgtacgagaaccagaagctgatcgccaatcagtttaacagcgccatcggcaagatccaggactctctgtcctctacagccagcgccctgggcaagctgcaggatgtggtgaatcagaacgcccaggccctgaataccctggtgaagcagctgagctccaacttcggcgccatctctagcgtgctgaatgacatcctgagccggctggacccccctgaggcagaggtgcagatcgacaggctgatcacaggccgcctgcagagcctgcagacctacgtgacacagcagctgatcagggcagcagagatcagagcctccgccaatctggccgccaccaagatgagcgagtgcgtgctgggacagtccaagagggtggacttttgtggcaagggctatcacctgatgtctttcccacagagcgcccctcacggcgtggtgtttctgcacgtgacctacgtgccagcccaggagaagaacttcaccacagcaccagccatctgccacgatggaaaggcacactttcctagggagggcgtgttcgtgtctaacggcacccactggtttgtgacacagcgcaatttctacgagccacagatcatcaccacagacaatacattcgtgagcggcaactgtgatgtggtgatcggcatcgtgaacaataccgtgtatgatccactgcagcccgagctggactcctttaaggaggagctggataagtacttcaagaatcacacctctcccgacgtggatctgggcgacatctccggcatcaatgcctctgtggtgaacatccagaaggagatcgaccggctgaacgaggtggccaagaatctgaacgagagcctgatcgatctgcaggagctgggcaagtatgagcagtacatcaagggctctggcagagagaacctgtatttccagggaggaggaggcagcggatacatccctgaggcaccaagggacggacaggcctacgtgcgcaaggatggcgagtgggtgctgctgtccacctttctgggccatcatcaccaccaccaccaccactga

SEQ ID NO: 1656 - DNA, 3846 bp, Artificial Sequence
  Description of Artificial Sequence: Synthetic polynucleotide
atgggcatcctgccaagcccaggaatgcccgccctgctgtctctggtgagcctgctgtccgtgctgctgatgggatgcgtggcagagacaggcacacagtgcgtgaacctgaccacaaggacccagctgccccctgcctataccaattctttcacacggggcgtgtactatcccgacaaggtgtttagaagctccgtgctgcactccacacaggatctgtttctgcctttcttttctaacgtgacctggttccacgccatccacgtgtccggcaccaatggcacaaagcggttcgacaatcccgtgctgccttttaacgatggcgtgtacttcgccagcaccgagaagtccaacatcatcagaggctggatctttggcaccacactggactctaagacacagagcctgctgatcgtgaacaatgccaccaacgtggtgatcaaggtgtgcgagttccagttttgtaatgatccattcctgggcgtgtactatcacaagaacaataagtcctggatggagtctgagtttcgcgtgtattctagcgccaacaattgcacatttgagtacgtgagccagcccttcctgatggacctggagggcaagcagggcaatttcaagaacctgagggagttcgtgtttaagaatatcgatggctacttcaagatctacagcaagcacaccccaatcaacctggtgcgcgacctgccacagggattctccgccctggagccactgtgggatctgcccatcggcatcaacatcacccggtttcagacactgctggccctgcacagatcctacctgacaccaggcgactcctctagcggatggaccgcaggagctgccgcctactatgtgggctatctgcagccccggaccttcctgctgaagtacaacgagaatggcaccatcacagacgcagtggattgcgccctggaccccctgtctgagacaaagtgtacactgaagagctttaccgtggagaagggcatctatcagacaagcaatttcagggtgcagcctaccgagtccatcgtgcgctttcccaatatcacaaacctgtgcccttttggcgaggtgttcaacgccaccagattcgccagcgtgtacgcctggaatcggaagagaatctccaactgcgtggccgactattctgtgctgtacaactccgcctctttcagcacctttaagtgctatggcgtgtctcccacaaagctgaatgatctgtgctttaccaacgtgtacgccgatagcttcgtgatcaggggagacgaagtgagacagatcgcaccaggacagacaggaaagatcgcagactacaattataagctgcctgacgatttcaccggctgcgtgatcgcctggaactccaacaatctggattctaaagtgggcggcaactacaattatctgtacaggctgtttcgcaagtccaatctgaagccattcgagcgggacatctccacagagatctaccaggccggctctaccccctgcaatggcgtggagggctttaactgttatttccctctgcagtcttacggcttccagccaacaaacggcgtgggctatcagccctacagagtggtggtgctgtcctttgagctgctgcacgcaccagcaacagtgtgcggcccaaagaagtctaccaatctggtgaagaacaagtgcgtgaacttcaacttcaacggactgaccggcacaggcgtgctgaccgagagcaataagaagttcctgccttttcagcagttcggcagggacatcgcagataccacagacgccgtgcgcgaccctcagaccctggagatcctggacatcacaccatgcagcttcggcggcgtgtccgtgatcacaccaggcaccaatacatccaaccaggtggccgtgctgtatcaggacgtgaattgtaccgaggtgcccgtggcaatccacgcagatcagctgacccctacatggcgggtgtactctaccggcagcaacgtgttccagacaagagccggatgcctgatcggagcagagcacgtgaacaatagctatgagtgcgacatccctatcggcgccggcatctgtgccagctaccagacccagacaaactccccatctggagcaggctccgtggccagccagtccatcatcgcctataccatgagcctgggcgccgagaacagcgtggcctactccaacaattctatcgccatccctaccaacttcacaatcagcgtgaccacagagatcctgccagtgtctatgaccaagacaagcgtggactgcacaatgtatatctgtggcgatagcaccgagtgctccaacctgctgctgcagtacggctccttttgtacccagctgaatagagccctgacaggcatcgccgtggagcaggataagaacacacaggaggtgttcgcccaggtgaagcagatctacaagaccccacccatcaaggactttggcggcttcaacttcagccagatcctgcctgatccaagcaagccctccaagaggtcttttatcgaggacctgctgttcaacaaggtgaccctggccgatgccggcttcatcaagcagtatggagattgcctgggagacatcgcagcccgcgacctgatctgtgcccagaagtttaatggcctgaccgtgctgcctccactgctgacagatgagatgatcgcccagtacacatctgccctgctggccggcaccatcacaagcggatggaccttcggcgcaggagccgccctgcagatcccttttgccatgcagatggcctataggttcaacggcatcggcgtgacccagaatgtgctgtacgagaaccagaagctgatcgccaatcagtttaacagcgccatcggcaagatccaggactctctgtcctctacagccagcgccctgggcaagctgcaggatgtggtgaatcagaacgcccaggccctgaataccctggtgaagcagctgagctccaacttcggcgccatctctagcgtgctgaatgacatcctgagccggctggacccccctgaggcagaggtgcagatcgacaggctgatcacaggccgcctgcagagcctgcagacctacgtgacacagcagctgatcagggcagcagagatcagagcctccgccaatctggccgccaccaagatgagcgagtgcgtgctgggacagtccaagagggtggacttttgtggcaagggctatcacctgatgtctttcccacagagcgcccctcacggcgtggtgtttctgcacgtgacctacgtgccagcccaggagaagaacttcaccacagcaccagccatctgccacgatggaaaggcacactttcctagggagggcgtgttcgtgtctaacggcacccactggtttgtgacacagcgcaatttctacgagccacagatcatcaccacagacaatacattcgtgagcggcaactgtgatgtggtgatcggcatcgtgaacaataccgtgtatgatccactgcagcccgagctggactcctttaaggaggagctggataagtacttcaagaatcacacctctcccgacgtggatctgggcgacatctccggcatcaatgcctctgtggtgaacatccagaaggagatcgaccggctgaacgaggtggccaagaatctgaacgagagcctgatcgatctgcaggagctgggcaagtatgagcagtacatcaagggctctggcagagagaacctgtatttccagggaggaggaggcagcggatacatccctgaggcaccaagggacggacaggcctacgtgcgcaaggatggcgagtgggtgctgctgtccacctttctgggccatcatcaccaccaccaccaccactga

SEQ ID NO: 1657 - DNA, 3846 bp, Artificial Sequence
  Description of Artificial Sequence: Synthetic polynucleotide
atgggcatcctgccaagcccaggaatgcccgccctgctgtctctggtgagcctgctgtccgtgctgctgatgggatgcgtggcagagacaggcacacagtgcgtgaacctgaccacaaggacccagctgccccctgcctataccaattctttcacacggggcgtgtactatcccgacaaggtgtttagaagctccgtgctgcactccacacaggatctgtttctgcctttcttttctaacgtgacctggttccacgccatccacgtgtccggcaccaatggcacaaagcggttcgacaatcccgtgctgccttttaacgatggcgtgtacttcgccagcaccgagaagtccaacatcatcagaggctggatctttggcaccacactggactctaagacacagagcctgctgatcgtgaacaatgccaccaacgtggtgatcaaggtgtgcgagttccagttttgtaatgatccattcctgggcgtgtactatcacaagaacaataagtcctggatggagtctgagtttcgcgtgtattctagcgccaacaattgcacatttgagtacgtgagccgacccttcctgatggacctggagggcaagcagggcaatttcaagaacctgagggagttcgtgtttaagaatatcgatggctacttcaagatctacagcaagcacaccccaatcaacctggtgcgcgacctgccacagggattctccgccctggagccactggtggatctgcccatcggcatcaacatcacccggtttcagacactgctggccctgcacagatcctacctgacaccaggcgactcctctagcggatggaccgcaggagctgccgcctactatgtgggctatctgcagccccggaccttcctgctgaagtacaacgagaatggcaccatcacagacgcagtggattgcgccctggaccccctgtctgagacaaagtgtacactgaagagctttaccgtggagaagggcatctatcagacaagcaatttcagggtgcagcctaccgagtccatcgtgcgctttcccaatatcacaaacctgtgcccttttggcgaggtgttcaacgccaccagattcgccagcgtgtacgcctggaatcggaagagaatctccaactgcgtggccgactattctgtgctgtacaactccgcctctttcagcacctttaagtgctatggcgtgtctcccacaaagctgaatgatctgtgctttaccaacgtgtacgccgatagcttcgtgatcaggggagacgaagtgagacagatcgcaccaggacagacaggaaagatcgcagactacaattataagctgcctgacgatttcaccggctgcgtgatcgcctggaactccaacaatctggattctaaagtgggcggcaactacaattatctgtacaggctgtttcgcaagtccaatctgaagccattcgagcgggacatctccacagagatctaccaggccggctctaccccctgcaatggcgtggagggctttaactgttatttccctctgcagtcttacggcttccagccaacaaacggcgtgggctatcagccctacagagtggtggtgctgtcctttgagctgctgcacgcaccagcaacagtgtgcggcccaaagaagtctaccaatctggtgaagaacaagtgcgtgaacttcaacttcaacggactgaccggcacaggcgtgctgaccgagagcaataagaagttcctgccttttcagcagttcggcagggacatcgcagataccacagacgccgtgcgcgaccctcagaccctggagatcctggacatcacaccatgcagcttcggcggcgtgtccgtgatcacaccaggcaccaatacatccaaccaggtggccgtgctgtatcaggacgtgaattgtaccgaggtgcccgtggcaatccacgcagatcagctgacccctacatggcgggtgtactctaccggcagcaacgtgttccagacaagagccggatgcctgatcggagcagagcacgtgaacaatagctatgagtgcgacatccctatcggcgccggcatctgtgccagctaccagacccagacaaactccccatctggagcaggctccgtggccagccagtccatcatcgcctataccatgagcctgggcgccgagaacagcgtggcctactccaacaattctatcgccatccctaccaacttcacaatcagcgtgaccacagagatcctgccagtgtctatgaccaagacaagcgtggactgcacaatgtatatctgtggcgatagcaccgagtgctccaacctgctgctgcagtacggctccttttgtacccagctgaatagagccctgacaggcatcgccgtggagcaggataagaacacacaggaggtgttcgcccaggtgaagcagatctacaagaccccacccatcaaggactttggcggcttcaacttcagccagatcctgcctgatccaagcaagccctccaagaggtcttttatcgaggacctgctgttcaacaaggtgaccctggccgatgccggcttcatcaagcagtatggagattgcctgggagacatcgcagcccgcgacctgatctgtgcccagaagtttaatggcctgaccgtgctgcctccactgctgacagatgagatgatcgcccagtacacatctgccctgctggccggcaccatcacaagcggatggaccttcggcgcaggagccgccctgcagatcccttttgccatgcagatggcctataggttcaacggcatcggcgtgacccagaatgtgctgtacgagaaccagaagctgatcgccaatcagtttaacagcgccatcggcaagatccaggactctctgtcctctacagccagcgccctgggcaagctgcaggatgtggtgaatcagaacgcccaggccctgaataccctggtgaagcagctgagctccaacttcggcgccatctctagcgtgctgaatgacatcctgagccggctggacccccctgaggcagaggtgcagatcgacaggctgatcacaggccgcctgcagagcctgcagacctacgtgacacagcagctgatcagggcagcagagatcagagcctccgccaatctggccgccaccaagatgagcgagtgcgtgctgggacagtccaagagggtggacttttgtggcaagggctatcacctgatgtctttcccacagagcgcccctcacggcgtggtgtttctgcacgtgacctacgtgccagcccaggagaagaacttcaccacagcaccagccatctgccacgatggaaaggcacactttcctagggagggcgtgttcgtgtctaacggcacccactggtttgtgacacagcgcaatttctacgagccacagatcatcaccacagacaatacattcgtgagcggcaactgtgatgtggtgatcggcatcgtgaacaataccgtgtatgatccactgcagcccgagctggactcctttaaggaggagctggataagtacttcaagaatcacacctctcccgacgtggatctgggcgacatctccggcatcaatgcctctgtggtgaacatccagaaggagatcgaccggctgaacgaggtggccaagaatctgaacgagagcctgatcgatctgcaggagctgggcaagtatgagcagtacatcaagggctctggcagagagaacctgtatttccagggaggaggaggcagcggatacatccctgaggcaccaagggacggacaggcctacgtgcgcaaggatggcgagtgggtgctgctgtccacctttctgggccatcatcaccaccaccaccaccactga

SEQ ID NO: 1658 - DNA, 3846 bp, Artificial Sequence
  Description of Artificial Sequence: Synthetic polynucleotide
atgggcatcctgccaagcccaggaatgcccgccctgctgtctctggtgagcctgctgtccgtgctgctgatgggatgcgtggcagagacaggcacacagtgcgtgaacctgaccacaaggacccagctgccccctgcctataccaattctttcacacggggcgtgtactatcccgacaaggtgtttagaagctccgtgctgcactccacacaggatctgtttctgcctttcttttctaacgtgacctggttccacgccatccacgtgtccggcaccaatggcacaaagcggttcgacaatcccgtgctgccttttaacgatggcgtgtacttcgccagcaccgagaagtccaacatcatcagaggctggatctttggcaccacactggactctaagacacagagcctgctgatcgtgaacaatgccaccaacgtggtgatcaaggtgtgcgagttccagttttgtaatgatccattcctgggcgtgtactatcacaagaacaataagtcctggatggagtctgagtttcgcgtgtattctagcgccaacaattgcacatttgagtacgtgagccagcccttcctgatggacctggagggcaagcagggcaatttcaagaacctgagggagttcgtgtttaagaatatcgatggctacttcaagatctacagcaagcacaccccaatcaacctggtgcgcgacctgccacagggattctccgccctggagccactggtggatctgcccatcggcatcaacatcacccggtttcagacactgctggccctgcacagatcctacctgacaccaggcgactcctctagcggatggaccgcaggagctgccgcctactatgtgggctatctgcagccccggaccttcctgctgaagtacaacgagaatggcaccatcacagacgcagtggattgcgccctggaccccctgtctgagacaaagtgtacactgaagagctttaccgtggagaagggcatctatcagacaagcaatttcagggtgcagcctaccgagtccatcgtgcgctttcccaatatcacaaacctgtgcccttttggcgaggtgttcaacgccaccagattcgccagcgtgtacgcctggaatcggaagagaatctccaactgcgtggccgactattctgtgctgtacaactccgcctctttcagcacctttaagtgctatggcgtgtctcccacaaagctgaatgatctgtgctttaccaacgtgtacgccgatagcttcgtgatcaggggagacgaagtgagacagatcgcaccaggacagacaggaaagatcgcagactacaattataagctgcctgacgatttcaccggctgcgtgatcgcctggaactccaacaatctggattctaaagtgggcggcaactacaattatctgtacaggctgtttcgcaagtccaatctgaagccattcgagcgggacatctccacagagatctaccaggccggctctaccccctgcaatggcgtggagggctttaactgttatttccctctgcagtcttacggcttccagccaacaaacggcgtgggctatcagccctacagagtggtggtgctgtcctttgagctgctgcacgcaccagcaacagtgtgcggcccaaagaagtctaccaatctggtgaagaacaagtgcgtgaacttcaacttcaacggactgaccggcacaggcgtgctgaccgagagcaataagaagttcctgccttttcagcagttcggcagggacatcgcagataccacagacgccgtgcgcgaccctcagaccctggagatcctggacatcacaccatgcagcttcggcggcgtgtccgtgatcacaccaggcaccaatacatccaaccaggtggccgtgctgtatcaggacgtgaattgtaccgaggtgcccgtggcaatccacgcagatcagctgacccctacatggcgggtgtactctaccggcagcaacgtgttccagacaagagccggatgcctgatcggagcagagcacgtgaacaatagctatgagtgcgacatccctatcggcgccggcatctgtgccagctaccagacccagacaaactccccatctggagcaggctccgtggccagcgaatccatcatcgcctataccatgagcctgggcgccgagaacagcgtggcctactccaacaattctatcgccatccctaccaacttcacaatcagcgtgaccacagagatcctgccagtgtctatgaccaagacaagcgtggactgcacaatgtatatctgtggcgatagcaccgagtgctccaacctgctgctgcagtacggctccttttgtacccagctgaatagagccctgacaggcatcgccgtggagcaggataagaacacacaggaggtgttcgcccaggtgaagcagatctacaagaccccacccatcaaggactttggcggcttcaacttcagccagatcctgcctgatccaagcaagccctccaagaggtcttttatcgaggacctgctgttcaacaaggtgaccctggccgatgccggcttcatcaagcagtatggagattgcctgggagacatcgcagcccgcgacctgatctgtgcccagaagtttaatggcctgaccgtgctgcctccactgctgacagatgagatgatcgcccagtacacatctgccctgctggccggcaccatcacaagcggatggaccttcggcgcaggagccgccctgcagatcccttttgccatgcagatggcctataggttcaacggcatcggcgtgacccagaatgtgctgtacgagaaccagaagctgatcgccaatcagtttaacagcgccatcggcaagatccaggactctctgtcctctacagccagcgccctgggcaagctgcaggatgtggtgaatcagaacgcccaggccctgaataccctggtgaagcagctgagctccaacttcggcgccatctctagcgtgctgaatgacatcctgagccggctggacccccctgaggcagaggtgcagatcgacaggctgatcacaggccgcctgcagagcctgcagacctacgtgacacagcagctgatcagggcagcagagatcagagcctccgccaatctggccgccaccaagatgagcgagtgcgtgctgggacagtccaagagggtggacttttgtggcaagggctatcacctgatgtctttcccacagagcgcccctcacggcgtggtgtttctgcacgtgacctacgtgccagcccaggagaagaacttcaccacagcaccagccatctgccacgatggaaaggcacactttcctagggagggcgtgttcgtgtctaacggcacccactggtttgtgacacagcgcaatttctacgagccacagatcatcaccacagacaatacattcgtgagcggcaactgtgatgtggtgatcggcatcgtgaacaataccgtgtatgatccactgcagcccgagctggactcctttaaggaggagctggataagtacttcaagaatcacacctctcccgacgtggatctgggcgacatctccggcatcaatgcctctgtggtgaacatccagaaggagatcgaccggctgaacgaggtggccaagaatctgaacgagagcctgatcgatctgcaggagctgggcaagtatgagcagtacatcaagggctctggcagagagaacctgtatttccagggaggaggaggcagcggatacatccctgaggcaccaagggacggacaggcctacgtgcgcaaggatggcgagtgggtgctgctgtccacctttctgggccatcatcaccaccaccaccaccactga

SEQ ID NO: 1659 - DNA, 3846 bp, Artificial Sequence
  Description of Artificial Sequence: Synthetic polynucleotide
atgggcatcctgccaagcccaggaatgcccgccctgctgtctctggtgagcctgctgtccgtgctgctgatgggatgcgtggcagagacaggcacacagtgcgtgaacctgaccacaaggacccagctgccccctgcctataccaattctttcacacggggcgtgtactatcccgacaaggtgtttagaagctccgtgctgcactccacacaggatctgtttctgcctttcttttctaacgtgacctggttccacgccatccacgtgtccggcaccaatggcacaaagcggttcgacaatcccgtgctgccttttaacgatggcgtgtacttcgccagcaccgagaagtccaacatcatcagaggctggatctttggcaccacactggactctaagacacagagcctgctgatcgtgaacaatgccaccaacgtggtgatcaaggtgtgcgagttccagttttgtaatgatccattcctgggcgtgtactatcacaagaacaataagtcctggatggagtctgagtttcgcgtgtattctagcgccaacaattgcacatttgagtacgtgagccagcccttcctgatggacctggagggcaagcagggcaatttcaagaacctgagggagttcgtgtttaagaatatcgatggctacttcaagatctacagcaagcacaccccaatcaacctggtgcgcgacctgccacagggattctccgccctggagccactggtggatctgcccatcggcatcaacatcacccggtttcagacactgctggccctgcacagatcctacctgacaccaggcgactcctctagcggatggaccgcagaagctgccgcctactatgtgggctatctgcagccccggaccttcctgctgaagtacaacgagaatggcaccatcacagacgcagtggattgcgccctggaccccctgtctgagacaaagtgtacactgaagagctttaccgtggagaagggcatctatcagacaagcaatttcagggtgcagcctaccgagtccatcgtgcgctttcccaatatcacaaacctgtgcccttttggcgaggtgttcaacgccaccagattcgccagcgtgtacgcctggaatcggaagagaatctccaactgcgtggccgactattctgtgctgtacaactccgcctctttcagcacctttaagtgctatggcgtgtctcccacaaagctgaatgatctgtgctttaccaacgtgtacgccgatagcttcgtgatcaggggagacgaagtgagacagatcgcaccaggacagacaggaaagatcgcagactacaattataagctgcctgacgatttcaccggctgcgtgatcgcctggaactccaacaatctggattctaaagtgggcggcaactacaattatctgtacaggctgtttcgcaagtccaatctgaagccattcgagcgggacatctccacagagatctaccaggccggctctaccccctgcaatggcgtggagggctttaactgttatttccctctgcagtcttacggcttccagccaacaaacggcgtgggctatcagccctacagagtggtggtgctgtcctttgagctgctgcacgcaccagcaacagtgtgcggcccaaagaagtctaccaatctggtgaagaacaagtgcgtgaacttcaacttcaacggactgaccggcacaggcgtgctgaccgagagcaataagaagttcctgccttttcagcagttcggcagggacatcgcagataccacagacgccgtgcgcgaccctcagaccctggagatcctggacatcacaccatgcagcttcggcggcgtgtccgtgatcacaccaggcaccaatacatccaaccaggtggccgtgctgtatcaggacgtgaattgtaccgaggtgcccgtggcaatccacgcagatcagctgacccctacatggcgggtgtactctaccggcagcaacgtgttccagacaagagccggatgcctgatcggagcagagcacgtgaacaatagctatgagtgcgacatccctatcggcgccggcatctgtgccagctaccagacccagacaaactccccatctggagcaggctccgtggccagccagtccatcatcgcctataccatgagcctgggcgccgagaacagcgtggcctactccaacaattctatcgccatccctaccaacttcacaatcagcgtgaccacagagatcctgccagtgtctatgaccaagacaagcgtggactgcacaatgtatatctgtggcgatagcaccgagtgctccaacctgctgctgcagtacggctccttttgtacccagctgaatagagccctgacaggcatcgccgtggagcaggataagaacacacaggaggtgttcgcccaggtgaagcagatctacaagaccccacccatcaaggactttggcggcttcaacttcagccagatcctgcctgatccaagcaagccctccaagaggtcttttatcgaggacctgctgttcaacaaggtgaccctggccgatgccggcttcatcaagcagtatggagattgcctgggagacatcgcagcccgcgacctgatctgtgcccagaagtttaatggcctgaccgtgctgcctccactgctgacagatgagatgatcgcccagtacacatctgccctgctggccggcaccatcacaagcggatggaccttcggcgcaggagccgccctgcagatcccttttgccatgcagatggcctataggttcaacggcatcggcgtgacccagaatgtgctgtacgagaaccagaagctgatcgccaatcagtttaacagcgccatcggcaagatccaggactctctgtcctctacagccagcgccctgggcaagctgcaggatgtggtgaatcagaacgcccaggccctgaataccctggtgaagcagctgagctccaacttcggcgccatctctagcgtgctgaatgacatcctgagccggctggacccccctgaggcagaggtgcagatcgacaggctgatcacaggccgcctgcagagcctgcagacctacgtgacacagcagctgatcagggcagcagagatcagagcctccgccaatctggccgccaccaagatgagcgagtgcgtgctgggacagtccaagagggtggacttttgtggcaagggctatcacctgatgtctttcccacagagcgcccctcacggcgtggtgtttctgcacgtgacctacgtgccagcccaggagaagaacttcaccacagcaccagccatctgccacgatggaaaggcacactttcctagggagggcgtgttcgtgtctaacggcacccactggtttgtgacacagcgcaatttctacgagccacagatcatcaccacagacaatacattcgtgagcggcaactgtgatgtggtgatcggcatcgtgaacaataccgtgtatgatccactgcagcccgagctggactcctttaaggaggagctggataagtacttcaagaatcacacctctcccgacgtggatctgggcgacatctccggcatcaatgcctctgtggtgaacatccagaaggagatcgaccggctgaacgaggtggccaagaatctgaacgagagcctgatcgatctgcaggagctgggcaagtatgagcagtacatcaagggctctggcagagagaacctgtatttccagggaggaggaggcagcggatacatccctgaggcaccaagggacggacaggcctacgtgcgcaaggatggcgagtgggtgctgctgtccacctttctgggccatcatcaccaccaccaccaccactga

SEQ ID NO: 1660 - DNA, 3846 bp, Artificial Sequence
  Description of Artificial Sequence: Synthetic polynucleotide
atgggcatcctgccaagcccaggaatgcccgccctgctgtctctggtgagcctgctgtccgtgctgctgatgggatgcgtggcagagacaggcacacagtgcgtgaacctgaccacaaggacccagctgccccctgcctataccaattctttcacacggggcgtgtactatcccgacaaggtgtttagaagctccgtgctgcactccacacaggatctgtttctgcctttcttttctaacgtgacctggttccacgccatccacgtgtccggcaccaatggcacaaagcggttcgacaatcccgtgctgccttttaacgatggcgtgtacttcgccagcaccgagaagtccaacatcatcagaggctggatctttggcaccacactggactctaagacacagagcctgctgatcgtgaacaatgccaccaacgtggtgatcaaggtgtgcgagttccagttttgtaatgatccattcctgggcgtgtactatcacaagaacaataagtcctggatggagtctgagtttcgcgtgtattctagcgccaacaattgcacatttgagtacgtgagccagcccttcctgatggacctggagggcaagcagggcaatttcaagaacctgagggagttcgtgtttaagaatatcgatggctacttcaagatctacagcaagcacaccccaatcaacctggtgcgcgacctgccacagggattctccgccctggagccactggtggatctgcccatcggcatcaacatcacccggtttcagacactgctggccctgtcgagatcctacctgacaccaggcgactcctctagcggatggaccgcaggagctgccgcctactatgtgggctatctgcagccccggaccttcctgctgaagtacaacgagaatggcaccatcacagacgcagtggattgcgccctggaccccctgtctgagacaaagtgtacactgaagagctttaccgtggagaagggcatctatcagacaagcaatttcagggtgcagcctaccgagtccatcgtgcgctttcccaatatcacaaacctgtgcccttttggcgaggtgttcaacgccaccagattcgccagcgtgtacgcctggaatcggaagagaatctccaactgcgtggccgactattctgtgctgtacaactccgcctctttcagcacctttaagtgctatggcgtgtctcccacaaagctgaatgatctgtgctttaccaacgtgtacgccgatagcttcgtgatcaggggagacgaagtgagacagatcgcaccaggacagacaggaaagatcgcagactacaattataagctgcctgacgatttcaccggctgcgtgatcgcctggaactccaacaatctggattctaaagtgggcggcaactacaattatctgtacaggctgtttcgcaagtccaatctgaagccattcgagcgggacatctccacagagatctaccaggccggctctaccccctgcaatggcgtggagggctttaactgttatttccctctgcagtcttacggcttccagccaacaaacggcgtgggctatcagccctacagagtggtggtgctgtcctttgagctgctgcacgcaccagcaacagtgtgcggcccaaagaagtctaccaatctggtgaagaacaagtgcgtgaacttcaacttcaacggactgaccggcacaggcgtgctgaccgagagcaataagaagttcctgccttttcagcagttcggcagggacatcgcagataccacagacgccgtgcgcgaccctcagaccctggagatcctggacatcacaccatgcagcttcggcggcgtgtccgtgatcacaccaggcaccaatacatccaaccaggtggccgtgctgtatcaggacgtgaattgtaccgaggtgcccgtggcaatccacgcagatcagctgacccctacatggcgggtgtactctaccggcagcaacgtgttccagacaagagccggatgcctgatcggagcagagcacgtgaacaatagctatgagtgcgacatccctatcggcgccggcatctgtgccagctaccagacccagacaaactccccatctggagcaggctccgtggccagccagtccatcatcgcctataccatgagcctgggcgccgagaacagcgtggcctactccaacaattctatcgccatccctaccaacttcacaatcagcgtgaccacagagatcctgccagtgtctatgaccaagacaagcgtggactgcacaatgtatatctgtggcgatagcaccgagtgctccaacctgctgctgcagtacggctccttttgtacccagctgaatagagccctgacaggcatcgccgtggagcaggataagaacacacaggaggtgttcgcccaggtgaagcagatctacaagaccccacccatcaaggactttggcggcttcaacttcagccagatcctgcctgatccaagcaagccctccaagaggtcttttatcgaggacctgctgttcaacaaggtgaccctggccgatgccggcttcatcaagcagtatggagattgcctgggagacatcgcagcccgcgacctgatctgtgcccagaagtttaatggcctgaccgtgctgcctccactgctgacagatgagatgatcgcccagtacacatctgccctgctggccggcaccatcacaagcggatggaccttcggcgcaggagccgccctgcagatcccttttgccatgcagatggcctataggttcaacggcatcggcgtgacccagaatgtgctgtacgagaaccagaagctgatcgccaatcagtttaacagcgccatcggcaagatccaggactctctgtcctctacagccagcgccctgggcaagctgcaggatgtggtgaatcagaacgcccaggccctgaataccctggtgaagcagctgagctccaacttcggcgccatctctagcgtgctgaatgacatcctgagccggctggacccccctgaggcagaggtgcagatcgacaggctgatcacaggccgcctgcagagcctgcagacctacgtgacacagcagctgatcagggcagcagagatcagagcctccgccaatctggccgccaccaagatgagcgagtgcgtgctgggacagtccaagagggtggacttttgtggcaagggctatcacctgatgtctttcccacagagcgcccctcacggcgtggtgtttctgcacgtgacctacgtgccagcccaggagaagaacttcaccacagcaccagccatctgccacgatggaaaggcacactttcctagggagggcgtgttcgtgtctaacggcacccactggtttgtgacacagcgcaatttctacgagccacagatcatcaccacagacaatacattcgtgagcggcaactgtgatgtggtgatcggcatcgtgaacaataccgtgtatgatccactgcagcccgagctggactcctttaaggaggagctggataagtacttcaagaatcacacctctcccgacgtggatctgggcgacatctccggcatcaatgcctctgtggtgaacatccagaaggagatcgaccggctgaacgaggtggccaagaatctgaacgagagcctgatcgatctgcaggagctgggcaagtatgagcagtacatcaagggctctggcagagagaacctgtatttccagggaggaggaggcagcggatacatccctgaggcaccaagggacggacaggcctacgtgcgcaaggatggcgagtgggtgctgctgtccacctttctgggccatcatcaccaccaccaccaccactga

SEQ ID NO: 1661 - DNA, 3846 bp, Artificial Sequence
  Description of Artificial Sequence: Synthetic polynucleotide
atgggcatcctgccaagcccaggaatgcccgccctgctgtctctggtgagcctgctgtccgtgctgctgatgggatgcgtggcagagacaggcacacagtgcgtgaacctgaccacaaggacccagctgccccctgcctataccaattctttcacacggggcgtgtactatcccgacaaggtgtttagaagctccgtgctgcactccacacaggatctgtttctgcctttcttttctaacgtgacctggttccacgccatccacgtgtccggcaccaatggcacaaagcggttcgacaatcccgtgctgccttttaacgatggcgtgtacttcgccgcaaccgagaagtccaacatcatcagaggctggatctttggcaccacactggactctaagacacagagcctgctgatcgtgaacaatgccaccaacgtggtgatcaaggtgtgcgagttccagttttgtaatgatccattcctgggcgtgtactatcacaagaacaataagtcctggatggagtctgagtttcgcgtgtattctagcgccaacaattgcacatttgagtacgtgagccagcccttcctgatggacctggagggcaagcagggcaatttcaagaacctgagggagttcgtgtttaagaatatcgatggctacttcaagatctacagcaagcacaccccaatcaacctggtgcgcgacctgccacagggattctccgccctggagccactggtggatctgcccatcggcatcaacatcacccggtttcagacactgctggccctgcacagatcctacctgacaccaggcgactcctctagcggatggaccgcaggagctgccgcctactttgtgggctatctgcagccccggaccttcctgctgaagtacaacgagaatggcaccatcacagacgcagtggattgcgccctggaccccctgtctgagacaaagtgtacactgaagagctttaccgtggagaagggcatctatcagacaagcaatttcagggtgcagcctaccgagtccatcgtgcgctttcccaatatcacaaacctgtgcccttttggcgaggtgttcaacgccaccagattcgccagcgtgtacgcctggaatcggaagagaatctccaactgcgtggccgactattctgtgctgtacaactccgcctctttcagcacctttaagtgctatggcgtgtctcccacaaagctgaatgatctgtgctttaccaacgtgtacgccgatagcttcgtgatcaggggagacgaagtgagacagatcgcaccaggacagacaggaaagatcgcagactacaattataagctgcctgacgatttcaccggctgcgtgatcgcctggaactccaacaatctggattctaaagtgggcggcaactacaattatctgtacaggctgtttcgcaagtccaatctgaagccattcgagcgggacatctccacagagatctaccaggccggctctaccccctgcaatggcgtggagggctttaactgttatttccctctgcagtcttacggcttccagccaacaaacggcgtgggctatcagccctacagagtggtggtgctgtcctttgagctgctgcacgcaccagcaacagtgtgcggcccaaagaagtctaccaatctggtgaagaacaagtgcgtgaacttcaacttcaacggactgaccggcacaggcgtgctgaccgagagcaataagaagttcctgccttttcagcagttcggcagggacatctcagataccacagacgccgtgcgcgaccctcagaccctggagatcctggacatcacaccatgcagcttcggcggcgtgtccgtgatcacaccaggcaccaatacatccaaccaggtggccgtgctgtatcaggacgtgaattgtaccgaggtgcccgtggcaatccacgcagatcagctgacccctacatggcgggtgtactctaccggcagcaacgtgttccagacaagagccggatgcctgatcggagcagagcacgtgaacaatagctatgagtgcgacatccctatcggcgccggcatctgtgccagctaccagacccagacaaactccccatctggagcaggctccgtggccagccagtccatcatcgcctataccatgagcctgggcgccgagaacagcgtggcctactccaacaattctatcgccatccctaccaacttcacaatcagcgtgaccacagagatcctgccagtgtctatgaccaagacaagcgtggactgcacaatgtatatctgtggcgatagcaccgagtgctccaacctgctgctgcagtacggctccttttgtacccagctgaatagagccctgacaggcatcgccgtggagcaggataagaacacacaggaggtgttcgcccaggtgaagcagatctacaagaccccacccatcaaggactttggcggcttcaacttcagccagatcctgcctgatccaagcaagccctccaagaggtcttttatcgaggacctgctgttcaacaaggtgaccctggccgatgccggcttcatcaagcagtatggagattgcctgggagacatcgcagcccgcgacctgatctgtgcccagaagtttaatggcctgaccgtgctgcctccactgctgacagatgagatgatcgcccagtacacatctgccctgctggccggcaccatcacagctggatggaccttcggcgcaggagccgccctgcagatcccttttgccatgcagatggcctataggttcaacggcatcggcgtgacccagaatgtgctgtacgagaaccagaagctgatcgccaatcagtttaacagcgccatcggcaagatccaggactctctgtcctctacagccagcgccctgggcaagctgcaggatgtggtgaatcagaacgcccaggccctgaataccctggtgaagcagctgagctccaacttcggcgccatctctagcgtgctgaatgacatcctgagccggctggacccccctgaggcagaggtgcagatcgacaggctgatcacaggccgcctgcagagcctgcagacctacgtgacacagcagctgatcagggcagcagagatcagagcctccgccaatctggccgccaccaagatgagcgagtgcgtgctgggacagtccaagagggtggacttttgtggcaagggctatcacctgatgtctttcccacaggctgcccctcacggcgtggtgtttctgcacgtgacctacgtgccagcccaggagaagaacttcaccacagcaccagccatctgccacgatggaaaggcacactttcctagggagggcgtgttcgtgtctaacggcacccactggtttgtgacacagcgcaatttctacgagccacagatcatcaccacagacaatacattcgtgagcggcaactgtgatgtggtgatcggcatcgtgaacaataccgtgtatgatccactgcagcccgagctggactcctttaaggaggagctggataagtacttcaagaatcacacctctcccgacgtggatctgggcgacatctccggcatcaatgcctctgtggtgaacatccagaaggagatcgaccggctgaacgaggtggccaagaatctgaacgagagcctgatcgatctgcaggagctgggcaagtatgagcagtacatcaagggctctggcagagagaacctgtatttccagggaggaggaggcagcggatacatccctgaggcaccaagggacggacaggcctacgtgcgcaaggatggcgagtgggtgctgctgtccacctttctgggccatcatcaccaccaccaccaccactga

SEQ ID NO: 1662 - DNA, 3846 bp, Artificial Sequence
  Description of Artificial Sequence: Synthetic polynucleotide
atgggcatcctgccaagcccaggaatgcccgccctgctgtctctggtgagcctgctgtccgtgctgctgatgggatgcgtggcagagacaggcacacagtgcgtgaacctgaccacaaggacccagctgccccctgcctataccaattctttcacacggggcgtgtactatcccgacaaggtgtttagaagctccgtgctgcactccacacaggatctgtttctgcctttcttttctaacgtgacctggttccacgccatccacgtgtccggcaccaatggcacaaagcggttcgacaatcccgtgctgccttttaacgatggcgtgtacttcgccagcaccgagaagtccaacatcatcagaggctggatctttggctcaacactggactctaagacacagagcctgctgatcgtgaacaatgccaccaacgtggtgatcaaggtgtgcgagttccagttttgtgatgatccattcctgggcgtgtactatcacaagaacaataagtcctggatggagactgagtttcgcgtgtattctagcgccaacaattgcacatttgagtacgtgagccagcccttcctgatggacctggagggcaagcagggcaatttcaagaacctgagggagttcgtgtttaagaatatcgatggctacttcaagatctacagcaagcacaccccaatcaacctggtgcgcgacctgccacagggattctccgccctggagccactggtggatctgcccatcggcatcaacatcacccggtttcagacactgctggccctgcacagatcctacctgacaccaggcgactcctctagcggatggaccgcaggagctgccgcctactatgtgggctatctgcagccccggaccttcctgctgaagtacaacgagaatggcaccatcacagacgcagtggattgcgccctggaccccctgtctgagacaaagtgtacactgaagagctttaccgtggagaagggcatctatcagacaagcaatttcagggtgcagcctaccgagtccatcgtgcgctttcccaatatcacaaacctgtgcccttttggcgaggtgttcaacgccaccagattcgccagcgtgtacgcctggaatcggaagagaatctccaactgcgtggccgactattctgtgctgtacaactccgcctctttcagcacctttaagtgctatggcgtgtctcccacaaagctgaatgatctgtgctttaccaacgtgtacgccgatagcttcgtgatcaggggagacgaagtgagacagatcgcaccaggacagacaggaaagatcgcagactacaattataagctgcctgacgatttcaccggctgcgtgatcgcctggaactccaacaatctggattctaaagtgggcggcaactacaattatctgtacaggctgtttcgcaagtccaatctgaagccattcgagcgggacatctccacagagatctaccaggccggctctaccccctgcaatggcgtggagggctttaactgttatttccctctgcagtcttacggcttccagccaacaaacggcgtgggctatcagccctacagagtggtggtgctgtcctttgagctgctgcacgcaccagcaacagtgtgcggcccaaagaagtctaccaatctggtgaagaacaagtgcgtgaacttcaacttcaacggactgaccggcacaggcgtgctgaccgagagcaataagaagttcctgccttttcagcagttcggcagggacatcgcagataccacagacgccgtgcgcgaccctcagaccctggagatcctggacatcacaccatgcagcttcggcggcgtgtccgtgatcacaccaggcaccaatacatccaaccaggtggccgtgctgtatcaggacgtgaattgtaccgaggtgcccgtggcaatccacgcagatcagctgacccctacatggcgggtgtactctaccggcagcaacgtgttccagacaagagccggatgcctgatcggagcagagcacgtgaacaatagctatgagtgcgacatccctatcggcgccggcatctgtgccagctaccagacccagacaaactccccatctggagcaggctccgtggccagccagtccatcatcgcctataccatgagcctgggcgccgagaacagcgtggcctactccaacaattctatcgccatccctaccaacttcacaatcagcgtgaccacagagatcctgccagtgtctatgaccaagacaagcgtggactgcacaatgtatatctgtggcgatagcaccgagtgctccaacctgctgctgcagtacggctccttttgtacccagctgaatagagccctgacaggcatcgccgtggagcaggataagaacacacaggaggtgttcgcccaggtgaagcagatctacaagaccccacccatcaaggactttggcggcttcaacttcagccagatcctgcctgatccaagcaagccctccaagaggtcttttatcgaggacctgctgttcaacaaggtgaccctggccgatgccggcttcatcaagcagtatggagattgcctgggagacatcgcagcccgcgacctgatctgtgcccagaagtttaatggcctgaccgtgctgcctccactgctgacagatgagatgatcgcccagtacacatctgccctgctggccggcaccatcacaagcggatggaccttcggcgcaggagccgccctgcagatcccttttgccatgcagatggcctataggttcaacggcatcggcgtgacccagaatgtgctgtacgagaaccagaagctgatcgccaatcagtttaacagcgccatcggcaagatccaggactctctgtcctctacagccagcgccctgggcaagctgcaggatgtggtgaatcagaacgcccaggccctgaataccctggtgaagcagctgagctccaacttcggcgccatctctagcgtgctgaatgacatcctgagccggctggacccccctgaggcagaggtgcagatcgacaggctgatcacaggccgcctgcagagcctgcagacctacgtgacacagcagctgatcagggcagcagagatcagagcctccgccaatctggccgccaccaagatgagcgagtgcgtgctgggacagtccaagagggtggacttttgtggcaagggctatcacctgatgtctttcccacagagcgcccctcacggcgtggtgtttctgcacgtgacctacgtgccagcccaggagaagaacttcaccacagcaccagccatctgccacgatggaaaggcacactttcctagggagggcgtgttcgtgtctaacggcacccactggtttgtgacacagcgcaatttctacgagccacagatcatcaccacagacaatacattcgtgagcggcaactgtgatgtggtgatcggcatcgtgaacaataccgtgtatgatccactgcagcccgagctggactcctttaaggaggagctggataagtacttcaagaatcacacctctcccgacgtggatctgggcgacatctccggcatcaatgcctctgtggtgaacatccagaaggagatcgaccggctgaacgaggtggccaagaatctgaacgagagcctgatcgatctgcaggagctgggcaagtatgagcagtacatcaagggctctggcagagagaacctgtatttccagggaggaggaggcagcggatacatccctgaggcaccaagggacggacaggcctacgtgcgcaaggatggcgagtgggtgctgctgtccacctttctgggccatcatcaccaccaccaccaccactga

SEQ ID NO: 1663 - DNA, 3846 bp, Artificial Sequence
  Description of Artificial Sequence: Synthetic polynucleotide
atgggcatcctgccaagcccaggaatgcccgccctgctgtctctggtgagcctgctgtccgtgctgctgatgggatgcgtggcagagacaggcacacagtgcgtgaacctgaccacaaggacccagctgccccctgcctataccaattctttcacacggggcgtgtactatcccgacaaggtgtttagaagctccgtgctgcactccacacaggatctgtttctgcctttcttttctaacgtgacctggttccacgccatccacgtgtccggcaccaatggcacaaagcggttcgacaatcccgtgctgccttttaacgatggcgtgtacttcgccagcaccgagaagtccaacatcatcagaggctggatctttggcaccacactggactctaagacacagagcctgctgatcgtgaacaatgccaccaacgtggtgatcaaggtgtgcgagttccagttttgtaatgatccattcctgggcgtgtactatcacaagaacaataagtcctggatggagtctgagtttcgcgtgtattctagcgccaacaattgcacatttgagtacgtgagccagcccttcctgatggacctggagggcaagcagggcaatttcaagaacctgagggagttcgtgtttaagaatatcgatggctacttcaagatctacagcaagcacaccccaatcaacctggtgcgcgacctgccacagggattctccgccctggagccactgacggatctgcccatcggcatcaacatcacccggtttcagacactgctggccctgcacagatcctacctgacaccaggcgactcctctagcggatggaccgcaggagctgccgcctactatgtgggctatctgcagccccggaccttcctgctgaagtacaacgagaatggcaccatcacagacgcagtggattgcgccctggaccccctgtctgagacaaagtgtacactgaagagctttaccgtggagaagggcatctatcagacaagcaatttcagggtgcagcctaccgagtccatcgtgcgctttcccaatatcacaaacctgtgcccttttggcgaggtgttcaacgccaccagattcgccagcgtgtacgcctggaatcggaagagaatctccaactgcgtggccgactattctgtgctgtacaactccgcctctttcagcacctttaagtgctatggcgtgtctcccacaaagctgaatgatctgtgctttaccaacgtgtacgccgatagcttcgtgatcaggggagacgaagtgagacagatcgcaccaggacagacaggaaagatcgcagactacaattataagctgcctgacgatttcaccggctgcgtgatcgcctggaactccaacaatctggattctaaagtgggcggcaactacaattatctgtacaggctgtttcgcaagtccaatctgaagccattcgagcgggacatctccacagagatctaccaggccggctctaccccctgcaatggcgtggagggctttaactgttatttccctctgcagtcttacggcttccagccaacaaacggcgtgggctatcagccctacagagtggtggtgctgtcctttgagctgctgcacgcaccagcaacagtgtgcggcccaaagaagtctaccaatctggtgaagaacaagtgcgtgaacttcaacttcaacggactgaccggcacaggcgtgctgaccgagagcaataagaagttcctgccttttcagcagttcggcagggacatcgcagataccacagacgccgtgcgcgaccctcagaccctggagatcctggacatcacaccatgcagcttcggcggcgtgtccgtgatcacaccaggcaccaatacatccaaccaggtggccgtgctgtatcaggacgtgaattgtaccgaggtgcccgtggcaatccacgcagatcagctgacccctacatggcgggtgtactctaccggcagcaacgtgttccagacaagagccggatgcctgatcggagcagagcacgtgaacaatagctatgagtgcgacatccctatcggcgccggcatctgtgccagctaccagacccagacaaactccccatctggagcaggctccgtggccagccagtccatcatcgcctataccatgagcctgggcgccgagaacagcgtggcctactccaacaattctatcgccatccctaccaacttcacaatcagcgtgaccacagagatcctgccagtgtctatgaccaagacaagcgtggactgcacaatgtatatctgtggcgatagcaccgagtgctccaacctgctgctgcagtacggctccttttgtacccagctgaatagagccctgacaggcatcgccgtggagcaggataagaacacacaggaggtgttcgcccaggtgaagcagatctacaagaccccacccatcaaggactttggcggcttcaacttcagccagatcctgcctgatccaagcaagccctccaagaggtcttttatcgaggacctgctgttcaacaaggtgaccctggccgatgccggcttcatcaagcagtatggagattgcctgggagacatcgcagcccgcgacctgatctgtgcccagaagtttaatggcctgaccgtgctgcctccactgctgacagatgagatgatcgcccagtacacatctgccctgctggccggcaccatcacaagcggatggaccttcggcgcaggagccgccctgcagatcccttttgccatgcagatggcctataggttcaacggcatcggcgtgacccagaatgtgctgtacgagaaccagaagctgatcgccaatcagtttaacagcgccatcggcaagatccaggactctctgtcctctacagccagcgccctgggcaagctgcaggatgtggtgaatcagaacgcccaggccctgaataccctggtgaagcagctgagctccaacttcggcgccatctctagcgtgctgaatgacatcctgagccggctggacccccctgaggcagaggtgcagatcgacaggctgatcacaggccgcctgcagagcctgcagacctacgtgacacagcagctgatcagggcagcagagatcagagcctccgccaatctggccgccaccaagatgagcgagtgcgtgctgggacagtccaagagggtggacttttgtggcaagggctatcacctgatgtctttcccacagagcgcccctcacggcgtggtgtttctgcacgtgacctacgtgccagcccaggagaagaacttcaccacagcaccagccatctgccacgatggaaaggcacactttcctagggagggcgtgttcgtgtctaacggcacccactggtttgtgacacagcgcaatttctacgagccacagatcatcaccacagacaatacattcgtgagcggcaactgtgatgtggtgatcggcatcgtgaacaataccgtgtatgatccactgcagcccgagctggactcctttaaggaggagctggataagtacttcaagaatcacacctctcccgacgtggatctgggcgacatctccggcatcaatgcctctgtggtgaacatccagaaggagatcgaccggctgaacgaggtggccaagaatctgaacgagagcctgatcgatctgcaggagctgggcaagtatgagcagtacatcaagggctctggcagagagaacctgtatttccagggaggaggaggcagcggatacatccctgaggcaccaagggacggacaggcctacgtgcgcaaggatggcgagtgggtgctgctgtccacctttctgggccatcatcaccaccaccaccaccactga

SEQ ID NO: 1664 - DNA, 3846 bp, Artificial Sequence
  Description of Artificial Sequence: Synthetic polynucleotide
atgggcatcctgccaagcccaggaatgcccgccctgctgtctctggtgagcctgctgtccgtgctgctgatgggatgcgtggcagagacaggcacacagtgcgtgaacctgaccacaaggacccagctgccccctgcctataccaattcttcaacacggggcgtgtactatcccgacaaggtgtttagaagctccgtgctgcactccacacaggatctgtttctgcctttcttttctaacgtgacctggttccacgccatccacgtgtccggcaccaatggcacaaagcggttcgacaatcccgtgctgccttttaacgatggcgtgtacttcgccagcaccgagaagtccaacatcatcagaggctggatctttggcaccacactggactctaagacacagagcctgctgatcgtgaacaatgccaccaacgtggtgatcaaggtgtgcgagttccagttttgtaatgatccattcctgggcgtgtactatcacaagaacaataagtcctggatggagtctgagtttcgcgtgtattctagcgccaacaattgcacatttgagtacgtgagccagcccttcctgatggacctggagggcaagcagggcaatttcaagaacctgagggagttcgtgtttaagaatatcgatggctacttcaagatctacagcaagcacaccccaatcaacctggtgcgcgacctgccacagggattctccgccctggagccactggtggatctgcccatcggcatcaacatcacccggtttcagacactgctggccctgcacagatcctacctgacaccaggcgactcctctagcggatggaccgcaggagctgccgcctactatgtgggctatctgcagccccggaccttcctgctgaagtacaacgagaatggcaccatcacagacgcagtggattgcgccctggaccccctgtctgagacaaagtgtacactgaagagctttaccgtggagaagggcatctatcagacaagcaatttcagggtgcagcctaccgagtccatcgtgcgctttcccaatatcacaaacctgtgcccttttggcgaggtgttcaacgccaccagattcgccagcgtgtacgcctggaatcggaagagaatctccaactgcgtggccgactattctgtgctgtacaactccgcctctttcagcacctttaagtgctatggcgtgtctcccacaaagctgaatgatctgtgctttaccaacgtgtacgccgatagcttcgtgatcaggggagacgaagtgagacagatcgcaccaggacagacaggaaagatcgcagactacaattataagctgcctgacgatttcaccggctgcgtgatcgcctggaactccaacaatctggattctaaagtgggcggcaactacaattatctgtacaggctgtttcgcaagtccaatctgaagccattcgagcgggacatctccacagagatctaccaggccggctctaccccctgcaatggcgtggagggctttaactgttatttccctctgcagtcttacggcttccagccaacaaacggcgtgggctatcagccctacagagtggtggtgctgtcctttgagctgctgcacgcaccagcaacagtgtgcggcccaaagaagtctaccaatctggtgaagaacaagtgcgtgaacttcaacttcaacggactgaccggcacaggcgtgctgaccgagagcaataagaagttcctgccttttcagcagttcggcagggacatcgcagataccacagacgccgtgcgcgaccctcagaccctggagatcctggacatcacaccatgcagcttcggcggcgtgtccgtgatcacaccaggcaccaatacatccaaccaggtggccgtgctgtatcaggacgtgaattgtaccgaggtgcccgtggcaatccacgcagatcagctgacccctacatggcgggtgtactctaccggcagcaacgtgttccagacaagagccggatgcctgatcggagcagagcacgtgaacaatagctatgagtgcgacatccctatcggcgccggcatctgtgccagctaccagacccagacaaactccccatctggagcaggctccgtggccagccagtccatcatcgcctataccatgagcctgggcgccgagaacagcgtggcctactccaacaattctatcgccatccctaccaacttcacaatcagcgtgaccacagagatcctgccagtgtctatgaccaagacaagcgtggactgcacaatgtatatctgtggcgatagcaccgagtgctccaacctgctgctgcagtacggctccttttgtacccagctgaatagagccctgacaggcatcgccgtggagcaggataagaacacacaggaggtgttcgcccaggtgaagcagatctacaagaccccacccatcaaggactttggcggcttcaacttcagccagatcctgcctgatccaagcaagccctccaagaggtcttttatcgaggacctgctgttcaacaaggtgaccctggccgatgccggcttcatcaagcagtatggagattgcctgggagacatcgcagcccgcgacctgatctgtgcccagaagtttaatggcctgaccgtgctgcctccactgctgacagatgagatgatcgcccagtacacatctgccctgctggccggcaccatcacaagcggatggaccttcggcgcaggagccgccctgcagatcccttttgccatgcagatggcctataggttcaacggcatcggcgtgacccagaatgtgctgtacgagaaccagaagctgatcgccaatcagtttaacagcgccatcggcaagatccaggactctctgtcctctacagccagcgccctgggcaagctgcaggatgtggtgaatcagaacgcccaggccctgaataccctggtgaagcagctgagctccaacttcggcgccatctctagcgtgctgaatgacatcctgagccggctggacccccctgaggcagaggtgcagatcgacaggctgatcacaggccgcctgcagagcctgcagacctacgtgacacagcagctgatcagggcagcagagatcagagcctccgccaatctggccgccaccaagatgagcgagtgcgtgctgggacagtccaagagggtggacttttgtggcaagggctatcacctgatgtctttcccacagagcgcccctcacggcgtggtgtttctgcacgtgacctacgtgccagcccaggagaagaacttcaccacagcaccagccatctgccacgatggaaaggcacactttcctagggagggcgtgttcgtgtctaacggcacccactggtttgtgacacagcgcaatttctacgagccacagatcatcaccacagacaatacattcgtgagcggcaactgtgatgtggtgatcggcatcgtgaacaataccgtgtatgatccactgcagcccgagctggactcctttaaggaggagctggataagtacttcaagaatcacacctctcccgacgtggatctgggcgacatctccggcatcaatgcctctgtggtgaacatccagaaggagatcgaccggctgaacgaggtggccaagaatctgaacgagagcctgatcgatctgcaggagctgggcaagtatgagcagtacatcaagggctctggcagagagaacctgtatttccagggaggaggaggcagcggatacatccctgaggcaccaagggacggacaggcctacgtgcgcaaggatggcgagtgggtgctgctgtccacctttctgggccatcatcaccaccaccaccaccactga

SEQ ID NO: 1665 - DNA, 3846 bp, Artificial Sequence
  Description of Artificial Sequence: Synthetic polynucleotide
atgggcatcctgccaagcccaggaatgcccgccctgctgtctctggtgagcctgctgtccgtgctgctgatgggatgcgtggcagagacaggcacacagtgcgtgaacctgaccacaaggacccagctgccccctgcctataccaattctttcacacggggcgtgtactatcccgacaaggtgtttagaagctccgtgctgcactccacacaggatctgtttctgcctttcttttctaacgtgacctggttccacgccatccacgtgtccggcaccaatggcacaaagcggttcgacaatcccgtgctgccttttaacgatggcgtgtacttcgccagcaccgagaagtccaacatcatcagaggctggatctttggcaccacactggactctaagacacagagcctgctgatcgtgaacaatgccaccaacgtggtgatcaaggtgtgcgagttccagttttgtaatgatccattcctgggcgtgtactatcacaagaacaataagtcctggatggagtctgagtttcgcgtgtattctagcgccaacaattgcacatttgagtacgtgagccagcccttcctgatggacctggagggcaagcagggcaatttcaagaacctgagggagttcgtgtttaagaatatcgatggctacttcaagatctacagcaagcacaccccaatcaacctggtgcgcgacctgccacagggattctccgccctggagccactgtttgatctgcccatcggcatcaacatcacccggtttcagacactgctggccctgcacagatcctacctgacaccaggcgactcctctagcggatggaccgcaggagctgccgcctactatgtgggctatctgcagccccggaccttcctgctgaagtacaacgagaatggcaccatcacagacgcagtggattgcgccctggaccccctgtctgagacaaagtgtacactgaagagctttaccgtggagaagggcatctatcagacaagcaatttcagggtgcagcctaccgagtccatcgtgcgctttcccaatatcacaaacctgtgcccttttggcgaggtgttcaacgccaccagattcgccagcgtgtacgcctggaatcggaagagaatctccaactgcgtggccgactattctgtgctgtacaactccgcctctttcagcacctttaagtgctatggcgtgtctcccacaaagctgaatgatctgtgctttaccaacgtgtacgccgatagcttcgtgatcaggggagacgaagtgagacagatcgcaccaggacagacaggaaagatcgcagactacaattataagctgcctgacgatttcaccggctgcgtgatcgcctggaactccaacaatctggattctaaagtgggcggcaactacaattatctgtacaggctgtttcgcaagtccaatctgaagccattcgagcgggacatctccacagagatctaccaggccggctctaccccctgcaatggcgtggagggctttaactgttatttccctctgcagtcttacggcttccagccaacaaacggcgtgggctatcagccctacagagtggtggtgctgtcctttgagctgctgcacgcaccagcaacagtgtgcggcccaaagaagtctaccaatctggtgaagaacaagtgcgtgaacttcaacttcaacggactgaccggcacaggcgtgctgaccgagagcaataagaagttcctgccttttcagcagttcggcagggacatcgcagataccacagacgccgtgcgcgaccctcagaccctggagatcctggacatcacaccatgcagcttcggcggcgtgtccgtgatcacaccaggcaccaatacatccaaccaggtggccgtgctgtatcaggacgtgaattgtaccgaggtgcccgtggcaatccacgcagatcagctgacccctacatggcgggtgtactctaccggcagcaacgtgttccagacaagagccggatgcctgatcggagcagagcacgtgaacaatagctatgagtgcgacatccctatcggcgccggcatctgtgccagctaccagacccagacaaactccccatctggagcaggctccgtggccagccagtccatcatcgcctataccatgagcctgggcgccgagaacagcgtggcctactccaacaattctatcgccatccctaccaacttcacaatcagcgtgaccacagagatcctgccagtgtctatgaccaagacaagcgtggactgcacaatgtatatctgtggcgatagcaccgagtgctccaacctgctgctgcagtacggctccttttgtacccagctgaatagagccctgacaggcatcgccgtggagcaggataagaacacacaggaggtgttcgcccaggtgaagcagatctacaagaccccacccatcaaggactttggcggcttcaacttcagccagatcctgcctgatccaagcaagccctccaagaggtcttttatcgaggacctgctgttcaacaaggtgaccctggccgatgccggcttcatcaagcagtatggagattgcctgggagacatcgcagcccgcgacctgatctgtgcccagaagtttaatggcctgaccgtgctgcctccactgctgacagatgagatgatcgcccagtacacatctgccctgctggccggcaccatcacaagcggatggaccttcggcgcaggagccgccctgcagatcccttttgccatgcagatggcctataggttcaacggcatcggcgtgacccagaatgtgctgtacgagaaccagaagctgatcgccaatcagtttaacagcgccatcggcaagatccaggactctctgtcctctacagccagcgccctgggcaagctgcaggatgtggtgaatcagaacgcccaggccctgaataccctggtgaagcagctgagctccaacttcggcgccatctctagcgtgctgaatgacatcctgagccggctggacccccctgaggcagaggtgcagatcgacaggctgatcacaggccgcctgcagagcctgcagacctacgtgacacagcagctgatcagggcagcagagatcagagcctccgccaatctggccgccaccaagatgagcgagtgcgtgctgggacagtccaagagggtggacttttgtggcaagggctatcacctgatgtctttcccacagagcgcccctcacggcgtggtgtttctgcacgtgacctacgtgccagcccaggagaagaacttcaccacagcaccagccatctgccacgatggaaaggcacactttcctagggagggcgtgttcgtgtctaacggcacccactggtttgtgacacagcgcaatttctacgagccacagatcatcaccacagacaatacattcgtgagcggcaactgtgatgtggtgatcggcatcgtgaacaataccgtgtatgatccactgcagcccgagctggactcctttaaggaggagctggataagtacttcaagaatcacacctctcccgacgtggatctgggcgacatctccggcatcaatgcctctgtggtgaacatccagaaggagatcgaccggctgaacgaggtggccaagaatctgaacgagagcctgatcgatctgcaggagctgggcaagtatgagcagtacatcaagggctctggcagagagaacctgtatttccagggaggaggaggcagcggatacatccctgaggcaccaagggacggacaggcctacgtgcgcaaggatggcgagtgggtgctgctgtccacctttctgggccatcatcaccaccaccaccaccactga

SEQ ID NO: 1666 - DNA, 3846 bp, Artificial Sequence
  Description of Artificial Sequence: Synthetic polynucleotide
atgggcatcctgccaagcccaggaatgcccgccctgctgtctctggtgagcctgctgtccgtgctgctgatgggatgcgtggcagagacaggcacacagtgcgtgaacctgaccacaaggacccagctgccccctgcctataccaattctttcacacggggcgtgtactatcccgacaaggtgtttagaagctccgtgctgcactccacacaggatctgtttctgcctttcttttctaacgtgacctggttccacgccatccacgtgtccggcaccaatggcacaaagcggttcgacaatcccgtgctgccttttaacgatggcgtgtacttcgccagcaccgagaagtccaacatcatcagaggctggatctttggcaccacactggactctaagacacagagcctgctgatcgtgaacaatgccaccaacgtggtgatcaaggtgtgcgagttccagttttgtaatgatccattcctgggcgtgtactatcacaagaacaataagtcctggatggagtctgagtttcgcgtgtattctagcgccaacaattgcacatttgagtacgtgagccagcccttcctgatggacctggagggcaagcagggcaatttcaagaacctgagggagttcgtgtttaagaatatcgatggctacttcaagatctacagcaagcacaccccaatcaacctggtgcgcgacctgccacagggattctccgccctggagccactggtggatctgcccatcggcatcaacatcacccggtttcagacactgctggccctgcacagatcctacctgacaccaggcgactcctctagcggatggaccgcaggagctgccgcctactatgtgggctatctgcagccccggaccttcctgctgaagtacaacgagaatggcaccatcacagacgcagtggattgcgccctggaccccctgtctgagacaaagtgtacactgaagagctttaccgtggagaagggcatctatcagacaagcaatttcagggtgcagcctaccgagtccatcgtgcgctttcccaatatcacaaacctgtgcccttttggcgaggtgttcaacgccaccagattcgccagcgtgtacgcctggaatcggaagagaatctccaactgcgtggccgactattctgtgctgtacaactccgcctctttcagcacctttaagtgctatggcgtgtctcccacaaagctgaatgatctgtgctttaccaacgtgtacgccgatagcttcgtgatcaggggagacgaagtgagacagatcgcaccaggacagacaggaaagatcgcagactacaattataagctgcctgacgatttcaccggctgcgtgatcgcctggaactccaacaatctggattctaaagtgggcggcaactacaattatctgtacaggctgtttcgcaagtccaatctgaagccattcgagcgggacatctccacagagatctaccaggccggctctaccccctgcaatggcgtggagggctttaactgttatttccctctgcagtcttacggcttccagccaacaaacggcgtgggctatcagccctacagagtggtggtgctgtcctttgagctgctgcacgcaccagcaacagtgtgcggcccaaagaagtctaccaatctggtgaagaacaagtgcgtgaacttcaacttcaacggactgaccggcacaggcgtgctgaccgagagcaataagaagttcctgccttttcagcagttcggcagggacatcgcagattttacagacgccgtgcgcgaccctcagaccctggagatcctggacatcacaccatgcagcttcggcggcgtgtccgtgatcacaccaggcaccaatacatccaaccaggtggccgtgctgtatcaggacgtgaattgtaccgaggtgcccgtggcaatccacgcagatcagctgacccctacatggcgggtgtactctaccggcagcaacgtgttccagacaagagccggatgcctgatcggagcagagcacgtgaacaatagctatgagtgcgacatccctatcggcgccggcatctgtgccagctaccagacccagacaaactccccatctggagcaggctccgtggccagccagtccatcatcgcctataccatgagcctgggcgccgagaacagcgtggcctactccaacaattctatcgccatccctaccaacttcacaatcagcgtgaccacagagatcctgccagtgtctatgaccaagacaagcgtggactgcacaatgtatatctgtggcgatagcaccgagtgctccaacctgctgctgcagtacggctccttttgtacccagctgaatagagccctgacaggcatcgccgtggagcaggataagaacacacaggaggtgttcgcccaggtgaagcagatctacaagaccccacccatcaaggactttggcggcttcaacttcagccagatcctgcctgatccaagcaagccctccaagaggtcttttatcgaggacctgctgttcaacaaggtgaccctggccgatgccggcttcatcaagcagtatggagattgcctgggagacatcgcagcccgcgacctgatctgtgcccagaagtttaatggcctgaccgtgctgcctccactgctgacagatgagatgatcgcccagtacacatctgccctgctggccggcaccatcacaagcggatggaccttcggcgcaggagccgccctgcagatcccttttgccatgcagatggcctataggttcaacggcatcggcgtgacccagaatgtgctgtacgagaaccagaagctgatcgccaatcagtttaacagcgccatcggcaagatccaggactctctgtcctctacagccagcgccctgggcaagctgcaggatgtggtgaatcagaacgcccaggccctgaataccctggtgaagcagctgagctccaacttcggcgccatctctagcgtgctgaatgacatcctgagccggctggacccccctgaggcagaggtgcagatcgacaggctgatcacaggccgcctgcagagcctgcagacctacgtgacacagcagctgatcagggcagcagagatcagagcctccgccaatctggccgccaccaagatgagcgagtgcgtgctgggacagtccaagagggtggacttttgtggcaagggctatcacctgatgtctttcccacagagcgcccctcacggcgtggtgtttctgcacgtgacctacgtgccagcccaggagaagaacttcaccacagcaccagccatctgccacgatggaaaggcacactttcctagggagggcgtgttcgtgtctaacggcacccactggtttgtgacacagcgcaatttctacgagccacagatcatcaccacagacaatacattcgtgagcggcaactgtgatgtggtgatcggcatcgtgaacaataccgtgtatgatccactgcagcccgagctggactcctttaaggaggagctggataagtacttcaagaatcacacctctcccgacgtggatctgggcgacatctccggcatcaatgcctctgtggtgaacatccagaaggagatcgaccggctgaacgaggtggccaagaatctgaacgagagcctgatcgatctgcaggagctgggcaagtatgagcagtacatcaagggctctggcagagagaacctgtatttccagggaggaggaggcagcggatacatccctgaggcaccaagggacggacaggcctacgtgcgcaaggatggcgagtgggtgctgctgtccacctttctgggccatcatcaccaccaccaccaccactga

SEQ ID NO: 1667 - DNA, 3846 bp, Artificial Sequence
  Description of Artificial Sequence: Synthetic polynucleotide
atgggcatcctgccaagcccaggaatgcccgccctgctgtctctggtgagcctgctgtccgtgctgctgatgggatgcgtggcagagacaggcacacagtgcgtgaacctgaccacaaggacccagctgccccctgcctataccaattctttcacacggggcgtgtactatcccgacaagatttttagaagctccgtgctgcacctcacacaggatctgtttctgcctttcttttctaacgtgacctggttccacgccatccacgtgtccggcaccaatggcacaaagcggttcgacaatcccgtgctgccttttaacgatggcgtgtacttcgccgcgaccgagaagtccaacatcatcagaggctggatctttggcaccacactggactctaagacacagagcctgctgatcgtgaacaatgccaccaacgtggtgatcaaggtgtgcgagttccagttttgtaatgatccattcctgggcgtgtactatcacaagaacaataagtcctggatggagtctgagtttcgcgtgtattctagcgccaacaattgcacatttgagtacgtgagccagcccttcctgatggacctggagggcaagcagggcaatttcaagaacctgagggagttcgtgtttaagaatatcgatggctacttcaagatctacagcaagcacaccccaatcaacctggtgcgcgacctgccacagggattctccgccctggagccactggtgaaactgcccatcggcatcaacatcacccggtttcagacactgctggccctgcacagatcctacctgacaccaggcgactcctctagcggatggaccgcaggagctgccgcctactatgtgggctatctgcagccccggaccttcctgctgaagtacaacgagaatggcaccatcacagacgcagtggattgcgccctggaccccctgtctgagacaaagtgtacactgaagagctttaccgtggagaagggcatctatcagacaagcaatttcagggtgcagcctaccgagtccatcgtgcgctttcccaatatcacaaacctgtgcccttttggcgaggtgttcaacgccaccagattcgccagcgtgtacgcctggaatcggaagagaatctccaactgcgtggccgactattctgtgctgtacaactccgcctctttcagcacctttaagtgctatggcgtgtctcccacaaagctgaatgatctgtgctttaccaacgtgtacgccgatagcttcgtgatcaggggagacgaagtgagacagatcgcaccaggacagacaggaaagatcgcagactacaattataagctgcctgacgatttcaccggctgcgtgatcgcctggaactccaacaatctggattctaaagtgggcggcaactacaattatctgtacaggctgtttcgcaagtccaatctgaagccattcgagcgggacatctccacagagatctaccaggccggctctaccccctgcaatggcgtggagggctttaactgttatttccctctgcagtcttacggcttccagccaacaaacggcgtgggctatcagccctacagagtggtggtgctgtcctttgagctgctgcacgcaccagcaacagtgtgcggcccaaagaagtctaccaatctggtgaagaacaagtgcgtgaacttcaacttcaacggactgaccggcacaggcgtgctgaccgagagcaataagaagttcctgccttttcagcagttcggcagggacatctcagataccacagacgccgtgcgcgaccctcagaccctggagatcctggacatcacaccatgcagcttcggcggcgtgtccgtgatcacaccaggcaccaatacatccaaccaggtggccgtgctgtatcaggacgtgaattgtaccgatgtgcccgtggcaatccacgcagatcagctgacccctacatggcgggtgtactctaccggcagcaacgtgttccagacacaagccggatgcctgatcggagcagagcacgtgaacaatagctatgagtgcgacatccctatcggcgccggcatctgtgccagctaccagacccagacaaactccccatctggagcaggctccgtggccagccagtccatcatcgcctataccatgagcctgggcgccgagaacagcgtggcctactccaacaattctatcgccatccctaccaacttcacaatcagcgtgaccacagagatcctgccagtgtctatgaccaagacaagcgtggactgcacaatgtatatctgtggcgatagcaccgagtgctccaacctgctgctgcagtacggctccttttgtacccagctgaatagagccctgacaggcatcgccgtggagcaggataagaacacacaggaggtgttcgcccaggtgaagcagatctacaagaccccacccatcaaggactttggcggcttcaacttcagccagatcctgcctgatccaagcaagccctccaagaggtcttttatcgaggacctgctgttcaacaaggtgaccctggccgatgccggcttcatcaagcagtatggagattgcctgggagacatcgcagcccgcgacctgatctgtgcccagaagtttaatggcctgaccgtgctgcctccactgctgacagatgagatgatcgcccagtacacagcggccctgctggccggcaccgctacagctggatggaccttcggcgcaggagccgccctgcagatcccttttgccatgcagatggcctataggttcaacggcatcggcgtgacccagaatgtgctgtacgagaaccagaagctgatcgccaatcagtttaacagcgccatcggcaagatccaggactctctgtcctctacagccagcgccctgggcaagctgcaggatgtggtgaatcagaacgcccaggccctgaataccctggtgaagcagctgagctccaacttcggcgccatctctagcgtgctgaatgacatcctgagccggctggacccccctgaggcagaggtgcagatcgacaggctgatcacaggccgcctgcagagcctgcagacctacgtgacacagcagctgatcagggcagcagagatcagagcctccgccaatctggccgccaccaagatgagcgagtgcgtgctgggacagtccaagagggtggacttttgtggcaagggctatcacctgatgtctttcccacagagcgcccctcacggcgtggtgtttctgcacgtgacctacgtgccagcccaggagaagaacttcaccacagcaccagccatctgccacgatggaaaggcacactttcctagggagggcgtgttcgtgtctaacggcacccactggtttgtgacacagcgcaatttctacgagccacagatcatcaccacagacaatacattcgtgagcggcaactgtgatgtggtgatcggcatcgtgaacaataccgtgtatgatccactgcagcccgagctggactcctttaaggaggagctggataagtacttcaagaatcacacctctcccgacgtggatctgggcgacatctccggcatcaatgcctctgtggtgaacatccagaaggagatcgaccggctgaacgaggtggccaagaatctgaacgagagcctgatcgatctgcaggagctgggcaagtatgagcagtacatcaagggctctggcagagagaacctgtatttccagggaggaggaggcagcggatacatccctgaggcaccaagggacggacaggcctacgtgcgcaaggatggcgagtgggtgctgctgtccacctttctgggccatcatcaccaccaccaccaccactga

SEQ ID NO: 1668 - DNA, 3846 bp, Artificial Sequence
  Description of Artificial Sequence: Synthetic polynucleotide
atgggcatcctgccaagcccaggaatgcccgccctgctgtctctggtgagcctgctgtccgtgctgctgatgggatgcgtggcagagacaggcacacagtgcgtgaacctgaccacaaggacccagctgccccctgcctataccaattctttcacacggggcgtgtactatcccgacaaggtgtttagaagctccgtgctgcactccacacaggatctgtttctgcctttcttttctaacgtgacctggttccacgccatccacgtgtccggcaccaatggcacaaagcggttcgacaatcccgtgctgccttttaacgatggcgtgtacttcgccagcaccgagaagtccaacatcatcagaggctggatctttggcaccacactggactctaagacacagagcctgctgatcgtgaacaatgccaccaacgtggtgatcaaggtgtgcgagttccagttttgtaatgatccattcctgggcgtgtactatcacaagaacaataagtcctggatggagtctgagtttcgcgtgtattctagcgccaacaattgcacatttgagtacgtgagccagcccttcctgatggacctggagggcaagcagggcaatttcaagaacctgagggagttcgtgtttaagaatatcgatggctacttcaagatctacagcaagcacaccccaatcaacctggtgcgcgacctgccacagggattctccgccctggagccactgttagatctgcccatcggcatcaacatcacccggtttcagacactgctggccctgcacagatcctacctgacaccaggcgactcctctagcggatggaccgcaggagctgccgcctactatgtgggctatctgcagccccggaccttcctgctgaagtacaacgagaatggcaccatcacagacgcagtggattgcgccctggaccccctgtctgagacaaagtgtacactgaagagctttaccgtggagaagggcatctatcagacaagcaatttcagggtgcagcctaccgagtccatcgtgcgctttcccaatatcacaaacctgtgcccttttggcgaggtgttcaacgccaccagattcgccagcgtgtacgcctggaatcggaagagaatctccaactgcgtggccgactattctgtgctgtacaactccgcctctttcagcacctttaagtgctatggcgtgtctcccacaaagctgaatgatctgtgctttaccaacgtgtacgccgatagcttcgtgatcaggggagacgaagtgagacagatcgcaccaggacagacaggaaagatcgcagactacaattataagctgcctgacgatttcaccggctgcgtgatcgcctggaactccaacaatctggattctaaagtgggcggcaactacaattatctgtacaggctgtttcgcaagtccaatctgaagccattcgagcgggacatctccacagagatctaccaggccggctctaccccctgcaatggcgtggagggctttaactgttatttccctctgcagtcttacggcttccagccaacaaacggcgtgggctatcagccctacagagtggtggtgctgtcctttgagctgctgcacgcaccagcaacagtgtgcggcccaaagaagtctaccaatctggtgaagaacaagtgcgtgaacttcaacttcaacggactgaccggcacaggcgtgctgaccgagagcaataagaagttcctgccttttcagcagttcggcagggacatcgcagataccacagacgccgtgcgcgaccctcagaccctggagatcctggacatcacaccatgcagcttcggcggcgtgtccgtgatcacaccaggcaccaatacatccaaccaggtggccgtgctgtatcaggacgtgaattgtaccgaggtgcccgtggcaatccacgcagatcagctgacccctacatggcgggtgtactctaccggcagcaacgtgttccagacaagagccggatgcctgatcggagcagagcacgtgaacaatagctatgagtgcgacatccctatcggcgccggcatctgtgccagctaccagacccagacaaactccccatctggagcaggctccgtggccagccagtccatcatcgcctataccatgagcctgggcgccgagaacagcgtggcctactccaacaattctatcgccatccctaccaacttcacaatcagcgtgaccacagagatcctgccagtgtctatgaccaagacaagcgtggactgcacaatgtatatctgtggcgatagcaccgagtgctccaacctgctgctgcagtacggctccttttgtacccagctgaatagagccctgacaggcatcgccgtggagcaggataagaacacacaggaggtgttcgcccaggtgaagcagatctacaagaccccacccatcaaggactttggcggcttcaacttcagccagatcctgcctgatccaagcaagccctccaagaggtcttttatcgaggacctgctgttcaacaaggtgaccctggccgatgccggcttcatcaagcagtatggagattgcctgggagacatcgcagcccgcgacctgatctgtgcccagaagtttaatggcctgaccgtgctgcctccactgctgacagatgagatgatcgcccagtacacatctgccctgctggccggcaccatcacaagcggatggaccttcggcgcaggagccgccctgcagatcccttttgccatgcagatggcctataggttcaacggcatcggcgtgacccagaatgtgctgtacgagaaccagaagctgatcgccaatcagtttaacagcgccatcggcaagatccaggactctctgtcctctacagccagcgccctgggcaagctgcaggatgtggtgaatcagaacgcccaggccctgaataccctggtgaagcagctgagctccaacttcggcgccatctctagcgtgctgaatgacatcctgagccggctggacccccctgaggcagaggtgcagatcgacaggctgatcacaggccgcctgcagagcctgcagacctacgtgacacagcagctgatcagggcagcagagatcagagcctccgccaatctggccgccaccaagatgagcgagtgcgtgctgggacagtccaagagggtggacttttgtggcaagggctatcacctgatgtctttcccacagagcgcccctcacggcgtggtgtttctgcacgtgacctacgtgccagcccaggagaagaacttcaccacagcaccagccatctgccacgatggaaaggcacactttcctagggagggcgtgttcgtgtctaacggcacccactggtttgtgacacagcgcaatttctacgagccacagatcatcaccacagacaatacattcgtgagcggcaactgtgatgtggtgatcggcatcgtgaacaataccgtgtatgatccactgcagcccgagctggactcctttaaggaggagctggataagtacttcaagaatcacacctctcccgacgtggatctgggcgacatctccggcatcaatgcctctgtggtgaacatccagaaggagatcgaccggctgaacgaggtggccaagaatctgaacgagagcctgatcgatctgcaggagctgggcaagtatgagcagtacatcaagggctctggcagagagaacctgtatttccagggaggaggaggcagcggatacatccctgaggcaccaagggacggacaggcctacgtgcgcaaggatggcgagtgggtgctgctgtccacctttctgggccatcatcaccaccaccaccaccactga

SEQ ID NO: 1669 - DNA, 3846 bp, Artificial Sequence
  Description of Artificial Sequence: Synthetic polynucleotide
atgggcatcctgccaagcccaggaatgcccgccctgctgtctctggtgagcctgctgtccgtgctgctgatgggatgcgtggcagagacaggcacacagtgcgtgaacctgaccacaaggacccagctgccccctgcctataccaattctttcacacggggcgtgtactatcccgacaaggtgtttagaagctccgtgctgcactccacacaggatctgtttctgcctttcttttctaacgtgacctggttccacgccatccacgtgtccggcaccaatggcacaaagcggttcgacaatcccgtgctgccttttaacgatggcgtgtacttcgccagcaccgagaagtccaacatcatcagaggctggatctttggcaccacactggactctaagacacagagcctgctgatcgtgaacaatgccaccaacgtggtgatcaaggtgtgcgagttccagttttgtaatgatccattcctgggcgtgtactatcacaagaacaataagtcctggatggagtctgagtttcgcgtgtattctagcgccaacaattgcacatttgagtacgtgagccagcccttcctgatggacctggagggcaagcagggcaatttcaagaacctgagggagttcgtgtttaagaatatcgatggctacttcaagatctacagcaagcacaccccaatcaacctggtgcgcgacctgccacagggattctccgccctgcgaccactggtggatctgcccatcggcatcaacatcacccggtttcagacactgctggccctgcacagatcctacctgacaccaggcgactcctctagcggatggaccgcaggagctgccgcctactatgtgggctatctgcagccccggaccttcctgctgaagtacaacgagaatggcaccatcacagacgcagtggattgcgccctggaccccctgtctgagacaaagtgtacactgaagagctttaccgtggagaagggcatctatcagacaagcaatttcagggtgcagcctaccgagtccatcgtgcgctttcccaatatcacaaacctgtgcccttttggcgaggtgttcaacgccaccagattcgccagcgtgtacgcctggaatcggaagagaatctccaactgcgtggccgactattctgtgctgtacaactccgcctctttcagcacctttaagtgctatggcgtgtctcccacaaagctgaatgatctgtgctttaccaacgtgtacgccgatagcttcgtgatcaggggagacgaagtgagacagatcgcaccaggacagacaggaaagatcgcagactacaattataagctgcctgacgatttcaccggctgcgtgatcgcctggaactccaacaatctggattctaaagtgggcggcaactacaattatctgtacaggctgtttcgcaagtccaatctgaagccattcgagcgggacatctccacagagatctaccaggccggctctaccccctgcaatggcgtggagggctttaactgttatttccctctgcagtcttacggcttccagccaacaaacggcgtgggctatcagccctacagagtggtggtgctgtcctttgagctgctgcacgcaccagcaacagtgtgcggcccaaagaagtctaccaatctggtgaagaacaagtgcgtgaacttcaacttcaacggactgaccggcacaggcgtgctgaccgagagcaataagaagttcctgccttttcagcagttcggcagggacatcgcagataccacagacgccgtgcgcgaccctcagaccctggagatcctggacatcacaccatgcagcttcggcggcgtgtccgtgatcacaccaggcaccaatacatccaaccaggtggccgtgctgtatcaggacgtgaattgtaccgaggtgcccgtggcaatccacgcagatcagctgacccctacatggcgggtgtactctaccggcagcaacgtgttccagacaagagccggatgcctgatcggagcagagcacgtgaacaatagctatgagtgcgacatccctatcggcgccggcatctgtgccagctaccagacccagacaaactccccatctggagcaggctccgtggccagccagtccatcatcgcctataccatgagcctgggcgccgagaacagcgtggcctactccaacaattctatcgccatccctaccaacttcacaatcagcgtgaccacagagatcctgccagtgtctatgaccaagacaagcgtggactgcacaatgtatatctgtggcgatagcaccgagtgctccaacctgctgctgcagtacggctccttttgtacccagctgaatagagccctgacaggcatcgccgtggagcaggataagaacacacaggaggtgttcgcccaggtgaagcagatctacaagaccccacccatcaaggactttggcggcttcaacttcagccagatcctgcctgatccaagcaagccctccaagaggtcttttatcgaggacctgctgttcaacaaggtgaccctggccgatgccggcttcatcaagcagtatggagattgcctgggagacatcgcagcccgcgacctgatctgtgcccagaagtttaatggcctgaccgtgctgcctccactgctgacagatgagatgatcgcccagtacacatctgccctgctggccggcaccatcacaagcggatggaccttcggcgcaggagccgccctgcagatcccttttgccatgcagatggcctataggttcaacggcatcggcgtgacccagaatgtgctgtacgagaaccagaagctgatcgccaatcagtttaacagcgccatcggcaagatccaggactctctgtcctctacagccagcgccctgggcaagctgcaggatgtggtgaatcagaacgcccaggccctgaataccctggtgaagcagctgagctccaacttcggcgccatctctagcgtgctgaatgacatcctgagccggctggacccccctgaggcagaggtgcagatcgacaggctgatcacaggccgcctgcagagcctgcagacctacgtgacacagcagctgatcagggcagcagagatcagagcctccgccaatctggccgccaccaagatgagcgagtgcgtgctgggacagtccaagagggtggacttttgtggcaagggctatcacctgatgtctttcccacagagcgcccctcacggcgtggtgtttctgcacgtgacctacgtgccagcccaggagaagaacttcaccacagcaccagccatctgccacgatggaaaggcacactttcctagggagggcgtgttcgtgtctaacggcacccactggtttgtgacacagcgcaatttctacgagccacagatcatcaccacagacaatacattcgtgagcggcaactgtgatgtggtgatcggcatcgtgaacaataccgtgtatgatccactgcagcccgagctggactcctttaaggaggagctggataagtacttcaagaatcacacctctcccgacgtggatctgggcgacatctccggcatcaatgcctctgtggtgaacatccagaaggagatcgaccggctgaacgaggtggccaagaatctgaacgagagcctgatcgatctgcaggagctgggcaagtatgagcagtacatcaagggctctggcagagagaacctgtatttccagggaggaggaggcagcggatacatccctgaggcaccaagggacggacaggcctacgtgcgcaaggatggcgagtgggtgctgctgtccacctttctgggccatcatcaccaccaccaccaccactga

SEQ ID NO: 1670 - DNA, 3846 bp, Artificial Sequence
  Description of Artificial Sequence: Synthetic polynucleotide
atgggcatcctgccaagcccaggaatgcccgccctgctgtctctggtgagcctgctgtccgtgctgctgatgggatgcgtggcagagacaggcacacagtgcgtgaacctgaccacaaggacccagctgccccctgcctataccaattctttcacacggggcgtgtactatcccgacaaggtgtttagaagctccgtgctgcactccacacaggatctgtttctgcctttcttttctaacgtgacctggttccacgccatccacgtgtccggcaccaatggcacaaagcggttcgacaatcccgtgctgccttttaacgatggcgtgtacttcgccagcaccgagaagtccaacatcatcagaggctggatctttggcaccacactggactctaagacacagagcctgctgatcgtgaacaatgccaccaacgtggtgatcaaggtgtgcgagttccagttttgtaatgatccattcctgggcgtgtactatcacaagaacaataagtcctggatggaggtagagtttcgcgtgtattctagcgccaacaattgcacatttgagtacgtgagccagcccttcctgatggacctggagggcaagcagggcaatttcaagaacctgagggagttcgtgtttaagaatatcgatggctacttcaagatctacagcaagcacaccccaatcaacctggtgcgcgacctgccacagggattctccgccctggagccactggtggatctgcccatcggcatcaacatcacccggtttcagacactgctggccctgcacagatcctacctgacaccaggcgactcctctagcggatggaccgcaggagctgccgcctactatgtgggctatctgcagccccggaccttcctgctgaagtacaacgagaatggcaccatcacagacgcagtggattgcgccctggaccccctgtctgagacaaagtgtacactgaagagctttaccgtggagaagggcatctatcagacaagcaatttcagggtgcagcctaccgagtccatcgtgcgctttcccaatatcacaaacctgtgcccttttggcgaggtgttcaacgccaccagattcgccagcgtgtacgcctggaatcggaagagaatctccaactgcgtggccgactattctgtgctgtacaactccgcctctttcagcacctttaagtgctatggcgtgtctcccacaaagctgaatgatctgtgctttaccaacgtgtacgccgatagcttcgtgatcaggggagacgaagtgagacagatcgcaccaggacagacaggaaagatcgcagactacaattataagctgcctgacgatttcaccggctgcgtgatcgcctggaactccaacaatctggattctaaagtgggcggcaactacaattatctgtacaggctgtttcgcaagtccaatctgaagccattcgagcgggacatctccacagagatctaccaggccggctctaccccctgcaatggcgtggagggctttaactgttatttccctctgcagtcttacggcttccagccaacaaacggcgtgggctatcagccctacagagtggtggtgctgtcctttgagctgctgcacgcaccagcaacagtgtgcggcccaaagaagtctaccaatctggtgaagaacaagtgcgtgaacttcaacttcaacggactgaccggcacaggcgtgctgaccgagagcaataagaagttcctgccttttcagcagttcggcagggacatcgcagataccacagacgccgtgcgcgaccctcagaccctggagatcctggacatcacaccatgcagcttcggcggcgtgtccgtgatcacaccaggcaccaatacatccaaccaggtggccgtgctgtatcaggacgtgaattgtaccgaggtgcccgtggcaatccacgcagatcagctgacccctacatggcgggtgtactctaccggcagcaacgtgttccagacaagagccggatgcctgatcggagcagagcacgtgaacaatagctatgagtgcgacatccctatcggcgccggcatctgtgccagctaccagacccagacaaactccccatctggagcaggctccgtggccagccagtccatcatcgcctataccatgagcctgggcgccgagaacagcgtggcctactccaacaattctatcgccatccctaccaacttcacaatcagcgtgaccacagagatcctgccagtgtctatgaccaagacaagcgtggactgcacaatgtatatctgtggcgatagcaccgagtgctccaacctgctgctgcagtacggctccttttgtacccagctgaatagagccctgacaggcatcgccgtggagcaggataagaacacacaggaggtgttcgcccaggtgaagcagatctacaagaccccacccatcaaggactttggcggcttcaacttcagccagatcctgcctgatccaagcaagccctccaagaggtcttttatcgaggacctgctgttcaacaaggtgaccctggccgatgccggcttcatcaagcagtatggagattgcctgggagacatcgcagcccgcgacctgatctgtgcccagaagtttaatggcctgaccgtgctgcctccactgctgacagatgagatgatcgcccagtacacatctgccctgctggccggcaccatcacaagcggatggaccttcggcgcaggagccgccctgcagatcccttttgccatgcagatggcctataggttcaacggcatcggcgtgacccagaatgtgctgtacgagaaccagaagctgatcgccaatcagtttaacagcgccatcggcaagatccaggactctctgtcctctacagccagcgccctgggcaagctgcaggatgtggtgaatcagaacgcccaggccctgaataccctggtgaagcagctgagctccaacttcggcgccatctctagcgtgctgaatgacatcctgagccggctggacccccctgaggcagaggtgcagatcgacaggctgatcacaggccgcctgcagagcctgcagacctacgtgacacagcagctgatcagggcagcagagatcagagcctccgccaatctggccgccaccaagatgagcgagtgcgtgctgggacagtccaagagggtggacttttgtggcaagggctatcacctgatgtctttcccacagagcgcccctcacggcgtggtgtttctgcacgtgacctacgtgccagcccaggagaagaacttcaccacagcaccagccatctgccacgatggaaaggcacactttcctagggagggcgtgttcgtgtctaacggcacccactggtttgtgacacagcgcaatttctacgagccacagatcatcaccacagacaatacattcgtgagcggcaactgtgatgtggtgatcggcatcgtgaacaataccgtgtatgatccactgcagcccgagctggactcctttaaggaggagctggataagtacttcaagaatcacacctctcccgacgtggatctgggcgacatctccggcatcaatgcctctgtggtgaacatccagaaggagatcgaccggctgaacgaggtggccaagaatctgaacgagagcctgatcgatctgcaggagctgggcaagtatgagcagtacatcaagggctctggcagagagaacctgtatttccagggaggaggaggcagcggatacatccctgaggcaccaagggacggacaggcctacgtgcgcaaggatggcgagtgggtgctgctgtccacctttctgggccatcatcaccaccaccaccaccactga

SEQ ID NO: 1671 - DNA, 3846 bp, Artificial Sequence
  Description of Artificial Sequence: Synthetic polynucleotide
atgggcatcctgccaagcccaggaatgcccgccctgctgtctctggtgagcctgctgtccgtgctgctgatgggatgcgtggcagagacaggcacacagtgcgtgaacctgaccacaaggacccagctgccccctgcctataccaattctttcacacggggcgtgtactatcccgacaaggtgtttagaagctccgtgctgcactccacacaggatctgtttctgcctttcttttctaacgtgacctggttccacgccatccacgtgtccggcaccaatggcacaaagcggttcgacaatcccgtgctgccttttaacgatggcgtgtacttcgccagcaccgagaagtccaacatcatcagaggctggatctttggcaccacactggactctaagacacagagcctgctgatcgtgaacaatgccaccaacgtggtgatcaaggtgtgcgagttccagttttgtaatgatccattcctgggcgtgtactatcacaagaacaataagtcctggatggagtctgagtttcgcgtgtattctagcgccaacaattgcacatttgagtacgtgagccagcccttcctgatggacctggagggcaagcagggcaatttcaagaacctgagggagttcgtgtttaagaatatcgatggctacttcaagatctacagcaagcacaccccaatcaacctggtgcgcgacctgccacagggattctccgccctggagccactggtggatctgcccatcggcatcaacatcacccggtttcagacactgctggccctgcacagatcctacctgacaccaggcgactcctctagcggatggaccgcaggagctgccgcctactatgtgggctatctgcagccccggaccttcctgctgaagtacaacgagaatggcaccatcacagacgcagtggattgcgccctggaccccctgtctgagacaaagtgtacactgaagagctttaccgtggagaagggcatctatcagacaagcaatttcagggtgcagcctaccgagtccatcgtgcgctttcccaatatcacaaacctgtgcccttttggcgaggtgttcaacgccaccagattcgccagcgtgtacgcctggaatcggaagagaatctccaactgcgtggccgactattctgtgctgtacaactccgcctctttcagcacctttaagtgctatggcgtgtctcccacaaagctgaatgatctgtgctttaccaacgtgtacgccgatagcttcgtgatcaggggagacgaagtgagacagatcgcaccaggacagacaggaaagatcgcagactacaattataagctgcctgacgatttcaccggctgcgtgatcgcctggaactccaacaatctggattctaaagtgggcggcaactacaattatctgtacaggctgtttcgcaagtccaatctgaagccattcgagcgggacatctccacagagatctaccaggccggctctaccccctgcaatggcgtggagggctttaactgttatttccctctgcagtcttacggcttccagccaacaaacggcgtgggctatcagccctacagagtggtggtgctgtcctttgagctgctgcacgcaccagcaacagtgtgcggcccaaagaagtctaccaatctggtgaagaacaagtgcgtgaacttcaacttcaacggactgaccggcacaggcgtgctgaccgagagcaataagaagttcctgccttttcagcagttcggcagggacatcgcagataccacagacgccgtgcgcgaccctcagaccctggagatcctggacatcacaccatgcagcttcggcggcgtgtccgtgatcacaccaggcaccaatacatccaaccaggtggccgtgctgtatcaggacgtgaattgtaccgaggtgcccgtggcaatccacgcagatcagctgacccctacatggcgggtgtactctaccggcagcaacgtgttccagacaagagccggatgcctgatcggagcagagcacgtgaacaatagctatgagtgcgacatccctatcggcgccggcatctgtgccagctaccagacccagacaaactccccatctggagcaggctccgtggccagccagtccatcatcgcctataccatgagcctgggcgccgagaacagcgtggcctactccaacaattctatcgccatccctaccaacttcacaatcagcgtgaccacagagatcctgccagtgtctatgaccaagacaagcgtggactgcacaatgtatatctgtggcgatagcaccgagtgctccaacctgctgctgcagtacggctccttttgtacccagctgaatagagccctgacaggcatcgccgtggagcaggataagaacacacaggaggtgttcgcccaggtgaagcagatctacaagaccccacccatcaaggactttggcggcttcaacttcagccagatcctgcctgatccaagcaagccctccaagaggtcttttatcgaggacctgctgttcaacaaggtgaccctggccgatgccggcttcatcaagcagtatggagattgcctgggagacatcgcagcccgcgacctgatctgtgcccagaagtttaatggcctgaccgtgctgcctccactgctgacagatgagatgatcgcccagtacacatctgccctgctggccggcaccatcacaagcggatggaccttcggcgcaggagccgccctgcagatcccttttgccatgcagatggcctataggttcaacggcatcggcgtgacccagaatgtgctgtacgagaaccagaagctgatcgccaatcagtttaacagcgccatcggcaagatccaggactctctgtcctctacatcaagcgccctgggcaagctgcaggatgtggtgaatcagaacgcccaggccctgaataccctggtgaagcagctgagctccaacttcggcgccatctctagcgtgctgaatgacatcctgagccggctggacccccctgaggcagaggtgcagatcgacaggctgatcacaggccgcctgcagagcctgcagacctacgtgacacagcagctgatcagggcagcagagatcagagcctccgccaatctggccgccaccaagatgagcgagtgcgtgctgggacagtccaagagggtggacttttgtggcaagggctatcacctgatgtctttcccacagagcgcccctcacggcgtggtgtttctgcacgtgacctacgtgccagcccaggagaagaacttcaccacagcaccagccatctgccacgatggaaaggcacactttcctagggagggcgtgttcgtgtctaacggcacccactggtttgtgacacagcgcaatttctacgagccacagatcatcaccacagacaatacattcgtgagcggcaactgtgatgtggtgatcggcatcgtgaacaataccgtgtatgatccactgcagcccgagctggactcctttaaggaggagctggataagtacttcaagaatcacacctctcccgacgtggatctgggcgacatctccggcatcaatgcctctgtggtgaacatccagaaggagatcgaccggctgaacgaggtggccaagaatctgaacgagagcctgatcgatctgcaggagctgggcaagtatgagcagtacatcaagggctctggcagagagaacctgtatttccagggaggaggaggcagcggatacatccctgaggcaccaagggacggacaggcctacgtgcgcaaggatggcgagtgggtgctgctgtccacctttctgggccatcatcaccaccaccaccaccactga

SEQ ID NO: 1672 - DNA, 3846 bp, Artificial Sequence
  Description of Artificial Sequence: Synthetic polynucleotide
atgggcatcctgccaagcccaggaatgcccgccctgctgtctctggtgagcctgctgtccgtgctgctgatgggatgcgtggcagagacaggcacacagtgcgtgaacctgaccacaaggacccagctgccccctgcctataccaattctttcacacggggcgtgtactatcccgacaaggtgtttagaagctccgtgctgcactccacacaggatctgtttctgcctttcttttctaacgtgacctggttccacgccatccacgtgtccggcaccaatggcacaaagcggttcgacaatcccgtgctgccttttaacgatggcgtgtacttcgccagcaccgagaagtccaacatcatcagaggctggatctttggcaccacactggactctaagacacagagcctgctgatcgtgaacaatgccaccaacgtggtgatcaaggtgtgcgagttccagttttgtaatgatccattcctgggcgtgtactatcacaagaacaataagtcctggatggagtctgagtttcgcgtgtattctagcgccaacaattgcacatttgagtacgtgagccagcccttcctgatggacctggagggcaagcagggcaatttcaagaacctgagggagttcgtgtttaagaatatcgatggctacttcaagatctacagcacgcacaccccaatcaacctggtgcgcgacctgccacagggattctccgccctggagccactggtggatctgcccatcggcatcaacatcacccggtttcagacactgctggccctgcacagatcctacctgacaccaggcgactcctctagcggatggaccgcaggagctgccgcctactatgtgggctatctgcagccccggaccttcctgctgaagtacaacgagaatggcaccatcacagacgcagtggattgcgccctggaccccctgtctgagacaaagtgtacactgaagagctttaccgtggagaagggcatctatcagacaagcaatttcagggtgcagcctaccgagtccatcgtgcgctttcccaatatcacaaacctgtgcccttttggcgaggtgttcaacgccaccagattcgccagcgtgtacgcctggaatcggaagagaatctccaactgcgtggccgactattctgtgctgtacaactccgcctctttcagcacctttaagtgctatggcgtgtctcccacaaagctgaatgatctgtgctttaccaacgtgtacgccgatagcttcgtgatcaggggagacgaagtgagacagatcgcaccaggacagacaggaaagatcgcagactacaattataagctgcctgacgatttcaccggctgcgtgatcgcctggaactccaacaatctggattctaaagtgggcggcaactacaattatctgtacaggctgtttcgcaagtccaatctgaagccattcgagcgggacatctccacagagatctaccaggccggctctaccccctgcaatggcgtggagggctttaactgttatttccctctgcagtcttacggcttccagccaacaaacggcgtgggctatcagccctacagagtggtggtgctgtcctttgagctgctgcacgcaccagcaacagtgtgcggcccaaagaagtctaccaatctggtgaagaacaagtgcgtgaacttcaacttcaacggactgaccggcacaggcgtgctgaccgagagcaataagaagttcctgccttttcagcagttcggcagggacatcgcagataccacagacgccgtgcgcgaccctcagaccctggagatcctggacatcacaccatgcagcttcggcggcgtgtccgtgatcacaccaggcaccaatacatccaaccaggtggccgtgctgtatcaggacgtgaattgtaccgaggtgcccgtggcaatccacgcagatcagctgacccctacatggcgggtgtactctaccggcagcaacgtgttccagacaagagccggatgcctgatcggagcagagcacgtgaacaatagctatgagtgcgacatccctatcggcgccggcatctgtgccagctaccagacccagacaaactccccatctggagcaggctccgtggccagccagtccatcatcgcctataccatgagcctgggcgccgagaacagcgtggcctactccaacaattctatcgccatccctaccaacttcacaatcagcgtgaccacagagatcctgccagtgtctatgaccaagacaagcgtggactgcacaatgtatatctgtggcgatagcaccgagtgctccaacctgctgctgcagtacggctccttttgtacccagctgaatagagccctgacaggcatcgccgtggagcaggataagaacacacaggaggtgttcgcccaggtgaagcagatctacaagaccccacccatcaaggactttggcggcttcaacttcagccagatcctgcctgatccaagcaagccctccaagaggtcttttatcgaggacctgctgttcaacaaggtgaccctggccgatgccggcttcatcaagcagtatggagattgcctgggagacatcgcagcccgcgacctgatctgtgcccagaagtttaatggcctgaccgtgctgcctccactgctgacagatgagatgatcgcccagtacacatctgccctgctggccggcaccatcacaagcggatggaccttcggcgcaggagccgccctgcagatcccttttgccatgcagatggcctataggttcaacggcatcggcgtgacccagaatgtgctgtacgagaaccagaagctgatcgccaatcagtttaacagcgccatcggcaagatccaggactctctgtcctctacagccagcgccctgggcaagctgcaggatgtggtgaatcagaacgcccaggccctgaataccctggtgaagcagctgagctccaacttcggcgccatctctagcgtgctgaatgacatcctgagccggctggacccccctgaggcagaggtgcagatcgacaggctgatcacaggccgcctgcagagcctgcagacctacgtgacacagcagctgatcagggcagcagagatcagagcctccgccaatctggccgccaccaagatgagcgagtgcgtgctgggacagtccaagagggtggacttttgtggcaagggctatcacctgatgtctttcccacagagcgcccctcacggcgtggtgtttctgcacgtgacctacgtgccagcccaggagaagaacttcaccacagcaccagccatctgccacgatggaaaggcacactttcctagggagggcgtgttcgtgtctaacggcacccactggtttgtgacacagcgcaatttctacgagccacagatcatcaccacagacaatacattcgtgagcggcaactgtgatgtggtgatcggcatcgtgaacaataccgtgtatgatccactgcagcccgagctggactcctttaaggaggagctggataagtacttcaagaatcacacctctcccgacgtggatctgggcgacatctccggcatcaatgcctctgtggtgaacatccagaaggagatcgaccggctgaacgaggtggccaagaatctgaacgagagcctgatcgatctgcaggagctgggcaagtatgagcagtacatcaagggctctggcagagagaacctgtatttccagggaggaggaggcagcggatacatccctgaggcaccaagggacggacaggcctacgtgcgcaaggatggcgagtgggtgctgctgtccacctttctgggccatcatcaccaccaccaccaccactga

SEQ ID NO: 1673 - DNA, 3846 bp, Artificial Sequence
  Description of Artificial Sequence: Synthetic polynucleotide
atgggcatcctgccaagcccaggaatgcccgccctgctgtctctggtgagcctgctgtccgtgctgctgatgggatgcgtggcagagacaggcacacagtgcgtgaacctgaccacaaggacccagctgccccctgcctataccaattctttcacacggggcgtgtactatcccgacaaggtgtttagaagctccgtgctgcactccacacaggatctgtttctgcctttcttttctaacgtgacctggttccacgccatccacgtgtccggcaccaatggcacaaagcggttcgacaatcccgtgctgccttttaacgatggcgtgtacttcgccagcaccgagaagtccaacatcatcagaggctggatctttggcaccacactggactctaagacacagagcctgctgatcgtgaacaatgccaccaacgtggtgatcaaggtgtgcgagttccagttttgtaatgatccattcctgggcgtgtactatcacaagaacaataagtcctggatggagtctgagtttcgcgtgtattctagcgccaacaattgcacatttgagtacgtgagccagcccttcctgttcgacctggagggcaagcagggcaatttcaagaacctgagggagttcgtgtttaagaatatcgatggctacttcaagatctacagcaagcacaccccaatcaacctggtgcgcgacctgccacagggattctccgccctggagccactggtggatctgcccatcggcatcaacatcacccggtttcagacactgctggccctgcacagatcctacctgacaccaggcgactcctctagcggatggaccgcaggagctgccgcctactatgtgggctatctgcagccccggaccttcctgctgaagtacaacgagaatggcaccatcacagacgcagtggattgcgccctggaccccctgtctgagacaaagtgtacactgaagagctttaccgtggagaagggcatctatcagacaagcaatttcagggtgcagcctaccgagtccatcgtgcgctttcccaatatcacaaacctgtgcccttttggcgaggtgttcaacgccaccagattcgccagcgtgtacgcctggaatcggaagagaatctccaactgcgtggccgactattctgtgctgtacaactccgcctctttcagcacctttaagtgctatggcgtgtctcccacaaagctgaatgatctgtgctttaccaacgtgtacgccgatagcttcgtgatcaggggagacgaagtgagacagatcgcaccaggacagacaggaaagatcgcagactacaattataagctgcctgacgatttcaccggctgcgtgatcgcctggaactccaacaatctggattctaaagtgggcggcaactacaattatctgtacaggctgtttcgcaagtccaatctgaagccattcgagcgggacatctccacagagatctaccaggccggctctaccccctgcaatggcgtggagggctttaactgttatttccctctgcagtcttacggcttccagccaacaaacggcgtgggctatcagccctacagagtggtggtgctgtcctttgagctgctgcacgcaccagcaacagtgtgcggcccaaagaagtctaccaatctggtgaagaacaagtgcgtgaacttcaacttcaacggactgaccggcacaggcgtgctgaccgagagcaataagaagttcctgccttttcagcagttcggcagggacatcgcagataccacagacgccgtgcgcgaccctcagaccctggagatcctggacatcacaccatgcagcttcggcggcgtgtccgtgatcacaccaggcaccaatacatccaaccaggtggccgtgctgtatcaggacgtgaattgtaccgaggtgcccgtggcaatccacgcagatcagctgacccctacatggcgggtgtactctaccggcagcaacgtgttccagacaagagccggatgcctgatcggagcagagcacgtgaacaatagctatgagtgcgacatccctatcggcgccggcatctgtgccagctaccagacccagacaaactccccatctggagcaggctccgtggccagccagtccatcatcgcctataccatgagcctgggcgccgagaacagcgtggcctactccaacaattctatcgccatccctaccaacttcacaatcagcgtgaccacagagatcctgccagtgtctatgaccaagacaagcgtggactgcacaatgtatatctgtggcgatagcaccgagtgctccaacctgctgctgcagtacggctccttttgtacccagctgaatagagccctgacaggcatcgccgtggagcaggataagaacacacaggaggtgttcgcccaggtgaagcagatctacaagaccccacccatcaaggactttggcggcttcaacttcagccagatcctgcctgatccaagcaagccctccaagaggtcttttatcgaggacctgctgttcaacaaggtgaccctggccgatgccggcttcatcaagcagtatggagattgcctgggagacatcgcagcccgcgacctgatctgtgcccagaagtttaatggcctgaccgtgctgcctccactgctgacagatgagatgatcgcccagtacacatctgccctgctggccggcaccatcacaagcggatggaccttcggcgcaggagccgccctgcagatcccttttgccatgcagatggcctataggttcaacggcatcggcgtgacccagaatgtgctgtacgagaaccagaagctgatcgccaatcagtttaacagcgccatcggcaagatccaggactctctgtcctctacagccagcgccctgggcaagctgcaggatgtggtgaatcagaacgcccaggccctgaataccctggtgaagcagctgagctccaacttcggcgccatctctagcgtgctgaatgacatcctgagccggctggacccccctgaggcagaggtgcagatcgacaggctgatcacaggccgcctgcagagcctgcagacctacgtgacacagcagctgatcagggcagcagagatcagagcctccgccaatctggccgccaccaagatgagcgagtgcgtgctgggacagtccaagagggtggacttttgtggcaagggctatcacctgatgtctttcccacagagcgcccctcacggcgtggtgtttctgcacgtgacctacgtgccagcccaggagaagaacttcaccacagcaccagccatctgccacgatggaaaggcacactttcctagggagggcgtgttcgtgtctaacggcacccactggtttgtgacacagcgcaatttctacgagccacagatcatcaccacagacaatacattcgtgagcggcaactgtgatgtggtgatcggcatcgtgaacaataccgtgtatgatccactgcagcccgagctggactcctttaaggaggagctggataagtacttcaagaatcacacctctcccgacgtggatctgggcgacatctccggcatcaatgcctctgtggtgaacatccagaaggagatcgaccggctgaacgaggtggccaagaatctgaacgagagcctgatcgatctgcaggagctgggcaagtatgagcagtacatcaagggctctggcagagagaacctgtatttccagggaggaggaggcagcggatacatccctgaggcaccaagggacggacaggcctacgtgcgcaaggatggcgagtgggtgctgctgtccacctttctgggccatcatcaccaccaccaccaccactga

SEQ ID NO: 1674 - DNA, 3846 bp, Artificial Sequence
  Description of Artificial Sequence: Synthetic polynucleotide
atgggcatcctgccaagcccaggaatgcccgccctgctgtctctggtgagcctgctgtccgtgctgctgatgggatgcgtggcagagacaggcacacagtgcgtgaacctgaccacaaggacccagctgccccctgcctataccaattctttcacacggggcgtgtactatcccgacaaggtgtttagaagctccgtgctgcactccacacaggatctgtttctgcctttcttttctaacgtgacctggttccacgccatccacgtgtccggcaccaatggcacaaagcggttcgacaatcccgtgctgccttttaacgatggcgtgtacttcgccagcaccgagaagtccaacatcatcagaggctggatctttggcaccacactggactctaagacacagagcctgctgatcgtgaacaatgccaccaacgtggtgatcaaggtgtgcgagttccagttttgtaatgatccattcctgggcgtgtactatcacaagaacaataagtcctggatggagtctgagtttcgcgtgtattctagcgccaacaattgcacatttgagtacgtgagccagcccttcctgatggacctggagggcaagcagggcaatttcaagaacctgagggagttcgtgtttaagaatatcgatggctacttcaagatctacagcaagcacaccccaatcaacctggtgcgcgacctgccacagggattctccgccctggagccactggtggatctgcccatcggcatcaacatcacccggtttcagacactgctggccctgcacagatcctacctgacaccaggcgactcctctagcggatggaccgcaggagctgccgcctactatgtgggctatctgcagccccggaccttcctgctgaagtacaacgagaatggcaccatcacagacgcagtggattgcgggctggaccccctgtctgagacaaagtgtacactgaagagctttaccgtggagaagggcatctatcagacaagcaatttcagggtgcagcctaccgagtccatcgtgcgctttcccaatatcacaaacctgtgcccttttggcgaggtgttcaacgccaccagattcgccagcgtgtacgcctggaatcggaagagaatctccaactgcgtggccgactattctgtgctgtacaactccgcctctttcagcacctttaagtgctatggcgtgtctcccacaaagctgaatgatctgtgctttaccaacgtgtacgccgatagcttcgtgatcaggggagacgaagtgagacagatcgcaccaggacagacaggaaagatcgcagactacaattataagctgcctgacgatttcaccggctgcgtgatcgcctggaactccaacaatctggattctaaagtgggcggcaactacaattatctgtacaggctgtttcgcaagtccaatctgaagccattcgagcgggacatctccacagagatctaccaggccggctctaccccctgcaatggcgtggagggctttaactgttatttccctctgcagtcttacggcttccagccaacaaacggcgtgggctatcagccctacagagtggtggtgctgtcctttgagctgctgcacgcaccagcaacagtgtgcggcccaaagaagtctaccaatctggtgaagaacaagtgcgtgaacttcaacttcaacggactgaccggcacaggcgtgctgaccgagagcaataagaagttcctgccttttcagcagttcggcagggacatcgcagataccacagacgccgtgcgcgaccctcagaccctggagatcctggacatcacaccatgcagcttcggcggcgtgtccgtgatcacaccaggcaccaatacatccaaccaggtggccgtgctgtatcaggacgtgaattgtaccgaggtgcccgtggcaatccacgcagatcagctgacccctacatggcgggtgtactctaccggcagcaacgtgttccagacaagagccggatgcctgatcggagcagagcacgtgaacaatagctatgagtgcgacatccctatcggcgccggcatctgtgccagctaccagacccagacaaactccccatctggagcaggctccgtggccagccagtccatcatcgcctataccatgagcctgggcgccgagaacagcgtggcctactccaacaattctatcgccatccctaccaacttcacaatcagcgtgaccacagagatcctgccagtgtctatgaccaagacaagcgtggactgcacaatgtatatctgtggcgatagcaccgagtgctccaacctgctgctgcagtacggctccttttgtacccagctgaatagagccctgacaggcatcgccgtggagcaggataagaacacacaggaggtgttcgcccaggtgaagcagatctacaagaccccacccatcaaggactttggcggcttcaacttcagccagatcctgcctgatccaagcaagccctccaagaggtcttttatcgaggacctgctgttcaacaaggtgaccctggccgatgccggcttcatcaagcagtatggagattgcctgggagacatcgcagcccgcgacctgatctgtgcccagaagtttaatggcctgaccgtgctgcctccactgctgacagatgagatgatcgcccagtacacatctgccctgctggccggcaccatcacaagcggatggaccttcggcgcaggagccgccctgcagatcccttttgccatgcagatggcctataggttcaacggcatcggcgtgacccagaatgtgctgtacgagaaccagaagctgatcgccaatcagtttaacagcgccatcggcaagatccaggactctctgtcctctacagccagcgccctgggcaagctgcaggatgtggtgaatcagaacgcccaggccctgaataccctggtgaagcagctgagctccaacttcggcgccatctctagcgtgctgaatgacatcctgagccggctggacccccctgaggcagaggtgcagatcgacaggctgatcacaggccgcctgcagagcctgcagacctacgtgacacagcagctgatcagggcagcagagatcagagcctccgccaatctggccgccaccaagatgagcgagtgcgtgctgggacagtccaagagggtggacttttgtggcaagggctatcacctgatgtctttcccacagagcgcccctcacggcgtggtgtttctgcacgtgacctacgtgccagcccaggagaagaacttcaccacagcaccagccatctgccacgatggaaaggcacactttcctagggagggcgtgttcgtgtctaacggcacccactggtttgtgacacagcgcaatttctacgagccacagatcatcaccacagacaatacattcgtgagcggcaactgtgatgtggtgatcggcatcgtgaacaataccgtgtatgatccactgcagcccgagctggactcctttaaggaggagctggataagtacttcaagaatcacacctctcccgacgtggatctgggcgacatctccggcatcaatgcctctgtggtgaacatccagaaggagatcgaccggctgaacgaggtggccaagaatctgaacgagagcctgatcgatctgcaggagctgggcaagtatgagcagtacatcaagggctctggcagagagaacctgtatttccagggaggaggaggcagcggatacatccctgaggcaccaagggacggacaggcctacgtgcgcaaggatggcgagtgggtgctgctgtccacctttctgggccatcatcaccaccaccaccaccactga

SEQ ID NO: 1675 - DNA, 3846 bp, Artificial Sequence
  Description of Artificial Sequence: Synthetic polynucleotide
atgggcatcctgccaagcccaggaatgcccgccctgctgtctctggtgagcctgctgtccgtgctgctgatgggatgcgtggcagagacaggcacacagtgcgtgaacctgaccacaaggacccagctgccccctgcctataccaattctttcacacggggcgtgtactatcccgacaaggtgtttagaagctccgtgctgcactccacacaggatctgtttctgcctttcttttctaacgtgacctggttccacgccatccacgtgtccggcaccaatggcacaaagcggttcgacaatcccgtgctgccttttaacgatggcgtgtacttcgccagcaccgagaagtccaacatcatcagaggctggatctttggcaccacactggactctaagacacagagcctgctgatcgtgaacaatgccaccaacgtggtgatcaaggtgtgcgagttccagttttgtaatgatccattcctgggcgtgtactatcacaagaacaataagtcctggatggagtctgagtttcgcgtgtattctagcgccaacaattgcacatttgagtacgtgagccagcccttcctgatggacctggagggcaagcagggcaatttcaagaacctgagggagttcgtgtttaagaatatcgatggctacttcaagatctacagcaagcacaccccaatcaacctggtgcgcgacctgccacagggattctccgccctggagccactggtggatctgcccatcggcatcaacatcacccggtttcagacactgctggccctgcacagatcctacctgacaccaggcgactcctctagcggatggaccgcaggagctgccgcctactatgtgggctatctgcagccccggaccttcctgctgaagtacaacgagaatggcaccatcacagacgcagtggattgcgccctggaccccctgtctgagacaaagtgtacactgaagagctttaccgtggagaagggcatctatcagacaagcaatttcagggtgcagcctaccgagtccatcgtgcgctttcccaatatcacaaacctgtgcccttttggcgaggtgttcaacgccaccagattcgccagcgtgtacgcctggaatcggaagagaatctccaactgcgtggccgactattctgtgctgtacaactccgcctctttcagcacctttaagtgctatggcgtgtctcccacaaagctgaatgatctgtgctttaccaacgtgtacgccgatagcttcgtgatcaggggagacgaagtgagacagatcgcaccaggacagacaggaaagatcgcagactacaattataagctgcctgacgatttcaccggctgcgtgatcgcctggaactccaacaatctggattctaaagtgggcggcaactacaattatctgtacaggctgtttcgcaagtccaatctgaagccattcgagcgggacatctccacagagatctaccaggccggctctaccccctgcaatggcgtggagggctttaactgttatttccctctgcagtcttacggcttccagccaacaaacggcgtgggctatcagccctacagagtggtggtgctgtcctttgagctgctgcacgcaccagcaacagtgtgcggcccaaagaagtctaccaatctggtgaagaacaagtgcgtgaacttcaacttcaacggactgaccggcacaggcgtgctgaccgagagcaataagaagttcctgccttttcagcagttcggcagggacatcgcagataccacagacgccgtgcgcgaccctcagaccctggagatcctggacatcacaccatgcagcttcggcggcgtgtccgtgatcacaccaggcaccaatacatccaaccaggtggccgtgctgtatcaggacgtgaattgtaccgaggtgcccgtggcaatccacgcagatcagctgacccctacatggcgggtgtactctaccggcagcaacgtgttccagacaagagccggatgcctgatcggagcagagcacgtgaacaatagctatgagtgcgacatccctatcggcgccggcatctgtgccagctaccagacccagacaaactccccatctggagcaggctccgtggccagccagtccatcatcgcctataccatgagcctgggcgccgagaacagcgtggcctactccaacaattctatcgccatccctaccaacttcacaatcagcgtgaccacagagatcctgccagtgtctatgaccaagacaagcgtggactgcacaatgtatatctgtggcgatagcgaagagtgctccaacctgctgctgcagtacggctccttttgtacccagctgaatagagccctgacaggcatcgccgtggagcaggataagaacacacaggaggtgttcgcccaggtgaagcagatctacaagaccccacccatcaaggactttggcggcttcaacttcagccagatcctgcctgatccaagcaagccctccaagaggtcttttatcgaggacctgctgttcaacaaggtgaccctggccgatgccggcttcatcaagcagtatggagattgcctgggagacatcgcagcccgcgacctgatctgtgcccagaagtttaatggcctgaccgtgctgcctccactgctgacagatgagatgatcgcccagtacacatctgccctgctggccggcaccatcacaagcggatggaccttcggcgcaggagccgccctgcagatcccttttgccatgcagatggcctataggttcaacggcatcggcgtgacccagaatgtgctgtacgagaaccagaagctgatcgccaatcagtttaacagcgccatcggcaagatccaggactctctgtcctctacagccagcgccctgggcaagctgcaggatgtggtgaatcagaacgcccaggccctgaataccctggtgaagcagctgagctccaacttcggcgccatctctagcgtgctgaatgacatcctgagccggctggacccccctgaggcagaggtgcagatcgacaggctgatcacaggccgcctgcagagcctgcagacctacgtgacacagcagctgatcagggcagcagagatcagagcctccgccaatctggccgccaccaagatgagcgagtgcgtgctgggacagtccaagagggtggacttttgtggcaagggctatcacctgatgtctttcccacagagcgcccctcacggcgtggtgtttctgcacgtgacctacgtgccagcccaggagaagaacttcaccacagcaccagccatctgccacgatggaaaggcacactttcctagggagggcgtgttcgtgtctaacggcacccactggtttgtgacacagcgcaatttctacgagccacagatcatcaccacagacaatacattcgtgagcggcaactgtgatgtggtgatcggcatcgtgaacaataccgtgtatgatccactgcagcccgagctggactcctttaaggaggagctggataagtacttcaagaatcacacctctcccgacgtggatctgggcgacatctccggcatcaatgcctctgtggtgaacatccagaaggagatcgaccggctgaacgaggtggccaagaatctgaacgagagcctgatcgatctgcaggagctgggcaagtatgagcagtacatcaagggctctggcagagagaacctgtatttccagggaggaggaggcagcggatacatccctgaggcaccaagggacggacaggcctacgtgcgcaaggatggcgagtgggtgctgctgtccacctttctgggccatcatcaccaccaccaccaccactga

SEQ ID NO: 1676 - DNA, 3846 bp, Artificial Sequence
  Description of Artificial Sequence: Synthetic polynucleotide
atgggcatcctgccaagcccaggaatgcccgccctgctgtctctggtgagcctgctgtccgtgctgctgatgggatgcgtggcagagacaggcacacagtgcgtgaacctgaccacaaggacccagctgccccctgcctataccaattctttcacacggggcgtgtactatcccgacaaggtgtttagaagctccgtgctgcactccacacaggatctgtttctgcctttcttttctaacgtgacctggttccacgccatccacgtgtccggcaccaatggcacaaagcggttcgacaatcccgtgctgccttttaacgatggcgtgtacttcgccagcaccgagaagtccaacatcatcagaggctggatctttggcaccacactggactctaagacacagagcctgctgatcgtgaacaatgccaccaacgtggtgatcaaggtgtgcgagttccagttttgtaatgatccattcctgggcgtgtactatcacaagaacaataagtcctggatggagtctgagtttcgcgtgtattctagcgccaacaattgcacatttgagtacgtgagccagcccttcctgatggacctggagggcaagcagggcaatttcaagaacctgagggagttcgtgtttaagaatatcgatggctacttcaagatctacagcaagcacaccccaatcaacctggtgcgcgacctgccacagggattctccgccctggagccactggtggatctgcccatcggcatcaacatcacccggtttcagacactgctggccctgcacagatcctacctgacaccaggcgactcctctagcggatggaccgcaggagctgccgcctactatgtgggctatctgcagccccggaccttcctgctgaagtacaacgagaatggcaccatcacagacgcagtggattgcgccctggaccccctgtctgagacaaagtgtacactgaagagctttaccgtggagaagggcatctatcagacaagcaatttcagggtgcagcctaccgagtccatcgtgcgctttcccaatatcacaaacctgtgcccttttggcgaggtgttcaacgccaccagattcgccagcgtgtacgcctggaatcggaagagaatctccaactgcgtggccgactattctgtgctgtacaactccgcctctttcagcacctttaagtgctatggcgtgtctcccacaaagctgaatgatctgtgctttaccaacgtgtacgccgatagcttcgtgatcaggggagacgaagtgagacagatcgcaccaggacagacaggaaagatcgcagactacaattataagctgcctgacgatttcaccggctgcgtgatcgcctggaactccaacaatctggattctaaagtgggcggcaactacaattatctgtacaggctgtttcgcaagtccaatctgaagccattcgagcgggacatctccacagagatctaccaggccggctctaccccctgcaatggcgtggagggctttaactgttatttccctctgcagtcttacggcttccagccaacaaacggcgtgggctatcagccctacagagtggtggtgctgtcctttgagctgctgcacgcaccagcaacagtgtgcggcccaaagaagtctaccaatctggtgaagaacaagtgcgtgaacttcaacttcaacggactgaccggcacaggcgtgctgaccgagagcaataagaagttcctgccttttcagcagttcggcagggacatcgcagataccacagacgccgtgcgcgaccctcagaccctggagatcctggacatcacaccatgcagcttcggcggcgtgtccgtgatcacaccaggcaccaatacatccaaccaggtggccgtgctgtatcaggacgtgaattgtaccgaggtgcccgtggcaatccacgcagatcagctgacccctacatggcgggtgtactctaccggcagcaacgtgttccagacaagagccggatgcctgatcggagcagagcacgtgaacaatagctatgagtgcgacatccctatcggcgccggcatctgtgccagctaccagacccagacaaactccccatctggagcaggctccgtggccagccagtccatcatcgcctataccatgagcctgggcgccgagaacagcgtggcctactccaacaattctatcgccatccctaccaacttcacaatcagcgtgaccacagagatcctgccagtgtctatgaccaagacaagcgtggactgcacaatgtatatctgtggcgatagcaccgagtgctccaacctgctgctgcagtacggctccttttgtacccagctgaatagagccctgacaggcatcgccgtggagcaggataagaacacacaggaggtgttcgcccaggtgaagcagatctacaagaccccacccatcaaggactttggcggcttcaacttcagccagatcctgcctgatccaagcaagccctccaagaggtcttttatcgaggacctgctgttcaacaaggtgaccctggccgatgccggcttcatcaagcagtatggagattgcctgggagacatcgcagcccgcgacctgatctgtgcccagaagtttaatggcctgaccgtgctgcctccactgctgacagatgagatgatcgcccagtacacatctgccctgctggccggcaccatcacaagcggatggaccttcggcgcaggagccgccctgcagatcccttttgccatgcagatggcctataggttcaacggcatcggcgtgacccagaatgtgctgtacgagaaccagaagctgatcgccaatcagtttaacaaagccatcggcaagatccaggactctctgtccacgacagccagcgccctgggcaagctgcaggatgtggtgaatcagaacgcccaggccctgaataccctggtgaagcagctgagctccaacttcggcgccatctctagcgtgctgaatgacatcctgagccggctggacccccctgaggcagaggtgcagatcgacaggctgatcacaggccgcctgcagagcctgcagacctacgtgacacagcagctgatcagggcagcagagatcagagcctccgccaatctggccgccaccaagatgagcgagtgcgtgctgggacagtccaagagggtggacttttgtggcaagggctatcacctgatgtctttcccacagagcgcccctcacggcgtggtgtttctgcacgtgacctacgtgccagcccaggagaagaacttcaccacagcaccagccatctgccacgatggaaaggcacactttcctagggagggcgtgttcgtgtctaacggcacccactggtttgtgacacagcgcaatttctacgagccacagatcatcaccacagacaatacattcgtgagcggcaactgtgatgtggtgatcggcatcgtgaacaataccgtgtatgatccactgcagcccgagctggactcctttaaggaggagctggataagtacttcaagaatcacacctctcccgacgtggatctgggcgacatctccggcatcaatgcctctgtggtgaacatccagaaggagatcgaccggctgaacgaggtggccaagaatctgaacgagagcctgatcgatctgcaggagctgggcaagtatgagcagtacatcaagggctctggcagagagaacctgtatttccagggaggaggaggcagcggatacatccctgaggcaccaagggacggacaggcctacgtgcgcaaggatggcgagtgggtgctgctgtccacctttctgggccatcatcaccaccaccaccaccactga

SEQ ID NO: 1677 - DNA, 3846 bp, Artificial Sequence
  Description of Artificial Sequence: Synthetic polynucleotide
atgggcatcctgccaagcccaggaatgcccgccctgctgtctctggtgagcctgctgtccgtgctgctgatgggatgcgtggcagagacaggcacacagtgcgtgaacctgaccacaaggacccagctgccccctgcctataccaattctttcacacggggcgtgtactatcccgacaaggtgtttagaagcgatgtgctgcactccacacaggatctgtttctgcctttcttttctaacgtgacctggttccacgccatccacgtgtccggcaccaatggcacaaagcggttcgacaatcccgtgctgccttttaacgatggcgtgtacttcgccagcaccgagaagtccaacatcatcagaggctggatctttggcaccacactggactctaagacacagagcctgctgatcgtgaacaatgccaccaacgtggtgatcaaggtgtgcgagttccagttttgtgaaaatccattcctgggcgtgtactatcacaagaacaataagtcctggatggagaaagagtttcgcgtgtattctagcgccaacaattgcacatttgagtacgtgagccagcccttcctgatggacctggggggcaagcagggcaatttcaagtggctgagggagttcgtgtttaagaatatcgatggctacttcaagatctacagcaagcacaccccaatcaacctggtgcgcgacctgccacagggattctccgccctggagccactgatggatctgcccatcggcatcaacatcacccggtttcagacactgctggccctgcacagatcctacctgacaccaggcgactcctctagcggatggaccgcaggagctgccgcctactatgtgggctatctgcagccccggaccttcctgctgaagtacaacgagaatggcaccatcacagacgcagtggattgcgccctggaccccctgtctgagacaaagtgtacactgaagagctttaccgtggagaagggcatctatcagacaagcaatttcagggtgcagcctaccgagtccatcgtgcgctttcccaatatcacaaacctgtgcccttttggcgaggtgttcaacgccaccagattcgccagcgtgtacgcctggaatcggaagagaatctccaactgcgtggccgactattctgtgctgtacaactccgcctctttcagcacctttaagtgctatggcgtgtctcccacaaagctgaatgatctgtgctttaccaacgtgtacgccgatagcttcgtgatcaggggagacgaagtgagacagatcgcaccaggacagacaggaaagatcgcagactacaattataagctgcctgacgatttcaccggctgcgtgatcgcctggaactccaacaatctggattctaaagtgggcggcaactacaattatctgtacaggctgtttcgcaagtccaatctgaagccattcgagcgggacatctccacagagatctaccaggccggctctaccccctgcaatggcgtggagggctttaactgttatttccctctgcagtcttacggcttccagccaacaaacggcgtgggctatcagccctacagagtggtggtgctgtcctttgagctgctgcacgcaccagcaacagtgtgcggcccaaagaagtctaccaatctggtgaagaacaagtgcgtgaacttcaacttcaacggactgaccggcacaggcgtgctgaccgagagcaataagaagttcctgccttttcagcagttcggcagggacatcgcagataatacagacgccgtgcgcgaccctcagaccctggagatcctggacatcacaccatgcagcttcggcggcgtgtccgtgatcacaccaggcaccaatacatccaaccaggtggccgtgctgtatcaggacgtgaattgtaccgaggtgcccaatgcaatccacgcagatcagctgacccctacatggcgggtgtactctaccggcagcaacgtgttccagacaagagccggatgcctgatcggagcagagcacgtgaacaatagctatgagtgcgacatccctatcggcgccggcatctgtgccagctaccagacccagacaaactccccatctggagcaggctccgtggccagccagtccatcatcgcctataccatgagcctgggcgccgagaacagcgtggcctactccaacaattctatcgccatccctaccaacttcacaatcagcgtgaccacagagatcctgccagtgtctatgaccaagacaagcgtggactgcacaatgtatatctgtggcgatagcaccgagtgctccaacctgctgctgcagtacggctccttttgtacccagctgaatagagccctgcatggcatcgcccgagagcaggataagaacacacaggaggtgttcgcccaggtgaagcagatctacaagaccccacccatcaaggactttggcggcttcaacttcagccagatcctgcctgatccaagcaagccctccaagaggtcttttatcgaggacctgctgttcaacaaggtgaccctggccgatgccggcttcatcaagcagtatggagattgcctgggagacatcgcagcccgcgacctgatctgtgcccagaagtttaatggcctgaccgtgctgcctccactgctgacagatgagatgatcgcccagtacacatctgccctgctggccggcaccatcacaagcggatggaccttcggcgcaggagccgccctgcagatcccttttgccatgcagatggcctataggttcaacggcatcggcgtgacccagaatgtgctgtacgagaaccagaagctgatcgccaatcagtttaacaaagccatcggcaagatccaggactctctgtcctctacagccagcgccctgggcaagctgcaggatgtggtgaatcagaacgcccaggccctgaataccctggtgaagcagctgagctccaacttcggcgccatctctagcgtgctgaatgacatcctgagccggctggacccccctgaggcagaggtgcagatcgacaggctgatcacaggccgcctgcagagcctgcagacctacgtgacacagcagctgatcagggcagcagagatcagagcctccgccaatctggccgccaccaagatgagcgagtgcgtgctgggacagtccaagagggtggacttttgtggcaagggctatcacctgatgtctttcccacagagcgcccctcacggcgtggtgtttctgcacgtgacctacgtgccagcccaggagaagaacttcaccacagcaccagccatctgccacgatggaaaggcattttttcctagggagggcgtgttcgtgtctaacggcacccaatggtttgtgacacagcgcaatttctacgagccacagatcatcaccacagacaatacattcgtgagcggcaactgtgatgtggtgatcggcatcgtgaacaataccgtgtatgatccactgcagcccgagctggactcctttaaggaggagctggataagtacttcaagaatcacacctctcccgacgtggatctgggcgacatctccggcatcaatgcctctgtggtgaacatccagaaggagatcgaccggctgaacgaggtggccaagaatctgaacgagagcctgatcgatctgcaggagctgggcaagtatgagcagtacatcaagggctctggcagagagaacctgtatttccagggaggaggaggcagcggatacatccctgaggcaccaagggacggacaggcctacgtgcgcaaggatggcgagtgggtgctgctgtccacctttctgggccatcatcaccaccaccaccaccactga

SEQ ID NO: 1678 - DNA, 3846 bp, Artificial Sequence
  Description of Artificial Sequence: Synthetic polynucleotide
atgggcatcctgccaagcccaggaatgcccgccctgctgtctctggtgagcctgctgtccgtgctgctgatgggatgcgtggcagagacaggcacacagtgcgtgaacctgaccacaaggacccagctgccccctgcctataccaattctttcacacggggcgtgtactatcccgacaaggtgtttagaagctccgtgctgcactccacacaggatctgtttctgcctttcttttctaacgtgacctggttccacgccatccacgtgtccggcaccaatggcacaaagcggttcgacaatcccgtgctgccttttaacgatggcgtgtacttcgccagcaccgagaagtccaacatcatcagaggctggatctttggcaccacactggactctaagacacagagcctgctgatcgtgaacaatgccaccaacgtggtgatcaaggtgtgcgagttccagttttgtaatgatccattcctgggcgtgtactatcacaagaacaataagtcctggatggagtctgagtttcgcgtgtattctagcgccaacaattgcacatttgagtacgtgagccagcccttcctgatggacctggagggcaagcagggcaatttcaagaacctgagggagttcgtgtttaagaatatcgatggctacttcaagatctacagcaagcacaccccaatcaacctggtgcgcgacctgccacagggattctccgccctggagccactggtggatctgcccatcggcatcaacatcacccggtttcagacactgctggccctgcacagatcctacctgacaccaggcgactcctctagcggatggaccgcaggagctgccgcctactatgtgggctatctgcagccccggaccttcctgctgaagtacaacgagaatggcaccatcacagacgcagtggattgcgccctggaccccctgtctgagacaaagtgtacactgaagagctttaccgtggagaagggcatctatcagacaagcaatttcagggtgcagcctaccgagtccatcgtgcgctttcccaatatcacaaacctgtgcccttttggcgaggtgttcaacgccaccagattcgccagcgtgtacgcctggaatcggaagagaatctccaactgcgtggccgactattctgtgctgtacaactccgcctctttcagcacctttaagtgctatggcgtgtctcccacaaagctgaatgatctgtgctttaccaacgtgtacgccgatagcttcgtgatcaggggagacgaagtgagacagatcgcaccaggacagacaggaaagatcgcagactacaattataagctgcctgacgatttcaccggctgcgtgatcgcctggaactccaacaatctggattctaaagtgggcggcaactacaattatctgtacaggctgtttcgcaagtccaatctgaagccattcgagcgggacatctccacagagatctaccaggccggctctaccccctgcaatggcgtggagggctttaactgttatttccctctgcagtcttacggcttccagccaacaaacggcgtgggctatcagccctacagagtggtggtgctgtcctttgagctgctgcacgcaccagcaacagtgtgcggcccaaagaagtctaccaatctggtgaagaacaagtgcgtgaacttcaacttcaacggactgaccggcacaggcgtgctgaccgagagcaataagaagttcctgccttttcagcagttcggcagggacatcgcagataccacagacgccgtgcgcgaccctcagaccctggagatcctggacatcacaccatgcagcttcggcggcgtgtccgtgatcacaccaggcaccaatacatccaaccaggtggccgtgctgtatcaggacgtgaattgtaccgaggtgcccgtggcaatccacgcagatcagctgacccctacatggcgggtgtactctaccggcagcaacgtgttccagacaagagccggatgcctgatcggagcagagcacgtgaacaatagctatgagtgcgacatccctatcggcgccggcatctgtgccagctaccagacccagacaaactccccatctggagcaggctccgtggccagccagtccatcatcgcctataccatgagcctgggcgccgagaacagcgtggcctactccaacaattctatcgccatccctaccaacttcacaatcagcgtgaccacagagatcctgccagtgtctatgaccaagacaagcgtggactgcacaatgtatatctgtggcgatagcaccgagtgctccaacctgctgctgcagtacggctccttttgtacccagctgaatagagccctgacaggcatcgccgtggagcaggataagaacacacaggaggtgttcgcccaggtgaagcagatctacaagaccccacccatcaaggactttggcggcttcaacttcagccagatcctgcctgatccaagcaagccctccaagaggtcttttatcgaggacctgctgttcaacaaggtgaccctggccgatgccggcttcatcaagcagtatggagattgcctgggagacatcgcagcccgcgacctgatctgtgcccagaagtttaatggcctgaccgtgctgcctccactgctgacagatgagatgatcgcccagtacacatctgccctgctggccggcaccatcacaagcggatggaccttcggcgcaggagccgccctgcagatcccttttgccatgcagatggcctataggttcaacggcatcggcgtgacccagaatgtgctgtacgagaaccagaagctgatcgccaatcagtttaacagcgccatcggcaagatccaggactctctgtcctctacagccagcgccctgggcaagctgcaggatgtggtgaatcagaacgcccaggccctgaataccctggtgaagcagctgagctccaacttcggcgccatctctagcgtgctgaatgacatcctgagccggctggacccccctgaggcagaggtgcagatcgacaggctgatcacaggccgcctgcagagcctgcagacctacgtgacacagcagctgatcagggcagcagagatcagagcctccgccaatctggccgccaccaagatgagcgagtgcgtgctgggacagtccaagagggtggacttttgtggcaagggctatcacctgatgtctttcccacagagcgcccctcacggcgtggtgtttctgcacgtgacctacgtgccagcccaggagaagaacttcaccacagcaccagccatctgccacgatggaaaggcacactttcctagggagggcgtgttcgtgtctaacggcacccgatggtttgtgacacagcgcaatttctacgagccacagatcatcaccacagacaatacattcgtgagcggcaactgtgatgtggtgatcggcatcgtgaacaataccgtgtatgatccactgcagcccgagctggactcctttaaggaggagctggataagtacttcaagaatcacacctctcccgacgtggatctgggcgacatctccggcatcaatgcctctgtggtgaacatccagaaggagatcgaccggctgaacgaggtggccaagaatctgaacgagagcctgatcgatctgcaggagctgggcaagtatgagcagtacatcaagggctctggcagagagaacctgtatttccagggaggaggaggcagcggatacatccctgaggcaccaagggacggacaggcctacgtgcgcaaggatggcgagtgggtgctgctgtccacctttctgggccatcatcaccaccaccaccaccactga

SEQ ID NO: 1679 - DNA, 3846 bp, Artificial Sequence
  Description of Artificial Sequence: Synthetic polynucleotide
atgggcatcctgccaagcccaggaatgcccgccctgctgtctctggtgagcctgctgtccgtgctgctgatgggatgcgtggcagagacaggcacacagtgcgtgaacctgaccacaaggacccagctgccccctgcctataccaattctttcacacggggcgtgtactatcccgacaaggtgtttagaagctccgtgctgcactccacacaggatctgtttctgcctttcttttctaacgtgacctggttccacgccatccacgtgtccggcaccaatggcacaaagcggttcgacaatcccgtgctgccttttaacgatggcgtgtacttcgccagcaccgagaagtccaacatcatcagaggctggatctttggcaccacactggactctaagacacagagcctgctgatcgtgaacaatgccaccaacgtggtgatcaaggtgtgcgagttccagttttgtaatgatccattcctgggcgtgtactatcacaagaacaataagtcctggatggagtctgagtttcgcgtgtattctagcgccaacaattgcacatttgagtacgtgagccagcccttcctgatggacctggagggcaagcagggcaatttcaagaacctgagggagttcgtgtttaagaatatcgatggctacttcaagatctacagcaagcacaccccaatcaacctggtgcgcgacctgccacagggattctccgccctggagccactggtggatctgcccatcggcatcaacatcacccggtttcagacactgctggccctgcacagatcctacctgacaccaggcgactcctctagcggatggaccgcaggagctgccgcctactatgtgggctatctgcagccccggaccttcctgctgaagtacaacgagaatggcaccatcacagacgcagtggattgcgccctggaccccctgtctgagacaaagtgtacactgaagagctttaccgtggagaagggcatctatcagacaagcaatttcagggtgcagcctaccgagtccatcgtgcgctttcccaatatcacaaacctgtgcccttttggcgaggtgttcaacgccaccagattcgccagcgtgtacgcctggaatcggaagagaatctccaactgcgtggccgactattctgtgctgtacaactccgcctctttcagcacctttaagtgctatggcgtgtctcccacaaagctgaatgatctgtgctttaccaacgtgtacgccgatagcttcgtgatcaggggagacgaagtgagacagatcgcaccaggacagacaggaaagatcgcagactacaattataagctgcctgacgatttcaccggctgcgtgatcgcctggaactccaacaatctggattctaaagtgggcggcaactacaattatctgtacaggctgtttcgcaagtccaatctgaagccattcgagcgggacatctccacagagatctaccaggccggctctaccccctgcaatggcgtggagggctttaactgttatttccctctgcagtcttacggcttccagccaacaaacggcgtgggctatcagccctacagagtggtggtgctgtcctttgagctgctgcacgcaccagcaacagtgtgcggcccaaagaagtctaccaatctggtgaagaacaagtgcgtgaacttcaacttcaacggactgaccggcacaggcgtgctgaccgagagcaataagaagttcctgccttttcagcagttcggcagggacatcgcagataccacagacgccgtgcgcgaccctcagaccctggagatcctggacatcacaccatgcagcttcggcggcgtgtccgtgatcacaccaggcaccaatacatccaaccaggtggccgtgctgtatcaggacgtgaattgtaccgaggtgcccgtggcaatccacgcagatcagctgacccctacatggcgggtgtactctaccggcagcaacgtgttccagacaagagccggatgcctgatcggagcagagcacgtgaacaatagctatgagtgcgacatccctatcggcgccggcatctgtgccagctaccagacccagacaaactccccatctggagcaggctccgtggccagccagtccatcatcgcctataccatgagcctgggcgccgagaacagcgtggcctactccaacaattctatcgccatccctaccaacttcacaatcagcgtgaccacagagatcctgccagtgtctatgaccaagacaagcgtggactgcacaatgtatatctgtggcgatagcaccgagtgctccaacctgctgctgcagtacggctccttttgtacccagctgaatagagccctgacaggcatcgccgtggagcaggataagaacacacaggaggtgttcgcccaggtgaagcagatctacaagaccccacccatcaaggactttggcggcttcaacttcagccagatcctgcctgatccaagcaagccctccaagaggtcttttatcgaggacctgctgttcaacaaggtgaccctggccgatgccggcttcatcaagcagtatggagattgcctgggagacatcgcagcccgcgacctgatctgtgcccagaagtttaatggcctgaccgtgctgcctccactgctgacagatgagatgatcgcccagtacacatctgccctgctggccggcaccatcacaagcggatggaccttcggcgcaggagccgccctgcagatcccttttgccatgcagatggcctataggttcaacggcatcggcgtgacccagaatgtgctgtacgagaaccagaagctgatcgccaatcagtttaacactgccatcggcaagatccaggactctctgtcctctacagccagcgccctgggcaagctgcaggatgtggtgaatcagaacgcccaggccctgaataccctggtgaagcagctgagctccaacttcggcgccatctctagcgtgctgaatgacatcctgagccggctggacccccctgaggcagaggtgcagatcgacaggctgatcacaggccgcctgcagagcctgcagacctacgtgacacagcagctgatcagggcagcagagatcagagcctccgccaatctggccgccaccaagatgagcgagtgcgtgctgggacagtccaagagggtggacttttgtggcaagggctatcacctgatgtctttcccacagagcgcccctcacggcgtggtgtttctgcacgtgacctacgtgccagcccaggagaagaacttcaccacagcaccagccatctgccacgatggaaaggcacactttcctagggagggcgtgttcgtgtctaacggcacccactggtttgtgacacagcgcaatttctacgagccacagatcatcaccacagacaatacattcgtgagcggcaactgtgatgtggtgatcggcatcgtgaacaataccgtgtatgatccactgcagcccgagctggactcctttaaggaggagctggataagtacttcaagaatcacacctctcccgacgtggatctgggcgacatctccggcatcaatgcctctgtggtgaacatccagaaggagatcgaccggctgaacgaggtggccaagaatctgaacgagagcctgatcgatctgcaggagctgggcaagtatgagcagtacatcaagggctctggcagagagaacctgtatttccagggaggaggaggcagcggatacatccctgaggcaccaagggacggacaggcctacgtgcgcaaggatggcgagtgggtgctgctgtccacctttctgggccatcatcaccaccaccaccaccactga

SEQ ID NO: 1680 - DNA, 3846 bp, Artificial Sequence
  Description of Artificial Sequence: Synthetic polynucleotide
atgggcatcctgccaagcccaggaatgcccgccctgctgtctctggtgagcctgctgtccgtgctgctgatgggatgcgtggcagagacaggcacacagtgcgtgaacctgaccacaaggacccagctgccccctgcctataccaattctttcacacggggcgtgtactatcccgacaaggtgtttagaagctccgtgctgcactccacacaggatctgtttctgcctttcttttctaacgtgacctggttccacgccatccacgtgtccggcaccaatggcacaaagcggttcgacaatcccgtgctgccttttaacgatggcgtgtacttcgccagcaccgagaagtccaacatcatcagaggctggatctttggcaccacactggactctaagacacagagcctgctgatcgtgaacaatgccaccaacgtggtgatcaaggtgtgcgagttccagttttgtaatgatccattcctgggcgtgtactatcacaagaacaataagtcctggatggagtctgagtttcgcgtgtattctagcgccaacaattgcacatttgagtacgtgagccagcccttcctgatggacctggagggcaagcagggcaatttcaagaacctgagggagttcgtgtttaagaatatcgatggctacttcaagatctacagcaagcacaccccaatcaacctggtgcgcgacctgccacagggattctccgccctggagccactggtggatctgcccatcggcatcaacatcacccggtttcagacactgctggccctgcacagatcctacctgacaccaggcgactcctctagcggatggaccgcaggagctgccgcctactatgtgggctatctgcagccccggaccttcctgctgaagtacaacgagaatggcaccatcacagacgcagtggattgcgccctggaccccctgtctgagacaaagtgtacactgaagagctttaccgtggagaagggcatctatcagacaagcaatttcagggtgcagcctaccgagtccatcgtgcgctttcccaatatcacaaacctgtgcccttttggcgaggtgttcaacgccaccagattcgccagcgtgtacgcctggaatcggaagagaatctccaactgcgtggccgactattctgtgctgtacaactccgcctctttcagcacctttaagtgctatggcgtgtctcccacaaagctgaatgatctgtgctttaccaacgtgtacgccgatagcttcgtgatcaggggagacgaagtgagacagatcgcaccaggacagacaggaaagatcgcagactacaattataagctgcctgacgatttcaccggctgcgtgatcgcctggaactccaacaatctggattctaaagtgggcggcaactacaattatctgtacaggctgtttcgcaagtccaatctgaagccattcgagcgggacatctccacagagatctaccaggccggctctaccccctgcaatggcgtggagggctttaactgttatttccctctgcagtcttacggcttccagccaacaaacggcgtgggctatcagccctacagagtggtggtgctgtcctttgagctgctgcacgcaccagcaacagtgtgcggcccaaagaagtctaccaatctggtgaagaacaagtgcgtgaacttcaacttcaacggactgaccggcacaggcgtgctgaccgagagcaataagaagttcctgccttttcagcagttcggcagggacatcgcagataccacagacgccgtgcgcgaccctcagaccctggagatcctggacatcacaccatgcagcttcggcggcgtgtccgtgatcacaccaggcaccaatacatccaaccaggtggccgtgctgtatcaggacgtgaattgtaccgaggtgcccgtggcaatccacgcagatcagctgacccctacatggcgggtgtactctaccggcagcaacgtgttccagacaagagccggatgcctgatcggagcagagcacgtgaacaatagctatgagtgcgacatccctatcggcgccggcatctgtgccagctaccagacccagacaaactccccatctggagcaggctccgtggccagccagtccatcatcgcctataccatgagcctgggcgccgagaacagcgtggcctactccaacaattctatcgccatccctaccaacttcacaatcagcgtgaccacagagatcctgccagtgtctatgaccaagacaagcgtggactgcacaatgtatatctgtggcgatagcaccgagtgctccaacctgctgctgcagtacggctccttttgtacccagctgaatagagccctgacaggcatcgccgtggagcaggataagaacacacaggaggtgttcgcccaggtgaagcagatctacaagaccccacccatcaaggactttggcggcttcaacttcagccagatcctgcctgatccaagcaagccctccaagaggtcttttatcgaggacctgctgttcaacaaggtgaccctggccgatgccggcttcatcaagcagtatggagattgcctgggagacatcgcagcccgcgacctgatctgtgcccagaagtttaatggcctgaccgtgctgcctccactgctgacagatgagatgatcgcccagtacacatctgccctgctggccggcaccatcacagcaggatggaccttcggcgcaggagccgccctgcagatcccttttgccatgcagatggcctataggttcaacggcatcggcgtgacccagaatgtgctgtacgagaaccagaagctgatcgccaatcagtttaacaatgccatcggcaatatccaggactctctgtccacgacagccagcgccctgggcaagctgcaggatgtggtgaatcagaacgcccaggccctgaataccctggtgaagcagctgagctccaacttcggcgccatctctagcgtgctgaatgacatcctgagccggctggacccccctgaggcagaggtgcagatcgacaggctgatcacaggccgcctgcagagcctgcagacctacgtgacacagcagctgatcagggcagcagagatcagagcctccgccaatctggccgccaccaagatgagcgagtgcgtgctgggacagtccaagagggtggacttttgtggcaagggctatcacctgatgtctttcccacagagcgcccctcacggcgtggtgtttctgcacgtgacctacgtgccagcccaggagaagaacttcaccacagcaccagccatctgccacgatggaaaggcacactttcctagggagggcgtgttcgtgtctaacggcacccactggtttgtgacacagcgcaatttctacgagccacagatcatcaccacagacaatacattcgtgagcggcaactgtgatgtggtgatcggcatcgtgaacaataccgtgtatgatccactgcagcccgagctggactcctttaaggaggagctggataagtacttcaagaatcacacctctcccgacgtggatctgggcgacatctccggcatcaatgcctctgtggtgaacatccagaaggagatcgaccggctgaacgaggtggccaagaatctgaacgagagcctgatcgatctgcaggagctgggcaagtatgagcagtacatcaagggctctggcagagagaacctgtatttccagggaggaggaggcagcggatacatccctgaggcaccaagggacggacaggcctacgtgcgcaaggatggcgagtgggtgctgctgtccacctttctgggccatcatcaccaccaccaccaccactga

SEQ ID NO: 1681 - DNA, 3846 bp, Artificial Sequence
  Description of Artificial Sequence: Synthetic polynucleotide
atgggcatcctgccaagcccaggaatgcccgccctgctgtctctggtgagcctgctgtccgtgctgctgatgggatgcgtggcagagacaggcacacagtgcgtgaacctgaccacaaggacccagctgccccctgcctataccaattctttcacacggggcgtgtactatcccgacaagatttttagaagctccgtgctgcaccttacacaggatctgtttctgcctttcttttctaacgtgacctggttccacgccatccacgtgtccggcaccaatggcacaaagcggttcgacaatcccgtgctgccttttaacgatggcgtgtacttcgccgctaccgagaagtccaacatcatcagaggctggatctttggcaccacactggactctaagacacagagcctgctgatcgtgaacaatgccaccaacgtggtgatcaaggtgtgcgagttccagttttgtaatgatccattcctgggcgtgtactatcacaagaacaataagtcctggatggagtctgagtttcgcgtgtattctagcgccaacaattgcacatttgagtacgtgagccagcccttcctgatggacctggagggcaagcagggcaatttcaagaacctgagggagttcgtgtttaagaatatcgatggctacttcaagatctacagcaagcacaccccaatcaacctggtgcgcgacctgccacagggattctccgccctggagccactggtgaaactgcccatcggcatcaacatcacccggtttcagacactgctggccctgcacagatcctacctgacaccaggcgactcctctagcggatggaccgcaggagctgccgcctactatgtgggctatctgcagccccggaccttcctgctgaagtacaacgagaatggcaccatcacagacgcagtggattgcgccctggaccccctgtctgagacaaagtgtacactgaagagctttaccgtggagaagggcatctatcagacaagcaatttcagggtgcagcctaccgagtccatcgtgcgctttcccaatatcacaaacctgtgcccttttggcgaggtgttcaacgccaccagattcgccagcgtgtacgcctggaatcggaagagaatctccaactgcgtggccgactattctgtgctgtacaactccgcctctttcagcacctttaagtgctatggcgtgtctcccacaaagctgaatgatctgtgctttaccaacgtgtacgccgatagcttcgtgatcaggggagacgaagtgagacagatcgcaccaggacagacaggaaagatcgcagactacaattataagctgcctgacgatttcaccggctgcgtgatcgcctggaactccaacaatctggattctaaagtgggcggcaactacaattatctgtacaggctgtttcgcaagtccaatctgaagccattcgagcgggacatctccacagagatctaccaggccggctctaccccctgcaatggcgtggagggctttaactgttatttccctctgcagtcttacggcttccagccaacaaacggcgtgggctatcagccctacagagtggtggtgctgtcctttgagctgctgcacgcaccagcaacagtgtgcggcccaaagaagtctaccaatctggtgaagaacaagtgcgtgaacttcaacttcaacggactgaccggcacaggcgtgctgaccgagagcaataagaagttcctgccttttcagcagttcggcagggacatcagtgataccacagacgccgtgcgcgaccctcagaccctggagatcctggacatcacaccatgcagcttcggcggcgtgtccgtgatcacaccaggcaccaatacatccaaccaggtggccgtgctgtatcaggacgtgaattgtaccgatgtgcccgtggcaatccacgcagatcagctgacccctacatggcgggtgtactctaccggcagcaacgtgttccagacacaagccggatgcctgatcggagcagagcacgtgaacaatagctatgagtgcgacatccctatcggcgccggcatctgtgccagctaccagacccagacaaactccccatctggagcaggctccgtggccagccagtccatcatcgcctataccatgagcctgggcgccgagaacagcgtggcctactccaacaattctatcgccatccctaccaacttcacaatcagcgtgaccacagagatcctgccagtgtctatgaccaagacaagcgtggactgcacaatgtatatctgtggcgatagcaccgagtgctccaacctgctgctgcagtacggctccttttgtacccagctgaatagagccctgacaggcatcgccgtggagcaggataagaacacacaggaggtgttcgcccaggtgaagcagatctacaagaccccacccatcaaggactttggcggcttcaacttcagccagatcctgcctgatccaagcaagccctccaagaggtcttttatcgaggacctgctgttcaacaaggtgaccctggccgatgccggcttcatcaagcagtatggagattgcctgggagacatcgcagcccgcgacctgatctgtgcccagaagtttaatggcctgaccgtgctgcctccactgctgacagatgagatgatcgccgcttacacagcggccctgctggccggcaccgcgacagctggatggaccttcggcgcaggagccgccctgcagatcccttttgccatgcagatggcctataggttcaacggcatcggcgtgacccagaatgtgctgtacgagaaccagaagctgatcgccaatcagtttaacagcgccatcggcaagatccaggactctctgtcctctacagccagcgccctgggcaagctgcaggatgtggtgaatcagaacgcccaggccctgaataccctggtgaagcagctgagctccaacttcggcgccatctctagcgtgctgaatgacatcctgagccggctggacccccctgaggcagaggtgcagatcgacaggctgatcacaggccgcctgcagagcctgcagacctacgtgacacagcagctgatcagggcagcagagatcagagcctccgccaatctggccgccaccaagatgagcgagtgcgtgctgggacagtccaagagggtggacttttgtggcaagggctatcacctgatgtctttcccacagagcgcccctcacggcgtggtgtttctgcacgtgacctacgtgccagcccaggagaagaacttcaccacagcaccagccatctgccacgatggaaaggcacactttcctagggagggcgtgttcgtgtctaacggcacccactggtttgtgacacagcgcaatttctacgagccacagatcatcaccacagacaatacattcgtgagcggcaactgtgatgtggtgatcggcatcgtgaacaataccgtgtatgatccactgcagcccgagctggactcctttaaggaggagctggataagtacttcaagaatcacacctctcccgacgtggatctgggcgacatctccggcatcaatgcctctgtggtgaacatccagaaggagatcgaccggctgaacgaggtggccaagaatctgaacgagagcctgatcgatctgcaggagctgggcaagtatgagcagtacatcaagggctctggcagagagaacctgtatttccagggaggaggaggcagcggatacatccctgaggcaccaagggacggacaggcctacgtgcgcaaggatggcgagtgggtgctgctgtccacctttctgggccatcatcaccaccaccaccaccactga

SEQ ID NO: 1682 - DNA, 3846 bp, Artificial Sequence
  Description of Artificial Sequence: Synthetic polynucleotide
atgggcatcctgccaagcccaggaatgcccgccctgctgtctctggtgagcctgctgtccgtgctgctgatgggatgcgtggcagagacaggcacacagtgcgtgaacctgaccacaaggacccagctgccccctgcctataccaattctttcacacggggcgtgtactatcccgacaaggtgtttagaagctccgtgctgcactccacacaggatctgtttctgcctttcttttctaacgtgacctggttccacgccatccacgtgtccggcaccaatggcacaaagcggttcgacaatcccgtgctgccttttaacgatggcgtgtacttcgccagcaccgagaagtccaacatcatcagaggctggatctttggcaccacactggactctaagacacagagcctgctgatcgtgaacaatgccaccaacgtggtgatcaaggtgtgcgagttccagttttgtaatgatccattcctgggcgtgtactatcacaagaacaataagtcctggatggagtctgagtttcgcgtgtattctagcgccaacaattgcacatttgagtacgtgagccagcccttcctgatggacctggagggcaagcagggcaatttcaagaacctgagggagttcgtgtttaagaatatcgatggctacttcaagatctacagcaagcacaccccaatcaacctggtgcgcgacctgccacagggattctccgccctggagccactggtggatctgcccatcggcatcaacatcacccggtttcagacactgctggccctgcacagatcctacctgacaccaggcgactcctctagcggatggaccgcaggagctgccgcctactatgtgggctatctgcagccccggaccttcctgctgaagtacaacgagaatggcaccatcacagacgcagtggattgcgccctggaccccctgtctgagacaaagtgtacactgaagagctttaccgtggagaagggcatctatcagacaagcaatttcagggtgcagcctaccgagtccatcgtgcgctttcccaatatcacaaacctgtgcccttttggcgaggtgttcaacgccaccagattcgccagcgtgtacgcctggaatcggaagagaatctccaactgcgtggccgactattctgtgctgtacaactccgcctctttcagcacctttaagtgctatggcgtgtctcccacaaagctgaatgatctgtgctttaccaacgtgtacgccgatagcttcgtgatcaggggagacgaagtgagacagatcgcaccaggacagacaggaaagatcgcagactacaattataagctgcctgacgatttcaccggctgcgtgatcgcctggaactccaacaatctggattctaaagtgggcggcaactacaattatctgtacaggctgtttcgcaagtccaatctgaagccattcgagcgggacatctccacagagatctaccaggccggctctaccccctgcaatggcgtggagggctttaactgttatttccctctgcagtcttacggcttccagccaacaaacggcgtgggctatcagccctacagagtggtggtgctgtcctttgagctgctgcacgcaccagcaacagtgtgcggcccaaagaagtctaccaatctggtgaagaacaagtgcgtgaacttcaacttcaacggactgaccggcacaggcgtgctgaccgagagcaataagaagttcctgccttttcagcagttcggcagggacatcgcagataccacagacgccgtgcgcgaccctcagaccctggagatcctggacatcgtaccatgcagcttcggcggcgtgtccgtgatcacaccaggcaccaatacatccaaccaggtggccgtgctgtatcaggacgtgaattgtaccgaggtgcccgtggcaatccacgcagatcagctgacccctacatggcgggtgtactctaccggcagcaacgtgttccagacaagagccggatgcctgatcggagcagagcacgtgaacaatagctatgagtgcgacatccctatcggcgccggcatctgtgccagctaccagacccagacaaactccccatctggagcaggctccgtggccagccagtccatcatcgcctataccatgagcctgggcgccgagaacagcgtggcctactccaacaattctatcgccatccctaccaacttcacaatcagcgtgaccacagagatcctgccagtgtctatgaccaagacaagcgtggactgcacaatgtatatctgtggcgatagcaccgagtgctccaacctgctgctgcagtacggctccttttgtacccagctgaatagagccctgacaggcatcgccgtggagcaggataagaacacacaggaggtgttcgcccaggtgaagcagatctacaagaccccacccatcaaggactttggcggcttcaacttcagccagatcctgcctgatccaagcaagccctccaagaggtcttttatcgaggacctgctgttcaacaaggtgaccctggccgatgccggcttcatcaagcagtatggagattgcctgggagacatcgcagcccgcgacctgatctgtgcccagaagtttaatggcctgaccgtgctgcctccactgctgacagatgagatgatcgcccagtacacatctgccctgctggccggcaccatcacaagcggatggaccttcggcgcaggagccgccctgcagatcccttttgccatgcagatggcctataggttcaacggcatcggcgtgacccagaatgtgctgtacgagaaccagaagctgatcgccaatcagtttaacagcgccatcggcaagatccaggactctctgtcctctacagccagcgccctgggcaagctgcaggatgtggtgaatcagaacgcccaggccctgaataccctggtgaagcagctgagctccaacttcggcgccatctctagcgtgctgaatgacatcctgagccggctggacccccctgaggcagaggtgcagatcgacaggctgatcacaggccgcctgcagagcctgcagacctacgtgacacagcagctgatcagggcagcagagatcagagcctccgccaatctggccgccaccaagatgagcgagtgcgtgctgggacagtccaagagggtggacttttgtggcaagggctatcacctgatgtctttcccacagagcgcccctcacggcgtggtgtttctgcacgtgacctacgtgccagcccaggagaagaacttcaccacagcaccagccatctgccacgatggaaaggcacactttcctagggagggcgtgttcgtgtctaacggcacccactggtttgtgacacagcgcaatttctacgagccacagatcatcaccacagacaatacattcgtgagcggcaactgtgatgtggtgatcggcatcgtgaacaataccgtgtatgatccactgcagcccgagctggactcctttaaggaggagctggataagtacttcaagaatcacacctctcccgacgtggatctgggcgacatctccggcatcaatgcctctgtggtgaacatccagaaggagatcgaccggctgaacgaggtggccaagaatctgaacgagagcctgatcgatctgcaggagctgggcaagtatgagcagtacatcaagggctctggcagagagaacctgtatttccagggaggaggaggcagcggatacatccctgaggcaccaagggacggacaggcctacgtgcgcaaggatggcgagtgggtgctgctgtccacctttctgggccatcatcaccaccaccaccaccactga

SEQ ID NO: 1683 - DNA, 3846 bp, Artificial Sequence
  Description of Artificial Sequence: Synthetic polynucleotide
atgggcatcctgccaagcccaggaatgcccgccctgctgtctctggtgagcctgctgtccgtgctgctgatgggatgcgtggcagagacaggcacacagtgcgtgaacctgaccacaaggacccagctgccccctgcctataccaattctttcacacggggcgtgtactatcccgacaaggtgtttagaagctccgtgctgcactccacacaggatctgtttctgcctttcttttctaacgtgacctggttccacgccatccacgtgtccggcaccaatggcacaaagcggttcgacaatcccgtgctgccttttaacgatggcgtgtacttcgccagcaccgagaagtccaacatcatcagaggctggatctttggcaccacactggactctaagacacagagcctgctgatcgtgaacaatgccaccaacgtggtgatcaaggtgtgcgagttccagttttgtaatgatccattcctgggcgtgtactatcacaagaacaataagtcctggatggagtctgagtttcgcgtgtattctagcgccaacaattgcacatttgagtacgtgagccagcccttcctgatggacctggagggcaagcagggcaatttcaagaacctgagggagttcgtgtttaagaatatcgatggctacttcaagatctacagcaagcacaccccaatcaacctggtgcgcgacctgccacagggattctccgccctggagccactggtggatctgcccatcggcatcaacatcacccggtttcagacactgctggccctgcacagatcctacctgacaccaggcgactcctctagcggatggaccgcaggagctgccgcctactatgtgggctatctgcagccccggaccttcctgctgaagtacaacgagaatggcaccatcacagacgcagtggattgcgccctggaccccctgtctgagacaaagtgtacactgaagagctttaccgtggagaagggcatctatcagacaagcaatttcagggtgcagcctaccgagtccatcgtgcgctttcccaatatcacaaacctgtgcccttttggcgaggtgttcaacgccaccagattcgccagcgtgtacgcctggaatcggaagagaatctccaactgcgtggccgactattctgtgctgtacaactccgcctctttcagcacctttaagtgctatggcgtgtctcccacaaagctgaatgatctgtgctttaccaacgtgtacgccgatagcttcgtgatcaggggagacgaagtgagacagatcgcaccaggacagacaggaaagatcgcagactacaattataagctgcctgacgatttcaccggctgcgtgatcgcctggaactccaacaatctggattctaaagtgggcggcaactacaattatctgtacaggctgtttcgcaagtccaatctgaagccattcgagcgggacatctccacagagatctaccaggccggctctaccccctgcaatggcgtggagggctttaactgttatttccctctgcagtcttacggcttccagccaacaaacggcgtgggctatcagccctacagagtggtggtgctgtcctttgagctgctgcacgcaccagcaacagtgtgcggcccaaagaagtctaccaatctggtgaagaacaagtgcgtgaacttcaacttcaacggactgaccggcacaggcgtgctgaccgagagcaataagaagttcctgccttttcagcagttcggcagggacatcgcagataccacagacgccgtgcgcgaccctcagaccctggagatcctggacatcacaccatgcagcttcggcggcgtgtccgtgatcacaccaggcaccaatacatccaaccaggtggccgtgctgtatcaggacgtgaattgtaccgaggtgcccgtggcaatccacgcagatcagctgacccctacatggcgggtgtactctaccggcagcaacgtgttccagacaagagccggatgcctgatcggagcagagcacgtgaacaatagctatgagtgcgacatccctatcggcgccggcatctgtgccagctaccagacccagacaaactccccatctggagcaggctccgtggccagccagtccatcatcgcctataccatgagcctgggcgccgagaacagcgtggcctactccaacaattctatcgccatccctaccaacttcacaatcagcgtgaccacagagatcctgccagtgtctatgaccaagacaagcgtggactgcacaatgtatatctgtggcgatagcaccgagtgctccaacctgctgctgcagtacggctccttttgtacccagctgaatagagccctgacaggcatcgccgaagagcaggataagaacacacaggaggtgttcgcccaggtgaagcagatctacaagaccccacccatcaaggactttggcggcttcaacttcagccagatcctgcctgatccaagcaagccctccaagaggtcttttatcgaggacctgctgttcaacaaggtgaccctggccgatgccggcttcatcaagcagtatggagattgcctgggagacatcgcagcccgcgacctgatctgtgcccagaagtttaatggcctgaccgtgctgcctccactgctgacagatgagatgatcgcccagtacacatctgccctgctggccggcaccatcacaagcggatggaccttcggcgcaggagccgccctgcagatcccttttgccatgcagatggcctataggttcaacggcatcggcgtgacccagaatgtgctgtacgagaaccagaagctgatcgccaatcagtttaacagcgccatcggcaagatccaggactctctgtcctctacagccagcgccctgggcaagctgcaggatgtggtgaatcagaacgcccaggccctgaataccctggtgaagcagctgagctccaacttcggcgccatctctagcgtgctgaatgacatcctgagccggctggacccccctgaggcagaggtgcagatcgacaggctgatcacaggccgcctgcagagcctgcagacctacgtgacacagcagctgatcagggcagcagagatcagagcctccgccaatctggccgccaccaagatgagcgagtgcgtgctgggacagtccaagagggtggacttttgtggcaagggctatcacctgatgtctttcccacagagcgcccctcacggcgtggtgtttctgcacgtgacctacgtgccagcccaggagaagaacttcaccacagcaccagccatctgccacgatggaaaggcacactttcctagggagggcgtgttcgtgtctaacggcacccactggtttgtgacacagcgcaatttctacgagccacagatcatcaccacagacaatacattcgtgagcggcaactgtgatgtggtgatcggcatcgtgaacaataccgtgtatgatccactgcagcccgagctggactcctttaaggaggagctggataagtacttcaagaatcacacctctcccgacgtggatctgggcgacatctccggcatcaatgcctctgtggtgaacatccagaaggagatcgaccggctgaacgaggtggccaagaatctgaacgagagcctgatcgatctgcaggagctgggcaagtatgagcagtacatcaagggctctggcagagagaacctgtatttccagggaggaggaggcagcggatacatccctgaggcaccaagggacggacaggcctacgtgcgcaaggatggcgagtgggtgctgctgtccacctttctgggccatcatcaccaccaccaccaccactga

SEQ ID NO: 1684 - DNA, 3846 bp, Artificial Sequence
  Description of Artificial Sequence: Synthetic polynucleotide
atgggcatcctgccaagcccaggaatgcccgccctgctgtctctggtgagcctgctgtccgtgctgctgatgggatgcgtggcagagacaggcacacagtgcgtgaacctgaccacaaggacccagctgccccctgcctataccaattctttcacacggggcgtgtactatcccgacaaggtgtttagaagctccgtgctgcactccacacaggatctgtttctgcctttcttttctaacgtgacctggttccacgccatccacgtgtccggcaccaatggcacaaagcggttcgacaatcccgtgctgccttttaacgatggcgtgtacttcgccagcaccgagaagtccaacatcatcagaggctggatctttggcaccacactggactctaagacacagagcctgctgatcgtgaacaatgccaccaacgtggtgatcaaggtgtgcgagttccagttttgtaatgatccattcctgggcgtgtactatcacaagaacaataagtcctggatggagtctgagtttcgcgtgtattctagcgccaacaattgcacatttgagtacactagccagcccttcctgatggacctggagggcaagcagggcaatttcaagaacctgagggagttcgtgtttaagaatatcgatggctacttcaagatctacagcaagcacaccccaatcaacctggtgcgcgacctgccacagggattctccgccctggagccactggtggatctgcccatcggcatcaacatcacccggtttcagacactgctggccctgcacagatcctacctgacaccaggcgactcctctagcggatggaccgcaggagctgccgcctactatgtgggctatctgcagccccggaccttcctgctgaagtacaacgagaatggcaccatcacagacgcagtggattgcgccctggaccccctgtctgagacaaagtgtacactgaagagctttaccgtggagaagggcatctatcagacaagcaatttcagggtgcagcctaccgagtccatcgtgcgctttcccaatatcacaaacctgtgcccttttggcgaggtgttcaacgccaccagattcgccagcgtgtacgcctggaatcggaagagaatctccaactgcgtggccgactattctgtgctgtacaactccgcctctttcagcacctttaagtgctatggcgtgtctcccacaaagctgaatgatctgtgctttaccaacgtgtacgccgatagcttcgtgatcaggggagacgaagtgagacagatcgcaccaggacagacaggaaagatcgcagactacaattataagctgcctgacgatttcaccggctgcgtgatcgcctggaactccaacaatctggattctaaagtgggcggcaactacaattatctgtacaggctgtttcgcaagtccaatctgaagccattcgagcgggacatctccacagagatctaccaggccggctctaccccctgcaatggcgtggagggctttaactgttatttccctctgcagtcttacggcttccagccaacaaacggcgtgggctatcagccctacagagtggtggtgctgtcctttgagctgctgcacgcaccagcaacagtgtgcggcccaaagaagtctaccaatctggtgaagaacaagtgcgtgaacttcaacttcaacggactgaccggcacaggcgtgctgaccgagagcaataagaagttcctgccttttcagcagttcggcagggacatcgcagataccacagacgccgtgcgcgaccctcagaccctggagatcctggacatcacaccatgcagcttcggcggcgtgtccgtgatcacaccaggcaccaatacatccaaccaggtggccgtgctgtatcaggacgtgaattgtaccgaggtgcccgtggcaatccacgcagatcagctgacccctacatggcgggtgtactctaccggcagcaacgtgttccagacaagagccggatgcctgatcggagcagagcacgtgaacaatagctatgagtgcgacatccctatcggcgccggcatctgtgccagctaccagacccagacaaactccccatctggagcaggctccgtggccagccagtccatcatcgcctataccatgagcctgggcgccgagaacagcgtggcctactccaacaattctatcgccatccctaccaacttcacaatcagcgtgaccacagagatcctgccagtgtctatgaccaagacaagcgtggactgcacaatgtatatctgtggcgatagcaccgagtgctccaacctgctgctgcagtacggctccttttgtacccagctgaatagagccctgacaggcatcgccgtggagcaggataagaacacacaggaggtgttcgcccaggtgaagcagatctacaagaccccacccatcaaggactttggcggcttcaacttcagccagatcctgcctgatccaagcaagccctccaagaggtcttttatcgaggacctgctgttcaacaaggtgaccctggccgatgccggcttcatcaagcagtatggagattgcctgggagacatcgcagcccgcgacctgatctgtgcccagaagtttaatggcctgaccgtgctgcctccactgctgacagatgagatgatcgcccagtacacatctgccctgctggccggcaccatcacaagcggatggaccttcggcgcaggagccgccctgcagatcccttttgccatgcagatggcctataggttcaacggcatcggcgtgacccagaatgtgctgtacgagaaccagaagctgatcgccaatcagtttaacagcgccatcggcaagatccaggactctctgtcctctacagccagcgccctgggcaagctgcaggatgtggtgaatcagaacgcccaggccctgaataccctggtgaagcagctgagctccaacttcggcgccatctctagcgtgctgaatgacatcctgagccggctggacccccctgaggcagaggtgcagatcgacaggctgatcacaggccgcctgcagagcctgcagacctacgtgacacagcagctgatcagggcagcagagatcagagcctccgccaatctggccgccaccaagatgagcgagtgcgtgctgggacagtccaagagggtggacttttgtggcaagggctatcacctgatgtctttcccacagagcgcccctcacggcgtggtgtttctgcacgtgacctacgtgccagcccaggagaagaacttcaccacagcaccagccatctgccacgatggaaaggcacactttcctagggagggcgtgttcgtgtctaacggcacccactggtttgtgacacagcgcaatttctacgagccacagatcatcaccacagacaatacattcgtgagcggcaactgtgatgtggtgatcggcatcgtgaacaataccgtgtatgatccactgcagcccgagctggactcctttaaggaggagctggataagtacttcaagaatcacacctctcccgacgtggatctgggcgacatctccggcatcaatgcctctgtggtgaacatccagaaggagatcgaccggctgaacgaggtggccaagaatctgaacgagagcctgatcgatctgcaggagctgggcaagtatgagcagtacatcaagggctctggcagagagaacctgtatttccagggaggaggaggcagcggatacatccctgaggcaccaagggacggacaggcctacgtgcgcaaggatggcgagtgggtgctgctgtccacctttctgggccatcatcaccaccaccaccaccactga

SEQ ID NO: 1685 - DNA, 3846 bp, Artificial Sequence
  Description of Artificial Sequence: Synthetic polynucleotide
atgggcatcctgccaagcccaggaatgcccgccctgctgtctctggtgagcctgctgtccgtgctgctgatgggatgcgtggcagagacaggcacacagtgcgtgaacctgaccacaaggacccagctgccccctgcctataccaattctttcacacggggcgtgtactatcccgacaagatttttagaagctccgtgctgcaccttacacaggatctgtttctgcctttcttttctaacgtgacctggttccacgccatccacgtgtccggcaccaatggcacaaagcggttcgacaatcccgtgctgccttttaacgatggcgtgtacttcgccgcaaccgagaagtccaacatcatcagaggctggatctttggcaccacactggactctaagacacagagcctgctgatcgtgaacaatgccaccaacgtggtgatcaaggtgtgcgagttccagttttgtaatgatccattcctgggcgtgtactatcacaagaacaataagtcctggatggagtctgagtttcgcgtgtattctagcgccaacaattgcacatttgagtacgtgagccagcccttcctgatggacctggagggcaagcagggcaatttcaagaacctgagggagttcgtgtttaagaatatcgatggctacttcaagatctacagcaagcacaccccaatcaacctggtgcgcgacctgccacagggattctccgccctggagccactggtgaaactgcccatcggcatcaacatcacccggtttcagacactgctggccctgcacagatcctacctgacaccaggcgactcctctagcggatggaccgcaggagctgccgcctactatgtgggctatctgcagccccggaccttcctgctgaagtacaacgagaatggcaccatcacagacgcagtggattgcgccctggaccccctgtctgagacaaagtgtacactgaagagctttaccgtggagaagggcatctatcagacaagcaatttcagggtgcagcctaccgagtccatcgtgcgctttcccaatatcacaaacctgtgcccttttggcgaggtgttcaacgccaccagattcgccagcgtgtacgcctggaatcggaagagaatctccaactgcgtggccgactattctgtgctgtacaactccgcctctttcagcacctttaagtgctatggcgtgtctcccacaaagctgaatgatctgtgctttaccaacgtgtacgccgatagcttcgtgatcaggggagacgaagtgagacagatcgcaccaggacagacaggaaagatcgcagactacaattataagctgcctgacgatttcaccggctgcgtgatcgcctggaactccaacaatctggattctaaagtgggcggcaactacaattatctgtacaggctgtttcgcaagtccaatctgaagccattcgagcgggacatctccacagagatctaccaggccggctctaccccctgcaatggcgtggagggctttaactgttatttccctctgcagtcttacggcttccagccaacaaacggcgtgggctatcagccctacagagtggtggtgctgtcctttgagctgctgcacgcaccagcaacagtgtgcggcccaaagaagtctaccaatctggtgaagaacaagtgcgtgaacttcaacttcaacggactgaccggcacaggcgtgctgaccgagagcaataagaagttcctgccttttcagcagttcggcagggacatctcggataccacagacgccgtgcgcgaccctcagaccctggagatcctggacatcacaccatgcagcttcggcggcgtgtccgtgatcacaccaggcaccaatacatccaaccaggtggccgtgctgtatcaggacgtgaattgtaccgatgtgcccgtggcaatccacgcagatcagctgacccctacatggcgggtgtactctaccggcagcaacgtgttccagacacaagccggatgcctgatcggagcagagcacgtgaacaatagctatgagtgcgacatccctatcggcgccggcatctgtgccagctaccagacccagacaaactccccatctggagcaggctccgtggccagccagtccatcatcgcctataccatgagcctgggcgccgagaacagcgtggcctactccaacaattctatcgccatccctaccaacttcacaatcagcgtgaccacagagatcctgccagtgtctatgaccaagacaagcgtggactgcacaatgtatatctgtggcgatagcaccgagtgctccaacctgctgctgcagtacggctccttttgtacccagctgaatagagccctgacaggcatcgccgtggagcaggataagaacacacaggaggtgttcgcccaggtgaagcagatctacaagaccccacccatcaaggactttggcggcttcaacttcagccagatcctgcctgatccaagcaagccctccaagaggtcttttatcgaggacctgctgttcaacaaggtgaccctggccgatgccggcttcatcaagcagtatggagattgcctgggagacatcgcagcccgcgacctgatctgtgcccagaagtttaatggcctgaccgtgctgcctccactgctgacagatgagatgatcgccgcgtacacagctgccctgctggccggcaccatcacagcgggatggaccttcggcgcaggagccgccctgcagatcccttttgccatgcagatggcctataggttcaacggcatcggcgtgacccagaatgtgctgtacgagaaccagaagctgatcgccaatcagtttaacagcgccatcggcaagatccaggactctctgtcctctacagccagcgccctgggcaagctgcaggatgtggtgaatcagaacgcccaggccctgaataccctggtgaagcagctgagctccaacttcggcgccatctctagcgtgctgaatgacatcctgagccggctggacccccctgaggcagaggtgcagatcgacaggctgatcacaggccgcctgcagagcctgcagacctacgtgacacagcagctgatcagggcagcagagatcagagcctccgccaatctggccgccaccaagatgagcgagtgcgtgctgggacagtccaagagggtggacttttgtggcaagggctatcacctgatgtctttcccacagagcgcccctcacggcgtggtgtttctgcacgtgacctacgtgccagcccaggagaagaacttcaccacagcaccagccatctgccacgatggaaaggcacactttcctagggagggcgtgttcgtgtctaacggcacccactggtttgtgacacagcgcaatttctacgagccacagatcatcaccacagacaatacattcgtgagcggcaactgtgatgtggtgatcggcatcgtgaacaataccgtgtatgatccactgcagcccgagctggactcctttaaggaggagctggataagtacttcaagaatcacacctctcccgacgtggatctgggcgacatctccggcatcaatgcctctgtggtgaacatccagaaggagatcgaccggctgaacgaggtggccaagaatctgaacgagagcctgatcgatctgcaggagctgggcaagtatgagcagtacatcaagggctctggcagagagaacctgtatttccagggaggaggaggcagcggatacatccctgaggcaccaagggacggacaggcctacgtgcgcaaggatggcgagtgggtgctgctgtccacctttctgggccatcatcaccaccaccaccaccactga

SEQ ID NO: 1686 - DNA, 3846 bp, Artificial Sequence
  Description of Artificial Sequence: Synthetic polynucleotide
atgggcatcctgccaagcccaggaatgcccgccctgctgtctctggtgagcctgctgtccgtgctgctgatgggatgcgtggcagagacaggcacacagtgcgtgaacctgaccacaaggacccagctgccccctgcctataccaattctttcacacggggcgtgtactatcccgacaaggtgtttagaagctccgtgctgcactccacacaggatctgtttctgcctttcttttctaacgtgacctggttccacgccatccacgtgtccggcaccaatggcacaaagcggttcgacaatcccgtgctgccttttaacgatggcgtgtacttcgccagcaccgagaagtccaacatcatcagaggctggatctttggcaccacactggactctaagacacagagcctgctgatcgtgaacaatgccaccaacgtggtgatcaaggtgtgcgagttccagttttgtaatgatccattcctgggcgtgtactatcacaagaacaataagtcctggatggagtctgagtttcgcgtgtattctagcgccaacaattgcacatttgagtacgtgagccagcccttcctgatggacctggagggcaagcagggcaatttcaagaacctgagggagttcgtgtttaagaatatcgatggctacttcaagatctacagcaagcacaccccaatcaacctggtgcgcgacctgccacagggattctccgccctggagccactggtggatctgcccatcggcatcaacatcacccggtttcagacactgctggccctgcacagatcctacctgacaccaggcgactcctctagcggatggaccgcaggagctgccgcctactatgtgggctatctgcagccccggaccttcctgctgaagtacaacgagaatggcaccatcacagacgcagtggattgcgccctggaccccctgtctgagacaaagtgtacactgaagagctttaccgtggagaagggcatctatcagacaagcaatttcagggtgcagcctaccgagtccatcgtgcgctttcccaatatcacaaacctgtgcccttttggcgaggtgttcaacgccaccagattcgccagcgtgtacgcctggaatcggaagagaatctccaactgcgtggccgactattctgtgctgtacaactccgcctctttcagcacctttaagtgctatggcgtgtctcccacaaagctgaatgatctgtgctttaccaacgtgtacgccgatagcttcgtgatcaggggagacgaagtgagacagatcgcaccaggacagacaggaaagatcgcagactacaattataagctgcctgacgatttcaccggctgcgtgatcgcctggaactccaacaatctggattctaaagtgggcggcaactacaattatctgtacaggctgtttcgcaagtccaatctgaagccattcgagcgggacatctccacagagatctaccaggccggctctaccccctgcaatggcgtggagggctttaactgttatttccctctgcagtcttacggcttccagccaacaaacggcgtgggctatcagccctacagagtggtggtgctgtcctttgagctgctgcacgcaccagcaacagtgtgcggcccaaagaagtctaccaatctggtgaagaacaagtgcgtgaacttcaacttcaacggactgaccggcacaggcgtgctgaccgagagcaataagaagttcctgccttttcagcagttcggcagggacatcgcagatgctacagacgccgtgcgcgaccctcagaccctggagatcctggacatcacaccatgcagcttcggcggcgtgtccgtgatcacaccaggcaccaatacatccaaccaggtggccgtgctgtatcaggacgtgaattgtaccgaggtgcccgtggcaatccacgcagatcagctgacccctacatggcgggtgtactctaccggcagcaacgtgttccagacaagagccggatgcctgatcggagcagagcacgtgaacaatagctatgagtgcgacatccctatcggcgccggcatctgtgccagctaccagacccagacaaactccccatctggagcaggctccgtggccagccagtccatcatcgcctataccatgagcctgggcgccgagaacagcgtggcctactccaacaattctatcgccatccctaccaacttcacaatcagcgtgaccacagagatcctgccagtgtctatgaccaagacaagcgtggactgcacaatgtatatctgtggcgatagcaccgagtgctccaacctgctgctgcagtacggctccttttgtacccagctgaatagagccctgacaggcatcgccgtggagcaggataagaacacacaggaggtgttcgcccaggtgaagcagatctacaagaccccacccatcaaggactttggcggcttcaacttcagccagatcctgcctgatccaagcaagccctccaagaggtcttttatcgaggacctgctgttcaacaaggtgaccctggccgatgccggcttcatcaagcagtatggagattgcctgggagacatcgcagcccgcgacctgatctgtgcccagaagtttaatggcctgaccgtgctgcctccactgctgacagatgagatgatcgcccagtacacatctgccctgctggccggcaccatcacaagcggatggaccttcggcgcaggagccgccctgcagatcccttttgccatgcagatggcctataggttcaacggcatcggcgtgacccagaatgtgctgtacgagaaccagaagctgatcgccaatcagtttaacagcgccatcggcaagatccaggactctctgtcctctacagccagcgccctgggcaagctgcaggatgtggtgaatcagaacgcccaggccctgaataccctggtgaagcagctgagctccaacttcggcgccatctctagcgtgctgaatgacatcctgagccggctggacccccctgaggcagaggtgcagatcgacaggctgatcacaggccgcctgcagagcctgcagacctacgtgacacagcagctgatcagggcagcagagatcagagcctccgccaatctggccgccaccaagatgagcgagtgcgtgctgggacagtccaagagggtggacttttgtggcaagggctatcacctgatgtctttcccacagagcgcccctcacggcgtggtgtttctgcacgtgacctacgtgccagcccaggagaagaacttcaccacagcaccagccatctgccacgatggaaaggcacactttcctagggagggcgtgttcgtgtctaacggcacccactggtttgtgacacagcgcaatttctacgagccacagatcatcaccacagacaatacattcgtgagcggcaactgtgatgtggtgatcggcatcgtgaacaataccgtgtatgatccactgcagcccgagctggactcctttaaggaggagctggataagtacttcaagaatcacacctctcccgacgtggatctgggcgacatctccggcatcaatgcctctgtggtgaacatccagaaggagatcgaccggctgaacgaggtggccaagaatctgaacgagagcctgatcgatctgcaggagctgggcaagtatgagcagtacatcaagggctctggcagagagaacctgtatttccagggaggaggaggcagcggatacatccctgaggcaccaagggacggacaggcctacgtgcgcaaggatggcgagtgggtgctgctgtccacctttctgggccatcatcaccaccaccaccaccactga

SEQ ID NO: 1687 - DNA, 3846 bp, Artificial Sequence
  Description of Artificial Sequence: Synthetic polynucleotide
atgggcatcctgccaagcccaggaatgcccgccctgctgtctctggtgagcctgctgtccgtgctgctgatgggatgcgtggcagagacaggcacacagtgcgtgaacctgaccacaaggacccagctgccccctgcctataccaattctttcacacggggcgtgtactatcccgacaaggtgtttagaagctccgtgctgcactccacacaggatctgtttctgcctttcttttctaacgtgacctggttccacgccatccacgtgtccggcaccaatggcacaaagcggttcgacaatcccgtgctgccttttaacgatggcgtgtacttcgccagcaccgagaagtccaacatcatcagaggctggatctttggcaccacactggactctaagacacagagcctgctgatcgtgaacaatgccaccaacgtggtgatcaaggtgtgcgagttccagttttgtaatgatccattcctgggcgtgtactatcacaagaacaataagtcctggatggagtctgagtttcgcgtgtattctagcgccaacaattgcacatttgagtacgtgagccagcccttcctgatggacctggagggcaagcagggcaatttcaagaacctgagggagttcgtgtttaagaatatcgatggctacttcaagatctacagcaagcacaccccaatcaacctggtgcgcgacctgccacagggattctccgccctggagccactggtggatctgcccatcggcatcaacatcacccggtttcagacactgctggccctgcacagatcctacctgacaccaggcgactcctctagcggatggaccgcaggagctgccgcctactatgtgggctatctgcagccccggaccttcctgctgaagtacaacgagaatggcaccatcacagacgcagtggattgcgccctggaccccctgtctgagacaaagtgtacactgaagagctttaccgtggagaagggcatctatcagacaagcaatttcagggtgcagcctaccgagtccatcgtgcgctttcccaatatcacaaacctgtgcccttttggcgaggtgttcaacgccaccagattcgccagcgtgtacgcctggaatcggaagagaatctccaactgcgtggccgactattctgtgctgtacaactccgcctctttcagcacctttaagtgctatggcgtgtctcccacaaagctgaatgatctgtgctttaccaacgtgtacgccgatagcttcgtgatcaggggagacgaagtgagacagatcgcaccaggacagacaggaaagatcgcagactacaattataagctgcctgacgatttcaccggctgcgtgatcgcctggaactccaacaatctggattctaaagtgggcggcaactacaattatctgtacaggctgtttcgcaagtccaatctgaagccattcgagcgggacatctccacagagatctaccaggccggctctaccccctgcaatggcgtggagggctttaactgttatttccctctgcagtcttacggcttccagccaacaaacggcgtgggctatcagccctacagagtggtggtgctgtcctttgagctgctgcacgcaccagcaacagtgtgcggcccaaagaagtctaccaatctggtgaagaacaagtgcgtgaacttcaacttcaacggactgaccggcacaggcgtgctgaccgagagcaataagaagttcctgccttttcagcagttcggcagggacatcgcagataccacagacgccgtgcgcgaccctcagaccctggagatcctggacatcacaccatgcagcttcggcggcgtgtccgtgatcacaccaggcaccaatacatccaaccaggtggccgtgctgtatcaggacgtgaattgtaccgaggtgcccgtggcaatccacgcagatcagctgacccctacatggcgggtgtactctaccggcagcaacgtgttccagacaagagccggatgcctgatcggagcagagcacgtgaacaatagctatgagtgcgacatccctatcggcgccggcatctgtgccagctaccagacccagacaaactccccatctggagcaggctccgtggccagccagtccatcatcgcctataccatgagcctgggcgccgagaacagcgtggcctactccaacaattctatcgccatccctaccaacttcacaatcagcgtgaccacagagatcctgccagtgtctatgaccaagacaagcgtggactgcacaatgtatatctgtggcgatagcaccgagtgctccaacctgctgctgcagtacggctccttttgtacccagctgaatagagccctgacaggcatcgccgtggagcaggataagaacacacaggaggtgttcgcccaggtgaagcagatctacaagaccccacccatcaaggactttggcggcttcaacttcagccagatcctgcctgatccaagcaagccctccaagaggtcttttatcgaggacctgctgttcaacaaggtgaccctggccgatgccggcttcatcaagcagtatggagattgcctgggagacatcgcagcccgcgacctgatctgtgcccagaagtttaatggcctgaccgtgctgcctccactgctgacagatgagatgatcgcccagtacacatctgccctgctggccggcaccatcacaagcggatggaccttcggcgcaggagccgccctgcagatcccttttgccatgcagatggcctataggttcaacggcatcggcgtgacccagaatgtgctgtacgagaaccagaagctgatcgccaatcagtttaacagcgccatctcaaagatccaggactctctgtcctctacagccagcgccctgggcaagctgcaggatgtggtgaatcagaacgcccaggccctgaataccctggtgaagcagctgagctccaacttcggcgccatctctagcgtgctgaatgacatcctgagccggctggacccccctgaggcagaggtgcagatcgacaggctgatcacaggccgcctgcagagcctgcagacctacgtgacacagcagctgatcagggcagcagagatcagagcctccgccaatctggccgccaccaagatgagcgagtgcgtgctgggacagtccaagagggtggacttttgtggcaagggctatcacctgatgtctttcccacagagcgcccctcacggcgtggtgtttctgcacgtgacctacgtgccagcccaggagaagaacttcaccacagcaccagccatctgccacgatggaaaggcacactttcctagggagggcgtgttcgtgtctaacggcacccactggtttgtgacacagcgcaatttctacgagccacagatcatcaccacagacaatacattcgtgagcggcaactgtgatgtggtgatcggcatcgtgaacaataccgtgtatgatccactgcagcccgagctggactcctttaaggaggagctggataagtacttcaagaatcacacctctcccgacgtggatctgggcgacatctccggcatcaatgcctctgtggtgaacatccagaaggagatcgaccggctgaacgaggtggccaagaatctgaacgagagcctgatcgatctgcaggagctgggcaagtatgagcagtacatcaagggctctggcagagagaacctgtatttccagggaggaggaggcagcggatacatccctgaggcaccaagggacggacaggcctacgtgcgcaaggatggcgagtgggtgctgctgtccacctttctgggccatcatcaccaccaccaccaccactga

SEQ ID NO: 1688 - DNA, 3846 bp, Artificial Sequence
  Description of Artificial Sequence: Synthetic polynucleotide
atgggcatcctgccaagcccaggaatgcccgccctgctgtctctggtgagcctgctgtccgtgctgctgatgggatgcgtggcagagacaggcacacagtgcgtgaacctgaccacaaggacccagctgccccctgcctataccaattctttcacacggggcgtgtactatcccgacaaggtgtttagaagctccgtgctgcactccacacaggatctgtttctgcctttcttttctaacgtgacctggttccacgccatccacgtgtccggcaccaatggcacaaagcggttcgacaatcccgtgctgccttttaacgatggcgtgtacttcgccagcaccgagaagtccaacatcatcagaggctggatctttggcaccacactggactctaagacacagagcctgctgatcgtgaacaatgccaccaacgtggtgatcaaggtgtgcgagttccagttttgtaatgatccattcctgggcgtgtactatcacaagaacaataagtcctggatggagtctgagtttcgcgtgtattctagcgccaacaattgcacatttgagtacgtgagccagcccttcctgatggacctggagggcaagcagggcaatttcaagaacctgagggagttcgtgtttaagaatatcgatggctacttcaagatctacagcaagcacaccccaatcaacctggtgcgcgacctgccacagggattctccgccctggagccactggtggatctgcccatcggcatcaacatcacccggtttcagacactgctggccctgcacagatcctacctgacaccaggcgactcctctagcggatggaccgcaggagctgccgcctactatgtgggctatctgcagccccggaccttcctgctgaagtacaacgagaatggcaccatcacagacgcagtggattgcgccctggaccccctgtctgagacaaagtgtacactgaagagctttaccgtggagaagggcatctatcagacaagcaatttcagggtgcagcctaccgagtccatcgtgcgctttcccaatatcacaaacctgtgcccttttggcgaggtgttcaacgccaccagattcgccagcgtgtacgcctggaatcggaagagaatctccaactgcgtggccgactattctgtgctgtacaactccgcctctttcagcacctttaagtgctatggcgtgtctcccacaaagctgaatgatctgtgctttaccaacgtgtacgccgatagcttcgtgatcaggggagacgaagtgagacagatcgcaccaggacagacaggaaagatcgcagactacaattataagctgcctgacgatttcaccggctgcgtgatcgcctggaactccaacaatctggattctaaagtgggcggcaactacaattatctgtacaggctgtttcgcaagtccaatctgaagccattcgagcgggacatctccacagagatctaccaggccggctctaccccctgcaatggcgtggagggctttaactgttatttccctctgcagtcttacggcttccagccaacaaacggcgtgggctatcagccctacagagtggtggtgctgtcctttgagctgctgcacgcaccagcaacagtgtgcggcccaaagaagtctaccaatctggtgaagaacaagtgcgtgaacttcaacttcaacggactgaccggcacaggcgtgctgaccgagagcaataagaagttcctgccttttcagcagttcggcagggacctcgcagataccacagacgccgtgcgcgaccctcagaccctggagatcctggacatcacaccatgcagcttcggcggcgtgtccgtgatcacaccaggcaccaatacatccaaccaggtggccgtgctgtatcaggacgtgaattgtaccgaggtgcccgtggcaatccacgcagatcagctgacccctacatggcgggtgtactctaccggcagcaacgtgttccagacaagagccggatgcctgatcggagcagagcacgtgaacaatagctatgagtgcgacatccctatcggcgccggcatctgtgccagctaccagacccagacaaactccccatctggagcaggctccgtggccagccagtccatcatcgcctataccatgagcctgggcgccgagaacagcgtggcctactccaacaattctatcgccatccctaccaacttcacaatcagcgtgaccacagagatcctgccagtgtctatgaccaagacaagcgtggactgcacaatgtatatctgtggcgatagcaccgagtgctccaacctgctgctgcagtacggctccttttgtacccagctgaatagagccctgacaggcatcgccgtggagcaggataagaacacacaggaggtgttcgcccaggtgaagcagatctacaagaccccacccatcaaggactttggcggcttcaacttcagccagatcctgcctgatccaagcaagccctccaagaggtcttttatcgaggacctgctgttcaacaaggtgaccctggccgatgccggcttcatcaagcagtatggagattgcctgggagacatcgcagcccgcgacctgatctgtgcccagaagtttaatggcctgaccgtgctgcctccactgctgacagatgagatgatcgcccagtacacatctgccctgctggccggcaccatcacaagcggatggaccttcggcgcaggagccgccctgcagatcccttttgccatgcagatggcctataggttcaacggcatcggcgtgacccagaatgtgctgtacgagaaccagaagctgatcgccaatcagtttaacagcgccatcggcaagatccaggactctctgtcctctacagccagcgccctgggcaagctgcaggatgtggtgaatcagaacgcccaggccctgaataccctggtgaagcagctgagctccaacttcggcgccatctctagcgtgctgaatgacatcctgagccggctggacccccctgaggcagaggtgcagatcgacaggctgatcacaggccgcctgcagagcctgcagacctacgtgacacagcagctgatcagggcagcagagatcagagcctccgccaatctggccgccaccaagatgagcgagtgcgtgctgggacagtccaagagggtggacttttgtggcaagggctatcacctgatgtctttcccacagagcgcccctcacggcgtggtgtttctgcacgtgacctacgtgccagcccaggagaagaacttcaccacagcaccagccatctgccacgatggaaaggcacactttcctagggagggcgtgttcgtgtctaacggcacccactggtttgtgacacagcgcaatttctacgagccacagatcatcaccacagacaatacattcgtgagcggcaactgtgatgtggtgatcggcatcgtgaacaataccgtgtatgatccactgcagcccgagctggactcctttaaggaggagctggataagtacttcaagaatcacacctctcccgacgtggatctgggcgacatctccggcatcaatgcctctgtggtgaacatccagaaggagatcgaccggctgaacgaggtggccaagaatctgaacgagagcctgatcgatctgcaggagctgggcaagtatgagcagtacatcaagggctctggcagagagaacctgtatttccagggaggaggaggcagcggatacatccctgaggcaccaagggacggacaggcctacgtgcgcaaggatggcgagtgggtgctgctgtccacctttctgggccatcatcaccaccaccaccaccactga

SEQ ID NO: 1689 - DNA, 3846 bp, Artificial Sequence
  Description of Artificial Sequence: Synthetic polynucleotide
atgggcatcctgccaagcccaggaatgcccgccctgctgtctctggtgagcctgctgtccgtgctgctgatgggatgcgtggcagagacaggcacacagtgcgtgaacctgaccacaaggacccagctgccccctgcctataccaattctttcacacggggcgtgtactatcccgacaaggtgtttagaagctccgtgctgcactccacacaggatctgtttctgcctttcttttctaacgtgacctggttccacgccatccacgtgtccggcaccaatggcacaaagcggttcgacaatcccgtgctgccttttaacgatggcgtgtacttcgccagcaccgagaagtccaacatcatcagaggctggatctttggcaccacactggactctaagacacagagcctgctgatcgtgaacaatgccaccaacgtggtgatcaaggtgtgcgagttccagttttgtaatgatccattcctgggcgtgtactatcacaagaacaataagtcctggatggagtctgagtttcgcgtgtattctagcgccaacaattgcacatttgagtacgtgagccagcccttcctgatggacctggagggcaagcagggcaatttcaagaacctgagggagttcgtgtttaagaatatcgatggctacttcaagatctacagcaagcacaccccaatcaacctggtgcgcgacctgccacagggattctccgccctggagccactggtggatctgcccatcggcatcaacatcacccggtttcagacactgctggccctgcacagatcctacctgacaccaggcgactcctctagcggatggaccgcaggagctgccgcctactatgtgggctatctgcagccccggaccttcctgctgaagtacaacgagaatggcaccatcacagacgcagtggattgcgccctggaccccctgtctgagacaaagtgtacactgaagagctttaccgtggagaagggcatctatcagacaagcaatttcagggtgcagcctaccgagtccatcgtgcgctttcccaatatcacaaacctgtgcccttttggcgaggtgttcaacgccaccagattcgccagcgtgtacgcctggaatcggaagagaatctccaactgcgtggccgactattctgtgctgtacaactccgcctctttcagcacctttaagtgctatggcgtgtctcccacaaagctgaatgatctgtgctttaccaacgtgtacgccgatagcttcgtgatcaggggagacgaagtgagacagatcgcaccaggacagacaggaaagatcgcagactacaattataagctgcctgacgatttcaccggctgcgtgatcgcctggaactccaacaatctggattctaaagtgggcggcaactacaattatctgtacaggctgtttcgcaagtccaatctgaagccattcgagcgggacatctccacagagatctaccaggccggctctaccccctgcaatggcgtggagggctttaactgttatttccctctgcagtcttacggcttccagccaacaaacggcgtgggctatcagccctacagagtggtggtgctgtcctttgagctgctgcacgcaccagcaacagtgtgcggcccaaagaagtctaccaatctggtgaagaacaagtgcgtgaacttcaacttcaacggactgaccggcacaggcgtgctgaccgagagcaataagaagttcctgccttttcagcagttcggcagggacatcgcagataccacagacgccgtgcgcgaccctcagaccctggagatcctggacatcacaccatgcagcttcggcggcgtgtccgtgatcacaccaggcaccaatacatccaaccaggtggccgtgctgtatcaggacgtgaattgtaccgaggtgcccgtggcaatccacgcagatcagctgacccctacatggcgggtgtactctaccggcagcaacgtgttccagacaagagccggatgcctgatcggagcagagcacgtgaacaatagctatgagtgcgacatccctatcggcgccggcatctgtgccagctaccagacccagacaaactccccatctggagcaggctccgtggccagccagtccatcatcgcctataccatgagcctgggcgccgagaacagcgtggcctactccaacaattctatcgccatccctaccaacttcacaatcagcgtgaccacagagatcctgccagtgtctatgaccaagacaagcgtggactgcacaatgtatatctgtggcgatagcaccgagtgctccaacctgctgctgcagtacggctccttttgtacccagctgaatagagccctgacaggcatcgccgatgagcaggataagaacacacaggaggtgttcgcccaggtgaagcagatctacaagaccccacccatcaaggactttggcggcttcaacttcagccagatcctgcctgatccaagcaagccctccaagaggtcttttatcgaggacctgctgttcaacaaggtgaccctggccgatgccggcttcatcaagcagtatggagattgcctgggagacatcgcagcccgcgacctgatctgtgcccagaagtttaatggcctgaccgtgctgcctccactgctgacagatgagatgatcgcccagtacacatctgccctgctggccggcaccatcacaagcggatggaccttcggcgcaggagccgccctgcagatcccttttgccatgcagatggcctataggttcaacggcatcggcgtgacccagaatgtgctgtacgagaaccagaagctgatcgccaatcagtttaacagcgccatcggcaagatccaggactctctgtcctctacagccagcgccctgggcaagctgcaggatgtggtgaatcagaacgcccaggccctgaataccctggtgaagcagctgagctccaacttcggcgccatctctagcgtgctgaatgacatcctgagccggctggacccccctgaggcagaggtgcagatcgacaggctgatcacaggccgcctgcagagcctgcagacctacgtgacacagcagctgatcagggcagcagagatcagagcctccgccaatctggccgccaccaagatgagcgagtgcgtgctgggacagtccaagagggtggacttttgtggcaagggctatcacctgatgtctttcccacagagcgcccctcacggcgtggtgtttctgcacgtgacctacgtgccagcccaggagaagaacttcaccacagcaccagccatctgccacgatggaaaggcacactttcctagggagggcgtgttcgtgtctaacggcacccactggtttgtgacacagcgcaatttctacgagccacagatcatcaccacagacaatacattcgtgagcggcaactgtgatgtggtgatcggcatcgtgaacaataccgtgtatgatccactgcagcccgagctggactcctttaaggaggagctggataagtacttcaagaatcacacctctcccgacgtggatctgggcgacatctccggcatcaatgcctctgtggtgaacatccagaaggagatcgaccggctgaacgaggtggccaagaatctgaacgagagcctgatcgatctgcaggagctgggcaagtatgagcagtacatcaagggctctggcagagagaacctgtatttccagggaggaggaggcagcggatacatccctgaggcaccaagggacggacaggcctacgtgcgcaaggatggcgagtgggtgctgctgtccacctttctgggccatcatcaccaccaccaccaccactga

SEQ ID NO: 1690 - DNA, 3846 bp, Artificial Sequence
  Description of Artificial Sequence: Synthetic polynucleotide
atgggcatcctgccaagcccaggaatgcccgccctgctgtctctggtgagcctgctgtccgtgctgctgatgggatgcgtggcagagacaggcacacagtgcgtgaacctgaccacaaggacccagctgccccctgcctataccaattctttcacacggggcgtgtactatcccgacaaggtgtttagaagctccgtgctgcactccacacaggatctgtttctgcctttcttttctaacgtgacctggttccacgccatccacgtgtccggcaccaatggcacaaagcggttcgacaatcccgtgctgccttttaacgatggcgtgtacttcgccagcaccgagaagtccaacatcatcagaggctggatctttggcaccacactggactctaagacacagagcctgctgatcgtgaacaatgccaccaacgtggtgatcaaggtgtgcgagttccagttttgtaatgatccattcctgggcgtgtactatcacaagaacaataagtcctggatggagtctgagtttcgcgtgtattctagcgccaacaattgcacatttgagtacgtgagccagcccttcctgatggacctggagggcaagcagggcaatttcaagaacctgagggagttcgtgtttaagaatatcgatggctacttcaagatctacagcaagcacaccccaatcaacctggtgcgcgacctgccacagggattctccgccctggagccactggtggatctgcccatcggcatcaacatcacccggtttcagacactgctggccctgcacagatcctacctgacaccaggcgactcctctagcggatggaccgcaggagctgccgcctactatgtgggctatctgcagccccggaccttcctgctgaagtacaacgagaatggcaccatcacagacgcagtggattgcgccctggaccccctgtctgagacaaagtgtacactgaagagctttaccgtggagaagggcatctatcagacaagcaatttcagggtgcagcctaccgagtccatcgtgcgctttcccaatatcacaaacctgtgcccttttggcgaggtgttcaacgccaccagattcgccagcgtgtacgcctggaatcggaagagaatctccaactgcgtggccgactattctgtgctgtacaactccgcctctttcagcacctttaagtgctatggcgtgtctcccacaaagctgaatgatctgtgctttaccaacgtgtacgccgatagcttcgtgatcaggggagacgaagtgagacagatcgcaccaggacagacaggaaagatcgcagactacaattataagctgcctgacgatttcaccggctgcgtgatcgcctggaactccaacaatctggattctaaagtgggcggcaactacaattatctgtacaggctgtttcgcaagtccaatctgaagccattcgagcgggacatctccacagagatctaccaggccggctctaccccctgcaatggcgtggagggctttaactgttatttccctctgcagtcttacggcttccagccaacaaacggcgtgggctatcagccctacagagtggtggtgctgtcctttgagctgctgcacgcaccagcaacagtgtgcggcccaaagaagtctaccaatctggtgaagaacaagtgcgtgaacttcaacttcaacggactgaccggcacaggcgtgctgaccgagagcaataagaagttcctgccttttcagcagttcggcagggacatcgcagataccacagacgccgtgcgcgaccctcagaccctggagatcctggacatcacaccatgcagcttcggcggcgtgtccgtgatcacaccaggcaccaatacatccaaccaggtggccgtgctgtatcaggacgtgaattgtaccgaggtgccctacgcaatccacgcagatcagctgacccctacatggcgggtgtactctaccggcagcaacgtgttccagacaagagccggatgcctgatcggagcagagcacgtgaacaatagctatgagtgcgacatccctatcggcgccggcatctgtgccagctaccagacccagacaaactccccatctggagcaggctccgtggccagccagtccatcatcgcctataccatgagcctgggcgccgagaacagcgtggcctactccaacaattctatcgccatccctaccaacttcacaatcagcgtgaccacagagatcctgccagtgtctatgaccaagacaagcgtggactgcacaatgtatatctgtggcgatagcaccgagtgctccaacctgctgctgcagtacggctccttttgtacccagctgaatagagccctgacaggcatcgccgtggagcaggataagaacacacaggaggtgttcgcccaggtgaagcagatctacaagaccccacccatcaaggactttggcggcttcaacttcagccagatcctgcctgatccaagcaagccctccaagaggtcttttatcgaggacctgctgttcaacaaggtgaccctggccgatgccggcttcatcaagcagtatggagattgcctgggagacatcgcagcccgcgacctgatctgtgcccagaagtttaatggcctgaccgtgctgcctccactgctgacagatgagatgatcgcccagtacacatctgccctgctggccggcaccatcacaagcggatggaccttcggcgcaggagccgccctgcagatcccttttgccatgcagatggcctataggttcaacggcatcggcgtgacccagaatgtgctgtacgagaaccagaagctgatcgccaatcagtttaacagcgccatcggcaagatccaggactctctgtcctctacagccagcgccctgggcaagctgcaggatgtggtgaatcagaacgcccaggccctgaataccctggtgaagcagctgagctccaacttcggcgccatctctagcgtgctgaatgacatcctgagccggctggacccccctgaggcagaggtgcagatcgacaggctgatcacaggccgcctgcagagcctgcagacctacgtgacacagcagctgatcagggcagcagagatcagagcctccgccaatctggccgccaccaagatgagcgagtgcgtgctgggacagtccaagagggtggacttttgtggcaagggctatcacctgatgtctttcccacagagcgcccctcacggcgtggtgtttctgcacgtgacctacgtgccagcccaggagaagaacttcaccacagcaccagccatctgccacgatggaaaggcacactttcctagggagggcgtgttcgtgtctaacggcacccactggtttgtgacacagcgcaatttctacgagccacagatcatcaccacagacaatacattcgtgagcggcaactgtgatgtggtgatcggcatcgtgaacaataccgtgtatgatccactgcagcccgagctggactcctttaaggaggagctggataagtacttcaagaatcacacctctcccgacgtggatctgggcgacatctccggcatcaatgcctctgtggtgaacatccagaaggagatcgaccggctgaacgaggtggccaagaatctgaacgagagcctgatcgatctgcaggagctgggcaagtatgagcagtacatcaagggctctggcagagagaacctgtatttccagggaggaggaggcagcggatacatccctgaggcaccaagggacggacaggcctacgtgcgcaaggatggcgagtgggtgctgctgtccacctttctgggccatcatcaccaccaccaccaccactga

SEQ ID NO: 1691 - DNA, 3846 bp, Artificial Sequence
  Description of Artificial Sequence: Synthetic polynucleotide
atgggcatcctgccaagcccaggaatgcccgccctgctgtctctggtgagcctgctgtccgtgctgctgatgggatgcgtggcagagacaggcacacagtgcgtgaacctgaccacaaggacccagctgccccctgcctataccaattctttcacacggggcgtgtactatcccgacaaggtgtttagaagctccgtgctgcactccacacaggatctgtttctgcctttcttttctaacgtgacctggttccacgccatccacgtgtccggcaccaatggcacaaagcggttcgacaatcccgtgctgccttttaacgatggcgtgtacttcgccagcaccgagaagtccaacatcatcagaggctggatctttggcaccacactggactctaagacacagagcctgctgatcgtgaacaatgccaccaacgtggtgatcaaggtgtgcgagttccagttttgtaatgatccattcctgggcgtgtactatcacaagaacaataagtcctggatggagtctgagtttcgcgtgtattctagcgccaacaattgcacatttgagtacgtgagccagcccttcctgatggacctggagggcaagcagggcaatttcaagaacctgagggagttcgtgtttaagaatatcgatggctacttcaagatctacagcaagcacaccccaatcaacctggtgcgcgacctgccacagggattctccgccctggagccactggtggatctgcccatcggcatcaacatcacccggtttcagacactgctggccctgcacagatcctacctgacaccaggcgactcctctagcggatggaccgcaggagctgccgcctactatgtgggctatctgcagccccggaccttcctgctgaagtacaacgagaatggcaccatcacagacgcagtggattgcgccctggaccccctgtctgagacaaagtgtacactgaagagctttaccgtggagaagggcatctatcagacaagcaatttcagggtgcagcctaccgagtccatcgtgcgctttcccaatatcacaaacctgtgcccttttggcgaggtgttcaacgccaccagattcgccagcgtgtacgcctggaatcggaagagaatctccaactgcgtggccgactattctgtgctgtacaactccgcctctttcagcacctttaagtgctatggcgtgtctcccacaaagctgaatgatctgtgctttaccaacgtgtacgccgatagcttcgtgatcaggggagacgaagtgagacagatcgcaccaggacagacaggaaagatcgcagactacaattataagctgcctgacgatttcaccggctgcgtgatcgcctggaactccaacaatctggattctaaagtgggcggcaactacaattatctgtacaggctgtttcgcaagtccaatctgaagccattcgagcgggacatctccacagagatctaccaggccggctctaccccctgcaatggcgtggagggctttaactgttatttccctctgcagtcttacggcttccagccaacaaacggcgtgggctatcagccctacagagtggtggtgctgtcctttgagctgctgcacgcaccagcaacagtgtgcggcccaaagaagtctaccaatctggtgaagaacaagtgcgtgaacttcaacttcaacggactgaccggcacaggcgtgctgaccgagagcaataagaagttcctgccttttcagcagttcggcagggacatcgcagataccacagacgccgtgcgcgaccctcagaccctggagatcctggacatcacaccatgcagcttcggcggcgtgtccgtgatcacaccaggcaccaatacatccaaccaggtggccgtgctgtatcaggacgtgaattgtaccgaggtgcccgtggcaatccacgcagatcagctgacccctacatggcgggtgtactctaccggcagcaacgtgttccagacaagagccggatgcctgatcggagcagagcacgtgaacaatagctatgagtgcgacatccctatcggcgccggcatctgtgccagctaccagacccagacaaactccccatctggagcaggctccgtggccagccagtccatcatcgcctataccatgagcctgggcgccgagaacagcgtggcctactccaacaattctatcgccatccctaccaacttcacaatcagcgtgcaaacagagatcctgccagtgtctatgaccaagacaagcgtggactgcacaatgtatatctgtggcgatagcaccgagtgctccaacctgctgctgcagtacggctccttttgtacccagctgaatagagccctgacaggcatcgccgtggagcaggataagaacacacaggaggtgttcgcccaggtgaagcagatctacaagaccccacccatcaaggactttggcggcttcaacttcagccagatcctgcctgatccaagcaagccctccaagaggtcttttatcgaggacctgctgttcaacaaggtgaccctggccgatgccggcttcatcaagcagtatggagattgcctgggagacatcgcagcccgcgacctgatctgtgcccagaagtttaatggcctgaccgtgctgcctccactgctgacagatgagatgatcgcccagtacacagcttcgctgctggccggcaccatcacagcgggatggaccttcggcgcaggagccgccctggtcatcccttttgccatgcagatggcctataggttcaacggcatcggcgtgcaacagaatgtgctgtacgagaaccagaagataatcgccaatcagtttaacaatgccatcggcaacatccaggactctctgtcctctacagccagcgccctgggcaagctgcaggatgtggtgaatcagaacgcccaggccctgaataccctggtgaagcagctgagctccaacttcggcgccatctctagcgtgctgaatgacatcctgagccggctggacccccctgaggcagaggtgcagatcgacaggctgatcacaggccgcctgcagagcctgcagacctacgtgacacagcagctgatcagggcagcagagatcagagcctccgccaatctggccgccaccaagatgagcgagtgcgtgaaaggacagtccaacaggtacggtttttgtggcaatggctatcacctgatgtctttcccacagagcgcccctcacggcgtggtgtttctgcacgtgacctacgtgccaactcagtttaagaacttcaccacagcaccagccatctgccacgatggaaaggcacactttcctagggagggcgtgttcgtgtctaacggcacccactggtttgtgacacagcgcaatttctacgagccacagatcatcaccacagacaatacattcgtgagcggcaactgtgatgtggtgatcggcatcgtgaacaataccgtgtatgatccactgcagcccgagctggactcctttaaggaggagctggataagtacttcaagaatcacacctctcccgacgtggatctgggcgacatctccggcatcaatgcctctgtggtgaacatccagaaggagatcgaccggctgaacgaggtggccaagaatctgaacgagagcctgatcgatctgcaggagctgggcaagtatgagcagtacatcaagggctctggcagagagaacctgtatttccagggaggaggaggcagcggatacatccctgaggcaccaagggacggacaggcctacgtgcgcaaggatggcgagtgggtgctgctgtccacctttctgggccatcatcaccaccaccaccaccactga

SEQ ID NO: 1692 - DNA, 3846 bp, Artificial Sequence
  Description of Artificial Sequence: Synthetic polynucleotide
atgggcatcctgccaagcccaggaatgcccgccctgctgtctctggtgagcctgctgtccgtgctgctgatgggatgcgtggcagagacaggcacacagtgcgtgaacctgaccacaaggacccagctgccccctgcctataccaattctaaaacacggggcgtgtactatcccgacaaggtgtttagaagctccgtgctgcactccacacaggatctgtttctgcctttcttttctaacgtgacctggttccacgccatccacgtgtccggcaccaatggcacaaagcggttcgacaatcccgtgctgccttttaacgatggcgtgtacttcgccagcaccgagaagtccaacatcatcagaggctggatctttggcaccacactggactctaagacacagagcctgctgatcgtgaacaatgccaccaacgtggtgatcaaggtgtgcgagttccagttttgtaatgatccattcctgggcgtgtactatcacaagaacaataagtcctggatggagtctgagtttcgcgtgtattctagcgccaacaattgcacatttgagtacgtgagccagcccttcctgatggacctggagggcaagcagggcaatttcaagaacctgagggagttcgtgtttaagaatatcgatggctacttcaagatctacagcaagcacaccccaatcaacctggtgcgcgacctgccacagggattctccgccctggagccactggtggatctgcccatcggcatcaacatcacccggtttcagacactgctggccctgcacagatcctacctgacaccaggcgactcctctagcggatggaccgcaggagctgccgcctactatgtgggctatctgcagccccggaccttcctgctgaagtacaacgagaatggcaccatcacagacgcagtggattgcgccctggaccccctgtctgagacaaagtgtacactgaagagctttaccgtggagaagggcatctatcagacaagcaatttcagggtgcagcctaccgagtccatcgtgcgctttcccaatatcacaaacctgtgcccttttggcgaggtgttcaacgccaccagattcgccagcgtgtacgcctggaatcggaagagaatctccaactgcgtggccgactattctgtgctgtacaactccgcctctttcagcacctttaagtgctatggcgtgtctcccacaaagctgaatgatctgtgctttaccaacgtgtacgccgatagcttcgtgatcaggggagacgaagtgagacagatcgcaccaggacagacaggaaagatcgcagactacaattataagctgcctgacgatttcaccggctgcgtgatcgcctggaactccaacaatctggattctaaagtgggcggcaactacaattatctgtacaggctgtttcgcaagtccaatctgaagccattcgagcgggacatctccacagagatctaccaggccggctctaccccctgcaatggcgtggagggctttaactgttatttccctctgcagtcttacggcttccagccaacaaacggcgtgggctatcagccctacagagtggtggtgctgtcctttgagctgctgcacgcaccagcaacagtgtgcggcccaaagaagtctaccaatctggtgaagaacaagtgcgtgaacttcaacttcaacggactgaccggcacaggcgtgctgaccgagagcaataagaagttcctgccttttcagcagttcggcagggacatcgcagataccacagacgccgtgcgcgaccctcagaccctggagatcctggacatcacaccatgcagcttcggcggcgtgtccgtgatcacaccaggcaccaatacatccaaccaggtggccgtgctgtatcaggacgtgaattgtaccgaggtgcccgtggcaatccacgcagatcagctgacccctacatggcgggtgtactctaccggcagcaacgtgttccagacaagagccggatgcctgatcggagcagagcacgtgaacaatagctatgagtgcgacatccctatcggcgccggcatctgtgccagctaccagacccagacaaactccccatctggagcaggctccgtggccagccagtccatcatcgcctataccatgagcctgggcgccgagaacagcgtggcctactccaacaattctatcgccatccctaccaacttcacaatcagcgtgaccacagagatcctgccagtgtctatgaccaagacaagcgtggactgcacaatgtatatctgtggcgatagcaccgagtgctccaacctgctgctgcagtacggctccttttgtacccagctgaatagagccctgacaggcatcgccgtggagcaggataagaacacacaggaggtgttcgcccaggtgaagcagatctacaagaccccacccatcaaggactttggcggcttcaacttcagccagatcctgcctgatccaagcaagccctccaagaggtcttttatcgaggacctgctgttcaacaaggtgaccctggccgatgccggcttcatcaagcagtatggagattgcctgggagacatcgcagcccgcgacctgatctgtgcccagaagtttaatggcctgaccgtgctgcctccactgctgacagatgagatgatcgcccagtacacatctgccctgctggccggcaccatcacaagcggatggaccttcggcgcaggagccgccctgcagatcccttttgccatgcagatggcctataggttcaacggcatcggcgtgacccagaatgtgctgtacgagaaccagaagctgatcgccaatcagtttaacagcgccatcggcaagatccaggactctctgtcctctacagccagcgccctgggcaagctgcaggatgtggtgaatcagaacgcccaggccctgaataccctggtgaagcagctgagctccaacttcggcgccatctctagcgtgctgaatgacatcctgagccggctggacccccctgaggcagaggtgcagatcgacaggctgatcacaggccgcctgcagagcctgcagacctacgtgacacagcagctgatcagggcagcagagatcagagcctccgccaatctggccgccaccaagatgagcgagtgcgtgctgggacagtccaagagggtggacttttgtggcaagggctatcacctgatgtctttcccacagagcgcccctcacggcgtggtgtttctgcacgtgacctacgtgccagcccaggagaagaacttcaccacagcaccagccatctgccacgatggaaaggcacactttcctagggagggcgtgttcgtgtctaacggcacccactggtttgtgacacagcgcaatttctacgagccacagatcatcaccacagacaatacattcgtgagcggcaactgtgatgtggtgatcggcatcgtgaacaataccgtgtatgatccactgcagcccgagctggactcctttaaggaggagctggataagtacttcaagaatcacacctctcccgacgtggatctgggcgacatctccggcatcaatgcctctgtggtgaacatccagaaggagatcgaccggctgaacgaggtggccaagaatctgaacgagagcctgatcgatctgcaggagctgggcaagtatgagcagtacatcaagggctctggcagagagaacctgtatttccagggaggaggaggcagcggatacatccctgaggcaccaagggacggacaggcctacgtgcgcaaggatggcgagtgggtgctgctgtccacctttctgggccatcatcaccaccaccaccaccactga

SEQ ID NO: 1693 - DNA, 3846 bp, Artificial Sequence
  Description of Artificial Sequence: Synthetic polynucleotide
atgggcatcctgccaagcccaggaatgcccgccctgctgtctctggtgagcctgctgtccgtgctgctgatgggatgcgtggcagagacaggcacacagtgcgtgaacctgaccacaaggacccagctgccccctgcctataccaattctttcacacggggcgtgtactatcccgacaaggtgtttagaagctccgtgctgcactccacacaggatctgtttctgcctttcttttctaacgtgacctggttccacgccatccacgtgtccggcaccaatggcacaaagcggttcgacaatcccgtgctgccttttaacgatggcgtgtacttcgccagcaccgagaagtccaacatcatcagaggctggatctttggcaccacactggactctaagacacagagcctgctgatcgtgaacaatgccaccaacgtggtgatcaaggtgtgcgagttccagttttgtaatgatccattcctgggcgtgtactatcacaagaacaataagtcctggatggagtctgagtttcgcgtgtattctagcgccaacaattgcacatttgagtacgtgagccagcccttcctgatggacctggagggcaagcagggcaatttcaagaacctgagggagttcgtgtttaagaatatcgatggctacttcaagatctacagcaagcacaccccaatcaacctggtgcgcgacctgccacagggattctccgccctggagccactggtggatctgcccatcggcatcaacatcacccggtttcagacactgctggccctgcacagatcctacctgacaccaggcgactcctctagcggatggcaagcaggagctgccgcctactatgtgggctatctgcagccccggaccttcctgctgaagtacaacgagaatggcaccatcacagacgcagtggattgcgccctggaccccctgtctgagacaaagtgtacactgaagagctttaccgtggagaagggcatctatcagacaagcaatttcagggtgcagcctaccgagtccatcgtgcgctttcccaatatcacaaacctgtgcccttttggcgaggtgttcaacgccaccagattcgccagcgtgtacgcctggaatcggaagagaatctccaactgcgtggccgactattctgtgctgtacaactccgcctctttcagcacctttaagtgctatggcgtgtctcccacaaagctgaatgatctgtgctttaccaacgtgtacgccgatagcttcgtgatcaggggagacgaagtgagacagatcgcaccaggacagacaggaaagatcgcagactacaattataagctgcctgacgatttcaccggctgcgtgatcgcctggaactccaacaatctggattctaaagtgggcggcaactacaattatctgtacaggctgtttcgcaagtccaatctgaagccattcgagcgggacatctccacagagatctaccaggccggctctaccccctgcaatggcgtggagggctttaactgttatttccctctgcagtcttacggcttccagccaacaaacggcgtgggctatcagccctacagagtggtggtgctgtcctttgagctgctgcacgcaccagcaacagtgtgcggcccaaagaagtctaccaatctggtgaagaacaagtgcgtgaacttcaacttcaacggactgaccggcacaggcgtgctgaccgagagcaataagaagttcctgccttttcagcagttcggcagggacatcgcagataccacagacgccgtgcgcgaccctcagaccctggagatcctggacatcacaccatgcagcttcggcggcgtgtccgtgatcacaccaggcaccaatacatccaaccaggtggccgtgctgtatcaggacgtgaattgtaccgaggtgcccgtggcaatccacgcagatcagctgacccctacatggcgggtgtactctaccggcagcaacgtgttccagacaagagccggatgcctgatcggagcagagcacgtgaacaatagctatgagtgcgacatccctatcggcgccggcatctgtgccagctaccagacccagacaaactccccatctggagcaggctccgtggccagccagtccatcatcgcctataccatgagcctgggcgccgagaacagcgtggcctactccaacaattctatcgccatccctaccaacttcacaatcagcgtgaccacagagatcctgccagtgtctatgaccaagacaagcgtggactgcacaatgtatatctgtggcgatagcaccgagtgctccaacctgctgctgcagtacggctccttttgtacccagctgaatagagccctgacaggcatcgccgtggagcaggataagaacacacaggaggtgttcgcccaggtgaagcagatctacaagaccccacccatcaaggactttggcggcttcaacttcagccagatcctgcctgatccaagcaagccctccaagaggtcttttatcgaggacctgctgttcaacaaggtgaccctggccgatgccggcttcatcaagcagtatggagattgcctgggagacatcgcagcccgcgacctgatctgtgcccagaagtttaatggcctgaccgtgctgcctccactgctgacagatgagatgatcgcccagtacacatctgccctgctggccggcaccatcacaagcggatggaccttcggcgcaggagccgccctgcagatcccttttgccatgcagatggcctataggttcaacggcatcggcgtgacccagaatgtgctgtacgagaaccagaagctgatcgccaatcagtttaacagcgccatcggcaagatccaggactctctgtcctctacagccagcgccctgggcaagctgcaggatgtggtgaatcagaacgcccaggccctgaataccctggtgaagcagctgagctccaacttcggcgccatctctagcgtgctgaatgacatcctgagccggctggacccccctgaggcagaggtgcagatcgacaggctgatcacaggccgcctgcagagcctgcagacctacgtgacacagcagctgatcagggcagcagagatcagagcctccgccaatctggccgccaccaagatgagcgagtgcgtgctgggacagtccaagagggtggacttttgtggcaagggctatcacctgatgtctttcccacagagcgcccctcacggcgtggtgtttctgcacgtgacctacgtgccagcccaggagaagaacttcaccacagcaccagccatctgccacgatggaaaggcacactttcctagggagggcgtgttcgtgtctaacggcacccactggtttgtgacacagcgcaatttctacgagccacagatcatcaccacagacaatacattcgtgagcggcaactgtgatgtggtgatcggcatcgtgaacaataccgtgtatgatccactgcagcccgagctggactcctttaaggaggagctggataagtacttcaagaatcacacctctcccgacgtggatctgggcgacatctccggcatcaatgcctctgtggtgaacatccagaaggagatcgaccggctgaacgaggtggccaagaatctgaacgagagcctgatcgatctgcaggagctgggcaagtatgagcagtacatcaagggctctggcagagagaacctgtatttccagggaggaggaggcagcggatacatccctgaggcaccaagggacggacaggcctacgtgcgcaaggatggcgagtgggtgctgctgtccacctttctgggccatcatcaccaccaccaccaccactga

SEQ ID NO: 1694 - DNA, 3846 bp, Artificial Sequence
  Description of Artificial Sequence: Synthetic polynucleotide
atgggcatcctgccaagcccaggaatgcccgccctgctgtctctggtgagcctgctgtccgtgctgctgatgggatgcgtggcagagacaggcacacagtgcgtgaacctgaccacaaggacccagctgccccctgcctataccaattctttcacacggggcgtgtactatcccgacaaggtgtttagaagctccgtgctgcactccacacaggatctgtttctgcctttcttttctaacgtgacctggttccacgccatccacgtgtccggcaccaatggcacaaagcggttcgacaatcccgtgctgccttttaacgatggcgtgtacttcgccagcaccgagaagtccaacatcatcagaggctggatctttggcaccacactggactctaagacacagagcctgctgatcgtgaacaatgccaccaacgtggtgatcaaggtgtgcgagttccagttttgtaatgatccattcctgggcgtgtactatcacaagaacaataagtcctggatggagtctgagtttcgcgtgtattctagcgccaacaattgcacatttgagtacgtgagccagcccttcctgatggacctggagggcaagcagggcaatttcaagaacctgagggagttcgtgtttaagaatatcgatggctacttcaagatctacagcaagcacaccccaatcaacctggtgcgcgacctgccacagggattctccgccctggagccactggtggatctgcccatcggcatcaacatcacccggtttcagacactgctggccctgcacagatcctacctgacaccaggcgactcctctagcggatggaccgcaggagctgccgcctactatgtgggctatctgcagccccggaccttcctgctgaagtacaacgagaatggcaccatcacagacgcagtggattgcgccctggaccccctgtctgagacaaagtgtacactgaagagctttaccgtggagaagggcatctatcagacaagcaatttcagggtgcagcctaccgagtccatcgtgcgctttcccaatatcacaaacctgtgcccttttggcgaggtgttcaacgccaccagattcgccagcgtgtacgcctggaatcggaagagaatctccaactgcgtggccgactattctgtgctgtacaactccgcctctttcagcacctttaagtgctatggcgtgtctcccacaaagctgaatgatctgtgctttaccaacgtgtacgccgatagcttcgtgatcaggggagacgaagtgagacagatcgcaccaggacagacaggaaagatcgcagactacaattataagctgcctgacgatttcaccggctgcgtgatcgcctggaactccaacaatctggattctaaagtgggcggcaactacaattatctgtacaggctgtttcgcaagtccaatctgaagccattcgagcgggacatctccacagagatctaccaggccggctctaccccctgcaatggcgtggagggctttaactgttatttccctctgcagtcttacggcttccagccaacaaacggcgtgggctatcagccctacagagtggtggtgctgtcctttgagctgctgcacgcaccagcaacagtgtgcggcccaaagaagtctaccaatctggtgaagaacaagtgcgtgaacttcaacttcaacggactgaccggcacaggcgtgctgaccgagagcaataagaagttcctgccttttcagcagttcggcagggacatcgcagataccacagacgccgtgcgcgaccctcagaccctggagatcctggacatcacaccatgcagcttcggcggcgtgtccgtgatcacaccaggcaccaatacatccaaccaggtggccgtgctgtatcaggacgtgaattgtaccgaggtgcccgtggcaatccacgcagatcagctgacccctacatggcgggtgtactctaccggcagcaacgtgttccagacaagagccggatgcctgatcggagcagagcacgtgaacaatagctatgagtgcgacatccctatcggcgccggcatctgtgccagctaccagacccagacaaactccccatctggagcaggctccgtggccagccagtccatcatcgcctataccatgagcctgggcgccgagaacagcgtggcctactccaacaattctatcgccatccctaccaacttcacaatcagcgtgaccacagagatcctgccagtgtctatgaccaagacaagcgtggactgcacaatgtatatctgtggcgatagcaccgagtgcttaaacctgctgagtcagtacggctccttttgttcacagctggaaagagccctgaatggcatcgccgtggagcaggataagaacacacaggaggtgttcgcccaggtgaagcagatctacaagaccccacccatcaaggactttggcggcttcaacttcagccagatcctgcctgatccaagcaagccctccaagaggtcttttatcgaggacctgctgttcaacaaggtgaccctggccgatgccggcttcatcaagcagtatggagattgcctgggagacatcgcagcccgcgacctgatctgtgcccagaagtttaatggcctgaccgtgctgcctccactgctgacagatgagatgatcgcccagtacacatctgccctgctggccggcaccatcacaagcggatggaccttcggcgcaggagccgccctgcagatcccttttgccatgcagatggcctataggttcaacggcatcggcgtgacccagaatgtgctgtacgagaaccagaagctgatcgccaatcagtttaacagcgccatcggcaagatccaggactctctgtcctctacagccagcgccctgggcaagctgcaggatgtggtgaatcagaacgcccaggccctgaataccctggtgaagcagctgagctccaacttcggcgccatctctagcgtgataaatgacatctataatcggctggacaaacctgaggcacaagcgcagatcgacaggctgatcacaggccgcctgcagagcctgcagacctacgtgacacagcagctgatcagggcagcagagatcagagcctccgccaatctggccgccaccaagatgagcgagtgcgtgctgggacagtccaagagggtggacttttgtggcaagggctatcacctgatgtctttcccacagagcgcccctcacggcgtggtgtttctgcacgtgacctacgtgccagcccaggagaagaacttcaccacagcaccagccatctgccacgatggaaaggcacactttcctagggagggcgtgttcgtgtctaacggcacccactggtttgtgacacagcgcaatttctacgagccacagatcatcaccacagacaatacattcgtgagcggcaactgtgatgtggtgatcggcatcgtgaacaataccgtgtatgatccactgcagcccgagctggactcctttaaggaggagctggataagtacttcaagaatcacacctctcccgacgtggatctgggcgacatctccggcatcaatgcctctgtggtgaacatccagaaggagatcgaccggctgaacgaggtggccaagaatctgaacgagagcctgatcgatctgcaggagctgggcaagtatgagcagtacatcaagggctctggcagagagaacctgtatttccagggaggaggaggcagcggatacatccctgaggcaccaagggacggacaggcctacgtgcgcaaggatggcgagtgggtgctgctgtccacctttctgggccatcatcaccaccaccaccaccactga

SEQ ID NO: 1695 - DNA, 3846 bp, Artificial Sequence
  Description of Artificial Sequence: Synthetic polynucleotide
atgggcatcctgccaagcccaggaatgcccgccctgctgtctctggtgagcctgctgtccgtgctgctgatgggatgcgtggcagagacaggcacacagtgcgtgaacctgaccacaaggacccagctgccccctgcctataccaattctttcacacggggcgtgtactatcccgacaagatatttagaagctccgtgctgcaccttacacaggatctgtttctgcctttcttttctaacgtgacctggttccacgccatccacgtgtccggcaccaatggcacaaagcggttcgacaatcccgtgctgccttttaacgatggcgtgtacttcgccgcaaccgagaagtccaacatcatcagaggctggatctttggcaccacactggactctaagacacagagcctgctgatcgtgaacaatgccaccaacgtggtgatcaaggtgtgcgagttccagttttgtaatgatccattcctgggcgtgtactatcacaagaacaataagtcctggatggagtctgagtttcgcgtgtattctagcgccaacaattgcacatttgagtacgtgagccagcccttcctgatggacctggagggcaagcagggcaatttcaagaacctgagggagttcgtgtttaagaatatcgatggctacttcaagatctacagcaagcacaccccaatcaacctggtgcgcgacctgccacagggattctccgccctggagccactggtgaaactgcccatcggcatcaacatcacccggtttcagacactgctggccctgcacagatcctacctgacaccaggcgactcctctagcggatggaccgcaggagctgccgcctactatgtgggctatctgcagccccggaccttcctgctgaagtacaacgagaatggcaccatcacagacgcagtggattgcgccctggaccccctgtctgagacaaagtgtacactgaagagctttaccgtggagaagggcatctatcagacaagcaatttcagggtgcagcctaccgagtccatcgtgcgctttcccaatatcacaaacctgtgcccttttggcgaggtgttcaacgccaccagattcgccagcgtgtacgcctggaatcggaagagaatctccaactgcgtggccgactattctgtgctgtacaactccgcctctttcagcacctttaagtgctatggcgtgtctcccacaaagctgaatgatctgtgctttaccaacgtgtacgccgatagcttcgtgatcaggggagacgaagtgagacagatcgcaccaggacagacaggaaagatcgcagactacaattataagctgcctgacgatttcaccggctgcgtgatcgcctggaactccaacaatctggattctaaagtgggcggcaactacaattatctgtacaggctgtttcgcaagtccaatctgaagccattcgagcgggacatctccacagagatctaccaggccggctctaccccctgcaatggcgtggagggctttaactgttatttccctctgcagtcttacggcttccagccaacaaacggcgtgggctatcagccctacagagtggtggtgctgtcctttgagctgctgcacgcaccagcaacagtgtgcggcccaaagaagtctaccaatctggtgaagaacaagtgcgtgaacttcaacttcaacggactgaccggcacaggcgtgctgaccgagagcaataagaagttcctgccttttcagcagttcggcagggacatctcggataccacagacgccgtgcgcgaccctcagaccctggagatcctggacatcacaccatgcagcttcggcggcgtgtccgtgatcacaccaggcaccaatacatccaaccaggtggccgtgctgtatcaggacgtgaattgtaccgatgtgcccgtggcaatccacgcagatcagctgacccctacatggcgggtgtactctaccggcagcaacgtgttccagacacaagccggatgcctgatcggagcagagcacgtgaacaatagctatgagtgcgacatccctatcggcgccggcatctgtgccagctaccagacccagacaaactccccatctggagcaggctccgtggccagccagtccatcatcgcctataccatgagcctgggcgccgagaacagcgtggcctactccaacaattctatcgccatccctaccaacttcacaatcagcgtgaccacagagatcctgccagtgtctatgaccaagacaagcgtggactgcacaatgtatatctgtggcgatagcaccgagtgctccaacctgctgctgcagtacggctccttttgtacccagctgaatagagccctgacaggcatcgccgtggagcaggataagaacacacaggaggtgttcgcccaggtgaagcagatctacaagaccccacccatcaaggactttggcggcttcaacttcagccagatcctgcctgatccaagcaagccctccaagaggtcttttatcgaggacctgctgttcaacaaggtgaccctggccgatgccggcttcatcaagcagtatggagattgcctgggagacatcgcagcccgcgacctgatctgtgcccagaagtttaatggcctgaccgtgctgcctccactgctgacagatgagatgatcgcccagtacacagcggccctgctggccggcaccatcacagcgggatggaccttcggcgcaggagccgccctgcagatcccttttgccatgcagatggcctataggttcaacggcatcggcgtgacccagaatgtgctgtacgagaaccagaagctgatcgccaatcagtttaacagcgccatcggcaagatccaggactctctgtcctctacagccagcgccctgggcaagctgcaggatgtggtgaatcagaacgcccaggccctgaataccctggtgaagcagctgagctccaacttcggcgccatctctagcgtgctgaatgacatcctgagccggctggacccccctgaggcagaggtgcagatcgacaggctgatcacaggccgcctgcagagcctgcagacctacgtgacacagcagctgatcagggcagcagagatcagagcctccgccaatctggccgccaccaagatgagcgagtgcgtgctgggacagtccaagagggtggacttttgtggcaagggctatcacctgatgtctttcccacagagcgcccctcacggcgtggtgtttctgcacgtgacctacgtgccagcccaggagaagaacttcaccacagcaccagccatctgccacgatggaaaggcacactttcctagggagggcgtgttcgtgtctaacggcacccactggtttgtgacacagcgcaatttctacgagccacagatcatcaccacagacaatacattcgtgagcggcaactgtgatgtggtgatcggcatcgtgaacaataccgtgtatgatccactgcagcccgagctggactcctttaaggaggagctggataagtacttcaagaatcacacctctcccgacgtggatctgggcgacatctccggcatcaatgcctctgtggtgaacatccagaaggagatcgaccggctgaacgaggtggccaagaatctgaacgagagcctgatcgatctgcaggagctgggcaagtatgagcagtacatcaagggctctggcagagagaacctgtatttccagggaggaggaggcagcggatacatccctgaggcaccaagggacggacaggcctacgtgcgcaaggatggcgagtgggtgctgctgtccacctttctgggccatcatcaccaccaccaccaccactga

SEQ ID NO: 1696 - DNA, 3846 bp, Artificial Sequence
  Description of Artificial Sequence: Synthetic polynucleotide
atgggcatcctgccaagcccaggaatgcccgccctgctgtctctggtgagcctgctgtccgtgctgctgatgggatgcgtggcagagacaggcacacagtgcgtgaacctgaccacaaggacccagctgccccctgcctataccaattctttcacacggggcgtgtactatcccgacaaggtgtttagaagctccgtgctgcactccacacaggatctgtttctgcctttcttttctaacgtgacctggttccacgccatccacgtgtccggcaccaatggcacaaagcggttcgacaatcccgtgctgccttttaacgatggcgtgtacttcgccagcaccgagaagtccaacatcatcagaggctggatctttggcaccacactggactctaagacacagagcctgctgatcgtgaacaatgccaccaacgtggtgatcaaggtgtgcgagttccagttttgtaatgatccattcctgggcgtgtactatcacaagaacaataagtcctggatggagtctgagtttcgcgtgtattctagcgccaacaattgcacatttgagtacgtgagccagcccttcctgatggacctggagggcaagcagggcaatttcaagaacctgagggagttcgtgtttaagaatatcgatggctacttcaagatctacagcaagcacaccccaatcaacctggtgcgcgacctgccacagggattctccgccctggagccactggtggatctgcccatcggcatcaacatcacccggtttcagacactgctggccctgcacagatcctacctgacaccaggcgactcctctagcggatggaccgcaggagctgccgcctactatgtgggctatctgcagccccggaccttcctgctgaagtacaacgagaatggcaccatcacagacgcagtggattgcgccctggaccccctgtctgagacaaagtgtacactgaagagctttaccgtggagaagggcatctatcagacaagcaatttcagggtgcagcctaccgagtccatcgtgcgctttcccaatatcacaaacctgtgcccttttggcgaggtgttcaacgccaccagattcgccagcgtgtacgcctggaatcggaagagaatctccaactgcgtggccgactattctgtgctgtacaactccgcctctttcagcacctttaagtgctatggcgtgtctcccacaaagctgaatgatctgtgctttaccaacgtgtacgccgatagcttcgtgatcaggggagacgaagtgagacagatcgcaccaggacagacaggaaagatcgcagactacaattataagctgcctgacgatttcaccggctgcgtgatcgcctggaactccaacaatctggattctaaagtgggcggcaactacaattatctgtacaggctgtttcgcaagtccaatctgaagccattcgagcgggacatctccacagagatctaccaggccggctctaccccctgcaatggcgtggagggctttaactgttatttccctctgcagtcttacggcttccagccaacaaacggcgtgggctatcagccctacagagtggtggtgctgtcctttgagctgctgcacgcaccagcaacagtgtgcggcccaaagaagtctaccaatctggtgaagaacaagtgcgtgaacttcaacttcaacggactgaccggcacaggcgtgctgaccgagagcaataagaagttcctgccttttcagcagttcggcagggacatcgcagataccacagacgccgtgcgcgaccctcagaccctggagatcctggacatcacaccatgcagcttcggcggcgtgtccgtgatcacaccaggcaccaatacatccaaccaggtggccgtgctgtatcaggacgtgaattgtaccgaggtgcccgtggcaatccacgcagatcagctgacccctacatggcgggtgtactctaccggcagcaacgtgttccagacaagagccggatgcctgatcggagcagagcacgtgaacaatagctatgagtgcgacatccctatcggcgccggcatctgtgccagctaccagacccagacaaactccccatctggagcaggctccgtggccagccagtccatcatcgcctataccatgagcctgggcgccgagaacagcgtggcctactccaacaattctatcgccatccctaccaacttcacaatcagcgtgaccacagagatcctgccagtgtctatgaccaagacaagcgtggactgcacaatgtatatctgtggcgatagcaccgagtgctccaacctgctgctgcagtacggctccttttgtacccagctgaatagagccctgacaggcatcgccgtggagcaggataagaacacacaggaggtgttcgcccaggtgaagcagatctacaagaccccacccatcaaggactttggcggcttcaacttcagccagatcctgcctgatccaagcaagccctccaagaggtcttttatcgaggacctgctgttcaacaaggtgaccctggccgatgccggcttcatcaagcagtatggagattgcctgggagacatcgcagcccgcgacctgatctgtgcccagaagtttaatggcctgaccgtgctgcctccactgctgacagatgagatgatcgcccagtacacatctgccctgctggccggcaccatcacaagcggatggaccttcggcgcaggagccgccctgcagatcccttttgccatgcagatggcctataggttcaacggcatcggcgtgacccagaatgtgctgtacgagaaccagaagctgatcgccaatcagtttaacagcgccatcggcaagatccaggactctctgtcctctacagccagcgccctgggcaagctgcaggatgtggtgaatcagaacgcccaggccctgaataccctggtgaagcagctgagctccaacttcggcgccatctctagcgtgctgaatgacatcctgagccggctggacccccctgaggcagaggtgcagatcgacaggctgatcacaggccgcctgcagagcctgcagacctacgtgacacagcagctgatcagggcagcagagatcagagcctccgccaatctggccgccaccaagatgagcgagtgcgtgctgggacagtccaagagggtggacttttgtggcaagggctatcacctgatgtctttcccacagagcgcccctcacggcgtggtgtttctgcacgtgacctacgtgccagcccaggagaagaacttcaccacagcaccagccatctgccacgatggaaaggcacactttcctagggagggcgtgttcgtgtctaacggcacccactggtttgtgacacagcgcaatttctacgagccacagactatcaccacagacaatacattcgtgagcggcaactgtgatgtggtgatcggcatcgtgaacaataccgtgtatgatccactgcagcccgagctggactcctttaaggaggagctggataagtacttcaagaatcacacctctcccgacgtggatctgggcgacatctccggcatcaatgcctctgtggtgaacatccagaaggagatcgaccggctgaacgaggtggccaagaatctgaacgagagcctgatcgatctgcaggagctgggcaagtatgagcagtacatcaagggctctggcagagagaacctgtatttccagggaggaggaggcagcggatacatccctgaggcaccaagggacggacaggcctacgtgcgcaaggatggcgagtgggtgctgctgtccacctttctgggccatcatcaccaccaccaccaccactga

SEQ ID NO: 1697 - DNA, 3846 bp, Artificial Sequence
  Description of Artificial Sequence: Synthetic polynucleotide
atgggcatcctgccaagcccaggaatgcccgccctgctgtctctggtgagcctgctgtccgtgctgctgatgggatgcgtggcagagacaggcacacagtgcgtgaacctgaccacaaggacccagctgccccctgcctataccaattctttcacacggggcgtgtactatcccgacgaggtgtttagaagctccgtgctgcactccacacaggatctgtttctgcctttcttttctaacgtgacctggttccacgccatccacgtgtccggcaccaatggcacaaagcggttcgacaatcccgtgctgccttttaacgatggcgtgtacttcgccagcaccgagaagtccaacatcatcagaggctggatctttggcaccacactggactctaagacacagagcctgctgatcgtgaacaatgccaccaacgtggtgatcaaggtgtgcgagttccagttttgtaatgatccattcctgggcgtgtactatcacaagaacaataagtcctggatggagtctgagtttcgcgtgtattctagcgccaacaattgcacatttgagtacgtgagccagcccttcctgatggacctggagggcaagcagggcaatttcaagaacctgagggagttcgtgtttaagaatatcgatggctacttcaagatctacagcaagcacaccccaatcaacctggtgcgcgacctgccacagggattctccgccctggagccactggtggatctgcccatcggcatcaacatcacccggtttcagacactgctggccctgcacagatcctacctgacaccaggcgactcctctagcggatggaccgcaggagctgccgcctactatgtgggctatctgcagccccggaccttcctgctgaagtacaacgagaatggcaccatcacagacgcagtggattgcgccctggaccccctgtctgagacaaagtgtacactgaagagctttaccgtggagaagggcatctatcagacaagcaatttcagggtgcagcctaccgagtccatcgtgcgctttcccaatatcacaaacctgtgcccttttggcgaggtgttcaacgccaccagattcgccagcgtgtacgcctggaatcggaagagaatctccaactgcgtggccgactattctgtgctgtacaactccgcctctttcagcacctttaagtgctatggcgtgtctcccacaaagctgaatgatctgtgctttaccaacgtgtacgccgatagcttcgtgatcaggggagacgaagtgagacagatcgcaccaggacagacaggaaagatcgcagactacaattataagctgcctgacgatttcaccggctgcgtgatcgcctggaactccaacaatctggattctaaagtgggcggcaactacaattatctgtacaggctgtttcgcaagtccaatctgaagccattcgagcgggacatctccacagagatctaccaggccggctctaccccctgcaatggcgtggagggctttaactgttatttccctctgcagtcttacggcttccagccaacaaacggcgtgggctatcagccctacagagtggtggtgctgtcctttgagctgctgcacgcaccagcaacagtgtgcggcccaaagaagtctaccaatctggtgaagaacaagtgcgtgaacttcaacttcaacggactgaccggcacaggcgtgctgaccgagagcaataagaagttcctgccttttcagcagttcggcagggacatcgcagataccacagacgccgtgcgcgaccctcagaccctggagatcctggacatcacaccatgcagcttcggcggcgtgtccgtgatcacaccaggcaccaatacatccaaccaggtggccgtgctgtatcaggacgtgaattgtaccgaggtgcccgtggcaatccacgcagatcagctgacccctacatggcgggtgtactctaccggcagcaacgtgttccagacaagagccggatgcctgatcggagcagagcacgtgaacaatagctatgagtgcgacatccctatcggcgccggcatctgtgccagctaccagacccagacaaactccccatctggagcaggctccgtggccagccagtccatcatcgcctataccatgagcctgggcgccgagaacagcgtggcctactccaacaattctatcgccatccctaccaacttcacaatcagcgtgaccacagagatcctgccagtgtctatgaccaagacaagcgtggactgcacaatgtatatctgtggcgatagcaccgagtgctccaacctgctgctgcagtacggctccttttgtacccagctgaatagagccctgacaggcatcgccgtggagcaggataagaacacacaggaggtgttcgcccaggtgaagcagatctacaagaccccacccatcaaggactttggcggcttcaacttcagccagatcctgcctgatccaagcaagccctccaagaggtcttttatcgaggacctgctgttcaacaaggtgaccctggccgatgccggcttcatcaagcagtatggagattgcctgggagacatcgcagcccgcgacctgatctgtgcccagaagtttaatggcctgaccgtgctgcctccactgctgacagatgagatgatcgcccagtacacatctgccctgctggccggcaccatcacaagcggatggaccttcggcgcaggagccgccctgcagatcccttttgccatgcagatggcctataggttcaacggcatcggcgtgacccagaatgtgctgtacgagaaccagaagctgatcgccaatcagtttaacagcgccatcggcaagatccaggactctctgtcctctacagccagcgccctgggcaagctgcaggatgtggtgaatcagaacgcccaggccctgaataccctggtgaagcagctgagctccaacttcggcgccatctctagcgtgctgaatgacatcctgagccggctggacccccctgaggcagaggtgcagatcgacaggctgatcacaggccgcctgcagagcctgcagacctacgtgacacagcagctgatcagggcagcagagatcagagcctccgccaatctggccgccaccaagatgagcgagtgcgtgctgggacagtccaagagggtggacttttgtggcaagggctatcacctgatgtctttcccacagagcgcccctcacggcgtggtgtttctgcacgtgacctacgtgccagcccaggagaagaacttcaccacagcaccagccatctgccacgatggaaaggcacactttcctagggagggcgtgttcgtgtctaacggcacccactggtttgtgacacagcgcaatttctacgagccacagatcatcaccacagacaatacattcgtgagcggcaactgtgatgtggtgatcggcatcgtgaacaataccgtgtatgatccactgcagcccgagctggactcctttaaggaggagctggataagtacttcaagaatcacacctctcccgacgtggatctgggcgacatctccggcatcaatgcctctgtggtgaacatccagaaggagatcgaccggctgaacgaggtggccaagaatctgaacgagagcctgatcgatctgcaggagctgggcaagtatgagcagtacatcaagggctctggcagagagaacctgtatttccagggaggaggaggcagcggatacatccctgaggcaccaagggacggacaggcctacgtgcgcaaggatggcgagtgggtgctgctgtccacctttctgggccatcatcaccaccaccaccaccactga

SEQ ID NO: 1698 - DNA, 3846 bp, Artificial Sequence
  Description of Artificial Sequence: Synthetic polynucleotide
atgggcatcctgccaagcccaggaatgcccgccctgctgtctctggtgagcctgctgtccgtgctgctgatgggatgcgtggcagagacaggcacacagtgcgtgaacctgaccacaaggacccagctgccccctgcctataccaattctttcacacggggcgtgtactatcccgacaaggtgtttagaagctccgtgctgcactccacacaggatctgtttctgcctttcttttctaacgtgacctggttccacgccatccacgtgtccggcaccaatggcacaaagcggttcgacaatcccgtgctgccttttaacgatggcgtgtacttcgccagcaccgagaagtccaacatcatcagaggctggatctttggcaccacactggactctaagacacagagcctgctgatcgtgaacaatgccaccaacgtggtgatcaaggtgtgcgagttccagttttgtaatgatccattcctgggcgtgtactatcacaagaacaataagtcctggatggagtctgagtttcgcgtgtattctagcgccaacaattgcacatttgagtacgtgagccagcccttcctgatggacctggagggcaagcagggcaatttcaagaacctgagggagttcgtgtttaagaatatcgatggctacttcaagatctacagcaagcacaccccaatcaacctggtgcgcgacctgccacagggattctccgccctggagccactggtggatctgcccatcggcatcaacatcacccggtttcagacactgctggccctgcacagatcctacctgacaccaggcgactcctctagcggatggaccgcaggagctgccgcctactatgtgggctatctgcagccccggaccttcctgctgaagtacaacgagaatggcaccatcacagacgcagtggattgcgccctggaccccctgtctgagacaaagtgtacactgaagagctttaccgtggagaagggcatctatcagacaagcaatttcagggtgcagcctaccgagtccatcgtgcgctttcccaatatcacaaacctgtgcccttttggcgaggtgttcaacgccaccagattcgccagcgtgtacgcctggaatcggaagagaatctccaactgcgtggccgactattctgtgctgtacaactccgcctctttcagcacctttaagtgctatggcgtgtctcccacaaagctgaatgatctgtgctttaccaacgtgtacgccgatagcttcgtgatcaggggagacgaagtgagacagatcgcaccaggacagacaggaaagatcgcagactacaattataagctgcctgacgatttcaccggctgcgtgatcgcctggaactccaacaatctggattctaaagtgggcggcaactacaattatctgtacaggctgtttcgcaagtccaatctgaagccattcgagcgggacatctccacagagatctaccaggccggctctaccccctgcaatggcgtggagggctttaactgttatttccctctgcagtcttacggcttccagccaacaaacggcgtgggctatcagccctacagagtggtggtgctgtcctttgagctgctgcacgcaccagcaacagtgtgcggcccaaagaagtctaccaatctggtgaagaacaagtgcgtgaacttcaacttcaacggactgaccggcacaggcgtgctgaccgagagcaataagaagttcctgccttttcagcagttcggcagggacatcgcagataccacagacgccgtgcgcgaccctcagaccctggagatcctggacatcacaccatgcagcttcggcggcgtgtccgtgatcacaccaggcaccaatacatccaacgctgtggccgtgctgtatcaggacgtgaattgtaccgaggtgcccgtggcaatccacgcagatcagctgacccctacatggcgggtgtactctaccggcagcaacgtgttccagacaagagccggatgcctgatcggagcagagcacgtgaacaatagctatgagtgcgacatccctatcggcgccggcatctgtgccagctaccagacccagacaaactccccatctggagcaggctccgtggccagccagtccatcatcgcctataccatgagcctgggcgccgagaacagcgtggcctactccaacaattctatcgccatccctaccaacttcacaatcagcgtgaccacagagatcctgccagtgtctatgaccaagacaagcgtggactgcacaatgtatatctgtggcgatagcaccgagtgctccaacctgctgctgcagtacggctccttttgtacccagctgaatagagccctgacaggcatcgccgtggagcaggataagaacacacaggaggtgttcgcccaggtgaagcagatctacaagaccccacccatcaaggactttggcggcttcaacttcagccagatcctgcctgatccaagcaagccctccaagaggtcttttatcgaggacctgctgttcaacaaggtgaccctggccgatgccggcttcatcaagcagtatggagattgcctgggagacatcgcagcccgcgacctgatctgtgcccagaagtttaatggcctgaccgtgctgcctccactgctgacagatgagatgatcgcccagtacacatctgccctgctggccggcaccatcacaagcggatggaccttcggcgcaggagccgccctgcagatcccttttgccatgcagatggcctataggttcaacggcatcggcgtgacccagaatgtgctgtacgagaaccagaagctgatcgccaatcagtttaacagcgccatcggcaagatccaggactctctgtcctctacagccagcgccctgggcaagctgcaggatgtggtgaatcagaacgcccaggccctgaataccctggtgaagcagctgagctccaacttcggcgccatctctagcgtgctgaatgacatcctgagccggctggacccccctgaggcagaggtgcagatcgacaggctgatcacaggccgcctgcagagcctgcagacctacgtgacacagcagctgatcagggcagcagagatcagagcctccgccaatctggccgccaccaagatgagcgagtgcgtgctgggacagtccaagagggtggacttttgtggcaagggctatcacctgatgtctttcccacagagcgcccctcacggcgtggtgtttctgcacgtgacctacgtgccagcccaggagaagaacttcaccacagcaccagccatctgccacgatggaaaggcacactttcctagggagggcgtgttcgtgtctaacggcacccactggtttgtgacacagcgcaatttctacgagccacagatcatcaccacagacaatacattcgtgagcggcaactgtgatgtggtgatcggcatcgtgaacaataccgtgtatgatccactgcagcccgagctggactcctttaaggaggagctggataagtacttcaagaatcacacctctcccgacgtggatctgggcgacatctccggcatcaatgcctctgtggtgaacatccagaaggagatcgaccggctgaacgaggtggccaagaatctgaacgagagcctgatcgatctgcaggagctgggcaagtatgagcagtacatcaagggctctggcagagagaacctgtatttccagggaggaggaggcagcggatacatccctgaggcaccaagggacggacaggcctacgtgcgcaaggatggcgagtgggtgctgctgtccacctttctgggccatcatcaccaccaccaccaccactga

SEQ ID NO: 1699 - DNA, 3846 bp, Artificial Sequence
  Description of Artificial Sequence: Synthetic polynucleotide
atgggcatcctgccaagcccaggaatgcccgccctgctgtctctggtgagcctgctgtccgtgctgctgatgggatgcgtggcagagacaggcacacagtgcgtgaacctgaccacaaggacccagctgccccctgcctataccaattctttcacacggggcgtgtactatcccgacaaggtgtttagaagctccgtgctgcactccacacaggatctgtttctgcctttcttttctaacgtgacctggttccacgccatccacgtgtccggcaccaatggcacaaagcggttcgacaatcccgtgctgccttttaacgatggcgtgtacttcgccagcaccgagaagtccaacatcatcagaggctggatctttggcaccacactggactctaagacacagagcctgctgatcgtgaacaatgccaccaacgtggtgatcaaggtgtgcgagttccagttttgtaatgatccattcctgggcgtgtactatcacaagaacaataagtcctggatggagtctgagtttcgcgtgtattctagcgccaacaattgcacatttgagtacgtgagccagcccttcctgatggacctggagggcaagcagggcaatttcaagaacctgagggagttcgtgtttaagaatatcgatggctacttcaagatctacagcaagcacaccccaatcaacctggtgcgcgacctgccacagggattctccgccctggagccactggtggatctgcccatcggcatcaacatcacccggtttcagacactgctggccctgcacagatcctacctgacaccaggcgactcctctagcggatggaccgcaggagctgccgcctactatgtgggctatctgcagccccggaccttcctgctgaagtacaacgagaatggcaccatcacagacgcagtggattgcgccctggaccccctgtctgagacaaagtgtacactgaagagctttaccgtggagaagggcatctatcagacaagcaatttcagggtgcagcctaccgagtccatcgtgcgctttcccaatatcacaaacctgtgcccttttggcgaggtgttcaacgccaccagattcgccagcgtgtacgcctggaatcggaagagaatctccaactgcgtggccgactattctgtgctgtacaactccgcctctttcagcacctttaagtgctatggcgtgtctcccacaaagctgaatgatctgtgctttaccaacgtgtacgccgatagcttcgtgatcaggggagacgaagtgagacagatcgcaccaggacagacaggaaagatcgcagactacaattataagctgcctgacgatttcaccggctgcgtgatcgcctggaactccaacaatctggattctaaagtgggcggcaactacaattatctgtacaggctgtttcgcaagtccaatctgaagccattcgagcgggacatctccacagagatctaccaggccggctctaccccctgcaatggcgtggagggctttaactgttatttccctctgcagtcttacggcttccagccaacaaacggcgtgggctatcagccctacagagtggtggtgctgtcctttgagctgctgcacgcaccagcaacagtgtgcggcccaaagaagtctaccaatctggtgaagaacaagtgcgtgaacttcaacttcaacggactgaccggcacaggcgtgctgaccgagagcaataagaagttcctgccttttcagcagttcggcagggacatcgcagataccacagacgccgtgcgcgaccctcagaccctggagatcctggacatccaaccatgcagcttcggcggcgtgtccgtgatcacaccaggcaccaatacatccaaccaggtggccgtgctgtatcaggacgtgaattgtaccgaggtgcccgtggcaatccacgcagatcagctgacccctacatggcgggtgtactctaccggcagcaacgtgttccagacaagagccggatgcctgatcggagcagagcacgtgaacaatagctatgagtgcgacatccctatcggcgccggcatctgtgccagctaccagacccagacaaactccccatctggagcaggctccgtggccagccagtccatcatcgcctataccatgagcctgggcgccgagaacagcgtggcctactccaacaattctatcgccatccctaccaacttcacaatcagcgtgaccacagagatcctgccagtgtctatgaccaagacaagcgtggactgcacaatgtatatctgtggcgatagcaccgagtgctccaacctgctgctgcagtacggctccttttgtacccagctgaatagagccctgacaggcatcgccgtggagcaggataagaacacacaggaggtgttcgcccaggtgaagcagatctacaagaccccacccatcaaggactttggcggcttcaacttcagccagatcctgcctgatccaagcaagccctccaagaggtcttttatcgaggacctgctgttcaacaaggtgaccctggccgatgccggcttcatcaagcagtatggagattgcctgggagacatcgcagcccgcgacctgatctgtgcccagaagtttaatggcctgaccgtgctgcctccactgctgacagatgagatgatcgcccagtacacatctgccctgctggccggcaccatcacaagcggatggaccttcggcgcaggagccgccctgcagatcccttttgccatgcagatggcctataggttcaacggcatcggcgtgacccagaatgtgctgtacgagaaccagaagctgatcgccaatcagtttaacagcgccatcggcaagatccaggactctctgtcctctacagccagcgccctgggcaagctgcaggatgtggtgaatcagaacgcccaggccctgaataccctggtgaagcagctgagctccaacttcggcgccatctctagcgtgctgaatgacatcctgagccggctggacccccctgaggcagaggtgcagatcgacaggctgatcacaggccgcctgcagagcctgcagacctacgtgacacagcagctgatcagggcagcagagatcagagcctccgccaatctggccgccaccaagatgagcgagtgcgtgctgggacagtccaagagggtggacttttgtggcaagggctatcacctgatgtctttcccacagagcgcccctcacggcgtggtgtttctgcacgtgacctacgtgccagcccaggagaagaacttcaccacagcaccagccatctgccacgatggaaaggcacactttcctagggagggcgtgttcgtgtctaacggcacccactggtttgtgacacagcgcaatttctacgagccacagatcatcaccacagacaatacattcgtgagcggcaactgtgatgtggtgatcggcatcgtgaacaataccgtgtatgatccactgcagcccgagctggactcctttaaggaggagctggataagtacttcaagaatcacacctctcccgacgtggatctgggcgacatctccggcatcaatgcctctgtggtgaacatccagaaggagatcgaccggctgaacgaggtggccaagaatctgaacgagagcctgatcgatctgcaggagctgggcaagtatgagcagtacatcaagggctctggcagagagaacctgtatttccagggaggaggaggcagcggatacatccctgaggcaccaagggacggacaggcctacgtgcgcaaggatggcgagtgggtgctgctgtccacctttctgggccatcatcaccaccaccaccaccactga

SEQ ID NO: 1700 - DNA, 3846 bp, Artificial Sequence
  Description of Artificial Sequence: Synthetic polynucleotide
atgggcatcctgccaagcccaggaatgcccgccctgctgtctctggtgagcctgctgtccgtgctgctgatgggatgcgtggcagagacaggcacacagtgcgtgaacctgaccacaaggacccagctgccccctgcctataccaattctttcacacggggcgtgtactatcccgacaagatatttagaagcaacgtgctgcactccacacaggatctgtttctgcctttcttttctaacgtgacctggttccacgccatccacgtgtccggcaccaatggcacaaagcggttcgacaatcccgtgctgccttttaacgatggcgtgtacttcgccagcaccgagaagtccaacatcatcagaggctggatctttggcaccacactggactctaagacacagagcctgctgatcgtgaacaatgccaccaacgtggtgatcaaggtgtgcgagttccagttttgtaatgatccattcctgggcgtgtactatcacaagaacaataagtcctggatggagtctgagtttcgcgtgtattctagcgccaacaattgcacatttgagtacgtgagccagcccttcctgatggacctggagggcaagcagggcaatttcaagaacctgagggagttcgtgtttaagaatatcgatggctacttcaagatctacagcaagcacaccccaatcaacctggtgcgcgacctgccacagggattctccgccctggagccactggtggatctgcccatcggcatcaacatcacccggtttcagacactgctggccctgcacagatcctacctgacaccaggcgactcctctagcggatggaccgcaggagctgccgcctactatgtgggctatctgcagccccggaccttcctgctgaagtacgatgagaatggctatatcacagacgcagtggattgcgccctggaccccctgtctgagacaaagtgtacactgaagagctttaccgtggagaagggcatctatcagacaagcaatttcagggtgcagcctaccgagtccatcgtgcgctttcccaatatcacaaacctgtgcccttttggcgaggtgttcaacgccaccagattcgccagcgtgtacgcctggaatcggaagagaatctccaactgcgtggccgactattctgtgctgtacaactccgcctctttcagcacctttaagtgctatggcgtgtctcccacaaagctgaatgatctgtgctttaccaacgtgtacgccgatagcttcgtgatcaggggagacgaagtgagacagatcgcaccaggacagacaggaaagatcgcagactacaattataagctgcctgacgatttcaccggctgcgtgatcgcctggaactccaacaatctggattctaaagtgggcggcaactacaattatctgtacaggctgtttcgcaagtccaatctgaagccattcgagcgggacatctccacagagatctaccaggccggctctaccccctgcaatggcgtggagggctttaactgttatttccctctgcagtcttacggcttccagccaacaaacggcgtgggctatcagccctacagagtggtggtgctgtcctttgagctgctgcacgcaccagcaacagtgtgcggcccaaagaagtctaccaatctggtgaagaacaagtgcgtgaacttcaacttcaacggactgaccggcacaggcgtgctgaccgagagcaataagaagttcctgccttttcagcagttcggcagggacatcgcagataccacagacgccgtgcgcgaccctcagaccctggagatcctggacatcacaccatgcagcttcggcggcgtgtccgtgatcacaccaggcaccaatacatccaaccaggtggccgtgctgtatcaggacgtgaattgtaccgaggtgcccgtggcaatccacgcagatcagctgacccctacatggcgggtgtactctaccggcagcaacgtgttccagacaagagccggatgcctgatcggagcagagcacgtgaacaatagctatgagtgcgacatccctatcggcgccggcatctgtgccagctaccagacccagacaaactccccatctggagcaggctccgtggccagccagtccatcatcgcctataccatgagcctgggcgccgagaacagcgtggcctactccaacaattctatcgccatccctaccaacttcacaatcagcgtgaccacagagatcctgccagtgtctatgaccaagacaagcgtggactgcacaatgtatatctgtggcgatagcaccgagtgctccaacctgctgctgcagtacggctccttttgtacccagctgaatagagccctgacaggcatcgccgtggagcaggataagaacacacaggaggtgttcgcccaggtgaagcagatctacaagaccccacccatcaaggactttggcggcttcaacttcagccagatcctgcctgatccaagcaagccctccaagaggtcttttatcgaggacctgctgttcaacaaggtgaccctggccgatgccggcttcatcaagcagtatggagattgcctgggagacatcgcagcccgcgacctgatctgtgcccagaagtttaatggcctgaccgtgctgcctccactgctgacagatgagatgatcgcccagtacacatctgccctgctggccggcaccatcacaagcggatggaccttcggcgcaggagccgccctgcagatcccttttgccatgcagatggcctataggttcaacggcatcggcgtgacccagaatgtgctgtacgagaaccagaagctgatcgccaatcagtttaacagcgccatcggcaagatccaggactctctgtcctctacagccagcgccctgggcaagctgcaggatgtggtgaatcagaacgcccaggccctgaataccctggtgaagcagctgagctccaacttcggcgccatctctagcgtgctgaatgacatcctgagccggctggacccccctgaggcagaggtgcagatcgacaggctgatcacaggccgcctgcagagcctgcagacctacgtgacacagcagctgatcagggcagcagagatcagagcctccgccaatctggccgccaccaagatgagcgagtgcgtgctgggacagtccaagagggtggacttttgtggcaagggctatcacctgatgtctttcccacagagcgcccctcacggcgtggtgtttctgcacgtgacctacgtgccagcccaggagaagaacttcaccacagcaccagccatctgccacgatggaaaggcacactttcctagggagggcgtgttcgtgtctaacggcacccactggtttgtgacacagcgcaatttctacgagccacagatcatcaccacagacaatacattcgtgagcggcaactgtgatgtggtgatcggcatcgtgaacaataccgtgtatgatccactgcagcccgagctggactcctttaaggaggagctggataagtacttcaagaatcacacctctcccgacgtggatctgggcgacatctccggcatcaatgcctctgtggtgaacatccagaaggagatcgaccggctgaacgaggtggccaagaatctgaacgagagcctgatcgatctgcaggagctgggcaagtatgagcagtacatcaagggctctggcagagagaacctgtatttccagggaggaggaggcagcggatacatccctgaggcaccaagggacggacaggcctacgtgcgcaaggatggcgagtgggtgctgctgtccacctttctgggccatcatcaccaccaccaccaccactga

SEQ ID NO: 1701 - DNA, 3846 bp, Artificial Sequence
  Description of Artificial Sequence: Synthetic polynucleotide
atgggcatcctgccaagcccaggaatgcccgccctgctgtctctggtgagcctgctgtccgtgctgctgatgggatgcgtggcagagacaggcacacagtgcgtgaacctgaccacaaggacccagctgccccctgcctataccaattctttcacacggggcgtgtactatcccgacaaggtgtttagaagctccgtgctgcactccacacaggatctgtttctgcctttcttttctaacgtgacctggttccacgccatccacgtgtccggcaccaatggcacaaagcggttcgacaatcccgtgctgccttttaacgatggcgtgtacttcgccagcaccgagaagtccaacatcatcagaggctggatctttggcaccacactggactctaagacacagagcctgctgatcgtgaacaatgccaccaacgtggtgatcaaggtgtgcgagttccagttttgtaatgatccattcctgggcgtgtactatcacaagaacaataagtcctggatggagtctgagtttcgcgtgtattctagcgccaacaattgcacatttgagtacgtgagccagcccttcctgatggacctggagggcaagcagggcaatttcaagaacctgagggagttcgtgtttaagaatatcgatggctacttcaagatctacagcaagcacaccccaatcaacctggtgcgcgacctgccacagggattctccgccctggagccactggtggatctgcccatcggcatcaacatcacccggtttcagacactgctggccctgcacagatcctacctgacaccaggcgactcctctagcggatggaccgcaggagctgccgcctactatgtgggctatctgcagccccggaccttcctgctgaagtttaacgagaatggcaccatcacagacgcagtggattgcgccctggaccccctgtctgagacaaagtgtacactgaagagctttaccgtggagaagggcatctatcagacaagcaatttcagggtgcagcctaccgagtccatcgtgcgctttcccaatatcacaaacctgtgcccttttggcgaggtgttcaacgccaccagattcgccagcgtgtacgcctggaatcggaagagaatctccaactgcgtggccgactattctgtgctgtacaactccgcctctttcagcacctttaagtgctatggcgtgtctcccacaaagctgaatgatctgtgctttaccaacgtgtacgccgatagcttcgtgatcaggggagacgaagtgagacagatcgcaccaggacagacaggaaagatcgcagactacaattataagctgcctgacgatttcaccggctgcgtgatcgcctggaactccaacaatctggattctaaagtgggcggcaactacaattatctgtacaggctgtttcgcaagtccaatctgaagccattcgagcgggacatctccacagagatctaccaggccggctctaccccctgcaatggcgtggagggctttaactgttatttccctctgcagtcttacggcttccagccaacaaacggcgtgggctatcagccctacagagtggtggtgctgtcctttgagctgctgcacgcaccagcaacagtgtgcggcccaaagaagtctaccaatctggtgaagaacaagtgcgtgaacttcaacttcaacggactgaccggcacaggcgtgctgaccgagagcaataagaagttcctgccttttcagcagttcggcagggacatcgcagataccacagacgccgtgcgcgaccctcagaccctggagatcctggacatcacaccatgcagcttcggcggcgtgtccgtgatcacaccaggcaccaatacatccaaccaggtggccgtgctgtatcaggacgtgaattgtaccgaggtgcccgtggcaatccacgcagatcagctgacccctacatggcgggtgtactctaccggcagcaacgtgttccagacaagagccggatgcctgatcggagcagagcacgtgaacaatagctatgagtgcgacatccctatcggcgccggcatctgtgccagctaccagacccagacaaactccccatctggagcaggctccgtggccagccagtccatcatcgcctataccatgagcctgggcgccgagaacagcgtggcctactccaacaattctatcgccatccctaccaacttcacaatcagcgtgaccacagagatcctgccagtgtctatgaccaagacaagcgtggactgcacaatgtatatctgtggcgatagcaccgagtgctccaacctgctgctgcagtacggctccttttgtacccagctgaatagagccctgacaggcatcgccgtggagcaggataagaacacacaggaggtgttcgcccaggtgaagcagatctacaagaccccacccatcaaggactttggcggcttcaacttcagccagatcctgcctgatccaagcaagccctccaagaggtcttttatcgaggacctgctgttcaacaaggtgaccctggccgatgccggcttcatcaagcagtatggagattgcctgggagacatcgcagcccgcgacctgatctgtgcccagaagtttaatggcctgaccgtgctgcctccactgctgacagatgagatgatcgcccagtacacatctgccctgctggccggcaccatcacaagcggatggaccttcggcgcaggagccgccctgcagatcccttttgccatgcagatggcctataggttcaacggcatcggcgtgacccagaatgtgctgtacgagaaccagaagctgatcgccaatcagtttaacagcgccatcggcaagatccaggactctctgtcctctacagccagcgccctgggcaagctgcaggatgtggtgaatcagaacgcccaggccctgaataccctggtgaagcagctgagctccaacttcggcgccatctctagcgtgctgaatgacatcctgagccggctggacccccctgaggcagaggtgcagatcgacaggctgatcacaggccgcctgcagagcctgcagacctacgtgacacagcagctgatcagggcagcagagatcagagcctccgccaatctggccgccaccaagatgagcgagtgcgtgctgggacagtccaagagggtggacttttgtggcaagggctatcacctgatgtctttcccacagagcgcccctcacggcgtggtgtttctgcacgtgacctacgtgccagcccaggagaagaacttcaccacagcaccagccatctgccacgatggaaaggcacactttcctagggagggcgtgttcgtgtctaacggcacccactggtttgtgacacagcgcaatttctacgagccacagatcatcaccacagacaatacattcgtgagcggcaactgtgatgtggtgatcggcatcgtgaacaataccgtgtatgatccactgcagcccgagctggactcctttaaggaggagctggataagtacttcaagaatcacacctctcccgacgtggatctgggcgacatctccggcatcaatgcctctgtggtgaacatccagaaggagatcgaccggctgaacgaggtggccaagaatctgaacgagagcctgatcgatctgcaggagctgggcaagtatgagcagtacatcaagggctctggcagagagaacctgtatttccagggaggaggaggcagcggatacatccctgaggcaccaagggacggacaggcctacgtgcgcaaggatggcgagtgggtgctgctgtccacctttctgggccatcatcaccaccaccaccaccactga

SEQ ID NO: 1702 - DNA, 3846 bp, Artificial Sequence
  Description of Artificial Sequence: Synthetic polynucleotide
atgggcatcctgccaagcccaggaatgcccgccctgctgtctctggtgagcctgctgtccgtgctgctgatgggatgcgtggcagagacaggcacacagtgcgtgaacctgaccacaaggacccagctgccccctgcctataccaattctttcacacggggcgtgtactatcccgacaaggtgtttagaagctccgtgctgcactccacacaggatctgtttctgcctttcttttctaacgtgacctggttccacgccatccacgtgtccggcaccaatggcacaaagcggttcgacaatcccgtgctgccttttaacgatggcgtgtacttcgccagcaccgagaagtccaacatcatcagaggctggatctttggcaccacactggactctaagacacagagcctgctgatcgtgaacaatgccaccaacgtggtgatcaaggtgtgcgagttccagttttgtaatgatccattcctgggcgtgtactatcacaagaacaataagtcctggatggagtctgagtttcgcgtgtattctagcgccaacaattgcacatttgagtacgtgagccagcccttcctgatggacctggagggcaagcagggcaatttcaagaacctgagggagttcgtgtttaagaatatcgatggctacttcaagatctacagcaagcacaccccaatcaacctggtgcgcgacctgccacagggattctccgccctggagccactggtggatctgcccatcggcatcaacatcacccggtttcagacactgctggccctgcacagatcctacctgacaccaggcgactcctctagcggatggaccgcaggagctgccgcctactatgtgggctatctgcagccccggaccttcctgctgaagtacaacgagaatggcaccatcacagacgcagtggattgcgccctggaccccctgtctgagacaaagtgtacactgaagagctttaccgtggagaagggcatctatcagacaagcaatttcagggtgcagcctaccgagtccatcgtgcgctttcccaatatcacaaacctgtgcccttttggcgaggtgttcaacgccaccagattcgccagcgtgtacgcctggaatcggaagagaatctccaactgcgtggccgactattctgtgctgtacaactccgcctctttcagcacctttaagtgctatggcgtgtctcccacaaagctgaatgatctgtgctttaccaacgtgtacgccgatagcttcgtgatcaggggagacgaagtgagacagatcgcaccaggacagacaggaaagatcgcagactacaattataagctgcctgacgatttcaccggctgcgtgatcgcctggaactccaacaatctggattctaaagtgggcggcaactacaattatctgtacaggctgtttcgcaagtccaatctgaagccattcgagcgggacatctccacagagatctaccaggccggctctaccccctgcaatggcgtggagggctttaactgttatttccctctgcagtcttacggcttccagccaacaaacggcgtgggctatcagccctacagagtggtggtgctgtcctttgagctgctgcacgcaccagcaacagtgtgcggcccaaagaagtctaccaatctggtgaagaacaagtgcgtgaacttcaacttcaacggactgaccggcacaggcgtgctgaccgagagcaataagaagttcctgccttttcagcagttcggcagggacatcgcagataccacagacgccgtgcgcgaccctcagaccctggagatcctggacatcacaccatgcagcttcggcggcgtgtccgtgatcacaccaggcaccaatacatccaaccaggtggccgtgctgtatcaggacgtgaattgtaccgaggtgcccgtggcaatccacgcagatcagctgacccctacatggcgggtgtactctaccggcagcaacgtgttccagacaagagccggatgcctgatcggagcagagcacgtgaacaatagctatgagtgcgacatccctatcggcgccggcatctgtgccagctaccagacccagacaaactccccatctggagcaggctccgtggccagccagtccatcatcgcctataccatgagcctgggcgccgagaacagcgtggcctactccaacaattctatcgccatccctaccaacttcacaatcagcgtgaccacagagatcctgccagtgtctatgaccaagacaagcgtggactgcacaatgtatatctgtggcgatagcaccgagtgctccaacctgctgctgcagtacggctccttttgtacccagctgaatagagccctgacaggcatcgccgtggagcaggataagaacacacaggaggtgttcgcccaggtgaagcagatctacaagaccccacccatcaaggactttggcggcttcaacttcagccagatcctgcctgatccaagcaagccctccaagaggtcttttatcgaggacctgctgttcaacaaggtgaccctggccgatgccggcttcatcaagcagtatggagattgcctgggagacatcaatgcccgcgacctgatctgtgcccagaagtttaatggcctgaccgtgctgcctccactgctgacagatgagatgatcgcccagtacacatctgccctgctggccggcaccatcacaagcggatggaccttcggcgcaggagccgccctgcagatcccttttgccatgcagatggcctataggttcaacggcatcggcgtgacccagaatgtgctgtacgagaaccagaagctgatcgccaatcagtttaacagcgccatcggcaagatccaggactctctgtcctctacagccagcgccctgggcaagctgcaggatgtggtgaatcagaacgcccaggccctgaataccctggtgaagcagctgagctccaacttcggcgccatctctagcgtgctgaatgacatcctgagccggctggacccccctgaggcagaggtgcagatcgacaggctgatcacaggccgcctgcagagcctgcagacctacgtgacacagcagctgatcagggcagcagagatcagagcctccgccaatctggccgccaccaagatgagcgagtgcgtgctgggacagtccaagagggtggacttttgtggcaagggctatcacctgatgtctttcccacagagcgcccctcacggcgtggtgtttctgcacgtgacctacgtgccagcccaggagaagaacttcaccacagcaccagccatctgccacgatggaaaggcacactttcctagggagggcgtgttcgtgtctaacggcacccactggtttgtgacacagcgcaatttctacgagccacagatcatcaccacagacaatacattcgtgagcggcaactgtgatgtggtgatcggcatcgtgaacaataccgtgtatgatccactgcagcccgagctggactcctttaaggaggagctggataagtacttcaagaatcacacctctcccgacgtggatctgggcgacatctccggcatcaatgcctctgtggtgaacatccagaaggagatcgaccggctgaacgaggtggccaagaatctgaacgagagcctgatcgatctgcaggagctgggcaagtatgagcagtacatcaagggctctggcagagagaacctgtatttccagggaggaggaggcagcggatacatccctgaggcaccaagggacggacaggcctacgtgcgcaaggatggcgagtgggtgctgctgtccacctttctgggccatcatcaccaccaccaccaccactga

SEQ ID NO: 1703 - DNA, 3846 bp, Artificial Sequence
  Description of Artificial Sequence: Synthetic polynucleotide
atgggcatcctgccaagcccaggaatgcccgccctgctgtctctggtgagcctgctgtccgtgctgctgatgggatgcgtggcagagacaggcacacagtgcgtgaacctgaccacaaggacccagctgccccctgcctataccaattctttcacacggggcgtgtactatcccgacaaggtgtttagaagctccgtgctgcactccacacaggatctgtttctgcctttcttttctaacgtgacctggttccacgccatccacgtgtccggcaccaatggcacaaagcggttcgacaatcccgtgctgccttttaacgatggcgtgtacttcgccagcaccgagaagtccaacatcatcagaggctggatctttggcaccacactggactctaagacacagagcctgctgatcgtgaacaatgccaccaacgtggtgatcaaggtgtgcgagttccagttttgtaatgatccattcctgggcgtgtactatcacaagaacaataagtcctggatggagtctgagtttcgcgtgtattctagcgccaacaattgcacatttgagtactcgagccagcccttcctgatggacctggagggcaagcagggcaatttcaagaacctgagggagttcgtgtttaagaatatcgatggctacttcaagatctacagcaagcacaccccaatcaacctggtgcgcgacctgccacagggattctccgccctggagccactggtggatctgcccatcggcatcaacatcacccggtttcagacactgctggccctgcacagatcctacctgacaccaggcgactcctctagcggatggaccgcaggagctgccgcctactatgtgggctatctgcagccccggaccttcctgctgaagtacaacgagaatggcaccatcacagacgcagtggattgcgccctggaccccctgtctgagacaaagtgtacactgaagagctttaccgtggagaagggcatctatcagacaagcaatttcagggtgcagcctaccgagtccatcgtgcgctttcccaatatcacaaacctgtgcccttttggcgaggtgttcaacgccaccagattcgccagcgtgtacgcctggaatcggaagagaatctccaactgcgtggccgactattctgtgctgtacaactccgcctctttcagcacctttaagtgctatggcgtgtctcccacaaagctgaatgatctgtgctttaccaacgtgtacgccgatagcttcgtgatcaggggagacgaagtgagacagatcgcaccaggacagacaggaaagatcgcagactacaattataagctgcctgacgatttcaccggctgcgtgatcgcctggaactccaacaatctggattctaaagtgggcggcaactacaattatctgtacaggctgtttcgcaagtccaatctgaagccattcgagcgggacatctccacagagatctaccaggccggctctaccccctgcaatggcgtggagggctttaactgttatttccctctgcagtcttacggcttccagccaacaaacggcgtgggctatcagccctacagagtggtggtgctgtcctttgagctgctgcacgcaccagcaacagtgtgcggcccaaagaagtctaccaatctggtgaagaacaagtgcgtgaacttcaacttcaacggactgaccggcacaggcgtgctgaccgagagcaataagaagttcctgccttttcagcagttcggcagggacatcgcagataccacagacgccgtgcgcgaccctcagaccctggagatcctggacatcacaccatgcagcttcggcggcgtgtccgtgatcacaccaggcaccaatacatccaaccaggtggccgtgctgtatcaggacgtgaattgtaccgaggtgcccgtggcaatccacgcagatcagctgacccctacatggcgggtgtactctaccggcagcaacgtgttccagacaagagccggatgcctgatcggagcagagcacgtgaacaatagctatgagtgcgacatccctatcggcgccggcatctgtgccagctaccagacccagacaaactccccatctggagcaggctccgtggccagccagtccatcatcgcctataccatgagcctgggcgccgagaacagcgtggcctactccaacaattctatcgccatccctaccaacttcacaatcagcgtgaccacagagatcctgccagtgtctatgaccaagacaagcgtggactgcacaatgtatatctgtggcgatagcaccgagtgctccaacctgctgctgcagtacggctccttttgtacccagctgaatagagccctgacaggcatcgccgtggagcaggataagaacacacaggaggtgttcgcccaggtgaagcagatctacaagaccccacccatcaaggactttggcggcttcaacttcagccagatcctgcctgatccaagcaagccctccaagaggtcttttatcgaggacctgctgttcaacaaggtgaccctggccgatgccggcttcatcaagcagtatggagattgcctgggagacatcgcagcccgcgacctgatctgtgcccagaagtttaatggcctgaccgtgctgcctccactgctgacagatgagatgatcgcccagtacacatctgccctgctggccggcaccatcacaagcggatggaccttcggcgcaggagccgccctgcagatcccttttgccatgcagatggcctataggttcaacggcatcggcgtgacccagaatgtgctgtacgagaaccagaagctgatcgccaatcagtttaacagcgccatcggcaagatccaggactctctgtcctctacagccagcgccctgggcaagctgcaggatgtggtgaatcagaacgcccaggccctgaataccctggtgaagcagctgagctccaacttcggcgccatctctagcgtgctgaatgacatcctgagccggctggacccccctgaggcagaggtgcagatcgacaggctgatcacaggccgcctgcagagcctgcagacctacgtgacacagcagctgatcagggcagcagagatcagagcctccgccaatctggccgccaccaagatgagcgagtgcgtgctgggacagtccaagagggtggacttttgtggcaagggctatcacctgatgtctttcccacagagcgcccctcacggcgtggtgtttctgcacgtgacctacgtgccagcccaggagaagaacttcaccacagcaccagccatctgccacgatggaaaggcacactttcctagggagggcgtgttcgtgtctaacggcacccactggtttgtgacacagcgcaatttctacgagccacagatcatcaccacagacaatacattcgtgagcggcaactgtgatgtggtgatcggcatcgtgaacaataccgtgtatgatccactgcagcccgagctggactcctttaaggaggagctggataagtacttcaagaatcacacctctcccgacgtggatctgggcgacatctccggcatcaatgcctctgtggtgaacatccagaaggagatcgaccggctgaacgaggtggccaagaatctgaacgagagcctgatcgatctgcaggagctgggcaagtatgagcagtacatcaagggctctggcagagagaacctgtatttccagggaggaggaggcagcggatacatccctgaggcaccaagggacggacaggcctacgtgcgcaaggatggcgagtgggtgctgctgtccacctttctgggccatcatcaccaccaccaccaccactga

SEQ ID NO: 1704 - DNA, 3846 bp, Artificial Sequence
  Description of Artificial Sequence: Synthetic polynucleotide
atgggcatcctgccaagcccaggaatgcccgccctgctgtctctggtgagcctgctgtccgtgctgctgatgggatgcgtggcagagacaggcacacagtgcgtgaacctgaccacaaggacccagctgccccctgcctataccaattctttcacacggggcgtgtactatcccgacaaggtgtttagaagctccgtgctgcactccacacaggatctgtttctgcctttcttttctaacgtgacctggttccacgccatccacgtgtccggcaccaatggcacaaagcggttcgacaatcccgtgctgccttttaacgatggcgtgtacttcgccagcaccgagaagtccaacatcatcagaggctggatctttggcaccacactggactctaagacacagagcctgctgatcgtgaacaatgccaccaacgtggtgatcaaggtgtgcgagttccagttttgtaatgatccattcctgggcgtgtactatcacaagaacaataagtcctggatggagtctgagtttcgcgtgtattctagcgccaacaattgcacatttgagtacgtgagccagcccttcctgatggacctggagggcaagcagggcaatttcaagaacctgagggagttcgtgtttaagaatatcgatggctacttcaagatctacagcaagcacaccccaatcaacctggtgcgcgacctgccacagggattctccgccctggagccactggtggatctgcccatcggcatcaacatcacccggtttcagacactgctggccctgcacagatcctacctgacaccaggcgactcctctagcggatggaccgcaggagctgccgcctactatgtgggctatctgcagccccggaccttcctgctgaagtacaacgagaatggcaccatcacagacgcagtggattgcgccctggaccccctgtctgagacaaagtgtacactgaagagctttaccgtggagaagggcatctatcagacaagcaatttcagggtgcagcctaccgagtccatcgtgcgctttcccaatatcacaaacctgtgcccttttggcgaggtgttcaacgccaccagattcgccagcgtgtacgcctggaatcggaagagaatctccaactgcgtggccgactattctgtgctgtacaactccgcctctttcagcacctttaagtgctatggcgtgtctcccacaaagctgaatgatctgtgctttaccaacgtgtacgccgatagcttcgtgatcaggggagacgaagtgagacagatcgcaccaggacagacaggaaagatcgcagactacaattataagctgcctgacgatttcaccggctgcgtgatcgcctggaactccaacaatctggattctaaagtgggcggcaactacaattatctgtacaggctgtttcgcaagtccaatctgaagccattcgagcgggacatctccacagagatctaccaggccggctctaccccctgcaatggcgtggagggctttaactgttatttccctctgcagtcttacggcttccagccaacaaacggcgtgggctatcagccctacagagtggtggtgctgtcctttgagctgctgcacgcaccagcaacagtgtgcggcccaaagaagtctaccaatctggtgaagaacaagtgcgtgaacttcaacttcaacggactgaccggcacaggcgtgctgaccgagagcaataagaagttcctgccttttcagcagttcggcagggacatcgcagataccacagacgccgtgcgcgaccctcagaccctggagatcctggacatcacaccatgcagcttcggcggcgtgtccgtgatcacaccaggcaccaatacatccaaccaggtggccgtgctgtatcaggacgtgaattgtaccgaggtgcccgtggcaatccacgcagatcagctgacccctacatggcgggtgtactctaccggcagcaacgtgttccagacaagagccggatgcctgatcggagcagagcacgtgaacaatagctatgagtgcgacatccctatcggcgccggcatctgtgccagctaccagacccagacaaactccccatctggagcaggctccgtggccagccagtccatcatcgcctataccatgagcctgggcgccgagaacagcgtggcctactccaacaataatatcgccatccctaccaacttcacaatcagcgtgaccacagagatcctgccagtgtctatgaccaagacaagcgtggactgcacaatgtatatctgtggcgatagcaccgagtgctccaacctgctgctgcagtacggctccttttgtacccagctgaatagagccctgacaggcatcgccgtggagcaggataagaacacacaggaggtgttcgcccaggtgaagcagatctacaagaccccacccatcaaggactttggcggcttcaacttcagccagatcctgcctgatccaagcaagccctccaagaggtcttttatcgaggacctgctgttcaacaaggtgaccctggccgatgccggcttcatcaagcagtatggagattgcctgggagacatcgcagcccgcgacctgatctgtgcccagaagtttaatggcctgaccgtgctgcctccactgctgacagatgagatgatcgcccagtacacatctgccctgctggccggcaccatcacaagcggatggaccttcggcgcaggagccgccctgcagatcccttttgccatgcagatggcctataggttcaacggcatcggcgtgacccagaatgtgctgtacgagaaccagaagctgatcgccaatcagtttaacagcgccatcggcaagatccaggactctctgtcctctacagccagcgccctgggcaagctgcaggatgtggtgaatcagaacgcccaggccctgaataccctggtgaagcagctgagctccaacttcggcgccatctctagcgtgctgaatgacatcctgagccggctggacccccctgaggcagaggtgcagatcgacaggctgatcacaggccgcctgcagagcctgcagacctacgtgacacagcagctgatcagggcagcagagatcagagcctccgccaatctggccgccaccaagatgagcgagtgcgtgctgggacagtccaagagggtggacttttgtggcaagggctatcacctgatgtctttcccacagagcgcccctcacggcgtggtgtttctgcacgtgacctacgtgccagcccaggagaagaacttcaccacagcaccagccatctgccacgatggaaaggcacactttcctagggagggcgtgttcgtgtctaacggcacccactggtttgtgacacagcgcaatttctacgagccacagatcatcaccacagacaatacattcgtgagcggcaactgtgatgtggtgatcggcatcgtgaacaataccgtgtatgatccactgcagcccgagctggactcctttaaggaggagctggataagtacttcaagaatcacacctctcccgacgtggatctgggcgacatctccggcatcaatgcctctgtggtgaacatccagaaggagatcgaccggctgaacgaggtggccaagaatctgaacgagagcctgatcgatctgcaggagctgggcaagtatgagcagtacatcaagggctctggcagagagaacctgtatttccagggaggaggaggcagcggatacatccctgaggcaccaagggacggacaggcctacgtgcgcaaggatggcgagtgggtgctgctgtccacctttctgggccatcatcaccaccaccaccaccactga

SEQ ID NO: 1705 - DNA, 3846 bp, Artificial Sequence
  Description of Artificial Sequence: Synthetic polynucleotide
atgggcatcctgccaagcccaggaatgcccgccctgctgtctctggtgagcctgctgtccgtgctgctgatgggatgcgtggcagagacaggcacacagtgcgtgaacctgaccacaaggacccagctgccccctgcctataccaattctttcacacggggcgtgtactatcccgacaaggtgtttagaagctccgtgctgcactccacacaggatctgtttctgcctttcttttctaacgtgacctggttccacgccatccacgtgtccggcaccaatggcacaaagcggttcgacaatcccgtgctgccttttaacgatggcgtgtacttcgccagcaccgagaagtccaacatcatcagaggctggatctttggcaccacactggactctaagacacagagcctgctgatcgtgaacaatgccaccaacgtggtgatcaaggtgtgcgagttccagttttgtaatgatccattcctgggcgtgtactatcacaagaacaataagtcctggatggagtctgagtttcgcgtgtattctagcgccaacaattgcacatttgagtacgtgagccagcccttcctgatggacctggagggcaagcagggcaatttcaagaacctgagggagttcgtgtttaagaatatcgatggctacttcaagatctacagcaagcacaccccaatcaacctggtgcgcgacctgccacagggattctccgccctggagccactggtggatctgcccatcggcatcaacatcacccggtttcagacactgctggccctgcacagatcctacctgacaccaggcgactcctctagcggatggaccgcaggagctgccgcctactatgtgggctatctgcagccccggaccttcctgctgaagtacaacgagaatggcaccatcacagacgcagtggattgcgccctggaccccctgtctgagacaaagtgtacactgaagagctttaccgtggagaagggcatctatcagacaagcaatttcagggtgcagcctaccgagtccatcgtgcgctttcccaatatcacaaacctgtgcccttttggcgaggtgttcaacgccaccagattcgccagcgtgtacgcctggaatcggaagagaatctccaactgcgtggccgactattctgtgctgtacaactccgcctctttcagcacctttaagtgctatggcgtgtctcccacaaagctgaatgatctgtgctttaccaacgtgtacgccgatagcttcgtgatcaggggagacgaagtgagacagatcgcaccaggacagacaggaaagatcgcagactacaattataagctgcctgacgatttcaccggctgcgtgatcgcctggaactccaacaatctggattctaaagtgggcggcaactacaattatctgtacaggctgtttcgcaagtccaatctgaagccattcgagcgggacatctccacagagatctaccaggccggctctaccccctgcaatggcgtggagggctttaactgttatttccctctgcagtcttacggcttccagccaacaaacggcgtgggctatcagccctacagagtggtggtgctgtcctttgagctgctgcacgcaccagcaacagtgtgcggcccaaagaagtctaccaatctggtgaagaacaagtgcgtgaacttcaacttcaacggactgaccggcacaggcgtgctgaccgagagcaataagaagttcctgccttttcagcagttcggcagggacatcgcagataccacagacgccgtgcgcgaccctcagaccctggagatcctggacatcacaccatgcagcttcggcggcgtgtccgtgatcacaccaggcaccaatacatccaaccaggtggccgtgctgtatcaggacgtgaattgtaccgaggtgcccgtggcaatccacgcagatcagctgacccctacatggcgggtgtactctaccggcagcaacgtgttccagacaagagccggatgcctgatcggagcagagcacgtgaacaatagctatgagtgcgacatccctatcggcgccggcatctgtgccagctaccagacccagacaaactccccatctggagcaggctccgtggccagccagtccatcatcgcctataccatgagcctgggcgccgagaacagcgtggcctactccaacaattctatcgccatccctaccaacttcacaatcagcgtgaccacagagatcctgccagtgtctatgaccaagacaagcgtggactgcacaatgtatatctgtggcgatagcaccgagtgctccaacctgctgctgcagtacggctccttttgtacccagctgaatagagccctgcatggcatcgccgtggagcaggataagaacacacaggaggtgttcgcccaggtgaagcagatctacaagaccccacccatcaaggactttggcggcttcaacttcagccagatcctgcctgatccaagcaagccctccaagaggtcttttatcgaggacctgctgttcaacaaggtgaccctggccgatgccggcttcatcaagcagtatggagattgcctgggagacatcgcagcccgcgacctgatctgtgcccagaagtttaatggcctgaccgtgctgcctccactgctgacagatgagatgatcgcccagtacacatctgccctgctggccggcaccatcacaagcggatggaccttcggcgcaggagccgccctgcagatcccttttgccatgcagatggcctataggttcaacggcatcggcgtgacccagaatgtgctgtacgagaaccagaagctgatcgccaatcagtttaacagcgccatcggcaagatccaggactctctgtcctctacagccagcgccctgggcaagctgcaggatgtggtgaatcagaacgcccaggccctgaataccctggtgaagcagctgagctccaacttcggcgccatctctagcgtgctgaatgacatcctgagccggctggacccccctgaggcagaggtgcagatcgacaggctgatcacaggccgcctgcagagcctgcagacctacgtgacacagcagctgatcagggcagcagagatcagagcctccgccaatctggccgccaccaagatgagcgagtgcgtgctgggacagtccaagagggtggacttttgtggcaagggctatcacctgatgtctttcccacagagcgcccctcacggcgtggtgtttctgcacgtgacctacgtgccagcccaggagaagaacttcaccacagcaccagccatctgccacgatggaaaggcacactttcctagggagggcgtgttcgtgtctaacggcacccactggtttgtgacacagcgcaatttctacgagccacagatcatcaccacagacaatacattcgtgagcggcaactgtgatgtggtgatcggcatcgtgaacaataccgtgtatgatccactgcagcccgagctggactcctttaaggaggagctggataagtacttcaagaatcacacctctcccgacgtggatctgggcgacatctccggcatcaatgcctctgtggtgaacatccagaaggagatcgaccggctgaacgaggtggccaagaatctgaacgagagcctgatcgatctgcaggagctgggcaagtatgagcagtacatcaagggctctggcagagagaacctgtatttccagggaggaggaggcagcggatacatccctgaggcaccaagggacggacaggcctacgtgcgcaaggatggcgagtgggtgctgctgtccacctttctgggccatcatcaccaccaccaccaccactga

SEQ ID NO: 1706 - DNA, 3846 bp, Artificial Sequence
  Description of Artificial Sequence: Synthetic polynucleotide
atgggcatcctgccaagcccaggaatgcccgccctgctgtctctggtgagcctgctgtccgtgctgctgatgggatgcgtggcagagacaggcacacagtgcgtgaacctgaccacaaggacccagctgccccctgcctataccaattctttcacacggggcgtgtactatcccgacaaggtgtttagaagctccgtgctgcactccacacaggatctgtttctgcctttcttttctaacgtgacctggttccacgccatccacgtgtccggcaccaatggcacaaagcggttcgacaatcccgtgctgccttttaacgatggcgtgtacttcgccagcaccgagaagtccaacatcatcagaggctggatctttggcaccacactggactctaagacacagagcctgctgatcgtgaacaatgccaccaacgtggtgatcaaggtgtgcgagttccagttttgtaatgatccattcctgggcgtgtactatcacaagaacaataagtcctggatggagtctgagtttcgcgtgtattctagcgccaacaattgcacatttgagtacgtgagccagcccttcctgatggacctggagggcaagcagggcaatttcaagaacctgagggagttcgtgtttaagaatatcgatggctacttcaagatctacagcaagcacaccccaatcaacctggtgcgcgacctgccacagggattctccgccctggagccactggtggatctgcccatcggcatcaacatcacccggtttcagacactgctggccctgcacagatcctacctgacaccaggcgactcctctagcggatggaccgcaggagctgccgcctactatgtgggctatctgcagccccggaccttcctgctgaagtacaacgagaatggcaccatcacagacgcagtggattgcgccctggaccccctgtctgagacaaagtgtacactgaagagctttaccgtggagaagggcatctatcagacaagcaatttcagggtgcagcctaccgagtccatcgtgcgctttcccaatatcacaaacctgtgcccttttggcgaggtgttcaacgccaccagattcgccagcgtgtacgcctggaatcggaagagaatctccaactgcgtggccgactattctgtgctgtacaactccgcctctttcagcacctttaagtgctatggcgtgtctcccacaaagctgaatgatctgtgctttaccaacgtgtacgccgatagcttcgtgatcaggggagacgaagtgagacagatcgcaccaggacagacaggaaagatcgcagactacaattataagctgcctgacgatttcaccggctgcgtgatcgcctggaactccaacaatctggattctaaagtgggcggcaactacaattatctgtacaggctgtttcgcaagtccaatctgaagccattcgagcgggacatctccacagagatctaccaggccggctctaccccctgcaatggcgtggagggctttaactgttatttccctctgcagtcttacggcttccagccaacaaacggcgtgggctatcagccctacagagtggtggtgctgtcctttgagctgctgcacgcaccagcaacagtgtgcggcccaaagaagtctaccaatctggtgaagaacaagtgcgtgaacttcaacttcaacggactgaccggcacaggcgtgctgaccgagagcaataagaagttcctgccttttcagcagttcggcagggacatcgcagataccacagacgccgtgcgcgaccctcagaccctggagatcctggacatcacaccatgcagcttcggcggcgtgtccgtgatcacaccaggcaccaatacatccaaccaggtggccgtgctgtatcaggacgtgaattgtaccgaggtgcccgtggcaatccacgcagatcagctgacccctacatggcgggtgtactctaccggcagcaacgtgttccagacaagagccggatgcctgatcggagcagagcacgtgaacaatagctatgagtgcgacatccctatcggcgccggcatctgtgccagctaccagacccagacaaactccccatctggagcaggctccgtggccagccagtccatcatcgcctataccatgagcctgggcgccgagaacagcgtggcctactccaacaattctatcgccatccctaccaacttcacaatcagcgtgaccacagagatcctgccagtgtctatgaccaagacaagcgtggactgcacaatgtatatctgtggcgatagcaccgagtgctccaacctgctgctgcagtacggctccttttgtacccagctgaatagagccctgacaggcatcgccgtggagcaggataagaacacacaggaggtgttcgcccaggtgaagcagatctacaagaccccacccatcaaggactttggcggcttcaacttcagccagatcctgcctgatccaagcaagccctccaagaggtcttttatcgaggacctgctgttcaacaaggtgaccctggccgatgccggcttcatcaagcagtatggagattgcctgggagacatcgcagcccgcgacctgatctgtgcccagaagtttaatggcctgaccgtgctgcctccactgctgacagatgagatgatcgcccagtacacatctgccctgctggccggcaccatcacaagcggatggaccttcggcgcaggagccgccctgcagatcccttttgccatgcagatggcctataggttcaacggcatcggcgtgacccagaatgtgctgtacgagaaccagaagctgatcgccaatcagtttaacagcgccatcggcaagatccaggactctctgtcctctacagccagcgccctgggcaagctgcaggatgtggtgaatcagaacgcccaggccctgaataccctggtgaagcagctgagctccaacttcggcgccatctctagcgtgctgaatgacatcctgagccggctggacccccctgaggcagaggtgcagatcgacaggctgatcacaggccgcctgcagagcctgcagacctacgtgacacagcagctgatcagggcagcagagatcagagcctccgccaatctggccgccaccaagatgagcgagtgcgtgctgggacagtccaagagggtggacttttgtggcaagggctatcacctgatgtctttcccacagagcgcccctcacggcgtggtgtttctgcacgtgacctacgtgccagcccaggagaagaacttcaccacagcaccagccatctgccacgatggaaaggcatggtttcctagggagggcgtgttcgtgtctaacggcacccactggtttgtgacacagcgcaatttctacgagccacagatcatcaccacagacaatacattcgtgagcggcaactgtgatgtggtgatcggcatcgtgaacaataccgtgtatgatccactgcagcccgagctggactcctttaaggaggagctggataagtacttcaagaatcacacctctcccgacgtggatctgggcgacatctccggcatcaatgcctctgtggtgaacatccagaaggagatcgaccggctgaacgaggtggccaagaatctgaacgagagcctgatcgatctgcaggagctgggcaagtatgagcagtacatcaagggctctggcagagagaacctgtatttccagggaggaggaggcagcggatacatccctgaggcaccaagggacggacaggcctacgtgcgcaaggatggcgagtgggtgctgctgtccacctttctgggccatcatcaccaccaccaccaccactga

SEQ ID NO: 1707 - DNA, 3846 bp, Artificial Sequence
  Description of Artificial Sequence: Synthetic polynucleotide
atgggcatcctgccaagcccaggaatgcccgccctgctgtctctggtgagcctgctgtccgtgctgctgatgggatgcgtggcagagacaggcacacagtgcgtgaacctgaccacaaggacccagctgccccctgcctataccaattctttcacacggggcgtgtactatcccgacaaggtgtttagaagctccgtgctgcactccacacaggatctgtttctgcctttcttttctaacgtgacctggttccacgccatccacgtgtccggcaccaatggcacaaagcggttcgacaatcccgtgctgccttttaacgatggcgtgtacttcgccagcaccgagaagtccaacatcatcagaggctggatctttggcaccacactggactctaagacacagagcctgctgatcgtgaacaatgccaccaacgtggtgatcaaggtgtgcgagttccagttttgtaatgatccaatgctgggcgtgtactatcacaagaacaataagtcctggatggagtctgagtttcgcgtgtattctagcgccaacaattgcacatttgagtacgtgagccagcccttcctgatggacctggagggcaagcagggcaatttcaagaacctgagggagttcgtgtttaagaatatcgatggctacttcaagatctacagcaagcacaccccaatcaacctggtgcgcgacctgccacagggattctccgccctggagccactggtggatctgcccatcggcatcaacatcacccggtttcagacactgctggccctgcacagatcctacctgacaccaggcgactcctctagcggatggaccgcaggagctgccgcctactatgtgggctatctgcagccccggaccttcctgctgaagtacaacgagaatggcaccatcacagacgcagtggattgcgccctggaccccctgtctgagacaaagtgtacactgaagagctttaccgtggagaagggcatctatcagacaagcaatttcagggtgcagcctaccgagtccatcgtgcgctttcccaatatcacaaacctgtgcccttttggcgaggtgttcaacgccaccagattcgccagcgtgtacgcctggaatcggaagagaatctccaactgcgtggccgactattctgtgctgtacaactccgcctctttcagcacctttaagtgctatggcgtgtctcccacaaagctgaatgatctgtgctttaccaacgtgtacgccgatagcttcgtgatcaggggagacgaagtgagacagatcgcaccaggacagacaggaaagatcgcagactacaattataagctgcctgacgatttcaccggctgcgtgatcgcctggaactccaacaatctggattctaaagtgggcggcaactacaattatctgtacaggctgtttcgcaagtccaatctgaagccattcgagcgggacatctccacagagatctaccaggccggctctaccccctgcaatggcgtggagggctttaactgttatttccctctgcagtcttacggcttccagccaacaaacggcgtgggctatcagccctacagagtggtggtgctgtcctttgagctgctgcacgcaccagcaacagtgtgcggcccaaagaagtctaccaatctggtgaagaacaagtgcgtgaacttcaacttcaacggactgaccggcacaggcgtgctgaccgagagcaataagaagttcctgccttttcagcagttcggcagggacatcgcagataccacagacgccgtgcgcgaccctcagaccctggagatcctggacatcacaccatgcagcttcggcggcgtgtccgtgatcacaccaggcaccaatacatccaaccaggtggccgtgctgtatcaggacgtgaattgtaccgaggtgcccgtggcaatccacgcagatcagctgacccctacatggcgggtgtactctaccggcagcaacgtgttccagacaagagccggatgcctgatcggagcagagcacgtgaacaatagctatgagtgcgacatccctatcggcgccggcatctgtgccagctaccagacccagacaaactccccatctggagcaggctccgtggccagccagtccatcatcgcctataccatgagcctgggcgccgagaacagcgtggcctactccaacaattctatcgccatccctaccaacttcacaatcagcgtgaccacagagatcctgccagtgtctatgaccaagacaagcgtggactgcacaatgtatatctgtggcgatagcaccgagtgctccaacctgctgctgcagtacggctccttttgtacccagctgaatagagccctgacaggcatcgccgtggagcaggataagaacacacaggaggtgttcgcccaggtgaagcagatctacaagaccccacccatcaaggactttggcggcttcaacttcagccagatcctgcctgatccaagcaagccctccaagaggtcttttatcgaggacctgctgttcaacaaggtgaccctggccgatgccggcttcatcaagcagtatggagattgcctgggagacatcgcagcccgcgacctgatctgtgcccagaagtttaatggcctgaccgtgctgcctccactgctgacagatgagatgatcgcccagtacacatctgccctgctggccggcaccatcacaagcggatggaccttcggcgcaggagccgccctgcagatcccttttgccatgcagatggcctataggttcaacggcatcggcgtgacccagaatgtgctgtacgagaaccagaagctgatcgccaatcagtttaacagcgccatcggcaagatccaggactctctgtcctctacagccagcgccctgggcaagctgcaggatgtggtgaatcagaacgcccaggccctgaataccctggtgaagcagctgagctccaacttcggcgccatctctagcgtgctgaatgacatcctgagccggctggacccccctgaggcagaggtgcagatcgacaggctgatcacaggccgcctgcagagcctgcagacctacgtgacacagcagctgatcagggcagcagagatcagagcctccgccaatctggccgccaccaagatgagcgagtgcgtgctgggacagtccaagagggtggacttttgtggcaagggctatcacctgatgtctttcccacagagcgcccctcacggcgtggtgtttctgcacgtgacctacgtgccagcccaggagaagaacttcaccacagcaccagccatctgccacgatggaaaggcacactttcctagggagggcgtgttcgtgtctaacggcacccactggtttgtgacacagcgcaatttctacgagccacagatcatcaccacagacaatacattcgtgagcggcaactgtgatgtggtgatcggcatcgtgaacaataccgtgtatgatccactgcagcccgagctggactcctttaaggaggagctggataagtacttcaagaatcacacctctcccgacgtggatctgggcgacatctccggcatcaatgcctctgtggtgaacatccagaaggagatcgaccggctgaacgaggtggccaagaatctgaacgagagcctgatcgatctgcaggagctgggcaagtatgagcagtacatcaagggctctggcagagagaacctgtatttccagggaggaggaggcagcggatacatccctgaggcaccaagggacggacaggcctacgtgcgcaaggatggcgagtgggtgctgctgtccacctttctgggccatcatcaccaccaccaccaccactga

SEQ ID NO: 1708 - DNA, 3846 bp, Artificial Sequence
  Description of Artificial Sequence: Synthetic polynucleotide
atgggcatcctgccaagcccaggaatgcccgccctgctgtctctggtgagcctgctgtccgtgctgctgatgggatgcgtggcagagacaggcacacagtgcgtgaacctgaccacaaggacccagctgccccctgcctataccaattctttcacacggggcgtgtactatcccgacaaggtgtttagaagctccgtgctgcactccacacaggatctgtttctgcctttcttttctaacgtgacctggttccacgccatccacgtgtccggcaccaatggcacaaagcggttcgacaatcccgtgctgccttttaacgatggcgtgtacttcgccagcaccgagaagtccaacatcatcagaggctggatctttggcaccacactggactctaagacacagagcctgctgatcgtgaacaatgccaccaacgtggtgatcaaggtgtgcgagttccagttttgtaatgatccattcctgggcgtgtactatcacaagaacaataagtcctggatggagtctgagtttcgcgtgtattctagcgccaacaattgcacatttgagtacgtgagccagcccttcctgatggacctggagggcaagcagggcaatttcaagaacctgagggagttcgtgtttaagaatatcgatggctacttcaagatctacagcaagcacaccccaatcaacctggtgcgcgacctgccacagggattctccgccctggagccactggtggatctgcccatcggcatcaacatcacccggtttcagacactgctggccctgcacagatcctacctgacaccaggcgactcctctagcggatggaccgcaggagctgccgcctactatgtgggctatctgcagccccggaccttcctgctgaagtacaacgagaatggcaccatcacagacgcagtggattgcgccctggaccccctgtctgagacaaagtgtacactgaagagctttaccgtggagaagggcatctatcagacaagcaatttcagggtgcagcctaccgagtccatcgtgcgctttcccaatatcacaaacctgtgcccttttggcgaggtgttcaacgccaccagattcgccagcgtgtacgcctggaatcggaagagaatctccaactgcgtggccgactattctgtgctgtacaactccgcctctttcagcacctttaagtgctatggcgtgtctcccacaaagctgaatgatctgtgctttaccaacgtgtacgccgatagcttcgtgatcaggggagacgaagtgagacagatcgcaccaggacagacaggaaagatcgcagactacaattataagctgcctgacgatttcaccggctgcgtgatcgcctggaactccaacaatctggattctaaagtgggcggcaactacaattatctgtacaggctgtttcgcaagtccaatctgaagccattcgagcgggacatctccacagagatctaccaggccggctctaccccctgcaatggcgtggagggctttaactgttatttccctctgcagtcttacggcttccagccaacaaacggcgtgggctatcagccctacagagtggtggtgctgtcctttgagctgctgcacgcaccagcaacagtgtgcggcccaaagaagtctaccaatctggtgaagaacaagtgcgtgaacttcaacttcaacggactgaccggcacaggcgtgctgaccgagagcaataagaagttcctgccttttcagcagttcggcagggacatcgcagataccacagacgccgtgcgcgaccctcagaccctggagatcctggacatcacaccatgcagcttcggcggcgtgtccgtgatcacaccaggcaccaatacatccaaccaggtggccgtgctgtatcaggacgtgaattgtaccgaggtgcccgtggcaatccacgcagatcagctgacccctacatggcgggtgtactctaccggcagcaacgtgttccagacaagagccggatgcctgatcggagcagagcacgtgaacaatagctatgagtgcgacatccctatcggcgccggcatctgtgccagctaccagacccagacaaactccccatctggagcaggctccgtggccagccagtccatcatcgcctataccatgagcctgggcgccgagaacagcgtggcctactccaacaattctatcgccatccctaccaacttcacaatcagcgtgaccacagagatcctgccagtgtctatgaccaagacaagcgtggactgcacaatgtatatctgtggcgatagcaccgagtgctccaacctgctgctgcagtacggctccttttgtacccagctgaatagagccctgacaggcatcgccatggagcaggataagaacacacaggaggtgttcgcccaggtgaagcagatctacaagaccccacccatcaaggactttggcggcttcaacttcagccagatcctgcctgatccaagcaagccctccaagaggtcttttatcgaggacctgctgttcaacaaggtgaccctggccgatgccggcttcatcaagcagtatggagattgcctgggagacatcgcagcccgcgacctgatctgtgcccagaagtttaatggcctgaccgtgctgcctccactgctgacagatgagatgatcgcccagtacacatctgccctgctggccggcaccatcacaagcggatggaccttcggcgcaggagccgccctgcagatcccttttgccatgcagatggcctataggttcaacggcatcggcgtgacccagaatgtgctgtacgagaaccagaagctgatcgccaatcagtttaacagcgccatcggcaagatccaggactctctgtcctctacagccagcgccctgggcaagctgcaggatgtggtgaatcagaacgcccaggccctgaataccctggtgaagcagctgagctccaacttcggcgccatctctagcgtgctgaatgacatcctgagccggctggacccccctgaggcagaggtgcagatcgacaggctgatcacaggccgcctgcagagcctgcagacctacgtgacacagcagctgatcagggcagcagagatcagagcctccgccaatctggccgccaccaagatgagcgagtgcgtgctgggacagtccaagagggtggacttttgtggcaagggctatcacctgatgtctttcccacagagcgcccctcacggcgtggtgtttctgcacgtgacctacgtgccagcccaggagaagaacttcaccacagcaccagccatctgccacgatggaaaggcacactttcctagggagggcgtgttcgtgtctaacggcacccactggtttgtgacacagcgcaatttctacgagccacagatcatcaccacagacaatacattcgtgagcggcaactgtgatgtggtgatcggcatcgtgaacaataccgtgtatgatccactgcagcccgagctggactcctttaaggaggagctggataagtacttcaagaatcacacctctcccgacgtggatctgggcgacatctccggcatcaatgcctctgtggtgaacatccagaaggagatcgaccggctgaacgaggtggccaagaatctgaacgagagcctgatcgatctgcaggagctgggcaagtatgagcagtacatcaagggctctggcagagagaacctgtatttccagggaggaggaggcagcggatacatccctgaggcaccaagggacggacaggcctacgtgcgcaaggatggcgagtgggtgctgctgtccacctttctgggccatcatcaccaccaccaccaccactga

SEQ ID NO: 1709 - DNA, 3846 bp, Artificial Sequence
  Description of Artificial Sequence: Synthetic polynucleotide
atgggcatcctgccaagcccaggaatgcccgccctgctgtctctggtgagcctgctgtccgtgctgctgatgggatgcgtggcagagacaggcacacagtgcgtgaacctgaccacaaggacccagctgccccctgcctataccaattctttcacacggggcgtgtactatcccgacaaggtgtttagaagctccgtgctgcactccacacaggatctgtttctgcctttcttttctaacgtgacctggttccacgccatccacgtgtccggcaccaatggcacaaagcggttcgacaatcccgtgctgccttttaacgatggcgtgtacttcgccagcaccgagaagtccaacatcatcagaggctggatctttggcaccacactggactctaagacacagagcctgctgatcgtgaacaatgccaccaacgtggtgatcaaggtgtgcgagttccagttttgtaatgatccattcctgggcgtgtactatcacaagaacaataagtcctggatggagtctgagtttcgcgtgtattctagcgccaacaattgcacatttgagtacgtgagccagcccttcctgatggacctggagggcaagcagggcaatttcaagaacctgagggagttcgtgtttaagaatatcgatggctacttcaagatctacagcaagcacaccccaatcaacctggtgcgcgacctgccacagggattctccgccctggagccactggtgagtctgcccatcggcatcaacatcacccggtttcagacactgctggccctgcacagatcctacctgacaccaggcgactcctctagcggatggaccgcaggagctgccgcctactatgtgggctatctgcagccccggaccttcctgctgaagtacaacgagaatggcaccatcacagacgcagtggattgcgccctggaccccctgtctgagacaaagtgtacactgaagagctttaccgtggagaagggcatctatcagacaagcaatttcagggtgcagcctaccgagtccatcgtgcgctttcccaatatcacaaacctgtgcccttttggcgaggtgttcaacgccaccagattcgccagcgtgtacgcctggaatcggaagagaatctccaactgcgtggccgactattctgtgctgtacaactccgcctctttcagcacctttaagtgctatggcgtgtctcccacaaagctgaatgatctgtgctttaccaacgtgtacgccgatagcttcgtgatcaggggagacgaagtgagacagatcgcaccaggacagacaggaaagatcgcagactacaattataagctgcctgacgatttcaccggctgcgtgatcgcctggaactccaacaatctggattctaaagtgggcggcaactacaattatctgtacaggctgtttcgcaagtccaatctgaagccattcgagcgggacatctccacagagatctaccaggccggctctaccccctgcaatggcgtggagggctttaactgttatttccctctgcagtcttacggcttccagccaacaaacggcgtgggctatcagccctacagagtggtggtgctgtcctttgagctgctgcacgcaccagcaacagtgtgcggcccaaagaagtctaccaatctggtgaagaacaagtgcgtgaacttcaacttcaacggactgaccggcacaggcgtgctgaccgagagcaataagaagttcctgccttttcagcagttcggcagggacatcgcagataccacagacgccgtgcgcgaccctcagaccctggagatcctggacatcacaccatgcagcttcggcggcgtgtccgtgatcacaccaggcaccaatacatccaaccaggtggccgtgctgtatcaggacgtgaattgtaccgaggtgcccgtggcaatccacgcagatcagctgacccctacatggcgggtgtactctaccggcagcaacgtgttccagacaagagccggatgcctgatcggagcagagcacgtgaacaatagctatgagtgcgacatccctatcggcgccggcatctgtgccagctaccagacccagacaaactccccatctggagcaggctccgtggccagccagtccatcatcgcctataccatgagcctgggcgccgagaacagcgtggcctactccaacaattctatcgccatccctaccaacttcacaatcagcgtgaccacagagatcctgccagtgtctatgaccaagacaagcgtggactgcacaatgtatatctgtggcgatagcaccgagtgctccaacctgctgctgcagtacggctccttttgtacccagctgaatagagccctgacaggcatcgccgtggagcaggataagaacacacaggaggtgttcgcccaggtgaagcagatctacaagaccccacccatcaaggactttggcggcttcaacttcagccagatcctgcctgatccaagcaagccctccaagaggtcttttatcgaggacctgctgttcaacaaggtgaccctggccgatgccggcttcatcaagcagtatggagattgcctgggagacatcgcagcccgcgacctgatctgtgcccagaagtttaatggcctgaccgtgctgcctccactgctgacagatgagatgatcgcccagtacacatctgccctgctggccggcaccatcacaagcggatggaccttcggcgcaggagccgccctgcagatcccttttgccatgcagatggcctataggttcaacggcatcggcgtgacccagaatgtgctgtacgagaaccagaagctgatcgccaatcagtttaacagcgccatcggcaagatccaggactctctgtcctctacagccagcgccctgggcaagctgcaggatgtggtgaatcagaacgcccaggccctgaataccctggtgaagcagctgagctccaacttcggcgccatctctagcgtgctgaatgacatcctgagccggctggacccccctgaggcagaggtgcagatcgacaggctgatcacaggccgcctgcagagcctgcagacctacgtgacacagcagctgatcagggcagcagagatcagagcctccgccaatctggccgccaccaagatgagcgagtgcgtgctgggacagtccaagagggtggacttttgtggcaagggctatcacctgatgtctttcccacagagcgcccctcacggcgtggtgtttctgcacgtgacctacgtgccagcccaggagaagaacttcaccacagcaccagccatctgccacgatggaaaggcacactttcctagggagggcgtgttcgtgtctaacggcacccactggtttgtgacacagcgcaatttctacgagccacagatcatcaccacagacaatacattcgtgagcggcaactgtgatgtggtgatcggcatcgtgaacaataccgtgtatgatccactgcagcccgagctggactcctttaaggaggagctggataagtacttcaagaatcacacctctcccgacgtggatctgggcgacatctccggcatcaatgcctctgtggtgaacatccagaaggagatcgaccggctgaacgaggtggccaagaatctgaacgagagcctgatcgatctgcaggagctgggcaagtatgagcagtacatcaagggctctggcagagagaacctgtatttccagggaggaggaggcagcggatacatccctgaggcaccaagggacggacaggcctacgtgcgcaaggatggcgagtgggtgctgctgtccacctttctgggccatcatcaccaccaccaccaccactga

SEQ ID NO: 1710 - DNA, 3846 bp, Artificial Sequence
  Description of Artificial Sequence: Synthetic polynucleotide
atgggcatcctgccaagcccaggaatgcccgccctgctgtctctggtgagcctgctgtccgtgctgctgatgggatgcgtggcagagacaggcacacagtgcgtgaacctgaccacaaggacccagctgccccctgcctataccaattctttcacacggggcgtgtactatcccgacaaggtgtttagaagctccgtgctgcactccacacaggatctgtttctgcctttcttttctaacgtgacctggttccacgccatccacgtgtccggcaccaatggcacaaagcggttcgacaatcccgtgctgccttttaacgatggcgtgtacttcgccagcaccgagaagtccaacatcatcagaggctggatctttggcaccacactggactctaagacacagagcctgctgatcgtgaacaatgccaccaacgtggtgatcaaggtgtgcgagttccagttttgtaatgatccattcctgggcgtgtactatcacaagaacaataagtcctggatggagtctgagtttcgcgtgtattctagcgccaacaattgcacatttgagtacgtgagccagcccttcctgatggacctggagggcaagcagggcaatttcaagaacctgagggagttcgtgtttaagaatatcgatggctacttcaagatctacagcaagcacaccccaatcaacctggtgcgcgacctgccacagggattctccgccctggagccactggtggatctgcccatcggcatcaacatcacccggtttcagacactgctggccctgcacagatcctacctgacaccaggcgactcctctagcggatggcgagcaggagctgccgcctactatgtgggctatctgcagccccggaccttcctgctgaagtacaacgagaatggcaccatcacagacgcagtggattgcgccctggaccccctgtctgagacaaagtgtacactgaagagctttaccgtggagaagggcatctatcagacaagcaatttcagggtgcagcctaccgagtccatcgtgcgctttcccaatatcacaaacctgtgcccttttggcgaggtgttcaacgccaccagattcgccagcgtgtacgcctggaatcggaagagaatctccaactgcgtggccgactattctgtgctgtacaactccgcctctttcagcacctttaagtgctatggcgtgtctcccacaaagctgaatgatctgtgctttaccaacgtgtacgccgatagcttcgtgatcaggggagacgaagtgagacagatcgcaccaggacagacaggaaagatcgcagactacaattataagctgcctgacgatttcaccggctgcgtgatcgcctggaactccaacaatctggattctaaagtgggcggcaactacaattatctgtacaggctgtttcgcaagtccaatctgaagccattcgagcgggacatctccacagagatctaccaggccggctctaccccctgcaatggcgtggagggctttaactgttatttccctctgcagtcttacggcttccagccaacaaacggcgtgggctatcagccctacagagtggtggtgctgtcctttgagctgctgcacgcaccagcaacagtgtgcggcccaaagaagtctaccaatctggtgaagaacaagtgcgtgaacttcaacttcaacggactgaccggcacaggcgtgctgaccgagagcaataagaagttcctgccttttcagcagttcggcagggacatcgcagataccacagacgccgtgcgcgaccctcagaccctggagatcctggacatcacaccatgcagcttcggcggcgtgtccgtgatcacaccaggcaccaatacatccaaccaggtggccgtgctgtatcaggacgtgaattgtaccgaggtgcccgtggcaatccacgcagatcagctgacccctacatggcgggtgtactctaccggcagcaacgtgttccagacaagagccggatgcctgatcggagcagagcacgtgaacaatagctatgagtgcgacatccctatcggcgccggcatctgtgccagctaccagacccagacaaactccccatctggagcaggctccgtggccagccagtccatcatcgcctataccatgagcctgggcgccgagaacagcgtggcctactccaacaattctatcgccatccctaccaacttcacaatcagcgtgaccacagagatcctgccagtgtctatgaccaagacaagcgtggactgcacaatgtatatctgtggcgatagcaccgagtgctccaacctgctgctgcagtacggctccttttgtacccagctgaatagagccctgacaggcatcgccgtggagcaggataagaacacacaggaggtgttcgcccaggtgaagcagatctacaagaccccacccatcaaggactttggcggcttcaacttcagccagatcctgcctgatccaagcaagccctccaagaggtcttttatcgaggacctgctgttcaacaaggtgaccctggccgatgccggcttcatcaagcagtatggagattgcctgggagacatcgcagcccgcgacctgatctgtgcccagaagtttaatggcctgaccgtgctgcctccactgctgacagatgagatgatcgcccagtacacatctgccctgctggccggcaccatcacaagcggatggaccttcggcgcaggagccgccctgcagatcccttttgccatgcagatggcctataggttcaacggcatcggcgtgacccagaatgtgctgtacgagaaccagaagctgatcgccaatcagtttaacagcgccatcggcaagatccaggactctctgtcctctacagccagcgccctgggcaagctgcaggatgtggtgaatcagaacgcccaggccctgaataccctggtgaagcagctgagctccaacttcggcgccatctctagcgtgctgaatgacatcctgagccggctggacccccctgaggcagaggtgcagatcgacaggctgatcacaggccgcctgcagagcctgcagacctacgtgacacagcagctgatcagggcagcagagatcagagcctccgccaatctggccgccaccaagatgagcgagtgcgtgctgggacagtccaagagggtggacttttgtggcaagggctatcacctgatgtctttcccacagagcgcccctcacggcgtggtgtttctgcacgtgacctacgtgccagcccaggagaagaacttcaccacagcaccagccatctgccacgatggaaaggcacactttcctagggagggcgtgttcgtgtctaacggcacccactggtttgtgacacagcgcaatttctacgagccacagatcatcaccacagacaatacattcgtgagcggcaactgtgatgtggtgatcggcatcgtgaacaataccgtgtatgatccactgcagcccgagctggactcctttaaggaggagctggataagtacttcaagaatcacacctctcccgacgtggatctgggcgacatctccggcatcaatgcctctgtggtgaacatccagaaggagatcgaccggctgaacgaggtggccaagaatctgaacgagagcctgatcgatctgcaggagctgggcaagtatgagcagtacatcaagggctctggcagagagaacctgtatttccagggaggaggaggcagcggatacatccctgaggcaccaagggacggacaggcctacgtgcgcaaggatggcgagtgggtgctgctgtccacctttctgggccatcatcaccaccaccaccaccactga

SEQ ID NO: 1711 - DNA, 3846 bp, Artificial Sequence
  Description of Artificial Sequence: Synthetic polynucleotide
atgggcatcctgccaagcccaggaatgcccgccctgctgtctctggtgagcctgctgtccgtgctgctgatgggatgcgtggcagagacaggcacacagtgcgtgaacctgaccacaaggacccagctgccccctgcctataccaattctttcacacggggcgtgtactatcccgacaaggtgtttagaagctccgtgctgcactccacacaggatctgtttctgcctttcttttctaacgtgacctggttccacgccatccacgtgtccggcaccaatggcacaaagcggttcgacaatcccgtgctgccttttaacgatggcgtgtacttcgccagcaccgagaagtccaacatcatcagaggctggatctttggcaccacactggactctaagacacagagcctgctgatcgtgaacaatgccaccaacgtggtgatcaaggtgtgcgagttccagttttgtaatgatccattcctgggcgtgtactatcacaagaacaataagtcctggatggagtctgagtttcgcgtgtattctagcgccaacaattgcacatttgagtacgtgagccagcccttcctgatggacctggagggcaagcagggcaatttcaagaacctgagggagttcgtgtttaagaatatcgatggctacttcaagatctacagcaagcacaccccaatcaacctggtgcgcgacctgccacagggattctccgccctggagccactggtggatctgcccatcggcatcaacatcacccggtttcagacactgctggccctgcacagatcctacctgacaccaggcgactcctctagcggatggaccgcaggagctgccgcctactatgtgggctatctgcagccccggaccttcctgctgaagtacaacgagaatggcaccatcacagacgcagtggattgcacgctggaccccctgtctgagacaaagtgtacactgaagagctttaccgtggagaagggcatctatcagacaagcaatttcagggtgcagcctaccgagtccatcgtgcgctttcccaatatcacaaacctgtgcccttttggcgaggtgttcaacgccaccagattcgccagcgtgtacgcctggaatcggaagagaatctccaactgcgtggccgactattctgtgctgtacaactccgcctctttcagcacctttaagtgctatggcgtgtctcccacaaagctgaatgatctgtgctttaccaacgtgtacgccgatagcttcgtgatcaggggagacgaagtgagacagatcgcaccaggacagacaggaaagatcgcagactacaattataagctgcctgacgatttcaccggctgcgtgatcgcctggaactccaacaatctggattctaaagtgggcggcaactacaattatctgtacaggctgtttcgcaagtccaatctgaagccattcgagcgggacatctccacagagatctaccaggccggctctaccccctgcaatggcgtggagggctttaactgttatttccctctgcagtcttacggcttccagccaacaaacggcgtgggctatcagccctacagagtggtggtgctgtcctttgagctgctgcacgcaccagcaacagtgtgcggcccaaagaagtctaccaatctggtgaagaacaagtgcgtgaacttcaacttcaacggactgaccggcacaggcgtgctgaccgagagcaataagaagttcctgccttttcagcagttcggcagggacatcgcagataccacagacgccgtgcgcgaccctcagaccctggagatcctggacatcacaccatgcagcttcggcggcgtgtccgtgatcacaccaggcaccaatacatccaaccaggtggccgtgctgtatcaggacgtgaattgtaccgaggtgcccgtggcaatccacgcagatcagctgacccctacatggcgggtgtactctaccggcagcaacgtgttccagacaagagccggatgcctgatcggagcagagcacgtgaacaatagctatgagtgcgacatccctatcggcgccggcatctgtgccagctaccagacccagacaaactccccatctggagcaggctccgtggccagccagtccatcatcgcctataccatgagcctgggcgccgagaacagcgtggcctactccaacaattctatcgccatccctaccaacttcacaatcagcgtgaccacagagatcctgccagtgtctatgaccaagacaagcgtggactgcacaatgtatatctgtggcgatagcaccgagtgctccaacctgctgctgcagtacggctccttttgtacccagctgaatagagccctgacaggcatcgccgtggagcaggataagaacacacaggaggtgttcgcccaggtgaagcagatctacaagaccccacccatcaaggactttggcggcttcaacttcagccagatcctgcctgatccaagcaagccctccaagaggtcttttatcgaggacctgctgttcaacaaggtgaccctggccgatgccggcttcatcaagcagtatggagattgcctgggagacatcgcagcccgcgacctgatctgtgcccagaagtttaatggcctgaccgtgctgcctccactgctgacagatgagatgatcgcccagtacacatctgccctgctggccggcaccatcacaagcggatggaccttcggcgcaggagccgccctgcagatcccttttgccatgcagatggcctataggttcaacggcatcggcgtgacccagaatgtgctgtacgagaaccagaagctgatcgccaatcagtttaacagcgccatcggcaagatccaggactctctgtcctctacagccagcgccctgggcaagctgcaggatgtggtgaatcagaacgcccaggccctgaataccctggtgaagcagctgagctccaacttcggcgccatctctagcgtgctgaatgacatcctgagccggctggacccccctgaggcagaggtgcagatcgacaggctgatcacaggccgcctgcagagcctgcagacctacgtgacacagcagctgatcagggcagcagagatcagagcctccgccaatctggccgccaccaagatgagcgagtgcgtgctgggacagtccaagagggtggacttttgtggcaagggctatcacctgatgtctttcccacagagcgcccctcacggcgtggtgtttctgcacgtgacctacgtgccagcccaggagaagaacttcaccacagcaccagccatctgccacgatggaaaggcacactttcctagggagggcgtgttcgtgtctaacggcacccactggtttgtgacacagcgcaatttctacgagccacagatcatcaccacagacaatacattcgtgagcggcaactgtgatgtggtgatcggcatcgtgaacaataccgtgtatgatccactgcagcccgagctggactcctttaaggaggagctggataagtacttcaagaatcacacctctcccgacgtggatctgggcgacatctccggcatcaatgcctctgtggtgaacatccagaaggagatcgaccggctgaacgaggtggccaagaatctgaacgagagcctgatcgatctgcaggagctgggcaagtatgagcagtacatcaagggctctggcagagagaacctgtatttccagggaggaggaggcagcggatacatccctgaggcaccaagggacggacaggcctacgtgcgcaaggatggcgagtgggtgctgctgtccacctttctgggccatcatcaccaccaccaccaccactga

SEQ ID NO: 1712 - DNA, 3846 bp, Artificial Sequence
  Description of Artificial Sequence: Synthetic polynucleotide
atgggcatcctgccaagcccaggaatgcccgccctgctgtctctggtgagcctgctgtccgtgctgctgatgggatgcgtggcagagacaggcacacagtgcgtgaacctgaccacaaggacccagctgccccctgcctataccaattctttcacacggggcgtgtactatcccgacaaggtgtttagaagctccgtgctgcactccacacaggatctgtttctgcctttcttttctaacgtgacctggttccacgccatccacgtgtccggcaccaatggcacaaagcggttcgacaatcccgtgctgccttttaacgatggcgtgtacttcgccagcaccgagaagtccaacatcatcagaggctggatctttggcaccacactggactctaagacacagagcctgctgatcgtgaacaatgccaccaacgtggtgatcaaggtgtgcgagttccagttttgtaatgatccattcctgggcgtgtactatcacaagaacaataagtcctggatggagtctgagtttcgcgtgtattctagcgccaacaattgcacatttgagtacgtgagccagcccttcctgatggacctggagggcaagcagggcaatttcaagaacctgagggagttcgtgtttaagaatatcgatggctacttcaagatctacagcaagcacaccccaatcaacctggtgcgcgacctgccacagggattctccgccctggagccactggtggatctgcccatcggcatcaacatcacccggtttcagacactgctggccctgcacagatcctacctgacaccaggcgactcctctagcggatggaccgcaggagctgccgcctactatgtgggctatctgcagccccggaccttcctgctgaagtacaacgagaatggcaccatcacagacgcagtggattgcgccctggaccccctgtctgagacaaagtgtacactgaagagctttaccgtggagaagggcatctatcagacaagcaatttcagggtgcagcctaccgagtccatcgtgcgctttcccaatatcacaaacctgtgcccttttggcgaggtgttcaacgccaccagattcgccagcgtgtacgcctggaatcggaagagaatctccaactgcgtggccgactattctgtgctgtacaactccgcctctttcagcacctttaagtgctatggcgtgtctcccacaaagctgaatgatctgtgctttaccaacgtgtacgccgatagcttcgtgatcaggggagacgaagtgagacagatcgcaccaggacagacaggaaagatcgcagactacaattataagctgcctgacgatttcaccggctgcgtgatcgcctggaactccaacaatctggattctaaagtgggcggcaactacaattatctgtacaggctgtttcgcaagtccaatctgaagccattcgagcgggacatctccacagagatctaccaggccggctctaccccctgcaatggcgtggagggctttaactgttatttccctctgcagtcttacggcttccagccaacaaacggcgtgggctatcagccctacagagtggtggtgctgtcctttgagctgctgcacgcaccagcaacagtgtgcggcccaaagaagtctaccaatctggtgaagaacaagtgcgtgaacttcaacttcaacggactgaccggcacaggcgtgctgaccgagagcaataagaagttcctgccttttcagcagttcggcagggacatctcagataccacagacgccgtgcgcgaccctacgaccctggagatcctggacatcacaccatgcagcttcggcggcgtgtccgtgatcacaccaggcaccaatacatccaaccaggtggccgtgctgtatcaggacgtgaattgtaccgaggtgcccgtggcaatccacgcagatcagctgacccctacatggcgggtgtactctaccggcagcaacgtgttccagacaagagccggatgcctgatcggagcagagcacgtgaacaatagctatgagtgcgacatccctatcggcgccggcatctgtgccagctaccagacccagacaaactccccatctggagcaggctccgtggccagccagtccatcatcgcctataccatgagcctgggcgccgagaacagcgtggcctactccaacaattctatcgccatccctaccaacttcacaatcagcgtgaccacagagatcctgccagtgtctatgaccaagacaagcgtggactgcacaatgtatatctgtggcgatagcaccgagtgctccaacctgctgctgcagtacggctccttttgtacccagctgaatagagccctgacaggcatcgccgtggagcaggataagaacacacaggaggtgttcgcccaggtgaagcagatctacaagaccccacccatcaaggactttggcggcttcaacttcagccagatcctgcctgatccaagcaagccctccaagaggtcttttatcgaggacctgctgttcaacaaggtgaccctggccgatgccggcttcatcaagcagtatggagattgcctgggagacatcgcagcccgcgacctgatctgtgcccagaagtttaatggcctgaccgtgctgcctccactgctgacagatgagatgatcgcccagtacacatctgccctgctggccggcaccatcacaagcggatggaccttcggcgcaggagccgccctgcagatcccttttgccatgcagatggcctataggttcaacggcatcggcgtgacccagaatgtgctgtacgagaaccagaagctgatcgccaatcagtttaacagcgccatcggcaagatccaggactctctgtcctctacagccagcgccctgggcaagctgcaggatgtggtgaatcagaacgcccaggccctgaataccctggtgaagcagctgagctccaacttcggcgccatctctagcgtgctgaatgacatcctgagccggctggacccccctgaggcagaggtgcagatcgacaggctgatcacaggccgcctgcagagcctgcagacctacgtgacacagcagctgatcagggcagcagagatcagagcctccgccaatctggccgccaccaagatgagcgagtgcgtgctgggacagtccaagagggtggacttttgtggcaagggctatcacctgatgtctttcccacagagcgcccctcacggcgtggtgtttctgcacgtgacctacgtgccagcccaggagaagaacttcaccacagcaccagccatctgccacgatggaaaggcacactttcctagggagggcgtgttcgtgtctaacggcacccactggtttgtgacacagcgcaatttctacgagccacagatcatcaccacagacaatacattcgtgagcggcaactgtgatgtggtgatcggcatcgtgaacaataccgtgtatgatccactgcagcccgagctggactcctttaaggaggagctggataagtacttcaagaatcacacctctcccgacgtggatctgggcgacatctccggcatcaatgcctctgtggtgaacatccagaaggagatcgaccggctgaacgaggtggccaagaatctgaacgagagcctgatcgatctgcaggagctgggcaagtatgagcagtacatcaagggctctggcagagagaacctgtatttccagggaggaggaggcagcggatacatccctgaggcaccaagggacggacaggcctacgtgcgcaaggatggcgagtgggtgctgctgtccacctttctgggccatcatcaccaccaccaccaccactga

SEQ ID NO: 1713 - DNA, 3846 bp, Artificial Sequence
  Description of Artificial Sequence: Synthetic polynucleotide
atgggcatcctgccaagcccaggaatgcccgccctgctgtctctggtgagcctgctgtccgtgctgctgatgggatgcgtggcagagacaggcacacagtgcgtgaacctgaccacaaggacccagctgccccctgcctataccaattctttcacacggggcgtgtactatcccgacaaggtgtttagaagctccgtgctgcactccacacaggatctgtttctgcctttcttttctaacgtgacctggttccacgccatccacgtgtccggcaccaatggcacaaagcggttcgacaatcccgtgctgccttttaacgatggcgtgtacttcgccagcaccgagaagtccaacatcatcagaggctggatctttggcaccacactggactctaagacacagagcctgctgatcgtgaacaatgccaccaacgtggtgatcaaggtgtgcgagttccagttttgtaatgatccattcctgggcgtgtactatcacaagaacaataagtcctggatggagtctgagtttcgcgtgtattctagcgccaacaattgcacatttgagtacgtgagccagcccttcctgatggacctggagggcaagcagggcaatttcaagaacctgagggagttcgtgtttaagaatatcgatggctacttcaagatctacagcaagcacaccccaatcaacctggtgcgcgacctgccacagggattctccgccctggagccactggtggatctgcccatcggcatcaacatcacccggtttcagacactgctggccctgcacagatcctacctgacaccaggcgactcctctagcggatggaccgcaggagctgccgcctactatgtgggctatctgcagccccggaccttcctgctgaagtacaacgagaatggcaccatcacagacgcagtggattgcgccctggaccccctgtctgagacaaagtgtacactgaagagctttaccgtggagaagggcatctatcagacaagcaatttcagggtgcagcctaccgagtccatcgtgcgctttcccaatatcacaaacctgtgcccttttggcgaggtgttcaacgccaccagattcgccagcgtgtacgcctggaatcggaagagaatctccaactgcgtggccgactattctgtgctgtacaactccgcctctttcagcacctttaagtgctatggcgtgtctcccacaaagctgaatgatctgtgctttaccaacgtgtacgccgatagcttcgtgatcaggggagacgaagtgagacagatcgcaccaggacagacaggaaagatcgcagactacaattataagctgcctgacgatttcaccggctgcgtgatcgcctggaactccaacaatctggattctaaagtgggcggcaactacaattatctgtacaggctgtttcgcaagtccaatctgaagccattcgagcgggacatctccacagagatctaccaggccggctctaccccctgcaatggcgtggagggctttaactgttatttccctctgcagtcttacggcttccagccaacaaacggcgtgggctatcagccctacagagtggtggtgctgtcctttgagctgctgcacgcaccagcaacagtgtgcggcccaaagaagtctaccaatctggtgaagaacaagtgcgtgaacttcaacttcaacggactgaccggcacaggcgtgctgaccgagagcaataagaagttcctgccttttcagcagttcggcagggacatcgcagataccacagacgccgtgcgcgaccctcagaccctggagatcctggacatcacaccatgcagcttcggcggcgtgtccgtgatcacaccaggcaccaatacatccaaccaggtggccgtgctgtatcaggacgtgaattgtaccgaggtgcccccggcaatccacgcagatcagctgacccctacatggcgggtgtactctaccggcagcaacgtgttccagacaagagccggatgcctgatcggagcagagcacgtgaacaatagctatgagtgcgacatccctatcggcgccggcatctgtgccagctaccagacccagacaaactccccatctggagcaggctccgtggccagccagtccatcatcgcctataccatgagcctgggcgccgagaacagcgtggcctactccaacaattctatcgccatccctaccaacttcacaatcagcgtgaccacagagatcctgccagtgtctatgaccaagacaagcgtggactgcacaatgtatatctgtggcgatagcaccgagtgctccaacctgctgctgcagtacggctccttttgtacccagctgaatagagccctgacaggcatcgccgtggagcaggataagaacacacaggaggtgttcgcccaggtgaagcagatctacaagaccccacccatcaaggactttggcggcttcaacttcagccagatcctgcctgatccaagcaagccctccaagaggtcttttatcgaggacctgctgttcaacaaggtgaccctggccgatgccggcttcatcaagcagtatggagattgcctgggagacatcgcagcccgcgacctgatctgtgcccagaagtttaatggcctgaccgtgctgcctccactgctgacagatgagatgatcgcccagtacacatctgccctgctggccggcaccatcacaagcggatggaccttcggcgcaggagccgccctgcagatcccttttgccatgcagatggcctataggttcaacggcatcggcgtgacccagaatgtgctgtacgagaaccagaagctgatcgccaatcagtttaacagcgccatcggcaagatccaggactctctgtcctctacagccagcgccctgggcaagctgcaggatgtggtgaatcagaacgcccaggccctgaataccctggtgaagcagctgagctccaacttcggcgccatctctagcgtgctgaatgacatcctgagccggctggacccccctgaggcagaggtgcagatcgacaggctgatcacaggccgcctgcagagcctgcagacctacgtgacacagcagctgatcagggcagcagagatcagagcctccgccaatctggccgccaccaagatgagcgagtgcgtgctgggacagtccaagagggtggacttttgtggcaagggctatcacctgatgtctttcccacagagcgcccctcacggcgtggtgtttctgcacgtgacctacgtgccagcccaggagaagaacttcaccacagcaccagccatctgccacgatggaaaggcacactttcctagggagggcgtgttcgtgtctaacggcacccactggtttgtgacacagcgcaatttctacgagccacagatcatcaccacagacaatacattcgtgagcggcaactgtgatgtggtgatcggcatcgtgaacaataccgtgtatgatccactgcagcccgagctggactcctttaaggaggagctggataagtacttcaagaatcacacctctcccgacgtggatctgggcgacatctccggcatcaatgcctctgtggtgaacatccagaaggagatcgaccggctgaacgaggtggccaagaatctgaacgagagcctgatcgatctgcaggagctgggcaagtatgagcagtacatcaagggctctggcagagagaacctgtatttccagggaggaggaggcagcggatacatccctgaggcaccaagggacggacaggcctacgtgcgcaaggatggcgagtgggtgctgctgtccacctttctgggccatcatcaccaccaccaccaccactga

SEQ ID NO: 1714 - DNA, 3846 bp, Artificial Sequence
  Description of Artificial Sequence: Synthetic polynucleotide
atgggcatcctgccaagcccaggaatgcccgccctgctgtctctggtgagcctgctgtccgtgctgctgatgggatgcgtggcagagacaggcacacagtgcgtgaacctgaccacaaggacccagctgccccctgcctataccaattctttcacacggggcgtgtactatcccgacaaggtgtttagaagctccgtgctgcactccacacaggatctgtttctgcctttcttttctaacgtgacctggttccacgccatccacgtgtccggcaccaatggcacaaagcggttcgacaatcccgtgctgccttttaacgatggcgtgtacttcgccagcaccgagaagtccaacatcatcagaggctggatctttggcaccacactggactctaagacacagagcctgctgatcgtgaacaatgccaccaacgtggtgatcaaggtgtgcgagttccagttttgtaatgatccattcctgggcgtgtactatcacaagaacaataagtcctggatggagtctgagtttcgcgtgtattctagcgccaacaattgcacatttgagtacgtgagccagcccttcctgatggacctggagggcaagcagggcaatttcaagaacctgagggagttcgtgtttaagaatatcgatggctacttcaagatctacagcaagcacaccccaatcaacctggtgcgcgacctgccacagggattctccgccctggagccactggtggatctgcccatcggcatcaacatcacccggtttcagacactgctggccctgcacagatcctacctgacaccaggcgactcctctagcggatggaccgcaggagctgccgcctactatgtgggctatctgcagccccggaccttcctgctgaagtacaacgagaatggcaccatcacagacgcagtggattgcgccctggaccccctgtctgagacaaagtgtacactgaagagctttaccgtggagaagggcatctatcagacaagcaatttcagggtgcagcctaccgagtccatcgtgcgctttcccaatatcacaaacctgtgcccttttggcgaggtgttcaacgccaccagattcgccagcgtgtacgcctggaatcggaagagaatctccaactgcgtggccgactattctgtgctgtacaactccgcctctttcagcacctttaagtgctatggcgtgtctcccacaaagctgaatgatctgtgctttaccaacgtgtacgccgatagcttcgtgatcaggggagacgaagtgagacagatcgcaccaggacagacaggaaagatcgcagactacaattataagctgcctgacgatttcaccggctgcgtgatcgcctggaactccaacaatctggattctaaagtgggcggcaactacaattatctgtacaggctgtttcgcaagtccaatctgaagccattcgagcgggacatctccacagagatctaccaggccggctctaccccctgcaatggcgtggagggctttaactgttatttccctctgcagtcttacggcttccagccaacaaacggcgtgggctatcagccctacagagtggtggtgctgtcctttgagctgctgcacgcaccagcaacagtgtgcggcccaaagaagtctaccaatctggtgaagaacaagtgcgtgaacttcaacttcaacggactgaccggcacaggcgtgctgaccgagagcaataagaagttcctgccttttcagcagttcggcagggacatcgcagataccacagacgccgtgcgcgaccctcagaccctggagatcctggacatcacaccatgcagcttcggcggcgtgtccgtgatcacaccaggcaccaatacatccaaccaggtggccgtgctgtatcaggacgtgaattgtaccgaggtgcccgtggcaatccacgcagatcagctgacccctacatggcgggtgtactctaccggcagcaacgtgttccagacaagagccggatgcctgatcggagcagagcacgtgaacaatagctatgagtgcgacatccctatcggcgccggcatctgtgccagctaccagacccagacaaactccccatctggagcaggctccgtggccagccagtccatcatcgcctataccatgagcctgggcgccgagaacagcgtggcctactccaacaattctatcgccatccctaccaacttcacaatcagcgtgaccacagagatcctgccagtgtctatgaccaagacaagcgtggactgcacaatgtatatctgtggcgatagcaccgagtgctccaacctgctgctgcagtacggctccttttgtacccagctgaatagagccctgacaggcatcgccgtggagcaggataagaacacacaggaggtgttcgcccaggtgaagcagatctacaagaccccacccatcaaggactttggcggcttcaacttcagccagatcctgcctgatccaagcaagccctccaagaggtcttttatcgaggacctgctgttcaacaaggtgaccctggccgatgccggcttcatcaagcagtatggaaaatgcctgggagacatcgcagcccgcgacctgatctgtgcccagaagtttaatggcctgaccgtgctgcctccactgctgacagatgagatgatcgcccagtacacatctgccctgctggccggcaccatcacaagcggatggaccttcggcgcaggagccgccctgcagatcccttttgccatgcagatggcctataggttcaacggcatcggcgtgacccagaatgtgctgtacgagaaccagaagctgatcgccaatcagtttaacagcgccatcggcaagatccaggactctctgtcctctacagccagcgccctgggcaagctgcaggatgtggtgaatcagaacgcccaggccctgaataccctggtgaagcagctgagctccaacttcggcgccatctctagcgtgctgaatgacatcctgagccggctggacccccctgaggcagaggtgcagatcgacaggctgatcacaggccgcctgcagagcctgcagacctacgtgacacagcagctgatcagggcagcagagatcagagcctccgccaatctggccgccaccaagatgagcgagtgcgtgctgggacagtccaagagggtggacttttgtggcaagggctatcacctgatgtctttcccacagagcgcccctcacggcgtggtgtttctgcacgtgacctacgtgccagcccaggagaagaacttcaccacagcaccagccatctgccacgatggaaaggcacactttcctagggagggcgtgttcgtgtctaacggcacccactggtttgtgacacagcgcaatttctacgagccacagatcatcaccacagacaatacattcgtgagcggcaactgtgatgtggtgatcggcatcgtgaacaataccgtgtatgatccactgcagcccgagctggactcctttaaggaggagctggataagtacttcaagaatcacacctctcccgacgtggatctgggcgacatctccggcatcaatgcctctgtggtgaacatccagaaggagatcgaccggctgaacgaggtggccaagaatctgaacgagagcctgatcgatctgcaggagctgggcaagtatgagcagtacatcaagggctctggcagagagaacctgtatttccagggaggaggaggcagcggatacatccctgaggcaccaagggacggacaggcctacgtgcgcaaggatggcgagtgggtgctgctgtccacctttctgggccatcatcaccaccaccaccaccactga

SEQ ID NO: 1715 - DNA, 3846 bp, Artificial Sequence
  Description of Artificial Sequence: Synthetic polynucleotide
atgggcatcctgccaagcccaggaatgcccgccctgctgtctctggtgagcctgctgtccgtgctgctgatgggatgcgtggcagagacaggcacacagtgcgtgaacctgaccacaaggacccagctgccccctgcctataccaattctttcacacggggcgtgtactatcccgacaaggtgtttagaagctccgtgctgcactccacacaggatctgtttctgcctttcttttctaacgtgacctggttccacgccatccacgtgtccggcaccaatggcacaaagcggttcgacaatcccgtgctgccttttaacgatggcgtgtacttcgccagcaccgagaagtccaacatcatcagaggctggatctttggcaccacactggactctaagacacagagcctgctgatcgtgaacaatgccaccaacgtggtgatcaaggtgtgcgagttccagttttgtaatgatccattcctgggcgtgtactatcacaagaacaataagtcctggatggagtctgagtttcgcgtgtattctagcgccaacaattgcacatttgagtacgtgagccagcccttcctgatggacctggagggcaagcagggcaatttcaagaacctgagggagttcgtgtttaagaatatcgatggctacttcaagatctacagcaagcacaccccaatcaacctggtgcgcgacctgccacagggattctccgccctggagccactggtggatctgcccatcggcatcaacatcacccggtttcagacactgctggccctgcacagatcctacctgacaccaggcgactcctctagcggatggaccgcaggagctgccgcctactatgtgggctatctgcagccccggaccttcctgctgaagtacaacgagaatggcaccatcacagacgcagtggattgcgccctggaccccctgtctgagacaaagtgtacactgaagagctttaccgtggagaagggcatctatcagacaagcaatttcagggtgcagcctaccgagtccatcgtgcgctttcccaatatcacaaacctgtgcccttttggcgaggtgttcaacgccaccagattcgccagcgtgtacgcctggaatcggaagagaatctccaactgcgtggccgactattctgtgctgtacaactccgcctctttcagcacctttaagtgctatggcgtgtctcccacaaagctgaatgatctgtgctttaccaacgtgtacgccgatagcttcgtgatcaggggagacgaagtgagacagatcgcaccaggacagacaggaaagatcgcagactacaattataagctgcctgacgatttcaccggctgcgtgatcgcctggaactccaacaatctggattctaaagtgggcggcaactacaattatctgtacaggctgtttcgcaagtccaatctgaagccattcgagcgggacatctccacagagatctaccaggccggctctaccccctgcaatggcgtggagggctttaactgttatttccctctgcagtcttacggcttccagccaacaaacggcgtgggctatcagccctacagagtggtggtgctgtcctttgagctgctgcacgcaccagcaacagtgtgcggcccaaagaagtctaccaatctggtgaagaacaagtgcgtgaacttcaacttcaacggactgaccggcacaggcgtgctgaccgagagcaataagaagttcctgccttttcagcagttcggcagggacatcgcagataccacagacgccgtgcgcgaccctcagaccctggagatcctggacatcacaccatgcagcttcggcggcgtgtccgtgatcacaccaggcaccaatacatccaaccaggtggccgtgctgtatcaggacgtgaattgtaccgaggtgcccgtggcaatccacgcagatcagctgacccctacatggcgggtgtactctaccggcagcaacgtgttccagacaagagccggatgcctgatcggagcagagcacgtgaacaatagctatgagtgcgacatccctatcggcgccggcatctgtgccagctaccagacccagacaaactccccatctggagcaggctccgtggccagccagtccatcatcgcctataccatgagcctgggcgccgagaacagcgtggcctactccaacaattctatcgccatccctaccaacttcacaatcagcgtgaccacagagatcctgccagtgtctatgaccaagacaagcgtggactgcgctatgtatatctgtggcgatagcaccgagtgctccaacctgctgctgcagtacggctccttttgtacccagctgaatagagccctgacaggcatcgccgtggagcaggataagaacacacaggaggtgttcgcccaggtgaagcagatctacaagaccccacccatcaaggactttggcggcttcaacttcagccagatcctgcctgatccaagcaagccctccaagaggtcttttatcgaggacctgctgttcaacaaggtgaccctggccgatgccggcttcatcaagcagtatggagattgcctgggagacatcgcagcccgcgacctgatctgtgcccagaagtttaatggcctgaccgtgctgcctccactgctgacagatgagatgatcgcccagtacacatctgccctgctggccggcaccatcacaagcggatggaccttcggcgcaggagccgccctgcagatcccttttgccatgcagatggcctataggttcaacggcatcggcgtgacccagaatgtgctgtacgagaaccagaagctgatcgccaatcagtttaacagcgccatcggcaagatccaggactctctgtcctctacagccagcgccctgggcaagctgcaggatgtggtgaatcagaacgcccaggccctgaataccctggtgaagcagctgagctccaacttcggcgccatctctagcgtgctgaatgacatcctgagccggctggacccccctgaggcagaggtgcagatcgacaggctgatcacaggccgcctgcagagcctgcagacctacgtgacacagcagctgatcagggcagcagagatcagagcctccgccaatctggccgccaccaagatgagcgagtgcgtgctgggacagtccaagagggtggacttttgtggcaagggctatcacctgatgtctttcccacagagcgcccctcacggcgtggtgtttctgcacgtgacctacgtgccagcccaggagaagaacttcaccacagcaccagccatctgccacgatggaaaggcacactttcctagggagggcgtgttcgtgtctaacggcacccactggtttgtgacacagcgcaatttctacgagccacagatcatcaccacagacaatacattcgtgagcggcaactgtgatgtggtgatcggcatcgtgaacaataccgtgtatgatccactgcagcccgagctggactcctttaaggaggagctggataagtacttcaagaatcacacctctcccgacgtggatctgggcgacatctccggcatcaatgcctctgtggtgaacatccagaaggagatcgaccggctgaacgaggtggccaagaatctgaacgagagcctgatcgatctgcaggagctgggcaagtatgagcagtacatcaagggctctggcagagagaacctgtatttccagggaggaggaggcagcggatacatccctgaggcaccaagggacggacaggcctacgtgcgcaaggatggcgagtgggtgctgctgtccacctttctgggccatcatcaccaccaccaccaccactga

SEQ ID NO: 1716 - DNA, 3846 bp, Artificial Sequence
  Description of Artificial Sequence: Synthetic polynucleotide
atgggcatcctgccaagcccaggaatgcccgccctgctgtctctggtgagcctgctgtccgtgctgctgatgggatgcgtggcagagacaggcacacagtgcgtgaacctgaccacaaggacccagctgccccctgcctataccaattctttcacacggggcgtgtactatcccgacaaggtgtttagaagctccgtgctgcactccacacaggatctgtttctgcctttcttttctaacgtgacctggttccacgccatccacgtgtccggcaccaatggcacaaagcggttcgacaatcccgtgctgccttttaacgatggcgtgtacttcgccagcaccgagaagtccaacatcatcagaggctggatctttggcaccacactggactctaagacacagagcctgctgatcgtgaacaatgccaccaacgtggtgatcaaggtgtgcgagttccagttttgtaatgatccattcctgggcgtgtactatcacaagaacaataagtcctggatggagtctgagtttcgcgtgtattctagcgccaacaattgcacatttgagtacgtgagccagcccttcctgatggacctggagggcaagcagggcaatttcaagaacctgagggagttcgtgtttaagaatatcgatggctacttcaagatctacagcaagcacaccccaatcaacctggtgcgcgacctgccacagggattctccgccctggagccactggtggatctgcccatcggcatcaacatcacccggtttcagacactgctggccctgcacagatcctacctgacaccaggcgactcctctagcggatggaccgcaggagctgccgcctactatgtgggctatctgcagccccggaccttcctgctgaagtacaacgagaatggcaccatcacagacgcagtggattgcgccctggaccccctgtctgagacaaagtgtacactgaagagctttaccgtggagaagggcatctatcagacaagcaatttcagggtgcagcctaccgagtccatcgtgcgctttcccaatatcacaaacctgtgcccttttggcgaggtgttcaacgccaccagattcgccagcgtgtacgcctggaatcggaagagaatctccaactgcgtggccgactattctgtgctgtacaactccgcctctttcagcacctttaagtgctatggcgtgtctcccacaaagctgaatgatctgtgctttaccaacgtgtacgccgatagcttcgtgatcaggggagacgaagtgagacagatcgcaccaggacagacaggaaagatcgcagactacaattataagctgcctgacgatttcaccggctgcgtgatcgcctggaactccaacaatctggattctaaagtgggcggcaactacaattatctgtacaggctgtttcgcaagtccaatctgaagccattcgagcgggacatctccacagagatctaccaggccggctctaccccctgcaatggcgtggagggctttaactgttatttccctctgcagtcttacggcttccagccaacaaacggcgtgggctatcagccctacagagtggtggtgctgtcctttgagctgctgcacgcaccagcaacagtgtgcggcccaaagaagtctaccaatctggtgaagaacaagtgcgtgaacttcaacttcaacggactgaccggcacaggcgtgctgaccgagagcaataagaagttcctgccttttcagcagttcggcagggacatcgcagataccacagacgccgtgcgcgaccctcagaccctggagatcctggacatcacaccatgcagcttcggcggcgtgtccgtgatcacaccaggcaccaatacatccaaccaggtggccgtgctgtatcaggacgtgaattgtaccgaggtgcccgtggcaatccacgcagatcagctgacccctacatggcgggtgtactctaccggcagcaacgtgttccagacaagagccggatgcctgatcggagcagagcacgtgaacaatagctatgagtgcgacatccctatcggcgccggcatctgtgccagctaccagacccagacaaactccccatctggagcaggctccgtggccagcgattccatcatcgcctataccatgagcctgggcgccgagaacagcgtggcctactccaacaattctatcgccatccctaccaacttcacaatcagcgtgaccacagagatcctgccagtgtctatgaccaagacaagcgtggactgcacaatgtatatctgtggcgatagcaccgagtgctccaacctgctgctgcagtacggctccttttgtacccagctgaatagagccctgacaggcatcgccgtggagcaggataagaacacacaggaggtgttcgcccaggtgaagcagatctacaagaccccacccatcaaggactttggcggcttcaacttcagccagatcctgcctgatccaagcaagccctccaagaggtcttttatcgaggacctgctgttcaacaaggtgaccctggccgatgccggcttcatcaagcagtatggagattgcctgggagacatcgcagcccgcgacctgatctgtgcccagaagtttaatggcctgaccgtgctgcctccactgctgacagatgagatgatcgcccagtacacatctgccctgctggccggcaccatcacaagcggatggaccttcggcgcaggagccgccctgcagatcccttttgccatgcagatggcctataggttcaacggcatcggcgtgacccagaatgtgctgtacgagaaccagaagctgatcgccaatcagtttaacagcgccatcggcaagatccaggactctctgtcctctacagccagcgccctgggcaagctgcaggatgtggtgaatcagaacgcccaggccctgaataccctggtgaagcagctgagctccaacttcggcgccatctctagcgtgctgaatgacatcctgagccggctggacccccctgaggcagaggtgcagatcgacaggctgatcacaggccgcctgcagagcctgcagacctacgtgacacagcagctgatcagggcagcagagatcagagcctccgccaatctggccgccaccaagatgagcgagtgcgtgctgggacagtccaagagggtggacttttgtggcaagggctatcacctgatgtctttcccacagagcgcccctcacggcgtggtgtttctgcacgtgacctacgtgccagcccaggagaagaacttcaccacagcaccagccatctgccacgatggaaaggcacactttcctagggagggcgtgttcgtgtctaacggcacccactggtttgtgacacagcgcaatttctacgagccacagatcatcaccacagacaatacattcgtgagcggcaactgtgatgtggtgatcggcatcgtgaacaataccgtgtatgatccactgcagcccgagctggactcctttaaggaggagctggataagtacttcaagaatcacacctctcccgacgtggatctgggcgacatctccggcatcaatgcctctgtggtgaacatccagaaggagatcgaccggctgaacgaggtggccaagaatctgaacgagagcctgatcgatctgcaggagctgggcaagtatgagcagtacatcaagggctctggcagagagaacctgtatttccagggaggaggaggcagcggatacatccctgaggcaccaagggacggacaggcctacgtgcgcaaggatggcgagtgggtgctgctgtccacctttctgggccatcatcaccaccaccaccaccactga

SEQ ID NO: 1717 - DNA, 3846 bp, Artificial Sequence
  Description of Artificial Sequence: Synthetic polynucleotide
atgggcatcctgccaagcccaggaatgcccgccctgctgtctctggtgagcctgctgtccgtgctgctgatgggatgcgtggcagagacaggcacacagtgcgtgaacctgaccacaaggacccagctgccccctgcctataccaattctttcacacggggcgtgtactatcccgacaaggtgtttagaagctccgtgctgcactccacacaggatctgtttctgcctttcttttctaacgtgacctggttccacgccatccacgtgtccggcaccaatggcacaaagcggttcgacaatcccgtgctgccttttaacgatggcgtgtacttcgccagcaccgagaagtccaacatcatcagaggctggatctttggcaccacactggactctaagacacagagcctgctgatcgtgaacaatgccaccaacgtggtgatcaaggtgtgcgagttccagttttgtaatgatccattcctgggcgtgtactatcacaagaacaataagtcctggatggagtctgagtttcgcgtgtattctagcgccaacaattgcacatttgagtacgtgagccagcccttcctgatggacctggagggcaagcagggcaatttcaagaacctgagggagttcgtgtttaagaatatcgatggctacttcaagatctacagcaagcacaccccaatcaacctggtgcgcgacctgccacagggattctccgccctggagccactggtggatctgcccatcggcatcaacatcacccggtttcagacactgctggccctgcacagatcctacctgacaccaggcgactcctctagcggatggaccgcaggagctgccgcctactatgtgggctatctgcagccccggaccttcctgctgaagtacaacgagaatggcaccatcacagacgcagtggattgcgccctggaccccctgtctgagacaaagtgtacactgaagagctttaccgtggagaagggcatctatcagacaagcaatttcagggtgcagcctaccgagtccatcgtgcgctttcccaatatcacaaacctgtgcccttttggcgaggtgttcaacgccaccagattcgccagcgtgtacgcctggaatcggaagagaatctccaactgcgtggccgactattctgtgctgtacaactccgcctctttcagcacctttaagtgctatggcgtgtctcccacaaagctgaatgatctgtgctttaccaacgtgtacgccgatagcttcgtgatcaggggagacgaagtgagacagatcgcaccaggacagacaggaaagatcgcagactacaattataagctgcctgacgatttcaccggctgcgtgatcgcctggaactccaacaatctggattctaaagtgggcggcaactacaattatctgtacaggctgtttcgcaagtccaatctgaagccattcgagcgggacatctccacagagatctaccaggccggctctaccccctgcaatggcgtggagggctttaactgttatttccctctgcagtcttacggcttccagccaacaaacggcgtgggctatcagccctacagagtggtggtgctgtcctttgagctgctgcacgcaccagcaacagtgtgcggcccaaagaagtctaccaatctggtgaagaacaagtgcgtgaacttcaacttcaacggactgaccggcacaggcgtgctgaccgagagcaataagaagttcctgccttttcagcagttcggcagggacatcgcagataccacagacgccgtgcgcgaccctcagaccctggagatcctggacatcacaccatgcagcttcggcggcgtgtccgtgatcacaccaggcaccaatacatccaaccaggtggccgtgctgtatcaggacgtgaattgtaccgaggtgcccgtggcaatccacgcagatcagctgacccctacatggcgggtgtactctaccggcagcaacgtgttccagacaagagccggatgcctgatcggagcagagcacgtgaacaatagctatgagtgcgacatccctatcggcgccggcatctgtgccagctaccagacccagacaaactccccatctggagcaggctccgtggccagcaattccatcatcgcctataccatgagcctgggcgccgagaacagcgtggcctactccaacaattctatcgccatccctaccaacttcacaatcagcgtgaccacagagatcctgccagtgtctatgaccaagacaagcgtggactgcacaatgtatatctgtggcgatagcaccgagtgctccaacctgctgctgcagtacggctccttttgtacccagctgaatagagccctgacaggcatcgccgtggagcaggataagaacacacaggaggtgttcgcccaggtgaagcagatctacaagaccccacccatcaaggactttggcggcttcaacttcagccagatcctgcctgatccaagcaagccctccaagaggtcttttatcgaggacctgctgttcaacaaggtgaccctggccgatgccggcttcatcaagcagtatggagattgcctgggagacatcgcagcccgcgacctgatctgtgcccagaagtttaatggcctgaccgtgctgcctccactgctgacagatgagatgatcgcccagtacacatctgccctgctggccggcaccatcacaagcggatggaccttcggcgcaggagccgccctgcagatcccttttgccatgcagatggcctataggttcaacggcatcggcgtgacccagaatgtgctgtacgagaaccagaagctgatcgccaatcagtttaacagcgccatcggcaagatccaggactctctgtcctctacagccagcgccctgggcaagctgcaggatgtggtgaatcagaacgcccaggccctgaataccctggtgaagcagctgagctccaacttcggcgccatctctagcgtgctgaatgacatcctgagccggctggacccccctgaggcagaggtgcagatcgacaggctgatcacaggccgcctgcagagcctgcagacctacgtgacacagcagctgatcagggcagcagagatcagagcctccgccaatctggccgccaccaagatgagcgagtgcgtgctgggacagtccaagagggtggacttttgtggcaagggctatcacctgatgtctttcccacagagcgcccctcacggcgtggtgtttctgcacgtgacctacgtgccagcccaggagaagaacttcaccacagcaccagccatctgccacgatggaaaggcacactttcctagggagggcgtgttcgtgtctaacggcacccactggtttgtgacacagcgcaatttctacgagccacagatcatcaccacagacaatacattcgtgagcggcaactgtgatgtggtgatcggcatcgtgaacaataccgtgtatgatccactgcagcccgagctggactcctttaaggaggagctggataagtacttcaagaatcacacctctcccgacgtggatctgggcgacatctccggcatcaatgcctctgtggtgaacatccagaaggagatcgaccggctgaacgaggtggccaagaatctgaacgagagcctgatcgatctgcaggagctgggcaagtatgagcagtacatcaagggctctggcagagagaacctgtatttccagggaggaggaggcagcggatacatccctgaggcaccaagggacggacaggcctacgtgcgcaaggatggcgagtgggtgctgctgtccacctttctgggccatcatcaccaccaccaccaccactga

SEQ ID NO: 1718 - DNA, 3846 bp, Artificial Sequence
  Description of Artificial Sequence: Synthetic polynucleotide
atgggcatcctgccaagcccaggaatgcccgccctgctgtctctggtgagcctgctgtccgtgctgctgatgggatgcgtggcagagacaggcacacagtgcgtgaacctgaccacaaggacccagctgccccctgcctataccaattctttcacacggggcgtgtactatcccgacaaggtgtttagaagctccgtgctgcactccacacaggatctgtttctgcctttcttttctaacgtgacctggttccacgccatccacgtgtccggcaccaatggcacaaagcggttcgacaatcccgtgctgccttttaacgatggcgtgtacttcgccagcaccgagaagtccaacatcatcagaggctggatctttggcaccacactggactctaagacacagagcctgctgatcgtgaacaatgccaccaacgtggtgatcaaggtgtgcgagttccagttttgtaatgatccattcctgggcgtgtactatcacaagaacaataagtcctggatggagtctgagtttcgcgtgtattctagcgccaacaattgcacatttgagtacgtgagccagcccttcctgatggacctggagggcaagcagggcaatttcaagaacctgagggagttcgtgtttaagaatatcgatggctacttcaagatctacagcaagcacaccccaatcaacctggtgcgcgacctgccacagggattctccgccctggagccactggtggatctgcccatcggcatcaacatcacccggtttcagacactgctggccctgcacagatcctacctgacaccaggcgactcctctagcggatggaccgcaggagctgccgcctactatgtgggctatctgcagccccggaccttcctgctgaagtacaacgagaatggcaccatcacagacgcagtggattgcgccctggaccccctgtctgagacaaagtgtacactgaagagctttaccgtggagaagggcatctatcagacaagcaatttcagggtgcagcctaccgagtccatcgtgcgctttcccaatatcacaaacctgtgcccttttggcgaggtgttcaacgccaccagattcgccagcgtgtacgcctggaatcggaagagaatctccaactgcgtggccgactattctgtgctgtacaactccgcctctttcagcacctttaagtgctatggcgtgtctcccacaaagctgaatgatctgtgctttaccaacgtgtacgccgatagcttcgtgatcaggggagacgaagtgagacagatcgcaccaggacagacaggaaagatcgcagactacaattataagctgcctgacgatttcaccggctgcgtgatcgcctggaactccaacaatctggattctaaagtgggcggcaactacaattatctgtacaggctgtttcgcaagtccaatctgaagccattcgagcgggacatctccacagagatctaccaggccggctctaccccctgcaatggcgtggagggctttaactgttatttccctctgcagtcttacggcttccagccaacaaacggcgtgggctatcagccctacagagtggtggtgctgtcctttgagctgctgcacgcaccagcaacagtgtgcggcccaaagaagtctaccaatctggtgaagaacaagtgcgtgaacttcaacttcaacggactgaccggcacaggcgtgctgaccgagagcaataagaagttcctgccttttcagcagttcggcagggacatcgcagataccacagacgccgtgcgcgaccctcagaccctggagatcctggacatcacaccatgcagcttcggcggcgtgtccgtgatcacaccaggcaccaatacatccaaccaggtggccgtgctgtatcaggacgtgaattgtaccgaggtgcccgtggcaatccacgcagatcagctgacccctacatggcgggtgtactctaccggcagcaacgtgttccagacaagagccggatgcctgatcggagcagagcacgtgaacaatagctatgagtgcgacatccctatcggcgccggcatctgtgccagctaccagacccagacaaactccccatctggagcaggctccgtggccagccagtccatcatcgcctataccatgagcctgggcgccgagaacagcgtggcctactccaacaattctatcgccatccctaccaacttcacaatcagcgtgaccacagagatcctgccagtgtctatgaccaagacaagcgtggactgcacaatgtatatctgtggcgatagcaccgagtgctccaacctgctgctgcagtacggctccttttgtacccagctgaatagagccctgacaggcatcgccgctgagcaggataagaacacacaggaggtgttcgcccaggtgaagcagatctacaagaccccacccatcaaggactttggcggcttcaacttcagccagatcctgcctgatccaagcaagccctccaagaggtcttttatcgaggacctgctgttcaacaaggtgaccctggccgatgccggcttcatcaagcagtatggagattgcctgggagacatcgcagcccgcgacctgatctgtgcccagaagtttaatggcctgaccgtgctgcctccactgctgacagatgagatgatcgcccagtacacatctgccctgctggccggcaccatcacaagcggatggaccttcggcgcaggagccgccctgcagatcccttttgccatgcagatggcctataggttcaacggcatcggcgtgacccagaatgtgctgtacgagaaccagaagctgatcgccaatcagtttaacagcgccatcggcaagatccaggactctctgtcctctacagccagcgccctgggcaagctgcaggatgtggtgaatcagaacgcccaggccctgaataccctggtgaagcagctgagctccaacttcggcgccatctctagcgtgctgaatgacatcctgagccggctggacccccctgaggcagaggtgcagatcgacaggctgatcacaggccgcctgcagagcctgcagacctacgtgacacagcagctgatcagggcagcagagatcagagcctccgccaatctggccgccaccaagatgagcgagtgcgtgctgggacagtccaagagggtggacttttgtggcaagggctatcacctgatgtctttcccacagagcgcccctcacggcgtggtgtttctgcacgtgacctacgtgccagcccaggagaagaacttcaccacagcaccagccatctgccacgatggaaaggcacactttcctagggagggcgtgttcgtgtctaacggcacccactggtttgtgacacagcgcaatttctacgagccacagatcatcaccacagacaatacattcgtgagcggcaactgtgatgtggtgatcggcatcgtgaacaataccgtgtatgatccactgcagcccgagctggactcctttaaggaggagctggataagtacttcaagaatcacacctctcccgacgtggatctgggcgacatctccggcatcaatgcctctgtggtgaacatccagaaggagatcgaccggctgaacgaggtggccaagaatctgaacgagagcctgatcgatctgcaggagctgggcaagtatgagcagtacatcaagggctctggcagagagaacctgtatttccagggaggaggaggcagcggatacatccctgaggcaccaagggacggacaggcctacgtgcgcaaggatggcgagtgggtgctgctgtccacctttctgggccatcatcaccaccaccaccaccactga

SEQ ID NO: 1719 - DNA, 3846 bp, Artificial Sequence
  Description of Artificial Sequence: Synthetic polynucleotide
atgggcatcctgccaagcccaggaatgcccgccctgctgtctctggtgagcctgctgtccgtgctgctgatgggatgcgtggcagagacaggcacacagtgcgtgaacctgaccacaaggacccagctgccccctgcctataccaattctttcacacggggcgtgtactatcccgacaaggtgtttagaagctccgtgctgcactccacacaggatctgtttctgcctttcttttctaacgtgacctggttccacgccatccacgtgtccggcaccaatggcacaaagcggttcgacaatcccgtgctgccttttaacgatggcgtgtacttcgccagcaccgagaagtccaacatcatcagaggctggatctttggcaccacactggactctaagacacagagcctgctgatcgtgaacaatgccaccaacgtggtgatcaaggtgtgcgagttccagttttgtaatgatccattcctgggcgtgtactatcacaagaacaataagtcctggatggagtctgagtttcgcgtgtattctagcgccaacaattgcacatttgagtacgtgagccagcccttcctgatggacctggagggcaagcagggcaatttcaagaacctgagggagttcgtgtttaagaatatcgatggctacttcaagatctacagcaagcacaccccaatcaacctggtgcgcgacctgccacagggattctccgccctggagccactggtggatctgcccatcggcatcaacatcacccggtttcagacactgctggccctgcacagatcctacctgacaccaggcgactcctctagcggatggaccgcaggagctgccgcctactatgtgggctatctgcagccccggaccttcctgctgaagtacaacgagaatggcaccatcacagacgcagtggattgcgccctggaccccctgtctgagacaaagtgtacactgaagagctttaccgtggagaagggcatctatcagacaagcaatttcagggtgcagcctaccgagtccatcgtgcgctttcccaatatcacaaacctgtgcccttttggcgaggtgttcaacgccaccagattcgccagcgtgtacgcctggaatcggaagagaatctccaactgcgtggccgactattctgtgctgtacaactccgcctctttcagcacctttaagtgctatggcgtgtctcccacaaagctgaatgatctgtgctttaccaacgtgtacgccgatagcttcgtgatcaggggagacgaagtgagacagatcgcaccaggacagacaggaaagatcgcagactacaattataagctgcctgacgatttcaccggctgcgtgatcgcctggaactccaacaatctggattctaaagtgggcggcaactacaattatctgtacaggctgtttcgcaagtccaatctgaagccattcgagcgggacatctccacagagatctaccaggccggctctaccccctgcaatggcgtggagggctttaactgttatttccctctgcagtcttacggcttccagccaacaaacggcgtgggctatcagccctacagagtggtggtgctgtcctttgagctgctgcacgcaccagcaacagtgtgcggcccaaagaagtctaccaatctggtgaagaacaagtgcgtgaacttcaacttcaacggactgaccggcacaggcgtgctgaccgagagcaataagaagttcctgccttttcagcagttcggcagggacatcgcagataccacagacgccgtgcgcgaccctcagaccctggagatcctggacatcacaccatgcagcttcggcggcgtgtccgtgatcacaccaggcaccaatacatccaaccaggtggccgtgctgtatcaggacgtgaattgtaccgaggtgcccgtggcaatccacgcagatcagctgacccctacatggcgggtgtactctaccggcagcaacgtgttccagacaagagccggatgcctgatcggagcagagcacgtgaacaatagctatgagtgcgacatccctatcggcgccggcatctgtgccagctaccagacccagacaaactccccatctggagcaggctccgtggccagccagtccatcatcgcctataccatgagcctgggcgccgagaacagcgtggcctactccaacaattctatcgccatccctaccaacttcacaatcagcgtgaccacagagatcctgccagtgtctatgaccaagacaagcgtggactgcacaatgtatatctgtggcgatagcaccgagtgctccaacctgctgctgcagtacggctccttttgtacccagctgaatagagccctgacaggcatcgccgtggagcaggataagaacacacaggaggtgttcgcccaggtgaagcagatctacaagaccccacccatcaaggactttggcggcttcaacttcagccagatcctgcctgatccaagcaagccctccaagaggtcttttatcgaggacctgctgttcaacaaggtgaccctggccgatgccggcttcatcaagcagtatggagattgcctgggagacatcgcagcccgcgacctgatctgtgcccagaagtttaatggcctgaccgtgctgcctccactgctgacagatgagatgatcgcccagtacacatctgccctgctggccggcaccatcacaagcggatggaccttcggcgcaggagccgccctgcagatcccttttgccatgcagatggcctataggttcaacggcatcggcgtgacccagaatgtgctgtacgagaaccagaagctgatcgccaatcagtttaacagcgccatcggcaagatccaggactctctgtcctctacagccagcgccctgggcaagctgcaggatgtggtgaatcagaacgcccaggccctgaatgaactggtgaagcagctgagctccaacttcggcgccatctctagcgtgctgaatgacatcctgagccggctggacccccctgaggcagaggtgcagatcgacaggctgatcacaggccgcctgcagagcctgcagacctacgtgacacagcagctgatcagggcagcagagatcagagcctccgccaatctggccgccaccaagatgagcgagtgcgtgctgggacagtccaagagggtggacttttgtggcaagggctatcacctgatgtctttcccacagagcgcccctcacggcgtggtgtttctgcacgtgacctacgtgccagcccaggagaagaacttcaccacagcaccagccatctgccacgatggaaaggcacactttcctagggagggcgtgttcgtgtctaacggcacccactggtttgtgacacagcgcaatttctacgagccacagatcatcaccacagacaatacattcgtgagcggcaactgtgatgtggtgatcggcatcgtgaacaataccgtgtatgatccactgcagcccgagctggactcctttaaggaggagctggataagtacttcaagaatcacacctctcccgacgtggatctgggcgacatctccggcatcaatgcctctgtggtgaacatccagaaggagatcgaccggctgaacgaggtggccaagaatctgaacgagagcctgatcgatctgcaggagctgggcaagtatgagcagtacatcaagggctctggcagagagaacctgtatttccagggaggaggaggcagcggatacatccctgaggcaccaagggacggacaggcctacgtgcgcaaggatggcgagtgggtgctgctgtccacctttctgggccatcatcaccaccaccaccaccactga

SEQ ID NO: 1720 - DNA, 3846 bp, Artificial Sequence
  Description of Artificial Sequence: Synthetic polynucleotide
atgggcatcctgccaagcccaggaatgcccgccctgctgtctctggtgagcctgctgtccgtgctgctgatgggatgcgtggcagagacaggcacacagtgcgtgaacctgaccacaaggacccagctgccccctgcctataccaattctttcacacggggcgtgtactatcccgacaaggtgtttagaagctccgtgctgcactccacacaggatctgtttctgcctttcttttctaacgtgacctggttccacgccatccacgtgtccggcaccaatggcacaaagcggttcgacaatcccgtgctgccttttaacgatggcgtgtacttcgccagcaccgagaagtccaacatcatcagaggctggatctttggcaccacactggactctaagacacagagcctgctgatcgtgaacaatgccaccaacgtggtgatcaaggtgtgcgagttccagttttgtaatgatccattcctgggcgtgtactatcacaagaacaataagtcctggatggagtctgagtttcgcgtgtattctagcgccaacaattgcacatttgagtacgtgagccagcccttcctgatggacctggagggcaagcagggcaatttcaagaacctgagggagttcgtgtttaagaatatcgatggctacttcaagatctacagcaagcacaccccaatcaacctggtgcgcgacctgccacagggattctccgccctggagccactggtggatctgcccatcggcatcaacatcacccggtttcagacactgctggccctgcacagatcctacctgacaccaggcgactcctctagcggatggaccgcaggagctgccgcctactatgtgggctatctgcagccccggaccttcctgctgaagtacaacgagaatggcaccatcacagacgcagtggattgcgccctggaccccctgtctgagacaaagtgtacactgaagagctttaccgtggagaagggcatctatcagacaagcaatttcagggtgcagcctaccgagtccatcgtgcgctttcccaatatcacaaacctgtgcccttttggcgaggtgttcaacgccaccagattcgccagcgtgtacgcctggaatcggaagagaatctccaactgcgtggccgactattctgtgctgtacaactccgcctctttcagcacctttaagtgctatggcgtgtctcccacaaagctgaatgatctgtgctttaccaacgtgtacgccgatagcttcgtgatcaggggagacgaagtgagacagatcgcaccaggacagacaggaaagatcgcagactacaattataagctgcctgacgatttcaccggctgcgtgatcgcctggaactccaacaatctggattctaaagtgggcggcaactacaattatctgtacaggctgtttcgcaagtccaatctgaagccattcgagcgggacatctccacagagatctaccaggccggctctaccccctgcaatggcgtggagggctttaactgttatttccctctgcagtcttacggcttccagccaacaaacggcgtgggctatcagccctacagagtggtggtgctgtcctttgagctgctgcacgcaccagcaacagtgtgcggcccaaagaagtctaccaatctggtgaagaacaagtgcgtgaacttcaacttcaacggactgaccggcacaggcgtgctgaccgagagcaataagaagttcctgccttttcagcagttcggcagggacatcgcagataccacagacgccgtgcgcgaccctcagaccctggagatcctggacatcacaccatgcagcttcggcggcgtgtccgtgatcacaccaggcaccaatacatccaaccaggtggccgtgctgtatcaggacgtgaattgtaccgaggtgcccgtggcaatccacgcagatcagctgacccctacatggcgggtgtactctaccggcagcaacgtgttccagacaagagccggatgcctgatcggagcagagcacgtgaacaatagctatgagtgcgacatccctatcggcgccggcatctgtgccagctaccagacccagacaaactccccatctggagcaggctccgtggccagccagtccatcatcgcctataccatgagcctgggcgccgagaacagcgtggcctactccaacaattctatcgccatccctaccaacttcacaatcagcgtgaccacagagatcctgccagtgtctatgcaaaagacaagcgtggactgcacaatgtatatctgtggcgatagcaccgagtgctccaacctgctgctgcagtacggctccttttgtacccagctgaatagagccctgacaggcatcgccgtggagcaggataagaacacacaggaggtgttcgcccaggtgaagcagatctacaagaccccacccatcaaggactttggcggcttcaacttcagccagatcctgcctgatccaagcaagccctccaagaggtcttttatcgaggacctgctgttcaacaaggtgaccctggccgatgccggcttcatcaagcagtatggagattgcctgggagacatcgcagcccgcgacctgatctgtgcccagaagtttaatggcctgaccgtgctgcctccactgctgacagatgagatgatcgcccagtacacatctgccctgctggccggcaccatcacaagcggatggaccttcggcgcaggagccgccctgcagatcccttttgccatgcagatggcctataggttcaacggcatcggcgtgacccagaatgtgctgtacgagaaccagaagctgatcgccaatcagtttaacagcgccatcggcaagatccaggactctctgtcctctacagccagcgccctgggcaagctgcaggatgtggtgaatcagaacgcccaggccctgaataccctggtgaagcagctgagctccaacttcggcgccatctctagcgtgctgaatgacatcctgagccggctggacccccctgaggcagaggtgcagatcgacaggctgatcacaggccgcctgcagagcctgcagacctacgtgacacagcagctgatcagggcagcagagatcagagcctccgccaatctggccgccaccaagatgagcgagtgcgtgctgggacagtccaagagggtggacttttgtggcaagggctatcacctgatgtctttcccacagagcgcccctcacggcgtggtgtttctgcacgtgacctacgtgccagcccaggagaagaacttcaccacagcaccagccatctgccacgatggaaaggcacactttcctagggagggcgtgttcgtgtctaacggcacccactggtttgtgacacagcgcaatttctacgagccacagatcatcaccacagacaatacattcgtgagcggcaactgtgatgtggtgatcggcatcgtgaacaataccgtgtatgatccactgcagcccgagctggactcctttaaggaggagctggataagtacttcaagaatcacacctctcccgacgtggatctgggcgacatctccggcatcaatgcctctgtggtgaacatccagaaggagatcgaccggctgaacgaggtggccaagaatctgaacgagagcctgatcgatctgcaggagctgggcaagtatgagcagtacatcaagggctctggcagagagaacctgtatttccagggaggaggaggcagcggatacatccctgaggcaccaagggacggacaggcctacgtgcgcaaggatggcgagtgggtgctgctgtccacctttctgggccatcatcaccaccaccaccaccactga

SEQ ID NO: 1721 - DNA, 3846 bp, Artificial Sequence
  Description of Artificial Sequence: Synthetic polynucleotide
atgggcatcctgccaagcccaggaatgcccgccctgctgtctctggtgagcctgctgtccgtgctgctgatgggatgcgtggcagagacaggcacacagtgcgtgaacctgaccacaaggacccagctgccccctgcctataccaattctttcacacggggcgtgtactatcccgacaaggtgtttagaagctccgtgctgcactccacacaggatctgtttctgcctttcttttctaacgtgacctggttccacgccatccacgtgtccggcaccaatggcacaaagcggttcgacaatcccgtgctgccttttaacgatggcgtgtacttcgccagcaccgagaagtccaacatcatcagaggctggatctttggcaccacactggactctaagacacagagcctgctgatcgtgaacaatgccaccaacgtggtgatcaaggtgtgcgagttccagttttgtaatgatccattcctgggcgtgtactatcacaagaacaataagtcctggatggagaacgagtttcgcgtgtattctagcgccaacaattgcacatttgagtacgtgagccagcccttcctgatggacctggagggcaagcagggcaatttcaagaacctgagggagttcgtgtttaagaatatcgatggctacttcaagatctacagcaagcacaccccaatcaacctggtgcgcgacctgccacagggattctccgccctggagccactggtggatctgcccatcggcatcaacatcacccggtttcagacactgctggccctgcacagatcctacctgacaccaggcgactcctctagcggatggaccgcaggagctgccgcctactatgtgggctatctgcagccccggaccttcctgctgaagtacaacgagaatggcaccatcacagacgcagtggattgcgccctggaccccctgtctgagacaaagtgtacactgaagagctttaccgtggagaagggcatctatcagacaagcaatttcagggtgcagcctaccgagtccatcgtgcgctttcccaatatcacaaacctgtgcccttttggcgaggtgttcaacgccaccagattcgccagcgtgtacgcctggaatcggaagagaatctccaactgcgtggccgactattctgtgctgtacaactccgcctctttcagcacctttaagtgctatggcgtgtctcccacaaagctgaatgatctgtgctttaccaacgtgtacgccgatagcttcgtgatcaggggagacgaagtgagacagatcgcaccaggacagacaggaaagatcgcagactacaattataagctgcctgacgatttcaccggctgcgtgatcgcctggaactccaacaatctggattctaaagtgggcggcaactacaattatctgtacaggctgtttcgcaagtccaatctgaagccattcgagcgggacatctccacagagatctaccaggccggctctaccccctgcaatggcgtggagggctttaactgttatttccctctgcagtcttacggcttccagccaacaaacggcgtgggctatcagccctacagagtggtggtgctgtcctttgagctgctgcacgcaccagcaacagtgtgcggcccaaagaagtctaccaatctggtgaagaacaagtgcgtgaacttcaacttcaacggactgaccggcacaggcgtgctgaccgagagcaataagaagttcctgccttttcagcagttcggcagggacatcgcagataccacagacgccgtgcgcgaccctcagaccctggagatcctggacatcacaccatgcagcttcggcggcgtgtccgtgatcacaccaggcaccaatacatccaaccaggtggccgtgctgtatcaggacgtgaattgtaccgaggtgcccgtggcaatccacgcagatcagctgacccctacatggcgggtgtactctaccggcagcaacgtgttccagacaagagccggatgcctgatcggagcagagcacgtgaacaatagctatgagtgcgacatccctatcggcgccggcatctgtgccagctaccagacccagacaaactccccatctggagcaggctccgtggccagccagtccatcatcgcctataccatgagcctgggcgccgagaacagcgtggcctactccaacaattctatcgccatccctaccaacttcacaatcagcgtgaccacagagatcctgccagtgtctatgaccaagacaagcgtggactgcacaatgtatatctgtggcgatagcaccgagtgctccaacctgctgctgcagtacggctccttttgtacccagctgaatagagccctgacaggcatcgccgtggagcaggataagaacacacaggaggtgttcgcccaggtgaagcagatctacaagaccccacccatcaaggactttggcggcttcaacttcagccagatcctgcctgatccaagcaagccctccaagaggtcttttatcgaggacctgctgttcaacaaggtgaccctggccgatgccggcttcatcaagcagtatggagattgcctgggagacatcgcagcccgcgacctgatctgtgcccagaagtttaatggcctgaccgtgctgcctccactgctgacagatgagatgatcgcccagtacacatctgccctgctggccggcaccatcacaagcggatggaccttcggcgcaggagccgccctgcagatcccttttgccatgcagatggcctataggttcaacggcatcggcgtgacccagaatgtgctgtacgagaaccagaagctgatcgccaatcagtttaacagcgccatcggcaagatccaggactctctgtcctctacagccagcgccctgggcaagctgcaggatgtggtgaatcagaacgcccaggccctgaataccctggtgaagcagctgagctccaacttcggcgccatctctagcgtgctgaatgacatcctgagccggctggacccccctgaggcagaggtgcagatcgacaggctgatcacaggccgcctgcagagcctgcagacctacgtgacacagcagctgatcagggcagcagagatcagagcctccgccaatctggccgccaccaagatgagcgagtgcgtgctgggacagtccaagagggtggacttttgtggcaagggctatcacctgatgtctttcccacagagcgcccctcacggcgtggtgtttctgcacgtgacctacgtgccagcccaggagaagaacttcaccacagcaccagccatctgccacgatggaaaggcacactttcctagggagggcgtgttcgtgtctaacggcacccactggtttgtgacacagcgcaatttctacgagccacagatcatcaccacagacaatacattcgtgagcggcaactgtgatgtggtgatcggcatcgtgaacaataccgtgtatgatccactgcagcccgagctggactcctttaaggaggagctggataagtacttcaagaatcacacctctcccgacgtggatctgggcgacatctccggcatcaatgcctctgtggtgaacatccagaaggagatcgaccggctgaacgaggtggccaagaatctgaacgagagcctgatcgatctgcaggagctgggcaagtatgagcagtacatcaagggctctggcagagagaacctgtatttccagggaggaggaggcagcggatacatccctgaggcaccaagggacggacaggcctacgtgcgcaaggatggcgagtgggtgctgctgtccacctttctgggccatcatcaccaccaccaccaccactga

SEQ ID NO: 1722 - DNA, 3846 bp, Artificial Sequence
  Description of Artificial Sequence: Synthetic polynucleotide
atgggcatcctgccaagcccaggaatgcccgccctgctgtctctggtgagcctgctgtccgtgctgctgatgggatgcgtggcagagacaggcacacagtgcgtgaacctgaccacaaggacccagctgccccctgcctataccaattctttcacacggggcgtgtactatcccgacaaggtgtttagaagctccgtgctgcactccacacaggatctgtttctgcctttcttttctaacgtgacctggttccacgccatccacgtgtccggcaccaatggcacaaagcggttcgacaatcccgtgctgccttttaacgatggcgtgtacttcgccagcaccgagaagtccaacatcatcagaggctggatctttggcaccacactggactctaagacacagagcctgctgatcgtgaacaatgccaccaacgtggtgatcaaggtgtgcgagttccagttttgtaatgatccattcctgggcgtgtactatcacaagaacaataagtcctggatggaggacgagtttcgcgtgtattctagcgccaacaattgcacatttgagtacgtgagccagcccttcctgatggacctggagggcaagcagggcaatttcaagaacctgagggagttcgtgtttaagaatatcgatggctacttcaagatctacagcaagcacaccccaatcaacctggtgcgcgacctgccacagggattctccgccctggagccactggtggatctgcccatcggcatcaacatcacccggtttcagacactgctggccctgcacagatcctacctgacaccaggcgactcctctagcggatggaccgcaggagctgccgcctactatgtgggctatctgcagccccggaccttcctgctgaagtacaacgagaatggcaccatcacagacgcagtggattgcgccctggaccccctgtctgagacaaagtgtacactgaagagctttaccgtggagaagggcatctatcagacaagcaatttcagggtgcagcctaccgagtccatcgtgcgctttcccaatatcacaaacctgtgcccttttggcgaggtgttcaacgccaccagattcgccagcgtgtacgcctggaatcggaagagaatctccaactgcgtggccgactattctgtgctgtacaactccgcctctttcagcacctttaagtgctatggcgtgtctcccacaaagctgaatgatctgtgctttaccaacgtgtacgccgatagcttcgtgatcaggggagacgaagtgagacagatcgcaccaggacagacaggaaagatcgcagactacaattataagctgcctgacgatttcaccggctgcgtgatcgcctggaactccaacaatctggattctaaagtgggcggcaactacaattatctgtacaggctgtttcgcaagtccaatctgaagccattcgagcgggacatctccacagagatctaccaggccggctctaccccctgcaatggcgtggagggctttaactgttatttccctctgcagtcttacggcttccagccaacaaacggcgtgggctatcagccctacagagtggtggtgctgtcctttgagctgctgcacgcaccagcaacagtgtgcggcccaaagaagtctaccaatctggtgaagaacaagtgcgtgaacttcaacttcaacggactgaccggcacaggcgtgctgaccgagagcaataagaagttcctgccttttcagcagttcggcagggacatcgcagataccacagacgccgtgcgcgaccctcagaccctggagatcctggacatcacaccatgcagcttcggcggcgtgtccgtgatcacaccaggcaccaatacatccaaccaggtggccgtgctgtatcaggacgtgaattgtaccgaggtgcccgtggcaatccacgcagatcagctgacccctacatggcgggtgtactctaccggcagcaacgtgttccagacaagagccggatgcctgatcggagcagagcacgtgaacaatagctatgagtgcgacatccctatcggcgccggcatctgtgccagctaccagacccagacaaactccccatctggagcaggctccgtggccagccagtccatcatcgcctataccatgagcctgggcgccgagaacagcgtggcctactccaacaattctatcgccatccctaccaacttcacaatcagcgtgaccacagagatcctgccagtgtctatgaccaagacaagcgtggactgcacaatgtatatctgtggcgatagcaccgagtgctccaacctgctgctgcagtacggctccttttgtacccagctgaatagagccctgacaggcatcgccgtggagcaggataagaacacacaggaggtgttcgcccaggtgaagcagatctacaagaccccacccatcaaggactttggcggcttcaacttcagccagatcctgcctgatccaagcaagccctccaagaggtcttttatcgaggacctgctgttcaacaaggtgaccctggccgatgccggcttcatcaagcagtatggagattgcctgggagacatcgcagcccgcgacctgatctgtgcccagaagtttaatggcctgaccgtgctgcctccactgctgacagatgagatgatcgcccagtacacatctgccctgctggccggcaccatcacaagcggatggaccttcggcgcaggagccgccctgcagatcccttttgccatgcagatggcctataggttcaacggcatcggcgtgacccagaatgtgctgtacgagaaccagaagctgatcgccaatcagtttaacagcgccatcggcaagatccaggactctctgtcctctacagccagcgccctgggcaagctgcaggatgtggtgaatcagaacgcccaggccctgaataccctggtgaagcagctgagctccaacttcggcgccatctctagcgtgctgaatgacatcctgagccggctggacccccctgaggcagaggtgcagatcgacaggctgatcacaggccgcctgcagagcctgcagacctacgtgacacagcagctgatcagggcagcagagatcagagcctccgccaatctggccgccaccaagatgagcgagtgcgtgctgggacagtccaagagggtggacttttgtggcaagggctatcacctgatgtctttcccacagagcgcccctcacggcgtggtgtttctgcacgtgacctacgtgccagcccaggagaagaacttcaccacagcaccagccatctgccacgatggaaaggcacactttcctagggagggcgtgttcgtgtctaacggcacccactggtttgtgacacagcgcaatttctacgagccacagatcatcaccacagacaatacattcgtgagcggcaactgtgatgtggtgatcggcatcgtgaacaataccgtgtatgatccactgcagcccgagctggactcctttaaggaggagctggataagtacttcaagaatcacacctctcccgacgtggatctgggcgacatctccggcatcaatgcctctgtggtgaacatccagaaggagatcgaccggctgaacgaggtggccaagaatctgaacgagagcctgatcgatctgcaggagctgggcaagtatgagcagtacatcaagggctctggcagagagaacctgtatttccagggaggaggaggcagcggatacatccctgaggcaccaagggacggacaggcctacgtgcgcaaggatggcgagtgggtgctgctgtccacctttctgggccatcatcaccaccaccaccaccactga

SEQ ID NO: 1723 - DNA, 3846 bp, Artificial Sequence
  Description of Artificial Sequence: Synthetic polynucleotide
atgggcatcctgccaagcccaggaatgcccgccctgctgtctctggtgagcctgctgtccgtgctgctgatgggatgcgtggcagagacaggcacacagtgcgtgaacctgaccacaaggacccagctgccccctgcctataccaattctttcacacggggcgtgtactatcccgacaaggtgtttagaagctccgtgctgcactccacacaggatctgtttctgcctttcttttctaacgtgacctggttccacgccatccacgtgtccggcaccaatggcacaaagcggttcgacaatcccgtgctgccttttaacgatggcgtgtacttcgccagcaccgagaagtccaacatcatcagaggctggatctttggcaccacactggactctaagacacagagcctgctgatcgtgaacaatgccaccaacgtggtgatcaaggtgtgcgagttccagttttgtaatgatccattcctgggcgtgtactatcacaagaacaataagtcctggatggagtctgagtttcgcgtgtattctagcgccaacaattgcacatttgagtacgtgagccagcccttcctgatggacctggagggcaagcagggcaatttcaagaacctgagggagttcgtgtttaagaatatcgatggctacttcaagatctacagcaagcacaccccaatcaacctggtgcgcgacctgccacagggattctccgccctggagccactggtggatctgcccatcggcatcaacatcacccggtttcagacactgctggccctgcacagatcctacctgacaccaggcgactcctctagcggatggaccgcaggagctgccgcctactatgtgggctatctgcagccccggaccttcctgctgaagtacaacgagaatggcaccatcacagacgcagtggattgcgccctggaccccctgtctgagacaaagtgtacactgaagagctttaccgtggagaagggcatctatcagacaagcaatttcagggtgcagcctaccgagtccatcgtgcgctttcccaatatcacaaacctgtgcccttttggcgaggtgttcaacgccaccagattcgccagcgtgtacgcctggaatcggaagagaatctccaactgcgtggccgactattctgtgctgtacaactccgcctctttcagcacctttaagtgctatggcgtgtctcccacaaagctgaatgatctgtgctttaccaacgtgtacgccgatagcttcgtgatcaggggagacgaagtgagacagatcgcaccaggacagacaggaaagatcgcagactacaattataagctgcctgacgatttcaccggctgcgtgatcgcctggaactccaacaatctggattctaaagtgggcggcaactacaattatctgtacaggctgtttcgcaagtccaatctgaagccattcgagcgggacatctccacagagatctaccaggccggctctaccccctgcaatggcgtggagggctttaactgttatttccctctgcagtcttacggcttccagccaacaaacggcgtgggctatcagccctacagagtggtggtgctgtcctttgagctgctgcacgcaccagcaacagtgtgcggcccaaagaagtctaccaatctggtgaagaacaagtgcgtgaacttcaacttcaacggactgaccggcacaggcgtgctgaccgagagcaataagaagttcctgccttttcagcagttcggcagggacatcgcagataccacagacgccgtgcgcgaccctcagaccctggagatcctggacatcacaccatgcagcttcggcggcgtgtccgtgatcacaccaggcaccaatacatccaaccaggtggccgtgctgtatcaggacgtgaattgtaccgaggtgcccgtggcaatccacgcagatcagctgacccctacatggcgggtgtactctaccggcagcaacgtgttccagacaagagccggatgcctgatcggagcagagcacgtgaacaatagctatgagtgcgacatccctatcggcaatggcatctgtgccagctaccagacccagacaaactccccatctggagcaggctccgtggccagccagtccatcatcgcctataccatgagcctgggcgccgagaacagcgtggcctactccaacaattctatcgccatccctaccaacttcacaatcagcgtgaccacagagatcctgccagtgtctatgaccaagacaagcgtggactgcacaatgtatatctgtggcgatagcaccgagtgctccaacctgctgctgcagtacggctccttttgtacccagctgaatagagccctgacaggcatcgccgtggagcaggataagaacacacaggaggtgttcgcccaggtgaagcagatctacaagaccccacccatcaaggactttggcggcttcaacttcagccagatcctgcctgatccaagcaagccctccaagaggtcttttatcgaggacctgctgttcaacaaggtgaccctggccgatgccggcttcatcaagcagtatggagattgcctgggagacatcgcagcccgcgacctgatctgtgcccagaagtttaatggcctgaccgtgctgcctccactgctgacagatgagatgatcgcccagtacacatctgccctgctggccggcaccatcacaagcggatggaccttcggcgcaggagccgccctgcagatcccttttgccatgcagatggcctataggttcaacggcatcggcgtgacccagaatgtgctgtacgagaaccagaagctgatcgccaatcagtttaacagcgccatcggcaagatccaggactctctgtcctctacagccagcgccctgggcaagctgcaggatgtggtgaatcagaacgcccaggccctgaataccctggtgaagcagctgagctccaacttcggcgccatctctagcgtgctgaatgacatcctgagccggctggacccccctgaggcagaggtgcagatcgacaggctgatcacaggccgcctgcagagcctgcagacctacgtgacacagcagctgatcagggcagcagagatcagagcctccgccaatctggccgccaccaagatgagcgagtgcgtgctgggacagtccaagagggtggacttttgtggcaagggctatcacctgatgtctttcccacagagcgcccctcacggcgtggtgtttctgcacgtgacctacgtgccagcccaggagaagaacttcaccacagcaccagccatctgccacgatggaaaggcacactttcctagggagggcgtgttcgtgtctaacggcacccactggtttgtgacacagcgcaatttctacgagccacagatcatcaccacagacaatacattcgtgagcggcaactgtgatgtggtgatcggcatcgtgaacaataccgtgtatgatccactgcagcccgagctggactcctttaaggaggagctggataagtacttcaagaatcacacctctcccgacgtggatctgggcgacatctccggcatcaatgcctctgtggtgaacatccagaaggagatcgaccggctgaacgaggtggccaagaatctgaacgagagcctgatcgatctgcaggagctgggcaagtatgagcagtacatcaagggctctggcagagagaacctgtatttccagggaggaggaggcagcggatacatccctgaggcaccaagggacggacaggcctacgtgcgcaaggatggcgagtgggtgctgctgtccacctttctgggccatcatcaccaccaccaccaccactga

SEQ ID NO: 1724 - DNA, 3846 bp, Artificial Sequence
  Description of Artificial Sequence: Synthetic polynucleotide
atgggcatcctgccaagcccaggaatgcccgccctgctgtctctggtgagcctgctgtccgtgctgctgatgggatgcgtggcagagacaggcacacagtgcgtgaacctgaccacaaggacccagctgccccctgcctataccaattctttcacacggggcgtgtactatcccgacaaggtgtttagaagctccgtgctgcactccacacaggatctgtttctgcctttcttttctaacgtgacctggttccacgccatccacgtgtccggcaccaatggcacaaagcggttcgacaatcccgtgctgccttttaacgatggcgtgtacttcgccagcaccgagaagtccaacatcatcagaggctggatctttggcaccacactggactctaagacacagagcctgctgatcgtgaacaatgccaccaacgtggtgatcaaggtgtgcgagttccagttttgtaatgatccattcctgggcgtgtactatcacaagaacaataagtcctggatggagtctgagtttcgcgtgtattctagcgccaacaattgcacatttgagtacgtgagccagcccttcctgatggacctggagggcaagcagggcaatttcaagaacctgagggagttcgtgtttaagaatatcgatggctacttcaagatctacagcaagcacaccccaatcaacctggtgcgcgacctgccacagggattctccgccctggagccactggtggatctgcccatcggcatcaacatcacccggtttcagacactgctggccctgcacagatcctacctgacaccaggcgactcctctagcggatggaccgcaggagctgccgcctactatgtgggctatctgcagccccggaccttcctgctgaagtacaacgagaatggcaccatcacagacgcagtggattgcgccctggaccccctgtctgagacaaagtgtacactgaagagctttaccgtggagaagggcatctatcagacaagcaatttcagggtgcagcctaccgagtccatcgtgcgctttcccaatatcacaaacctgtgcccttttggcgaggtgttcaacgccaccagattcgccagcgtgtacgcctggaatcggaagagaatctccaactgcgtggccgactattctgtgctgtacaactccgcctctttcagcacctttaagtgctatggcgtgtctcccacaaagctgaatgatctgtgctttaccaacgtgtacgccgatagcttcgtgatcaggggagacgaagtgagacagatcgcaccaggacagacaggaaagatcgcagactacaattataagctgcctgacgatttcaccggctgcgtgatcgcctggaactccaacaatctggattctaaagtgggcggcaactacaattatctgtacaggctgtttcgcaagtccaatctgaagccattcgagcgggacatctccacagagatctaccaggccggctctaccccctgcaatggcgtggagggctttaactgttatttccctctgcagtcttacggcttccagccaacaaacggcgtgggctatcagccctacagagtggtggtgctgtcctttgagctgctgcacgcaccagcaacagtgtgcggcccaaagaagtctaccaatctggtgaagaacaagtgcgtgaacttcaacttcaacggactgaccggcacaggcgtgctgaccgagagcaataagaagttcctgccttttcagcagttcggcagggacatcgcagataccacagacgccgtgcgcgaccctcagaccctggagatcctggacatcacaccatgcagcttcggcggcgtgtccgtgatcacaccaggcaccaatacatccaaccaggtggccgtgctgtatcaggacgtgaattgtaccgaggtgcccgtggcaatccacgcagatcagctgacccctacatggcgggtgtactctaccggcagcaacgtgttccagacaagagccggatgcctgatcggagcagagcacgtgaacaatagctatgagtgcgacatccctatcggcgccggcatctgtgccagctaccagacccagacaaactccccatctggagcaggctccgtggccagccagtccatcatcgcctataccatgagcctgggcgccgagaacagcgtggcctactccaacaattctatcgccatccctaccaacttcacaatcagcgtgaccacagagatcctgccagtgtctatgaccaagacaagcgtggactgcacaatgtatatctgtggcgatagcaccgagtgctccaacctgctgctgcagtacggctccttttgtacccagctgaatagagccctgacaggcatcgccgtggagcaggataagaacacacaggaggtgttcgcccaggtgaagcagatctacaagaccccacccatcaaggactttggcggcttcaacttcagccagatcctgcctgatccaagcaagccctccaagaggtcttttatcgaggacctgctgttcaacaaggtgaccctggccgatgccggcttcatcaagcagtatggagattgcctgggagacatcgcagcccgcgacctgatctgtgcccagaagtttaatggcctgaccgtgctgcctccactgctgacagatgagatgatcgcccagtacacatctgccctgctggccggcaccatcacaagcggatggaccttcggcgcaggagccgccctgcagatcccttttgccatgcagatggcctataggttcaacggcatcggcgtgacccagaatgtgctgtacgagaaccagaagctgatcgccaatcagtttaacagcgccatcggcaagatccaggactctctgtccacgacagccagcgccctgggcaagctgcaggatgtggtgaatcagaacgcccaggccctgaataccctggtgaagcagctgagctccaacttcggcgccatctctagcgtgctgaatgacatcctgagccggctggacccccctgaggcagaggtgcagatcgacaggctgatcacaggccgcctgcagagcctgcagacctacgtgacacagcagctgatcagggcagcagagatcagagcctccgccaatctggccgccaccaagatgagcgagtgcgtgctgggacagtccaagagggtggacttttgtggcaagggctatcacctgatgtctttcccacagagcgcccctcacggcgtggtgtttctgcacgtgacctacgtgccagcccaggagaagaacttcaccacagcaccagccatctgccacgatggaaaggcacactttcctagggagggcgtgttcgtgtctaacggcacccactggtttgtgacacagcgcaatttctacgagccacagatcatcaccacagacaatacattcgtgagcggcaactgtgatgtggtgatcggcatcgtgaacaataccgtgtatgatccactgcagcccgagctggactcctttaaggaggagctggataagtacttcaagaatcacacctctcccgacgtggatctgggcgacatctccggcatcaatgcctctgtggtgaacatccagaaggagatcgaccggctgaacgaggtggccaagaatctgaacgagagcctgatcgatctgcaggagctgggcaagtatgagcagtacatcaagggctctggcagagagaacctgtatttccagggaggaggaggcagcggatacatccctgaggcaccaagggacggacaggcctacgtgcgcaaggatggcgagtgggtgctgctgtccacctttctgggccatcatcaccaccaccaccaccactga

SEQ ID NO: 1725 - DNA, 3846 bp, Artificial Sequence
  Description of Artificial Sequence: Synthetic polynucleotide
atgggcatcctgccaagcccaggaatgcccgccctgctgtctctggtgagcctgctgtccgtgctgctgatgggatgcgtggcagagacaggcacacagtgcgtgaacctgaccacaaggacccagctgccccctgcctataccaattctttcacacggggcgtgtactatcccgacaaggtgtttagaagctccgtgctgcactccacacaggatctgtttctgcctttcttttctaacgtgacctggttccacgccatccacgtgtccggcaccaatggcacaaagcggttcgacaatcccgtgctgccttttaacgatggcgtgtacttcgccagcaccgagaagtccaacatcatcagaggctggatctttggcaccacactggactctaagacacagagcctgctgatcgtgaacaatgccaccaacgtggtgatcaaggtgtgcgagttccagttttgtaatgatccattcctgggcgtgtactatcacaagaacaataagtcctggatggagtctgagtttcgcgtgtattctagcgccaacaattgcacatttgagtacgtgagccagcccttcctgatggacctggagggcaagcagggcaatttcaagaacctgagggagttcgtgtttaagaatatcgatggctacttcaagatctacagcaagcacaccccaatcaacctggtgcgcgacctgccacagggattctccgccctggagccactggtggatctgcccatcggcatcaacatcacccggtttcagacactgctggccctgcacagatcctacctgacaccaggcgactcctctagcggatggaccgcaggagctgccgcctactatgtgggctatctgcagccccggaccttcctgctgaagtacaacgagaatggcaccatcacagacgcagtggattgcgccctggaccccctgtctgagacaaagtgtacactgaagagctttaccgtggagaagggcatctatcagacaagcaatttcagggtgcagcctaccgagtccatcgtgcgctttcccaatatcacaaacctgtgcccttttggcgaggtgttcaacgccaccagattcgccagcgtgtacgcctggaatcggaagagaatctccaactgcgtggccgactattctgtgctgtacaactccgcctctttcagcacctttaagtgctatggcgtgtctcccacaaagctgaatgatctgtgctttaccaacgtgtacgccgatagcttcgtgatcaggggagacgaagtgagacagatcgcaccaggacagacaggaaagatcgcagactacaattataagctgcctgacgatttcaccggctgcgtgatcgcctggaactccaacaatctggattctaaagtgggcggcaactacaattatctgtacaggctgtttcgcaagtccaatctgaagccattcgagcgggacatctccacagagatctaccaggccggctctaccccctgcaatggcgtggagggctttaactgttatttccctctgcagtcttacggcttccagccaacaaacggcgtgggctatcagccctacagagtggtggtgctgtcctttgagctgctgcacgcaccagcaacagtgtgcggcccaaagaagtctaccaatctggtgaagaacaagtgcgtgaacttcaacttcaacggactgaccggcacaggcgtgctgaccgagagcaataagaagttcctgccttttcagcagttcggcagggacatcgcagataccacagacgccgtgcgcgaccctcagaccctggagatcctggacatcacaccatgcagcttcggcggcgtgtccgtgatcacaccaggcaccaatacatccaaccaggtggccgtgctgtatcaggacgtgaattgtaccgaggtgcccgtggcaatccacgcagatcagctgacccctacatggcgggtgtactctaccggcagcaacgtgttccagacaagagccggatgcctgatcggagcagagcacgtgaacaatagctatgagtgcgacatccctatcggcgccggcatctgtgccagctaccagacccagacaaactccccatctggagcaggctccgtggccagccagtccatcatcgcctataccatgagcctgggcgccgagaacacggtggcctactccaacaattctatcgccatccctaccaacttcacaatcagcgtgaccacagagatcctgccagtgtctatgaccaagacaagcgtggactgcacaatgtatatctgtggcgatagcaccgagtgctccaacctgctgctgcagtacggctccttttgtacccagctgaatagagccctgacaggcatcgccgtggagcaggataagaacacacaggaggtgttcgcccaggtgaagcagatctacaagaccccacccatcaaggactttggcggcttcaacttcagccagatcctgcctgatccaagcaagccctccaagaggtcttttatcgaggacctgctgttcaacaaggtgaccctggccgatgccggcttcatcaagcagtatggagattgcctgggagacatcgcagcccgcgacctgatctgtgcccagaagtttaatggcctgaccgtgctgcctccactgctgacagatgagatgatcgcccagtacacatctgccctgctggccggcaccatcacaagcggatggaccttcggcgcaggagccgccctgcagatcccttttgccatgcagatggcctataggttcaacggcatcggcgtgacccagaatgtgctgtacgagaaccagaagctgatcgccaatcagtttaacagcgccatcggcaagatccaggactctctgtcctctacagccagcgccctgggcaagctgcaggatgtggtgaatcagaacgcccaggccctgaataccctggtgaagcagctgagctccaacttcggcgccatctctagcgtgctgaatgacatcctgagccggctggacccccctgaggcagaggtgcagatcgacaggctgatcacaggccgcctgcagagcctgcagacctacgtgacacagcagctgatcagggcagcagagatcagagcctccgccaatctggccgccaccaagatgagcgagtgcgtgctgggacagtccaagagggtggacttttgtggcaagggctatcacctgatgtctttcccacagagcgcccctcacggcgtggtgtttctgcacgtgacctacgtgccagcccaggagaagaacttcaccacagcaccagccatctgccacgatggaaaggcacactttcctagggagggcgtgttcgtgtctaacggcacccactggtttgtgacacagcgcaatttctacgagccacagatcatcaccacagacaatacattcgtgagcggcaactgtgatgtggtgatcggcatcgtgaacaataccgtgtatgatccactgcagcccgagctggactcctttaaggaggagctggataagtacttcaagaatcacacctctcccgacgtggatctgggcgacatctccggcatcaatgcctctgtggtgaacatccagaaggagatcgaccggctgaacgaggtggccaagaatctgaacgagagcctgatcgatctgcaggagctgggcaagtatgagcagtacatcaagggctctggcagagagaacctgtatttccagggaggaggaggcagcggatacatccctgaggcaccaagggacggacaggcctacgtgcgcaaggatggcgagtgggtgctgctgtccacctttctgggccatcatcaccaccaccaccaccactga

SEQ ID NO: 1726 - DNA, 3846 bp, Artificial Sequence
  Description of Artificial Sequence: Synthetic polynucleotide
atgggcatcctgccaagcccaggaatgcccgccctgctgtctctggtgagcctgctgtccgtgctgctgatgggatgcgtggcagagacaggcacacagtgcgtgaacctgaccacaaggacccagctgccccctgcctataccaattctttcacacggggcgtgtactatcccgacaaggtgtttagaagctccgtgctgcactccacacaggatctgtttctgcctttcttttctaacgtgacctggttccacgccatccacgtgtccggcaccaatggcacaaagcggttcgacaatcccgtgctgccttttaacgatggcgtgtacttcgccagcaccgagaagtccaacatcatcagaggctggatctttggcaccacactggactctaagacacagagcctgctgatcgtgaacaatgccaccaacgtggtgatcaaggtgtgcgagttccagttttgtaatgatccattcctgggcgtgtactatcacaagaacaataagtcctggatggagtctgagtttcgcgtgtattctagcgccaacaattgcacatttgagtacgtgagccagcccttcctgatggacctggagggcaagcagggcaatttcaagaacctgagggagttcgtgtttaagaatatcgatggctacttcaagatctacagcaagcacaccccaatcaacctggtgcgcgacctgccacagggattctccgccctggagccactggtggatctgcccatcggcatcaacatcacccggtttcagacactgctggccctgcacagatcctacctgacaccaggcgactcctctagcggatggaccgcaggagctgccgcctactatgtgggctatctgcagccccggaccttcctgctgaagtacaacgagaatggcaccatcacagacgcagtggattgcgccctggaccccctgtctgagacaaagtgtacactgaagagctttaccgtggagaagggcatctatcagacaagcaatttcagggtgcagcctaccgagtccatcgtgcgctttcccaatatcacaaacctgtgcccttttggcgaggtgttcaacgccaccagattcgccagcgtgtacgcctggaatcggaagagaatctccaactgcgtggccgactattctgtgctgtacaactccgcctctttcagcacctttaagtgctatggcgtgtctcccacaaagctgaatgatctgtgctttaccaacgtgtacgccgatagcttcgtgatcaggggagacgaagtgagacagatcgcaccaggacagacaggaaagatcgcagactacaattataagctgcctgacgatttcaccggctgcgtgatcgcctggaactccaacaatctggattctaaagtgggcggcaactacaattatctgtacaggctgtttcgcaagtccaatctgaagccattcgagcgggacatctccacagagatctaccaggccggctctaccccctgcaatggcgtggagggctttaactgttatttccctctgcagtcttacggcttccagccaacaaacggcgtgggctatcagccctacagagtggtggtgctgtcctttgagctgctgcacgcaccagcaacagtgtgcggcccaaagaagtctaccaatctggtgaagaacaagtgcgtgaacttcaacttcaacggactgaccggcacaggcgtgctgaccgagagcaataagaagttcctgccttttcagcagttcggcagggacatcgcagataccacagacgccgtgcgcgaccctcagaccctggagatcctggacatcacaccatgcagcttcggcggcgtgtccgtgatcacaccaggcaccaatacatcctcacaggtggccgtgctgtatcaggacgtgaattgtaccgaggtgcccgtggcaatccacgcagatcagctgacccctacatggcgggtgtactctaccggcagcaacgtgttccagacaagagccggatgcctgatcggagcagagcacgtgaacaatagctatgagtgcgacatccctatcggcgccggcatctgtgccagctaccagacccagacaaactccccatctggagcaggctccgtggccagccagtccatcatcgcctataccatgagcctgggcgccgagaacagcgtggcctactccaacaattctatcgccatccctaccaacttcacaatcagcgtgaccacagagatcctgccagtgtctatgaccaagacaagcgtggactgcacaatgtatatctgtggcgatagcaccgagtgctccaacctgctgctgcagtacggctccttttgtacccagctgaatagagccctgacaggcatcgccgtggagcaggataagaacacacaggaggtgttcgcccaggtgaagcagatctacaagaccccacccatcaaggactttggcggcttcaacttcagccagatcctgcctgatccaagcaagccctccaagaggtcttttatcgaggacctgctgttcaacaaggtgaccctggccgatgccggcttcatcaagcagtatggagattgcctgggagacatcgcagcccgcgacctgatctgtgcccagaagtttaatggcctgaccgtgctgcctccactgctgacagatgagatgatcgcccagtacacatctgccctgctggccggcaccatcacaagcggatggaccttcggcgcaggagccgccctgcagatcccttttgccatgcagatggcctataggttcaacggcatcggcgtgacccagaatgtgctgtacgagaaccagaagctgatcgccaatcagtttaacagcgccatcggcaagatccaggactctctgtcctctacagccagcgccctgggcaagctgcaggatgtggtgaatcagaacgcccaggccctgaataccctggtgaagcagctgagctccaacttcggcgccatctctagcgtgctgaatgacatcctgagccggctggacccccctgaggcagaggtgcagatcgacaggctgatcacaggccgcctgcagagcctgcagacctacgtgacacagcagctgatcagggcagcagagatcagagcctccgccaatctggccgccaccaagatgagcgagtgcgtgctgggacagtccaagagggtggacttttgtggcaagggctatcacctgatgtctttcccacagagcgcccctcacggcgtggtgtttctgcacgtgacctacgtgccagcccaggagaagaacttcaccacagcaccagccatctgccacgatggaaaggcacactttcctagggagggcgtgttcgtgtctaacggcacccactggtttgtgacacagcgcaatttctacgagccacagatcatcaccacagacaatacattcgtgagcggcaactgtgatgtggtgatcggcatcgtgaacaataccgtgtatgatccactgcagcccgagctggactcctttaaggaggagctggataagtacttcaagaatcacacctctcccgacgtggatctgggcgacatctccggcatcaatgcctctgtggtgaacatccagaaggagatcgaccggctgaacgaggtggccaagaatctgaacgagagcctgatcgatctgcaggagctgggcaagtatgagcagtacatcaagggctctggcagagagaacctgtatttccagggaggaggaggcagcggatacatccctgaggcaccaagggacggacaggcctacgtgcgcaaggatggcgagtgggtgctgctgtccacctttctgggccatcatcaccaccaccaccaccactga

SEQ ID NO: 1727 - DNA, 3846 bp, Artificial Sequence
  Description of Artificial Sequence: Synthetic polynucleotide
atgggcatcctgccaagcccaggaatgcccgccctgctgtctctggtgagcctgctgtccgtgctgctgatgggatgcgtggcagagacaggcacacagtgcgtgaacctgaccacaaggacccagctgccccctgcctataccaattctttcacacggggcgtgtactatcccgacaaggtgtttagaagctccgtgctgcactccacacaggatctgtttctgcctttcttttctaacgtgacctggttccacgccatccacgtgtccggcaccaatggcacaaagcggttcgacaatcccgtgctgccttttaacgatggcgtgtacttcgccagcaccgagaagtccaacatcatcagaggctggatctttggcaccacactggactctaagacacagagcctgctgatcgtgaacaatgccaccaacgtggtgatcaaggtgtgcgagttccagttttgtaatgatccattcctgggcgtgtactatcacaagaacaataagtcctggatggagtctgagtttcgcgtgtattctagcgccaacaattgcacatttgagtacgtgagccagcccttcctgatggacctggagggcaagcagggcaatttcaagaacctgagggagttcgtgtttaagaatatcgatggctacttcaagatctacagcaagcacaccccaatcaacctggtgcgcgacctgccacagggattctccccgctggagccactggtggatctgcccatcggcatcaacatcacccggtttcagacactgctggccctgcacagatcctacctgacaccaggcgactcctctagcggatggaccgcaggagctgccgcctactatgtgggctatctgcagccccggaccttcctgctgaagtacaacgagaatggcaccatcacagacgcagtggattgcgccctggaccccctgtctgagacaaagtgtacactgaagagctttaccgtggagaagggcatctatcagacaagcaatttcagggtgcagcctaccgagtccatcgtgcgctttcccaatatcacaaacctgtgcccttttggcgaggtgttcaacgccaccagattcgccagcgtgtacgcctggaatcggaagagaatctccaactgcgtggccgactattctgtgctgtacaactccgcctctttcagcacctttaagtgctatggcgtgtctcccacaaagctgaatgatctgtgctttaccaacgtgtacgccgatagcttcgtgatcaggggagacgaagtgagacagatcgcaccaggacagacaggaaagatcgcagactacaattataagctgcctgacgatttcaccggctgcgtgatcgcctggaactccaacaatctggattctaaagtgggcggcaactacaattatctgtacaggctgtttcgcaagtccaatctgaagccattcgagcgggacatctccacagagatctaccaggccggctctaccccctgcaatggcgtggagggctttaactgttatttccctctgcagtcttacggcttccagccaacaaacggcgtgggctatcagccctacagagtggtggtgctgtcctttgagctgctgcacgcaccagcaacagtgtgcggcccaaagaagtctaccaatctggtgaagaacaagtgcgtgaacttcaacttcaacggactgaccggcacaggcgtgctgaccgagagcaataagaagttcctgccttttcagcagttcggcagggacatcgcagataccacagacgccgtgcgcgaccctcagaccctggagatcctggacatcacaccatgcagcttcggcggcgtgtccgtgatcacaccaggcaccaatacatccaaccaggtggccgtgctgtatcaggacgtgaattgtaccgaggtgcccgtggcaatccacgcagatcagctgacccctacatggcgggtgtactctaccggcagcaacgtgttccagacaagagccggatgcctgatcggagcagagcacgtgaacaatagctatgagtgcgacatccctatcggcgccggcatctgtgccagctaccagacccagacaaactccccatctggagcaggctccgtggccagccagtccatcatcgcctataccatgagcctgggcgccgagaacagcgtggcctactccaacaattctatcgccatccctaccaacttcacaatcagcgtgaccacagagatcctgccagtgtctatgaccaagacaagcgtggactgcacaatgtatatctgtggcgatagcaccgagtgctccaacctgctgctgcagtacggctccttttgtacccagctgaatagagccctgacaggcatcgccgtggagcaggataagaacacacaggaggtgttcgcccaggtgaagcagatctacaagaccccacccatcaaggactttggcggcttcaacttcagccagatcctgcctgatccaagcaagccctccaagaggtcttttatcgaggacctgctgttcaacaaggtgaccctggccgatgccggcttcatcaagcagtatggagattgcctgggagacatcgcagcccgcgacctgatctgtgcccagaagtttaatggcctgaccgtgctgcctccactgctgacagatgagatgatcgcccagtacacatctgccctgctggccggcaccatcacaagcggatggaccttcggcgcaggagccgccctgcagatcccttttgccatgcagatggcctataggttcaacggcatcggcgtgacccagaatgtgctgtacgagaaccagaagctgatcgccaatcagtttaacagcgccatcggcaagatccaggactctctgtcctctacagccagcgccctgggcaagctgcaggatgtggtgaatcagaacgcccaggccctgaataccctggtgaagcagctgagctccaacttcggcgccatctctagcgtgctgaatgacatcctgagccggctggacccccctgaggcagaggtgcagatcgacaggctgatcacaggccgcctgcagagcctgcagacctacgtgacacagcagctgatcagggcagcagagatcagagcctccgccaatctggccgccaccaagatgagcgagtgcgtgctgggacagtccaagagggtggacttttgtggcaagggctatcacctgatgtctttcccacagagcgcccctcacggcgtggtgtttctgcacgtgacctacgtgccagcccaggagaagaacttcaccacagcaccagccatctgccacgatggaaaggcacactttcctagggagggcgtgttcgtgtctaacggcacccactggtttgtgacacagcgcaatttctacgagccacagatcatcaccacagacaatacattcgtgagcggcaactgtgatgtggtgatcggcatcgtgaacaataccgtgtatgatccactgcagcccgagctggactcctttaaggaggagctggataagtacttcaagaatcacacctctcccgacgtggatctgggcgacatctccggcatcaatgcctctgtggtgaacatccagaaggagatcgaccggctgaacgaggtggccaagaatctgaacgagagcctgatcgatctgcaggagctgggcaagtatgagcagtacatcaagggctctggcagagagaacctgtatttccagggaggaggaggcagcggatacatccctgaggcaccaagggacggacaggcctacgtgcgcaaggatggcgagtgggtgctgctgtccacctttctgggccatcatcaccaccaccaccaccactga

SEQ ID NO: 1728 - DNA, 3846 bp, Artificial Sequence
  Description of Artificial Sequence: Synthetic polynucleotide
atgggcatcctgccaagcccaggaatgcccgccctgctgtctctggtgagcctgctgtccgtgctgctgatgggatgcgtggcagagacaggcacacagtgcgtgaacctgaccacaaggacccagctgccccctgcctataccaattctggcacacggggcgtgtactatcccgacaaggtgtttagaagctccgtgctgcactccacacaggatctgtttctgcctttcttttctaacgtgacctggttccacgccatccacgtgtccggcaccaatggcacaaagcggttcgacaatcccgtgctgccttttaacgatggcgtgtacttcgccagcaccgagaagtccaacatcatcagaggctggatctttggcaccacactggactctaagacacagagcctgctgatcgtgaacaatgccaccaacgtggtgatcaaggtgtgcgagttccagttttgtaatgatccattcctgggcgtgtactatcacaagaacaataagtcctggatggagtctgagtttcgcgtgtattctagcgccaacaattgcacatttgagtacgtgagccagcccttcctgatggacctggagggcaagcagggcaatttcaagaacctgagggagttcgtgtttaagaatatcgatggctacttcaagatctacagcaagcacaccccaatcaacctggtgcgcgacctgccacagggattctccgccctggagccactggtggatctgcccatcggcatcaacatcacccggtttcagacactgctggccctgcacagatcctacctgacaccaggcgactcctctagcggatggaccgcaggagctgccgcctactatgtgggctatctgcagccccggaccttcctgctgaagtacaacgagaatggcaccatcacagacgcagtggattgcgccctggaccccctgtctgagacaaagtgtacactgaagagctttaccgtggagaagggcatctatcagacaagcaatttcagggtgcagcctaccgagtccatcgtgcgctttcccaatatcacaaacctgtgcccttttggcgaggtgttcaacgccaccagattcgccagcgtgtacgcctggaatcggaagagaatctccaactgcgtggccgactattctgtgctgtacaactccgcctctttcagcacctttaagtgctatggcgtgtctcccacaaagctgaatgatctgtgctttaccaacgtgtacgccgatagcttcgtgatcaggggagacgaagtgagacagatcgcaccaggacagacaggaaagatcgcagactacaattataagctgcctgacgatttcaccggctgcgtgatcgcctggaactccaacaatctggattctaaagtgggcggcaactacaattatctgtacaggctgtttcgcaagtccaatctgaagccattcgagcgggacatctccacagagatctaccaggccggctctaccccctgcaatggcgtggagggctttaactgttatttccctctgcagtcttacggcttccagccaacaaacggcgtgggctatcagccctacagagtggtggtgctgtcctttgagctgctgcacgcaccagcaacagtgtgcggcccaaagaagtctaccaatctggtgaagaacaagtgcgtgaacttcaacttcaacggactgaccggcacaggcgtgctgaccgagagcaataagaagttcctgccttttcagcagttcggcagggacatcgcagataccacagacgccgtgcgcgaccctcagaccctggagatcctggacatcacaccatgcagcttcggcggcgtgtccgtgatcacaccaggcaccaatacatccaaccaggtggccgtgctgtatcaggacgtgaattgtaccgaggtgcccgtggcaatccacgcagatcagctgacccctacatggcgggtgtactctaccggcagcaacgtgttccagacaagagccggatgcctgatcggagcagagcacgtgaacaatagctatgagtgcgacatccctatcggcgccggcatctgtgccagctaccagacccagacaaactccccatctggagcaggctccgtggccagccagtccatcatcgcctataccatgagcctgggcgccgagaacagcgtggcctactccaacaattctatcgccatccctaccaacttcacaatcagcgtgaccacagagatcctgccagtgtctatgaccaagacaagcgtggactgcacaatgtatatctgtggcgatagcaccgagtgctccaacctgctgctgcagtacggctccttttgtacccagctgaatagagccctgacaggcatcgccgtggagcaggataagaacacacaggaggtgttcgcccaggtgaagcagatctacaagaccccacccatcaaggactttggcggcttcaacttcagccagatcctgcctgatccaagcaagccctccaagaggtcttttatcgaggacctgctgttcaacaaggtgaccctggccgatgccggcttcatcaagcagtatggagattgcctgggagacatcgcagcccgcgacctgatctgtgcccagaagtttaatggcctgaccgtgctgcctccactgctgacagatgagatgatcgcccagtacacatctgccctgctggccggcaccatcacaagcggatggaccttcggcgcaggagccgccctgcagatcccttttgccatgcagatggcctataggttcaacggcatcggcgtgacccagaatgtgctgtacgagaaccagaagctgatcgccaatcagtttaacagcgccatcggcaagatccaggactctctgtcctctacagccagcgccctgggcaagctgcaggatgtggtgaatcagaacgcccaggccctgaataccctggtgaagcagctgagctccaacttcggcgccatctctagcgtgctgaatgacatcctgagccggctggacccccctgaggcagaggtgcagatcgacaggctgatcacaggccgcctgcagagcctgcagacctacgtgacacagcagctgatcagggcagcagagatcagagcctccgccaatctggccgccaccaagatgagcgagtgcgtgctgggacagtccaagagggtggacttttgtggcaagggctatcacctgatgtctttcccacagagcgcccctcacggcgtggtgtttctgcacgtgacctacgtgccagcccaggagaagaacttcaccacagcaccagccatctgccacgatggaaaggcacactttcctagggagggcgtgttcgtgtctaacggcacccactggtttgtgacacagcgcaatttctacgagccacagatcatcaccacagacaatacattcgtgagcggcaactgtgatgtggtgatcggcatcgtgaacaataccgtgtatgatccactgcagcccgagctggactcctttaaggaggagctggataagtacttcaagaatcacacctctcccgacgtggatctgggcgacatctccggcatcaatgcctctgtggtgaacatccagaaggagatcgaccggctgaacgaggtggccaagaatctgaacgagagcctgatcgatctgcaggagctgggcaagtatgagcagtacatcaagggctctggcagagagaacctgtatttccagggaggaggaggcagcggatacatccctgaggcaccaagggacggacaggcctacgtgcgcaaggatggcgagtgggtgctgctgtccacctttctgggccatcatcaccaccaccaccaccactga

SEQ ID NO: 1729 - DNA, 3846 bp, Artificial Sequence
  Description of Artificial Sequence: Synthetic polynucleotide
atgggcatcctgccaagcccaggaatgcccgccctgctgtctctggtgagcctgctgtccgtgctgctgatgggatgcgtggcagagacaggcacacagtgcgtgaacctgaccacaaggacccagctgccccctgcctataccaattctttcacacggggcgtgtactatcccgacaaggtgtttagaagctccgtgctgcactccacacaggatctgtttctgcctttcttttctaacgtgacctggttccacgccatccacgtgtccggcaccaatggcacaaagcggttcgacaatcccgtgctgccttttggggatggcgtgtacttcgccagcaccgagaagtccaacatcatcagaggctggatctttggcagtacactggactctaagacacagagcctgctgatcgtgaacaatgccaccaacgtggtgatcaaggtgtgcgagttccagttttgtaatgatccattcctgggcgtgtactatcacaagaacaataagtcctggatggagtctgagtttcgcgtgtattctagcgccaacaattgcacatttgagtacgtgagccagcccttcctgatggacctggagggcaagcagggcaatttcaagaacctgagggagttcgtgtttaagaatatcgatggctacttcaagatctacagcaagcacaccccaatcaacctggtgcgcgacctgccacagggattctccgccctggagccactggtggatctgcccatcggcatcaacatcacccggtttcagacactgctggccctgcacagatcctacctgacaccaggcgactcctctagcggatggaccgcaggagctgccgcctactatgtgggctatctgcagccccggaccttcctgctgaagtacaacgagaatggcaccatcacagacgcagtggattgcgccctggaccccctgtctgagacaaagtgtacactgaagagctttaccgtggagaagggcatctatcagacaagcaatttcagggtgcagcctaccgagtccatcgtgcgctttcccaatatcacaaacctgtgcccttttggcgaggtgttcaacgccaccagattcgccagcgtgtacgcctggaatcggaagagaatctccaactgcgtggccgactattctgtgctgtacaactccgcctctttcagcacctttaagtgctatggcgtgtctcccacaaagctgaatgatctgtgctttaccaacgtgtacgccgatagcttcgtgatcaggggagacgaagtgagacagatcgcaccaggacagacaggaaagatcgcagactacaattataagctgcctgacgatttcaccggctgcgtgatcgcctggaactccaacaatctggattctaaagtgggcggcaactacaattatctgtacaggctgtttcgcaagtccaatctgaagccattcgagcgggacatctccacagagatctaccaggccggctctaccccctgcaatggcgtggagggctttaactgttatttccctctgcagtcttacggcttccagccaacaaacggcgtgggctatcagccctacagagtggtggtgctgtcctttgagctgctgcacgcaccagcaacagtgtgcggcccaaagaagtctaccaatctggtgaagaacaagtgcgtgaacttcaacttcaacggactgaccggcacaggcgtgctgaccgagagcaataagaagttcctgccttttcagcagttcggcagggacatcgcagataccacagacgccgtgcgcgaccctcagaccctggagatcctggacatcacaccatgcagcttcggcggcgtgtccgtgatcacaccaggcaccaatacatccaaccaggtggccgtgctgtatcaggacgtgaattgtaccgaggtgcccgtggcaatccacgcagatcagctgacccctacatggcgggtgtactctaccggcagcaacgtgttccagacaagagccggatgcctgatcggagcagagcacgtgaacaatagctatgagtgcgacatccctatcggcgccggcatctgtgccagctaccagacccagacaaactccccatctggagcaggctccgtggccagccagtccatcatcgcctataccatgagcctgggcgccgagaacagcgtggcctactccaacaattctatcgccatccctaccaacttcacaatcagcgtgaccacagagatcctgccagtgtctatgaccaagacaagcgtggactgcacaatgtatatctgtggcgatagcaccgagtgctccaacctgctgctgcagtacggctccttttgtacccagctgaatagagccctgacaggcatcgccgtggagcaggataagaacacacaggaggtgttcgcccaggtgaagcagatctacaagaccccacccatcaaggactttggcggcttcaacttcagccagatcctgcctgatccaagcaagccctccaagaggtcttttatcgaggacctgctgttcaacaaggtgaccctggccgatgccggcttcatcaagcagtatggagattgcctgggagacatcgcagcccgcgacctgatctgtgcccagaagtttaatggcctgaccgtgctgcctccactgctgacagatgagatgatcgcccagtacacatctgccctgctggccggcaccatcacaagcggatggaccttcggcgcaggagccgccctgcagatcccttttgccatgcagatggcctataggttcaacggcatcggcgtgacccagaatgtgctgtacgagaaccagaagctgatcgccaatcagtttaacagcgccatcggcaagatccaggactctctgtcctctacagccagcgccctgggcaagctgcaggatgtggtgaatcagaacgcccaggccctgaataccctggtgaagcagctgagctccaacttcggcgccatctctagcgtgctgaatgacatcctgagccggctggacccccctgaggcagaggtgcagatcgacaggctgatcacaggccgcctgcagagcctgcagacctacgtgacacagcagctgatcagggcagcagagatcagagcctccgccaatctggccgccaccaagatgagcgagtgcgtgctgggacagtccaagagggtggacttttgtggcaagggctatcacctgatgtctttcccacagagcgcccctcacggcgtggtgtttctgcacgtgacctacgtgccagcccaggagaagaacttcaccacagcaccagccatctgccacgatggaaaggcacactttcctagggagggcgtgttcgtgtctaacggcacccactggtttgtgacacagcgcaatttctacgagccacagatcatcaccacagacaatacattcgtgagcggcaactgtgatgtggtgatcggcatcgtgaacaataccgtgtatgatccactgcagcccgagctggactcctttaaggaggagctggataagtacttcaagaatcacacctctcccgacgtggatctgggcgacatctccggcatcaatgcctctgtggtgaacatccagaaggagatcgaccggctgaacgaggtggccaagaatctgaacgagagcctgatcgatctgcaggagctgggcaagtatgagcagtacatcaagggctctggcagagagaacctgtatttccagggaggaggaggcagcggatacatccctgaggcaccaagggacggacaggcctacgtgcgcaaggatggcgagtgggtgctgctgtccacctttctgggccatcatcaccaccaccaccaccactga

SEQ ID NO: 1730 - DNA, 3846 bp, Artificial Sequence
  Description of Artificial Sequence: Synthetic polynucleotide
atgggcatcctgccaagcccaggaatgcccgccctgctgtctctggtgagcctgctgtccgtgctgctgatgggatgcgtggcagagacaggcacacagtgcgtgaacctgaccacaaggacccagctgccccctgcctataccaattctttcacacggggcgtgtactatcccgacaaggtgtttagaagctccgtgctgcactccacacaggatctgtttctgcctttcttttctaacgtgacctggttccacgccatccacgtgtccggcaccaatggcacaaagcggttcgacaatcccgtgctgccttttaacgatggcgtgtacttcgccagcaccgagaagtccaacatcatcagaggctggatctttggcaccacactggactctaagacacagagcctgctgatcgtgaacaatgccaccaacgtggtgatcaaggtgtgcgagttccagttttgtaatgatccattcctgggcgtgtactatcacaagaacaataagtcctggatggagtctgagtttcgcgtgtattctagcgccaacaattgcacatttgagtacgtgagccagcccttcctgatggacctggagggcaagcagggcaatttcaagaacctgagggagttcgtgtttaagaatatcgatggctacttcaagatctacagcaagcacaccccaatcaacctggtgcgcgacctgccacagggattctccgccctggagccactggtggatctgcccatcggcatcaacatcacccggtttcagacactgctggccctgcacagatcctacctgacaccaggcgactcctctagcggatggaccgcaggagctgccgcctactatgtgggctatctgcagccccggaccttcctgctgaagtacaacgagaatggcaccatcacagacgcagtggattgcgccctggaccccctgtctgagacaaagtgtacactgaagagctttaccgtggagaagggcatctatcagacaagcaatttcagggtgcagcctaccgagtccatcgtgcgctttcccaatatcacaaacctgtgcccttttggcgaggtgttcaacgccaccagattcgccagcgtgtacgcctggaatcggaagagaatctccaactgcgtggccgactattctgtgctgtacaactccgcctctttcagcacctttaagtgctatggcgtgtctcccacaaagctgaatgatctgtgctttaccaacgtgtacgccgatagcttcgtgatcaggggagacgaagtgagacagatcgcaccaggacagacaggaaagatcgcagactacaattataagctgcctgacgatttcaccggctgcgtgatcgcctggaactccaacaatctggattctaaagtgggcggcaactacaattatctgtacaggctgtttcgcaagtccaatctgaagccattcgagcgggacatctccacagagatctaccaggccggctctaccccctgcaatggcgtggagggctttaactgttatttccctctgcagtcttacggcttccagccaacaaacggcgtgggctatcagccctacagagtggtggtgctgtcctttgagctgctgcacgcaccagcaacagtgtgcggcccaaagaagtctaccaatctggtgaagaacaagtgcgtgaacttcaacttcaacggactgaccggcacaggcgtgctgaccgagagcaataagaagttcctgccttttcagcagttcggcagggacatcgcagataccacagacgccgtgcgcgaccctcagaccctggagatcctggacatcacaccatgcagcttcggcggcgtgtccgtgatcacaccaggcaccaatacatccaaccaggtggccgtgctgtatcaggacgtgaattgtaccgaggtgcccgtggcaatccacgcagatcagctgacccctacatggcgggtgtactctaccggcagcaacgtgttccagacaagagccggatgcctgatcggagcagagcacgtgaacaatagctatgagtgcgacatccctatcggcgccggcatctgtgccagctaccagacccagacaaactccccatctggagcaggctccgtggccagccagtccatcatcgcctataccatgagcctgggcgccgagaacagcgtggcctactccaacaattctatcgccatccctaccaacttcacaatcagcgtgaccacagagatcctgccagtgtctatgaccaagacaagcgtggactgcacaatgtatatctgtggcgatagcaccgagtgctccaacctgctgctgcagtacggctccttttgtacccagctgaatagagccctgacaggcatcgccgtggagcaggataagaacacacaggaggtgttcgcccaggtgaagcagatctacaagaccccacccatcaaggactttggcggcttcaacttcagccagatcctgcctgatccaagcaagccctccaagaggtcttttatcgaggacctgctgttcaacaaggtgaccctggccgatgccggcttcatcaagcagtatggagattgcctgggagacatcgcagcccgcgacctgatctgtgcccagaagtttaatggcctgaccgtgctgcctccactgctgacagatgagatgatcgcccagtacacatctgccctgctggccggcaccatcacaagcggatggaccttcggcgcaggagccgccctgcagatcccttttgccatgcagatggcctataggttcaacggcatcggcgtgacccagaatgtgctgtacgagaaccagaagcaaatcgccaatcagtttaacagcgccatcggcaagatccaggactctctgtcctctacagccagcgccctgggcaagctgcaggatgtggtgaatcagaacgcccaggccctgaataccctggtgaagcagctgagctccaacttcggcgccatctctagcgtgctgaatgacatcctgagccggctggacccccctgaggcagaggtgcagatcgacaggctgatcacaggccgcctgcagagcctgcagacctacgtgacacagcagctgatcagggcagcagagatcagagcctccgccaatctggccgccaccaagatgagcgagtgcgtgctgggacagtccaagagggtggacttttgtggcaagggctatcacctgatgtctttcccacagagcgcccctcacggcgtggtgtttctgcacgtgacctacgtgccagcccaggagaagaacttcaccacagcaccagccatctgccacgatggaaaggcacactttcctagggagggcgtgttcgtgtctaacggcacccactggtttgtgacacagcgcaatttctacgagccacagatcatcaccacagacaatacattcgtgagcggcaactgtgatgtggtgatcggcatcgtgaacaataccgtgtatgatccactgcagcccgagctggactcctttaaggaggagctggataagtacttcaagaatcacacctctcccgacgtggatctgggcgacatctccggcatcaatgcctctgtggtgaacatccagaaggagatcgaccggctgaacgaggtggccaagaatctgaacgagagcctgatcgatctgcaggagctgggcaagtatgagcagtacatcaagggctctggcagagagaacctgtatttccagggaggaggaggcagcggatacatccctgaggcaccaagggacggacaggcctacgtgcgcaaggatggcgagtgggtgctgctgtccacctttctgggccatcatcaccaccaccaccaccactga

SEQ ID NO: 1731 - DNA, 3846 bp, Artificial Sequence
  Description of Artificial Sequence: Synthetic polynucleotide
atgggcatcctgccaagcccaggaatgcccgccctgctgtctctggtgagcctgctgtccgtgctgctgatgggatgcgtggcagagacaggcacacagtgcgtgaacctgaccacaaggacccagctgccccctgcctataccaattctttcacacggggcgtgtactatcccgacaaggtgtttagaagctccgtgctgcactccacacaggatctgtttctgcctttcttttctaacgtgacctggttccacgccatccacgtgtccggcaccaatggcacaaagcggttcgacaatcccgtgctgccttttaacgatggcgtgtacttcgccagcaccgagaagtccaacatcatcagaggctggatctttggcaccacactggactctaagacacagagcctgctgatcgtgaacaatgccaccaacgtggtgatcaaggtgtgcgagttccagttttgtaatgatccattcctgggcgtgtactatcacaagaacaataagtcctggatggagtctgagtttcgcgtgtattctagcgccaacaattgcacatttgagtacgtgagccagcccttcctgatggacctggagggcaagcagggcaatttcaagaacctgagggagttcgtgtttaagaatatcgatggctacttcaagatctacagcaagcacaccccaatcaacctggtgcgcgacctgccacagggattctccgccctggagccactggtggatctgcccatcggcatcaacatcacccggtttcagacactgctggccctgcacagatcctacctgacaccaggcgactcctctagcggatggaccgcaggagctgccgcctactatgtgggctatctgcagccccggaccttcctgctgaagtacaacgagaatggcaccatcacagacgcagtggattgcgatctggaccccctgtctgagacaaagtgtacactgaagagctttaccgtggagaagggcatctatcagacaagcaatttcagggtgcagcctaccgagtccatcgtgcgctttcccaatatcacaaacctgtgcccttttggcgaggtgttcaacgccaccagattcgccagcgtgtacgcctggaatcggaagagaatctccaactgcgtggccgactattctgtgctgtacaactccgcctctttcagcacctttaagtgctatggcgtgtctcccacaaagctgaatgatctgtgctttaccaacgtgtacgccgatagcttcgtgatcaggggagacgaagtgagacagatcgcaccaggacagacaggaaagatcgcagactacaattataagctgcctgacgatttcaccggctgcgtgatcgcctggaactccaacaatctggattctaaagtgggcggcaactacaattatctgtacaggctgtttcgcaagtccaatctgaagccattcgagcgggacatctccacagagatctaccaggccggctctaccccctgcaatggcgtggagggctttaactgttatttccctctgcagtcttacggcttccagccaacaaacggcgtgggctatcagccctacagagtggtggtgctgtcctttgagctgctgcacgcaccagcaacagtgtgcggcccaaagaagtctaccaatctggtgaagaacaagtgcgtgaacttcaacttcaacggactgaccggcacaggcgtgctgaccgagagcaataagaagttcctgccttttcagcagttcggcagggacatcgcagataccacagacgccgtgcgcgaccctcagaccctggagatcctggacatcacaccatgcagcttcggcggcgtgtccgtgatcacaccaggcaccaatacatccaaccaggtggccgtgctgtatcaggacgtgaattgtaccgaggtgcccgtggcaatccacgcagatcagctgacccctacatggcgggtgtactctaccggcagcaacgtgttccagacaagagccggatgcctgatcggagcagagcacgtgaacaatagctatgagtgcgacatccctatcggcgccggcatctgtgccagctaccagacccagacaaactccccatctggagcaggctccgtggccagccagtccatcatcgcctataccatgagcctgggcgccgagaacagcgtggcctactccaacaattctatcgccatccctaccaacttcacaatcagcgtgaccacagagatcctgccagtgtctatgaccaagacaagcgtggactgcacaatgtatatctgtggcgatagcaccgagtgctccaacctgctgctgcagtacggctccttttgtacccagctgaatagagccctgacaggcatcgccgtggagcaggataagaacacacaggaggtgttcgcccaggtgaagcagatctacaagaccccacccatcaaggactttggcggcttcaacttcagccagatcctgcctgatccaagcaagccctccaagaggtcttttatcgaggacctgctgttcaacaaggtgaccctggccgatgccggcttcatcaagcagtatggagattgcctgggagacatcgcagcccgcgacctgatctgtgcccagaagtttaatggcctgaccgtgctgcctccactgctgacagatgagatgatcgcccagtacacatctgccctgctggccggcaccatcacaagcggatggaccttcggcgcaggagccgccctgcagatcccttttgccatgcagatggcctataggttcaacggcatcggcgtgacccagaatgtgctgtacgagaaccagaagctgatcgccaatcagtttaacagcgccatcggcaagatccaggactctctgtcctctacagccagcgccctgggcaagctgcaggatgtggtgaatcagaacgcccaggccctgaataccctggtgaagcagctgagctccaacttcggcgccatctctagcgtgctgaatgacatcctgagccggctggacccccctgaggcagaggtgcagatcgacaggctgatcacaggccgcctgcagagcctgcagacctacgtgacacagcagctgatcagggcagcagagatcagagcctccgccaatctggccgccaccaagatgagcgagtgcgtgctgggacagtccaagagggtggacttttgtggcaagggctatcacctgatgtctttcccacagagcgcccctcacggcgtggtgtttctgcacgtgacctacgtgccagcccaggagaagaacttcaccacagcaccagccatctgccacgatggaaaggcacactttcctagggagggcgtgttcgtgtctaacggcacccactggtttgtgacacagcgcaatttctacgagccacagatcatcaccacagacaatacattcgtgagcggcaactgtgatgtggtgatcggcatcgtgaacaataccgtgtatgatccactgcagcccgagctggactcctttaaggaggagctggataagtacttcaagaatcacacctctcccgacgtggatctgggcgacatctccggcatcaatgcctctgtggtgaacatccagaaggagatcgaccggctgaacgaggtggccaagaatctgaacgagagcctgatcgatctgcaggagctgggcaagtatgagcagtacatcaagggctctggcagagagaacctgtatttccagggaggaggaggcagcggatacatccctgaggcaccaagggacggacaggcctacgtgcgcaaggatggcgagtgggtgctgctgtccacctttctgggccatcatcaccaccaccaccaccactga

SEQ ID NO: 1732 - DNA, 3846 bp, Artificial Sequence
  Description of Artificial Sequence: Synthetic polynucleotide
atgggcatcctgccaagcccaggaatgcccgccctgctgtctctggtgagcctgctgtccgtgctgctgatgggatgcgtggcagagacaggcacacagtgcgtgaacctgaccacaaggacccagctgccccctgcctataccaattctttcacacggggcgtgtactatcccgacaaggtgtttagaagctccgtgctgcactccacacaggatctgtttctgcctttcttttctaacgtgacctggttccacgccatccacgtgtccggcaccaatggcacaaagcggttcgacaatcccatactgccttttaacgatggcgtgtacttcgccagcaccgagaagtccaacatcatcagaggctggatctttggcaccacactggactctaagacacagagcctgctgatcgtgaacaatgccaccaacgtggtgatcaaggtgtgcgagttccagttttgtaatgatccattcctgggcgtgtactatcacaagaacaataagtcctggatggagtctgagtttcgcgtgtattctagcgccaacaattgcacatttgagtacgtgagccagcccttcctgatggacctggagggcaagcagggcaatttcaagaacctgagggagttcgtgtttaagaatatcgatggctacttcaagatctacagcaagcacaccccaatcaacctggtgcgcgacctgccacagggattctccgccctggagccactggtggatctgcccatcggcatcaacatcacccggtttcagacactgctggccctgcacagatcctacctgacaccaggcgactcctctagcggatggaccgcaggagctgccgcctactatgtgggctatctgcagccccggaccttcctgctgaagtacaacgagaatggcaccatcacagacgcagtggattgcgccctggaccccctgtctgagacaaagtgtacactgaagagctttaccgtggagaagggcatctatcagacaagcaatttcagggtgcagcctaccgagtccatcgtgcgctttcccaatatcacaaacctgtgcccttttggcgaggtgttcaacgccaccagattcgccagcgtgtacgcctggaatcggaagagaatctccaactgcgtggccgactattctgtgctgtacaactccgcctctttcagcacctttaagtgctatggcgtgtctcccacaaagctgaatgatctgtgctttaccaacgtgtacgccgatagcttcgtgatcaggggagacgaagtgagacagatcgcaccaggacagacaggaaagatcgcagactacaattataagctgcctgacgatttcaccggctgcgtgatcgcctggaactccaacaatctggattctaaagtgggcggcaactacaattatctgtacaggctgtttcgcaagtccaatctgaagccattcgagcgggacatctccacagagatctaccaggccggctctaccccctgcaatggcgtggagggctttaactgttatttccctctgcagtcttacggcttccagccaacaaacggcgtgggctatcagccctacagagtggtggtgctgtcctttgagctgctgcacgcaccagcaacagtgtgcggcccaaagaagtctaccaatctggtgaagaacaagtgcgtgaacttcaacttcaacggactgaccggcacaggcgtgctgaccgagagcaataagaagttcctgccttttcagcagttcggcagggacatcgcagataccacagacgccgtgcgcgaccctcagaccctggagatcctggacatcacaccatgcagcttcggcggcgtgtccgtgatcacaccaggcaccaatacatccaaccaggtggccgtgctgtatcaggacgtgaattgtaccgaggtgcccgtggcaatccacgcagatcagctgacccctacatggcgggtgtactctaccggcagcaacgtgttccagacaagagccggatgcctgatcggagcagagcacgtgaacaatagctatgagtgcgacatccctatcggcgccggcatctgtgccagctaccagacccagacaaactccccatctggagcaggctccgtggccagccagtccatcatcgcctataccatgagcctgggcgccgagaacagcgtggcctactccaacaattctatcgccatccctaccaacttcacaatcagcgtgaccacagagatcctgccagtgtctatgaccaagacaagcgtggactgcacaatgtatatctgtggcgatagcaccgagtgctccaacctgctgctgcagtacggctccttttgtacccagctgaatagagccctgacaggcatcgccgtggagcaggataagaacacacaggaggtgttcgcccaggtgaagcagatctacaagaccccacccatcaaggactttggcggcttcaacttcagccagatcctgcctgatccaagcaagccctccaagaggtcttttatcgaggacctgctgttcaacaaggtgaccctggccgatgccggcttcatcaagcagtatggagattgcctgggagacatcgcagcccgcgacctgatctgtgcccagaagtttaatggcctgaccgtgctgcctccactgctgacagatgagatgatcgcccagtacacatctgccctgctggccggcaccatcacaagcggatggaccttcggcgcaggagccgccctgcagatcccttttgccatgcagatggcctataggttcaacggcatcggcgtgacccagaatgtgctgtacgagaaccagaagctgatcgccaatcagtttaacagcgccatcggcaagatccaggactctctgtcctctacagccagcgccctgggcaagctgcaggatgtggtgaatcagaacgcccaggccctgaataccctggtgaagcagctgagctccaacttcggcgccatctctagcgtgctgaatgacatcctgagccggctggacccccctgaggcagaggtgcagatcgacaggctgatcacaggccgcctgcagagcctgcagacctacgtgacacagcagctgatcagggcagcagagatcagagcctccgccaatctggccgccaccaagatgagcgagtgcgtgctgggacagtccaagagggtggacttttgtggcaagggctatcacctgatgtctttcccacagagcgcccctcacggcgtggtgtttctgcacgtgacctacgtgccagcccaggagaagaacttcaccacagcaccagccatctgccacgatggaaaggcacactttcctagggagggcgtgttcgtgtctaacggcacccactggtttgtgacacagcgcaatttctacgagccacagatcatcaccacagacaatacattcgtgagcggcaactgtgatgtggtgatcggcatcgtgaacaataccgtgtatgatccactgcagcccgagctggactcctttaaggaggagctggataagtacttcaagaatcacacctctcccgacgtggatctgggcgacatctccggcatcaatgcctctgtggtgaacatccagaaggagatcgaccggctgaacgaggtggccaagaatctgaacgagagcctgatcgatctgcaggagctgggcaagtatgagcagtacatcaagggctctggcagagagaacctgtatttccagggaggaggaggcagcggatacatccctgaggcaccaagggacggacaggcctacgtgcgcaaggatggcgagtgggtgctgctgtccacctttctgggccatcatcaccaccaccaccaccactga

SEQ ID NO: 1733 - DNA, 3846 bp, Artificial Sequence
  Description of Artificial Sequence: Synthetic polynucleotide
atgggcatcctgccaagcccaggaatgcccgccctgctgtctctggtgagcctgctgtccgtgctgctgatgggatgcgtggcagagacaggcacacagtgcgtgaacctgaccacaaggacccagctgccccctgcctataccaattctttcacacggggcgtgtactatcccgacaaggtgtttagaagctccgtgctgcactccacacaggatctgtttctgcctttcttttctaacgtgacctggttccacgccatccacgtgtccggcaccaatggcacaaagcggttcgacaatcccgtgctgccttttaacgatggcgtgtacttcgccagcaccgagaagtccaacatcatcagaggctggatctttggcaccacactggactctaagacacagagcctgctgatcgtgaacaatgccaccaacgtggtgatcaaggtgtgcgagttccagttttgtaatgatccattcctgggcgtgtactatcacaagaacaataagtcctggatggagtctgagtttcgcgtgtattctagcgccaacaattgcacatttgagtacgtgagccagcccttcctgatggacctggagggcaagcagggcaatttcaagaacctgagggagttcgtgtttaagaatatcgatggctacttcaagatctacagcaagcacaccccaatcaacctggtgcgcgacctgccacagggattctccgccctggagccactggtggatctgcccatcggcatcaacatcacccggtttcagacactgctggccctgcacagatcctacctgacaccaggcgactcctctagcggatggaccgcaggagctgccgcctactatgtgggctatctgcagccccggaccttcctgctgaagtacaacgagaatggcaccatcacagacgcagtggattgcgccctggaccccctgtctgagacaaagtgtacactgaagagctttaccgtggagaagggcatctatcagacaagcaatttcagggtgcagcctaccgagtccatcgtgcgctttcccaatatcacaaacctgtgcccttttggcgaggtgttcaacgccaccagattcgccagcgtgtacgcctggaatcggaagagaatctccaactgcgtggccgactattctgtgctgtacaactccgcctctttcagcacctttaagtgctatggcgtgtctcccacaaagctgaatgatctgtgctttaccaacgtgtacgccgatagcttcgtgatcaggggagacgaagtgagacagatcgcaccaggacagacaggaaagatcgcagactacaattataagctgcctgacgatttcaccggctgcgtgatcgcctggaactccaacaatctggattctaaagtgggcggcaactacaattatctgtacaggctgtttcgcaagtccaatctgaagccattcgagcgggacatctccacagagatctaccaggccggctctaccccctgcaatggcgtggagggctttaactgttatttccctctgcagtcttacggcttccagccaacaaacggcgtgggctatcagccctacagagtggtggtgctgtcctttgagctgctgcacgcaccagcaacagtgtgcggcccaaagaagtctaccaatctggtgaagaacaagtgcgtgaacttcaacttcaacggactgaccggcacaggcgtgctgaccgagagcaataagaagttcctgccttttcagcagttcggcagggacatcgcagataccacagacgccgtgcgcgaccctcagaccctggagatcctggacatcacaccatgcagcttcggcggcgtgtccgtgatcacaccaggcaccaatacatccaaccaggtggccgtgctgtatcaggacgtgaattgtaccgaggtgcccgtggcaatccacgcagatcagctgacccctacatggcgggtgtactctaccggcagcaacgtgttccagacaagagccggatgcctgatcggagcagagcacgtgaacaatagctatgagtgcgacatccctatcggcgccggcatctgtgccagctaccagacccagacaaactccccatctggagcaggctccgtggccagccagtccatcatcgcctataccatgagcctgggcgccgagaacagcgtggcctactccaacaattctatcgccatccctaccaacttcacaatcagcgtgaccacagagatcctgccagtgtctatgaccaagacaagcgtggactgcacaatgtatatctgtggcgatagcaccgagtgctccaacctgctgctgcagtacggctccttttgtacccagctgaatagagccctgacaggcatcgccgtggagcaggataagaacacacaggaggtgttcgcccaggtgaagcagatctacaagaccccacccatcaaggactttggcggcttcaacttcagccagatcctgcctgatccaagcaagccctccaagaggtcttttatcgaggacctgctgttcaacaaggtgaccctggccgatgccggcttcatcaagcagtatggagattgcctgggagacatcgcagcccgcgacctgatctgtgcccagaagtttaatggcctgaccgtgctgcctccactgctgacagatgagatgatcgcccagtacacatctgccctgctggccggcaccatcacaagcggatggaccttcggcgcaggagccgccctgcagatcccttttgccatgcagatggcctataggttcaacggcatcggcgtgacccagaatgtgctgtacgagaaccagaagctgatcgccaatcagtttaacagcgccatcggcaagatccaggactctctgtcctctacagccagcgccctgggcaagctgcaggatgtggtgaatcagaacgcccaggccctgaataccctggtgaagcagctgagctccaacttcggcgccatctctagcgtgctgaatgacatcctgagccggctggacccccctgaggcagaggtgcagatcgacaggctgatcacaggccgcctgcagagcctgcagacctacgtgacacagcagctgatcagggcagcagagatcagagcctccgccaatctggccgccaccaagatgagcgagtgcgtgctgggacagtccaagagggtggacttttgtggcaagggctatcacctgatgtctttcccacagagcgcccctcacggcgtggtgtttctgcacgtgacctacgtgccagcccaggagaagaacttcaccacagcaccagccatctgccacgatggaaaggcacactttcctagggagggcgtgttcgtgtctaacggcacccaatggtttgtgacacagcgcaatttctacgagccacagatcatcaccacagacaatacattcgtgagcggcaactgtgatgtggtgatcggcatcgtgaacaataccgtgtatgatccactgcagcccgagctggactcctttaaggaggagctggataagtacttcaagaatcacacctctcccgacgtggatctgggcgacatctccggcatcaatgcctctgtggtgaacatccagaaggagatcgaccggctgaacgaggtggccaagaatctgaacgagagcctgatcgatctgcaggagctgggcaagtatgagcagtacatcaagggctctggcagagagaacctgtatttccagggaggaggaggcagcggatacatccctgaggcaccaagggacggacaggcctacgtgcgcaaggatggcgagtgggtgctgctgtccacctttctgggccatcatcaccaccaccaccaccactga

SEQ ID NO: 1734 - DNA, 3846 bp, Artificial Sequence
  Description of Artificial Sequence: Synthetic polynucleotide
atgggcatcctgccaagcccaggaatgcccgccctgctgtctctggtgagcctgctgtccgtgctgctgatgggatgcgtggcagagacaggcacacagtgcgtgaacctgaccacaaggacccagctgccccctgcctataccaattctttcacacggggcgtgtactatcccgacaaggtgtttagaagctccgtgctgcactccacacaggatctgtttctgcctttcttttctaacgtgacctggttccacgccatccacgtgtccggcaccaatggcacaaagcggttcgacaatcccgtgctgccttttaacgatggcgtgtacttcgccagcaccgagaagtccaacatcatcagaggctggatctttggcaccacactggactctaagacacagagcctgctgatcgtgaacaatgccaccaacgtggtgatcaaggtgtgcgagttccagttttgtaatgatccattcctgggcgtgtactatcacaagaacaataagtcctggatggagtctgagtttcgcgtgtattctagcgccaacaattgcacatttgagtacgtgagccagcccttcctgatggacctggagggcaagcagggcaatttcaagaacctgagggagttcgtgtttaagaatatcgatggctacttcaagatctacagcaagcacaccccaatcaacctggtgcgcgacctgccacagggattctccgccctggagccactggtggatctgcccatcggcatcaacatcacccggtttcagacactgctggccctgcacagatcctacctgacaccaggcgactcctctagcggatggaccgcaggagctgccgcctactatgtgggctatctgcagccccggaccttcctgctgaagtacaacgagaatggcaccatcacagacgcagtggattgctcgctggaccccctgtctgagacaaagtgtacactgaagagctttaccgtggagaagggcatctatcagacaagcaatttcagggtgcagcctaccgagtccatcgtgcgctttcccaatatcacaaacctgtgcccttttggcgaggtgttcaacgccaccagattcgccagcgtgtacgcctggaatcggaagagaatctccaactgcgtggccgactattctgtgctgtacaactccgcctctttcagcacctttaagtgctatggcgtgtctcccacaaagctgaatgatctgtgctttaccaacgtgtacgccgatagcttcgtgatcaggggagacgaagtgagacagatcgcaccaggacagacaggaaagatcgcagactacaattataagctgcctgacgatttcaccggctgcgtgatcgcctggaactccaacaatctggattctaaagtgggcggcaactacaattatctgtacaggctgtttcgcaagtccaatctgaagccattcgagcgggacatctccacagagatctaccaggccggctctaccccctgcaatggcgtggagggctttaactgttatttccctctgcagtcttacggcttccagccaacaaacggcgtgggctatcagccctacagagtggtggtgctgtcctttgagctgctgcacgcaccagcaacagtgtgcggcccaaagaagtctaccaatctggtgaagaacaagtgcgtgaacttcaacttcaacggactgaccggcacaggcgtgctgaccgagagcaataagaagttcctgccttttcagcagttcggcagggacatcgcagataccacagacgccgtgcgcgaccctcagaccctggagatcctggacatcacaccatgcagcttcggcggcgtgtccgtgatcacaccaggcaccaatacatccaaccaggtggccgtgctgtatcaggacgtgaattgtaccgaggtgcccgaagcaatccacgcagatcagctgacccctacatggcgggtgtactctaccggcagcaacgtgttccagacaagagccggatgcctgatcggagcagagcacgtgaacaatagctatgagtgcgacatccctatcggcgccggcatctgtgccagctaccagacccagacaaactccccatctggagcaggctccgtggccagccagtccatcatcgcctataccatgagcctgggcgccgagaacagcgtggcctactccaacaattctatcgccatccctaccaacttcacaatcagcgtgaccacagagatcctgccagtgtctatgaccaagacaagcgtggactgcacaatgtatatctgtggcgatagcaccgagtgctccaacctgctgctgcagtacggctccttttgtacccagctgaatagagccctgacaggcatcgccgtggagcaggataagaacacacaggaggtgttcgcccaggtgaagcagatctacaagaccccacccatcaaggactttggcggcttcaacttcagccagatcctgcctgatccaagcaagccctccaagaggtcttttatcgaggacctgctgttcaacaaggtgaccctggccgatgccggcttcatcaagcagtatggagattgcctgggagacatcgcagcccgcgacctgatctgtgcccagaagtttaatggcctgaccgtgctgcctccactgctgacagatgagatgatcgcccagtacacatctgccctgctggccggcaccatcacaagcggatggaccttcggcgcaggagccgccctgcagatcccttttgccatgcagatggcctataggttcaacggcatcggcgtgacccagaatgtgctgtacgagaaccagaagctgatcgccaatcagtttaacagcgccatcggcaagatccaggactctctgtcctctacagccagcgccctgggcaagctgcaggatgtggtgaatcagaacgcccaggccctgaataccctggtgaagcagctgagctccaacttcggcgccatctctagcgtgctgaatgacatcctgagccggctggacccccctgaggcagaggtgcagatcgacaggctgatcacaggccgcctgcagagcctgcagacctacgtgacacagcagctgatcagggcagcagagatcagagcctccgccaatctggccgccaccaagatgagcgagtgcgtgctgggacagtccaagagggtggacttttgtggcaagggctatcacctgatgtctttcccacagagcgcccctcacggcgtggtgtttctgcacgtgacctacgtgccagcccaggagaagaacttcaccacagcaccagccatctgccacgatggaaaggcacactttcctagggagggcgtgttcgtgtctaacggcacccactggtttgtgacacagcgcaatttctacgagccacagatcatcaccacagacaatacattcgtgagcggcaactgtgatgtggtgatcggcatcgtgaacaataccgtgtatgatccactgcagcccgagctggactcctttaaggaggagctggataagtacttcaagaatcacacctctcccgacgtggatctgggcgacatctccggcatcaatgcctctgtggtgaacatccagaaggagatcgaccggctgaacgaggtggccaagaatctgaacgagagcctgatcgatctgcaggagctgggcaagtatgagcagtacatcaagggctctggcagagagaacctgtatttccagggaggaggaggcagcggatacatccctgaggcaccaagggacggacaggcctacgtgcgcaaggatggcgagtgggtgctgctgtccacctttctgggccatcatcaccaccaccaccaccactga

SEQ ID NO: 1735 - DNA, 3846 bp, Artificial Sequence
  Description of Artificial Sequence: Synthetic polynucleotide
atgggcatcctgccaagcccaggaatgcccgccctgctgtctctggtgagcctgctgtccgtgctgctgatgggatgcgtggcagagacaggcacacagtgcgtgaacctgaccacaaggacccagctgccccctgcctataccaattctttcacacggggcgtgtactatcccgacaaggtgtttagaagctccgtgctgcactccacacaggatctgtttctgcctttcttttctaacgtgacctggttccacgccatccacgtgtccggcaccaatggcacaaagcggttcgacaatcccgtgctgccttttaacgatggcgtgtacttcgccagcaccgagaagtccaacatcatcagaggctggatctttggcaccacactggactctaagacacagagcctgctgatcgtgaacaatgccaccaacgtggtgatcaaggtgtgcgagttccagttttgtaatgatccattcctgggcgtgtactatcacaagaacaataagtcctggatggagtctgagtttcgcgtgtattctagcgccaacaattgcacatttgagtacgtgagccagcccttcctgatggacctggagggcaagcagggcaatttcaagaacctgagggagttcgtgtttaagaatatcgatggctacttcaagatctacagcaagcacaccccaatcaacctggtgcgcgacctgccacagggattctccgccctggagccagatgtggatctgcccatcggcatcaacatcacccggtttcagacactgctggccctgcacagatcctacctgacaccaggcgactcctctagcggatggaccgcaggagctgccgcctactatgtgggctatctgcagccccggaccttcctgctgaagtacaacgagaatggcaccatcacagacgcagtggattgcgccctggaccccctgtctgagacaaagtgtacactgaagagctttaccgtggagaagggcatctatcagacaagcaatttcagggtgcagcctaccgagtccatcgtgcgctttcccaatatcacaaacctgtgcccttttggcgaggtgttcaacgccaccagattcgccagcgtgtacgcctggaatcggaagagaatctccaactgcgtggccgactattctgtgctgtacaactccgcctctttcagcacctttaagtgctatggcgtgtctcccacaaagctgaatgatctgtgctttaccaacgtgtacgccgatagcttcgtgatcaggggagacgaagtgagacagatcgcaccaggacagacaggaaagatcgcagactacaattataagctgcctgacgatttcaccggctgcgtgatcgcctggaactccaacaatctggattctaaagtgggcggcaactacaattatctgtacaggctgtttcgcaagtccaatctgaagccattcgagcgggacatctccacagagatctaccaggccggctctaccccctgcaatggcgtggagggctttaactgttatttccctctgcagtcttacggcttccagccaacaaacggcgtgggctatcagccctacagagtggtggtgctgtcctttgagctgctgcacgcaccagcaacagtgtgcggcccaaagaagtctaccaatctggtgaagaacaagtgcgtgaacttcaacttcaacggactgaccggcacaggcgtgctgaccgagagcaataagaagttcctgccttttcagcagttcggcagggacatcgcagataccacagacgccgtgcgcgaccctcagaccctggagatcctggacatcacaccatgcagcttcggcggcgtgtccgtgatcacaccaggcaccaatacatccaaccaggtggccgtgctgtatcaggacgtgaattgtaccgaggtgcccgtggcaatccacgcagatcagctgacccctacatggcgggtgtactctaccggcagcaacgtgttccagacaagagccggatgcctgatcggagcagagcacgtgaacaatagctatgagtgcgacatccctatcggcgccggcatctgtgccagctaccagacccagacaaactccccatctggagcaggctccgtggccagccagtccatcatcgcctataccatgagcctgggcgccgagaacagcgtggcctactccaacaattctatcgccatccctaccaacttcacaatcagcgtgaccacagagatcctgccagtgtctatgaccaagacaagcgtggactgcacaatgtatatctgtggcgatagcaccgagtgctccaacctgctgctgcagtacggctccttttgtacccagctgaatagagccctgacaggcatcgccgtggagcaggataagaacacacaggaggtgttcgcccaggtgaagcagatctacaagaccccacccatcaaggactttggcggcttcaacttcagccagatcctgcctgatccaagcaagccctccaagaggtcttttatcgaggacctgctgttcaacaaggtgaccctggccgatgccggcttcatcaagcagtatggagattgcctgggagacatcgcagcccgcgacctgatctgtgcccagaagtttaatggcctgaccgtgctgcctccactgctgacagatgagatgatcgcccagtacacatctgccctgctggccggcaccatcacaagcggatggaccttcggcgcaggagccgccctgcagatcccttttgccatgcagatggcctataggttcaacggcatcggcgtgacccagaatgtgctgtacgagaaccagaagctgatcgccaatcagtttaacagcgccatcggcaagatccaggactctctgtcctctacagccagcgccctgggcaagctgcaggatgtggtgaatcagaacgcccaggccctgaataccctggtgaagcagctgagctccaacttcggcgccatctctagcgtgctgaatgacatcctgagccggctggacccccctgaggcagaggtgcagatcgacaggctgatcacaggccgcctgcagagcctgcagacctacgtgacacagcagctgatcagggcagcagagatcagagcctccgccaatctggccgccaccaagatgagcgagtgcgtgctgggacagtccaagagggtggacttttgtggcaagggctatcacctgatgtctttcccacagagcgcccctcacggcgtggtgtttctgcacgtgacctacgtgccagcccaggagaagaacttcaccacagcaccagccatctgccacgatggaaaggcacactttcctagggagggcgtgttcgtgtctaacggcacccactggtttgtgacacagcgcaatttctacgagccacagatcatcaccacagacaatacattcgtgagcggcaactgtgatgtggtgatcggcatcgtgaacaataccgtgtatgatccactgcagcccgagctggactcctttaaggaggagctggataagtacttcaagaatcacacctctcccgacgtggatctgggcgacatctccggcatcaatgcctctgtggtgaacatccagaaggagatcgaccggctgaacgaggtggccaagaatctgaacgagagcctgatcgatctgcaggagctgggcaagtatgagcagtacatcaagggctctggcagagagaacctgtatttccagggaggaggaggcagcggatacatccctgaggcaccaagggacggacaggcctacgtgcgcaaggatggcgagtgggtgctgctgtccacctttctgggccatcatcaccaccaccaccaccactga

SEQ ID NO: 1736 - DNA, 3846 bp, Artificial Sequence
  Description of Artificial Sequence: Synthetic polynucleotide
atgggcatcctgccaagcccaggaatgcccgccctgctgtctctggtgagcctgctgtccgtgctgctgatgggatgcgtggcagagacaggcacacagtgcgtgaacctgaccacaaggacccagctgccccctgcctataccaattctttcacacggggcgtgtactatcccgacaaggtgtttagaagctccgtgctgcactccacacaggatctgtttctgcctttcttttctaacgtgacctggttccacgccatccacgtgtccggcaccaatggcacaaagcggttcgacaatcccgtgctgccttttaacgatggcgtgtacttcgccagcaccgagaagtccaacatcatcagaggctggatctttggcaccacactggactctaagacacagagcctgctgatcgtgaacaatgccaccaacgtggtgatcaaggtgtgcgagttccagttttgtaatgatccattcctgggcgtgtactatcacaagaacaataagtcctggatggagtctgagtttcgcgtgtattctagcgccaacaattgcacatttgagtacgtgagccagcccttcctgatggacctggagggcaagcagggcaatttcaagaacctgagggagttcgtgtttaagaatatcgatggctacttcaagatctacagcaagcacaccccaatcaacctggtgcgcgacctgccacagggattctccgccctggagccactggtggatctgcccatcggcatcaacatcacccggtttcagacactgctggccctgcacagatcctacctgacaccaggcgactcctctagcggatggaccgcaggagctgccgcctactatgtgggctatctgcagccccggaccttcctgctgaagtacaacgagaatggcaccatcacagacgcagtggattgcgccctggaccccctgtctgagacaaagtgtacactgaagagctttaccgtggagaagggcatctatcagacaagcaatttcagggtgcagcctaccgagtccatcgtgcgctttcccaatatcacaaacctgtgcccttttggcgaggtgttcaacgccaccagattcgccagcgtgtacgcctggaatcggaagagaatctccaactgcgtggccgactattctgtgctgtacaactccgcctctttcagcacctttaagtgctatggcgtgtctcccacaaagctgaatgatctgtgctttaccaacgtgtacgccgatagcttcgtgatcaggggagacgaagtgagacagatcgcaccaggacagacaggaaagatcgcagactacaattataagctgcctgacgatttcaccggctgcgtgatcgcctggaactccaacaatctggattctaaagtgggcggcaactacaattatctgtacaggctgtttcgcaagtccaatctgaagccattcgagcgggacatctccacagagatctaccaggccggctctaccccctgcaatggcgtggagggctttaactgttatttccctctgcagtcttacggcttccagccaacaaacggcgtgggctatcagccctacagagtggtggtgctgtcctttgagctgctgcacgcaccagcaacagtgtgcggcccaaagaagtctaccaatctggtgaagaacaagtgcgtgaacttcaacttcaacggactgaccggcacaggcgtgctgaccgagagcaataagaagttcctgccttttcagcagttcggcagggacatcgcagataccacagacgccgtgcgcgaccctcagaccctggagatcctggacatcacaccatgcagcttcggcggcgtgtccgtgatcacaccaggcaccaatacatccaaccaggtggccgtgctgtatcaggacgtgaattgtaccgaggtgcccgtggcaatccacgcagatcagctgacccctacatggcgggtgtactctaccggcagcaacgtgttccagacaagagccggatgcctgatcggagcagagcacgtgaacaatagctatgagtgcgacatccctatcggcgccggcatctgtgccagctaccagacccagacaaactccccatctggagcaggctccgtggccagccagtccatcatcgcctataccatgagcctgggcgccgagaacagcgtggcctactccaacaattctatcgccatccctaccaacttcacaatcagcgtgaccacagagatcctgccagtgtctatgaccaagacaagcgtggactgcacaatgtatatctgtggcgatagcaccgagtgctccaacctgctgctgcagtacggctccttttgtacccagctgaatagagccctgacaggcatcgccgtggagcaggataagaacacacaggaggtgttcgcccaggtgaagcagatctacaagaccccacccatcaaggactttggcggcttcaacttcagccagatcctgcctgatccaagcaagccctccaagaggtcttttatcgaggacctgctgttcaacaaggtgaccctggccgatgccggcttcatcaagcagtatggagattgcctgggagacatcgcagcccgcgacctgatctgtgcccagaagtttaatggcctgaccgtgctgcctccactgctgacagatgagatgatcgcccagtacacatctgccctgctggccggcaccatcacagctggatggaccttcggcgcaggagccgccctgcagatcccttttgccatgcagatggcctataggttcaacggcatcggcgtgacccagaatgtgctgtacgagaaccagaagctgatcgccaatcagtttaacagcgccatcggcaagatccaggactctctgtcctctacagccagcgccctgggcaagctgcaggatgtggtgaatcagaacgcccaggccctgaataccctggtgaagcagctgagctccaacttcggcgccatctctagcgtgctgaatgacatcctgagccggctggacccccctgaggcagaggtgcagatcgacaggctgatcacaggccgcctgcagagcctgcagacctacgtgacacagcagctgatcagggcagcagagatcagagcctccgccaatctggccgccaccaagatgagcgagtgcgtgctgggacagtccaagagggtggacttttgtggcaagggctatcacctgatgtctttcccacagagcgcccctcacggcgtggtgtttctgcacgtgacctacgtgccagcccaggagaagaacttcaccacagcaccagccatctgccacgatggaaaggcacactttcctagggagggcgtgttcgtgtctaacggcacccactggtttgtgacacagcgcaatttctacgagccacagatcatcaccacagacaatacattcgtgagcggcaactgtgatgtggtgatcggcatcgtgaacaataccgtgtatgatccactgcagcccgagctggactcctttaaggaggagctggataagtacttcaagaatcacacctctcccgacgtggatctgggcgacatctccggcatcaatgcctctgtggtgaacatccagaaggagatcgaccggctgaacgaggtggccaagaatctgaacgagagcctgatcgatctgcaggagctgggcaagtatgagcagtacatcaagggctctggcagagagaacctgtatttccagggaggaggaggcagcggatacatccctgaggcaccaagggacggacaggcctacgtgcgcaaggatggcgagtgggtgctgctgtccacctttctgggccatcatcaccaccaccaccaccactga

SEQ ID NO: 1737 - DNA, 3846 bp, Artificial Sequence
  Description of Artificial Sequence: Synthetic polynucleotide
atgggcatcctgccaagcccaggaatgcccgccctgctgtctctggtgagcctgctgtccgtgctgctgatgggatgcgtggcagagacaggcacacagtgcgtgaacctgaccacaaggacccagctgccccctgcctataccaattctttcacacggggcgtgtactatcccgacaaggtgtttagaagctccgtgctgcactccacacaggatctgtttctgcctttcttttctaacgtgacctggttccacgccatccacgtgtccggcaccaatggcacaaagcggttcgacaatcccgtgctgccttttaacgatggcgtgtacttcgccagcaccgagaagtccaacatcatcagaggctggatctttggcaccacactggactctaagacacagagcctgctgatcgtgaacaatgccaccaacgtggtgatcaaggtgtgcgagttccagttttgtaatgatccattcctgggcgtgtactatcacaagaacaataagtcctggatggagtctgagtttcgcgtgtattctagcgccaacaattgcacatttgagtacgtgagccagcccttcctgatggacctggagggcaagcagggcaatttcaagaacctgagggagttcgtgtttaagaatatcgatggctacttcaagatctacagcaagcacaccccaatcaacctggtgcgcgacctgccacagggattctccgccctggagccactggtggatctgcccatcggcatcaacatcacccggtttcagacactgctggccctgcacagatcctacctgacaccaggcgactcctctagcggatggaccgcaggagctgccgcctactatgtgggctatctgcagccccggaccttcctgctgaagtacaacgagaatggcaccatcacagacgcagtggattgcgccctggaccccctgtctgaggcaaagtgtacactgaagagctttaccgtggagaagggcatctatcagacaagcaatttcagggtgcagcctaccgagtccatcgtgcgctttcccaatatcacaaacctgtgcccttttggcgaggtgttcaacgccaccagattcgccagcgtgtacgcctggaatcggaagagaatctccaactgcgtggccgactattctgtgctgtacaactccgcctctttcagcacctttaagtgctatggcgtgtctcccacaaagctgaatgatctgtgctttaccaacgtgtacgccgatagcttcgtgatcaggggagacgaagtgagacagatcgcaccaggacagacaggaaagatcgcagactacaattataagctgcctgacgatttcaccggctgcgtgatcgcctggaactccaacaatctggattctaaagtgggcggcaactacaattatctgtacaggctgtttcgcaagtccaatctgaagccattcgagcgggacatctccacagagatctaccaggccggctctaccccctgcaatggcgtggagggctttaactgttatttccctctgcagtcttacggcttccagccaacaaacggcgtgggctatcagccctacagagtggtggtgctgtcctttgagctgctgcacgcaccagcaacagtgtgcggcccaaagaagtctaccaatctggtgaagaacaagtgcgtgaacttcaacttcaacggactgaccggcacaggcgtgctgaccgagagcaataagaagttcctgccttttcagcagttcggcagggacatcgcagataccacagacgccgtgcgcgaccctcagaccctggagatcctggacatcacaccatgcagcttcggcggcgtgtccgtgatcacaccaggcaccaatacatccaaccaggtggccgtgctgtatcaggacgtgaattgtaccgaggtgcccgtggcaatccacgcagatcagctgacccctacatggcgggtgtactctaccggcagcaacgtgttccagacaagagccggatgcctgatcggagcagagcacgtgaacaatagctatgagtgcgacatccctatcggcgccggcatctgtgccagctaccagacccagacaaactccccatctggagcaggctccgtggccagccagtccatcatcgcctataccatgagcctgggcgccgagaacagcgtggcctactccaacaattctatcgccatccctaccaacttcacaatcagcgtgaccacagagatcctgccagtgtctatgaccaagacaagcgtggactgcacaatgtatatctgtggcgatagcaccgagtgctccaacctgctgctgcagtacggctccttttgtacccagctgaatagagccctgacaggcatcgccgtggagcaggataagaacacacaggaggtgttcgcccaggtgaagcagatctacaagaccccacccatcaaggactttggcggcttcaacttcagccagatcctgcctgatccaagcaagccctccaagaggtcttttatcgaggacctgctgttcaacaaggtgaccctggccgatgccggcttcatcaagcagtatggagattgcctgggagacatcgcagcccgcgacctgatctgtgcccagaagtttaatggcctgaccgtgctgcctccactgctgacagatgagatgatcgcccagtacacatctgccctgctggccggcaccatcacaagcggatggaccttcggcgcaggagccgccctgcagatcccttttgccatgcagatggcctataggttcaacggcatcggcgtgacccagaatgtgctgtacgagaaccagaagctgatcgccaatcagtttaacagcgccatcggcaagatccaggactctctgtcctctacagccagcgccctgggcaagctgcaggatgtggtgaatcagaacgcccaggccctgaataccctggtgaagcagctgagctccaacttcggcgccatctctagcgtgctgaatgacatcctgagccggctggacccccctgaggcagaggtgcagatcgacaggctgatcacaggccgcctgcagagcctgcagacctacgtgacacagcagctgatcagggcagcagagatcagagcctccgccaatctggccgccaccaagatgagcgagtgcgtgctgggacagtccaagagggtggacttttgtggcaagggctatcacctgatgtctttcccacagagcgcccctcacggcgtggtgtttctgcacgtgacctacgtgccagcccaggagaagaacttcaccacagcaccagccatctgccacgatggaaaggcacactttcctagggagggcgtgttcgtgtctaacggcacccactggtttgtgacacagcgcaatttctacgagccacagatcatcaccacagacaatacattcgtgagcggcaactgtgatgtggtgatcggcatcgtgaacaataccgtgtatgatccactgcagcccgagctggactcctttaaggaggagctggataagtacttcaagaatcacacctctcccgacgtggatctgggcgacatctccggcatcaatgcctctgtggtgaacatccagaaggagatcgaccggctgaacgaggtggccaagaatctgaacgagagcctgatcgatctgcaggagctgggcaagtatgagcagtacatcaagggctctggcagagagaacctgtatttccagggaggaggaggcagcggatacatccctgaggcaccaagggacggacaggcctacgtgcgcaaggatggcgagtgggtgctgctgtccacctttctgggccatcatcaccaccaccaccaccactga

SEQ ID NO: 1738 - DNA, 3846 bp, Artificial Sequence
  Description of Artificial Sequence: Synthetic polynucleotide
atgggcatcctgccaagcccaggaatgcccgccctgctgtctctggtgagcctgctgtccgtgctgctgatgggatgcgtggcagagacaggcacacagtgcgtgaacctgaccacaaggacccagctgccccctgcctataccaattctttcacacggggcgtgtactatcccgacaaggtgtttagaagctccgtgctgcactccacacaggatctgtttctgcctttcttttctaacgtgacctggttccacgccatccacgtgtccggcaccaatggcacaaagcggttcgacaatcccgtgctgccttttaacgatggcgtgtacttcgccagcaccgagaagtccaacatcatcagaggctggatctttggcaccacactggactctaagacacagagcctgctgatcgtgaacaatgccaccaacgtggtgatcaaggtgtgcgagttccagttttgtaatgatccattcctgggcgtgtactatcacaagaacaataagtcctggatggagtctgagtttcgcgtgtattctagcgccaacaattgcacatttgagtacgtgagccagcccttcctgatggacctggagggcaagcagggcaatttcaagaacctgagggagttcgtgtttaagaatatcgatggctacttcaagatctacagcaagcacaccccaatcaacctggtgcgcgacctgccacagggattctccgccctggagccactggtggatctgcccatcggcatcaacatcacccggtttcagacactgctggccctgcacagatcctacctgacaccaggcgactcctctagcggatggaccgcaggagctgccgcctactatgtgggctatctgcagccccggaccttcctgctgaagtacaacgagaatggcaccatcacagacgcagtggattgcgccctggaccccctgtctgagacaaagtgtacactgaagagctttaccgtggagaagggcatctatcagacaagcaatttcagggtgcagcctaccgagtccatcgtgcgctttcccaatatcacaaacctgtgcccttttggcgaggtgttcaacgccaccagattcgccagcgtgtacgcctggaatcggaagagaatctccaactgcgtggccgactattctgtgctgtacaactccgcctctttcagcacctttaagtgctatggcgtgtctcccacaaagctgaatgatctgtgctttaccaacgtgtacgccgatagcttcgtgatcaggggagacgaagtgagacagatcgcaccaggacagacaggaaagatcgcagactacaattataagctgcctgacgatttcaccggctgcgtgatcgcctggaactccaacaatctggattctaaagtgggcggcaactacaattatctgtacaggctgtttcgcaagtccaatctgaagccattcgagcgggacatctccacagagatctaccaggccggctctaccccctgcaatggcgtggagggctttaactgttatttccctctgcagtcttacggcttccagccaacaaacggcgtgggctatcagccctacagagtggtggtgctgtcctttgagctgctgcacgcaccagcaacagtgtgcggcccaaagaagtctaccaatctggtgaagaacaagtgcgtgaacttcaacttcaacggactgaccggcacaggcgtgctgaccagtagcaataagaagttcctgccttttcagcagttcggcagggacatcgcagataccacagacgccgtgcgcgaccctcagaccctggagatcctggacatcacaccatgcagcttcggcggcgtgtccgtgatcacaccaggcaccaatacatccaaccaggtggccgtgctgtatcaggacgtgaattgtaccgaggtgcccgtggcaatccacgcagatcagctgacccctacatggcgggtgtactctaccggcagcaacgtgttccagacaagagccggatgcctgatcggagcagagcacgtgaacaatagctatgagtgcgacatccctatcggcgccggcatctgtgccagctaccagacccagacaaactccccatctggagcaggctccgtggccagccagtccatcatcgcctataccatgagcctgggcgccgagaacagcgtggcctactccaacaattctatcgccatccctaccaacttcacaatcagcgtgaccacagagatcctgccagtgtctatgaccaagacaagcgtggactgcacaatgtatatctgtggcgatagcaccgagtgctccaacctgctgctgcagtacggctccttttgtacccagctgaatagagccctgacaggcatcgccgtggagcaggataagaacacacaggaggtgttcgcccaggtgaagcagatctacaagaccccacccatcaaggactttggcggcttcaacttcagccagatcctgcctgatccaagcaagccctccaagaggtcttttatcgaggacctgctgttcaacaaggtgaccctggccgatgccggcttcatcaagcagtatggagattgcctgggagacatcgcagcccgcgacctgatctgtgcccagaagtttaatggcctgaccgtgctgcctccactgctgacagatgagatgatcgcccagtacacatctgccctgctggccggcaccatcacaagcggatggaccttcggcgcaggagccgccctgcagatcccttttgccatgcagatggcctataggttcaacggcatcggcgtgacccagaatgtgctgtacgagaaccagaagctgatcgccaatcagtttaacagcgccatcggcaagatccaggactctctgtcctctacagccagcgccctgggcaagctgcaggatgtggtgaatcagaacgcccaggccctgaataccctggtgaagcagctgagctccaacttcggcgccatctctagcgtgctgaatgacatcctgagccggctggacccccctgaggcagaggtgcagatcgacaggctgatcacaggccgcctgcagagcctgcagacctacgtgacacagcagctgatcagggcagcagagatcagagcctccgccaatctggccgccaccaagatgagcgagtgcgtgctgggacagtccaagagggtggacttttgtggcaagggctatcacctgatgtctttcccacagagcgcccctcacggcgtggtgtttctgcacgtgacctacgtgccagcccaggagaagaacttcaccacagcaccagccatctgccacgatggaaaggcacactttcctagggagggcgtgttcgtgtctaacggcacccactggtttgtgacacagcgcaatttctacgagccacagatcatcaccacagacaatacattcgtgagcggcaactgtgatgtggtgatcggcatcgtgaacaataccgtgtatgatccactgcagcccgagctggactcctttaaggaggagctggataagtacttcaagaatcacacctctcccgacgtggatctgggcgacatctccggcatcaatgcctctgtggtgaacatccagaaggagatcgaccggctgaacgaggtggccaagaatctgaacgagagcctgatcgatctgcaggagctgggcaagtatgagcagtacatcaagggctctggcagagagaacctgtatttccagggaggaggaggcagcggatacatccctgaggcaccaagggacggacaggcctacgtgcgcaaggatggcgagtgggtgctgctgtccacctttctgggccatcatcaccaccaccaccaccactga

SEQ ID NO: 1739 - DNA, 3846 bp, Artificial Sequence
  Description of Artificial Sequence: Synthetic polynucleotide
atgggcatcctgccaagcccaggaatgcccgccctgctgtctctggtgagcctgctgtccgtgctgctgatgggatgcgtggcagagacaggcacacagtgcgtgaacctgaccacaaggacccagctgccccctgcctataccaattctttcacacggggcgtgtactatcccgacaaggtgtttagaagctccgtgctgcactccacacaggatctgtttctgcctttcttttctaacgtgacctggttccacgccatccacgtgtccggcaccaatggcacaaagcggttcgacaatcccgtgctgccttttaacgatggcgtgtacttcgccagcaccgagaagtccaacatcatcagaggctggatctttggcaccacactggactctaagacacagagcctgctgatcgtgaacaatgccaccaacgtggtgatcaaggtgtgcgagttccagttttgtaatgatccattcctgggcgtgtactatcacaagaacaataagtcctggatggagtctgagtttcgcgtgtattctagcgccaacaattgcacatttgagtacgtgagccagcccttcctgatggacctggagggcaagcagggcaatttcaagaacctgagggagttcgtgtttaagaatatcgatggctacttcaagatctacagcaagcacaccccaatcaacctggtgcgcgacctgccacagggattctccgccctggagccactggtggatctgcccatcggcatcaacatcacccggtttcagacactgctggccctgcacagatcctacctgacaccaggcgactcctctagcggatggaccgcaggagctgccgcctactatgtgggctatctgcagccccggaccttcctgctgaagtacaacgagaatggcaccatcacagacgcagtggattgcgccctggaccccctgtctgagacaaagtgtacactgaagagctttaccgtggagaagggcatctatcagacaagcaatttcagggtgcagcctaccgagtccatcgtgcgctttcccaatatcacaaacctgtgcccttttggcgaggtgttcaacgccaccagattcgccagcgtgtacgcctggaatcggaagagaatctccaactgcgtggccgactattctgtgctgtacaactccgcctctttcagcacctttaagtgctatggcgtgtctcccacaaagctgaatgatctgtgctttaccaacgtgtacgccgatagcttcgtgatcaggggagacgaagtgagacagatcgcaccaggacagacaggaaagatcgcagactacaattataagctgcctgacgatttcaccggctgcgtgatcgcctggaactccaacaatctggattctaaagtgggcggcaactacaattatctgtacaggctgtttcgcaagtccaatctgaagccattcgagcgggacatctccacagagatctaccaggccggctctaccccctgcaatggcgtggagggctttaactgttatttccctctgcagtcttacggcttccagccaacaaacggcgtgggctatcagccctacagagtggtggtgctgtcctttgagctgctgcacgcaccagcaacagtgtgcggcccaaagaagtctaccaatctggtgaagaacaagtgcgtgaacttcaacttcaacggactgaccggcacaggcgtgctgaccgagagcaataagaagttcctgccttttcagcagttcggcagggacatcgcagataccacagacgccgtgcgcgaccctcagaccctggagatcctggacatcacaccatgcagcttcggcggcgtgtccgtgatcacaccaggcaccaatacatccaaccaggtggccgtgctgtatcaggacgtgaattgtaccgaggtgcccgtggcaatccacgcagatcagctgacccctacatggcgggtgtactctaccggcagcaacgtgttccagacaagagccggatgcctgatcggagcagagcacgtgaacaatagctatgagtgcgacatccctatcggcgccggcatctgtgccagctaccagacccagacaaactccccatctggagcaggctccgtggccagccagtccatcatcgcctataccatgagcctgggcgccgagaacagcgtggcctactccaacaattctatcgccatccctaccaacttcacaatcagcgtgaccacagagatcctgccagtgtctatgaccaagacaagcgtggactgcacaatgtatatctgtggcgatagcaccgagtgctccaacctgctgctgcagtacggctccttttgtacccagctgaatagagccctgacaggcatcgccgtggagcaggataagaacacacaggaggtgttcgcccaggtgaagcagatctacaagaccccacccatcaaggactttggcggcttcaacttcagccagatcctgcctgatccaagcaagccctccaagaggtcttttatcgaggacctgctgttcaacaaggtgaccctggccgatgccggcttcatcaagcagtatggagattgcctgggagacatcgcagcccgcgacctgatctgtgcccagaagtttaatggcctgaccgtgctgcctccactgctgacagatgagatgatcgcccagtacacatctgccctgctggccggcaccatcacaagcggatggaccttcggcgcaggagccgccctgcagatcccttttgccatgcagatggcctataggttcaacggcatcggcgtgacccagaatgtgctgtacgagaaccagaagctgatcgccaatcagtttaacagcgccatcggcaagatccaggactctctgtcctctacagccagcgccctgggcaagctgcaggatgtggtgaatcagaacgcccaggccctgaataccctggtgaagcagctgagctccaacttcggcgccatctctagcgtgctgaatgacatcctgagccggctggacccccctgaggcagaggtgcagatcgacaggctgatcacaggccgcctgcagagcctgcagacctacgtgacacagcagctgatcagggcagcagagatcagagcctccgccaatctggccgccaccaagatgagcgagtgcgtgctgggacagtccaagagggtggacttttgtggcaagggctatcacctgatgtctttcccacagagcgcccctcacggcgtggtgtttctgcacgtgacctacgtgccagcccaggagaagaacttcaccacagcaccagccatctgccacgatggaaaggcacactttcctagggagggcgtgttcgtgtctaacggcaccgcgtggtttgtgacacagcgcaatttctacgagccacagatcatcaccacagacaatacattcgtgagcggcaactgtgatgtggtgatcggcatcgtgaacaataccgtgtatgatccactgcagcccgagctggactcctttaaggaggagctggataagtacttcaagaatcacacctctcccgacgtggatctgggcgacatctccggcatcaatgcctctgtggtgaacatccagaaggagatcgaccggctgaacgaggtggccaagaatctgaacgagagcctgatcgatctgcaggagctgggcaagtatgagcagtacatcaagggctctggcagagagaacctgtatttccagggaggaggaggcagcggatacatccctgaggcaccaagggacggacaggcctacgtgcgcaaggatggcgagtgggtgctgctgtccacctttctgggccatcatcaccaccaccaccaccactga

SEQ ID NO: 1740 - DNA, 3846 bp, Artificial Sequence
  Description of Artificial Sequence: Synthetic polynucleotide
atgggcatcctgccaagcccaggaatgcccgccctgctgtctctggtgagcctgctgtccgtgctgctgatgggatgcgtggcagagacaggcacacagtgcgtgaacctgaccacaaggacccagctgccccctgcctataccaattctttcacacggggcgtgtactatcccgacaaggtgtttagaagcgatgtgctgcactccacacaggatctgtttctgcctttcttttctaacgtgacctggttccacgccatccacgtgtccggcaccaatggcacaaagcggttcgacaatcccgtgctgccttttaacgatggcgtgtacttcgccagcaccgagaagtccaacatcatcagaggctggatctttggcaccacactggactctaagacacagagcctgctgatcgtgaacaatgccaccaacgtggtgatcaaggtgtgcgagttccagttttgtgaagatccattcctgggcgtgtactatcacaagaacaataagtcctggatggagaaagagtttcgcgtgtattctagcgccaacaattgcacatttgagtacgtgagccagcccttcctgatggacctgggaggcaagcagggcaatttcaagaacctgagggagttcgtgtttaagaatatcgatggctacttcaagatctacagcaagcacaccccaatcaacctggtgcgcgacctgccacagggattctccgccctggagccactgatggatctgcccatcggcatcaacatcacccggtttcagacactgctggccctgcacagatcctacctgacaccaggcgactcctctagcggatggaccgcaggagctgccgcctactatgtgggctatctgcagccccggaccttcctgctgaagtacaacgagaatggcaccatcacagacgcagtggattgcgccctggaccccctgtctgagacaaagtgtacactgaagagctttaccgtggagaagggcatctatcagacaagcaatttcagggtgcagcctaccgagtccatcgtgcgctttcccaatatcacaaacctgtgcccttttggcgaggtgttcaacgccaccagattcgccagcgtgtacgcctggaatcggaagagaatctccaactgcgtggccgactattctgtgctgtacaactccgcctctttcagcacctttaagtgctatggcgtgtctcccacaaagctgaatgatctgtgctttaccaacgtgtacgccgatagcttcgtgatcaggggagacgaagtgagacagatcgcaccaggacagacaggaaagatcgcagactacaattataagctgcctgacgatttcaccggctgcgtgatcgcctggaactccaacaatctggattctaaagtgggcggcaactacaattatctgtacaggctgtttcgcaagtccaatctgaagccattcgagcgggacatctccacagagatctaccaggccggctctaccccctgcaatggcgtggagggctttaactgttatttccctctgcagtcttacggcttccagccaacaaacggcgtgggctatcagccctacagagtggtggtgctgtcctttgagctgctgcacgcaccagcaacagtgtgcggcccaaagaagtctaccaatctggtgaagaacaagtgcgtgaacttcaacttcaacggactgaccggcacaggcgtgctgaccgagagcaataagaagttcctgccttttcagcagttcggcagggacatcgcagataatacagacgccgtgcgcgaccctcagaccctggagatcctggacatcacaccatgcagcttcggcggcgtgtccgtgatcacaccaggcaccaatacatccaaccaggtggccgtgctgtatcaggacgtgaattgtaccgaggtgcccaatgcaatccacgcagatcagctgacccctacatggcgggtgtactctaccggcagcaacgtgttccagacaagagccggatgcctgatcggagcagagcacgtgaacaatagctatgagtgcgacatccctatcggcgccggcatctgtgccagctaccagacccagacaaactccccatctggagcaggctccgtggccagccagtccatcatcgcctataccatgagcctgggcgccgagaacagcgtggcctactccaacaattctatcgccatccctaccaacttcacaatcagcgtgaccacagagatcctgccagtgtctatgaccaagacaagcgtggactgcacaatgtatatctgtggcgatagcaccgagtgctccaacctgctgctgcagtacggctccttttgtacccagctgaatagagccctgcaaggcatcgcccaagagcaggataagaacacacaggaggtgttcgcccaggtgaagcagatctacaagaccccacccatcaaggactttggcggcttcaacttcagccagatcctgcctgatccaagcaagccctccaagaggtcttttatcgaggacctgctgttcaacaaggtgaccctggccgatgccggcttcatcaagcagtatggagattgcctgggagacatcgcagcccgcgacctgatctgtgcccagaagtttaatggcctgaccgtgctgcctccactgctgacagatgagatgatcgcccagtacacatctgccctgctggccggcaccatcacaagcggatggaccttcggcgcaggagccgccctgcagatcccttttgccatgcagatggcctataggttcaacggcatcggcgtgacccagaatgtgctgtacgagaaccagaagctgatcgccaatcagtttaacaaagccatcggcaagatccaggactctctgtcctctacagccagcgccctgggcaagctgcaggatgtggtgaatcagaacgcccaggccctgaataccctggtgaagcagctgagctccaacttcggcgccatctctagcgtgctgaatgacatcctgagccggctggacccccctgaggcagaggtgcagatcgacaggctgatcacaggccgcctgcagagcctgcagacctacgtgacacagcagctgatcagggcagcagagatcagagcctccgccaatctggccgccaccaagatgagcgagtgcgtgctgggacagtccaagagggtggacttttgtggcaagggctatcacctgatgtctttcccacagagcgcccctcacggcgtggtgtttctgcacgtgacctacgtgccagcccaggagaagaacttcaccacagcaccagccatctgccacgatggaaaggcattttttcctagggagggcgtgttcgtgtctaacggcacccaatggtttgtgacacagcgcaatttctacgagccacagatcatcaccacagacaatacattcgtgagcggcaactgtgatgtggtgatcggcatcgtgaacaataccgtgtatgatccactgcagcccgagctggactcctttaaggaggagctggataagtacttcaagaatcacacctctcccgacgtggatctgggcgacatctccggcatcaatgcctctgtggtgaacatccagaaggagatcgaccggctgaacgaggtggccaagaatctgaacgagagcctgatcgatctgcaggagctgggcaagtatgagcagtacatcaagggctctggcagagagaacctgtatttccagggaggaggaggcagcggatacatccctgaggcaccaagggacggacaggcctacgtgcgcaaggatggcgagtgggtgctgctgtccacctttctgggccatcatcaccaccaccaccaccactga

SEQ ID NO: 1741 - DNA, 3846 bp, Artificial Sequence
  Description of Artificial Sequence: Synthetic polynucleotide
atgggcatcctgccaagcccaggaatgcccgccctgctgtctctggtgagcctgctgtccgtgctgctgatgggatgcgtggcagagacaggcacacagtgcgtgaacctgaccacaaggacccagctgccccctgcctataccaattctttcacacggggcgtgtactatcccgacaaggtgtttagaagctccgtgctgcactccacacaggatctgtttctgcctttcttttctaacgtgacctggttccacgccttgcacgtgtccggcaccaatggcacaaagcggttcgacaatcccgtgctgccttttaacgatggcgtgtacttcgccagcaccgagaagtccaacatcatcagaggctggatctttggcaccacactggactctaagacacagagcctgctgatcgtgaacaatgccaccaacgtggtgatcaaggtgtgcgagttccagttttgtaatgatccattcctgggcgtgtactatcacaagaacaataagtcctggatggagtctgagtttcgcgtgtattctagcgccaacaattgcacatttgagtacgtgagccagcccttcctgatggacctggagggcaagcagggcaatttcaagaacctgagggagttcgtgtttaagaatatcgatggctacttcaagatctacagcaagcacaccccaatcaacctggtgcgcgacctgccacagggattctccgccctggagccactggtggatctgcccatcggcatcaacatcacccggtttcagacactgctggccctgcacagatcctacctgacaccaggcgactcctctagcggatggaccgcaggagctgccgcctactatgtgggctatctgcagccccggaccttcctgctgaagtacaacgagaatggcaccatcacagacgcagtggattgcgccctggaccccctgtctgagacaaagtgtacactgaagagctttaccgtggagaagggcatctatcagacaagcaatttcagggtgcagcctaccgagtccatcgtgcgctttcccaatatcacaaacctgtgcccttttggcgaggtgttcaacgccaccagattcgccagcgtgtacgcctggaatcggaagagaatctccaactgcgtggccgactattctgtgctgtacaactccgcctctttcagcacctttaagtgctatggcgtgtctcccacaaagctgaatgatctgtgctttaccaacgtgtacgccgatagcttcgtgatcaggggagacgaagtgagacagatcgcaccaggacagacaggaaagatcgcagactacaattataagctgcctgacgatttcaccggctgcgtgatcgcctggaactccaacaatctggattctaaagtgggcggcaactacaattatctgtacaggctgtttcgcaagtccaatctgaagccattcgagcgggacatctccacagagatctaccaggccggctctaccccctgcaatggcgtggagggctttaactgttatttccctctgcagtcttacggcttccagccaacaaacggcgtgggctatcagccctacagagtggtggtgctgtcctttgagctgctgcacgcaccagcaacagtgtgcggcccaaagaagtctaccaatctggtgaagaacaagtgcgtgaacttcaacttcaacggactgaccggcacaggcgtgctgaccgagagcaataagaagttcctgccttttcagcagttcggcagggacatcgcagataccacagacgccgtgcgcgaccctcagaccctggagatcctggacatcacaccatgcagcttcggcggcgtgtccgtgatcacaccaggcaccaatacatccaaccaggtggccgtgctgtatcaggacgtgaattgtaccgaggtgcccgtggcaatccacgcagatcagctgacccctacatggcgggtgtactctaccggcagcaacgtgttccagacaagagccggatgcctgatcggagcagagcacgtgaacaatagctatgagtgcgacatccctatcggcgccggcatctgtgccagctaccagacccagacaaactccccatctggagcaggctccgtggccagccagtccatcatcgcctataccatgagcctgggcgccgagaacagcgtggcctactccaacaattctatcgccatccctaccaacttcacaatcagcgtgaccacagagatcctgccagtgtctatgaccaagacaagcgtggactgcacaatgtatatctgtggcgatagcaccgagtgctccaacctgctgctgcagtacggctccttttgtacccagctgaatagagccctgacaggcatcgccgtggagcaggataagaacacacaggaggtgttcgcccaggtgaagcagatctacaagaccccacccatcaaggactttggcggcttcaacttcagccagatcctgcctgatccaagcaagccctccaagaggtcttttatcgaggacctgctgttcaacaaggtgaccctggccgatgccggcttcatcaagcagtatggagattgcctgggagacatcgcagcccgcgacctgatctgtgcccagaagtttaatggcctgaccgtgctgcctccactgctgacagatgagatgatcgcccagtacacatctgccctgctggccggcaccatcacaagcggatggaccttcggcgcaggagccgccctgcagatcccttttgccatgcagatggcctataggttcaacggcatcggcgtgacccagaatgtgctgtacgagaaccagaagctgatcgccaatcagtttaacagcgccatcggcaagatccaggactctctgtcctctacagccagcgccctgggcaagctgcaggatgtggtgaatcagaacgcccaggccctgaataccctggtgaagcagctgagctccaacttcggcgccatctctagcgtgctgaatgacatcctgagccggctggacccccctgaggcagaggtgcagatcgacaggctgatcacaggccgcctgcagagcctgcagacctacgtgacacagcagctgatcagggcagcagagatcagagcctccgccaatctggccgccaccaagatgagcgagtgcgtgctgggacagtccaagagggtggacttttgtggcaagggctatcacctgatgtctttcccacagagcgcccctcacggcgtggtgtttctgcacgtgacctacgtgccagcccaggagaagaacttcaccacagcaccagccatctgccacgatggaaaggcacactttcctagggagggcgtgttcgtgtctaacggcacccactggtttgtgacacagcgcaatttctacgagccacagatcatcaccacagacaatacattcgtgagcggcaactgtgatgtggtgatcggcatcgtgaacaataccgtgtatgatccactgcagcccgagctggactcctttaaggaggagctggataagtacttcaagaatcacacctctcccgacgtggatctgggcgacatctccggcatcaatgcctctgtggtgaacatccagaaggagatcgaccggctgaacgaggtggccaagaatctgaacgagagcctgatcgatctgcaggagctgggcaagtatgagcagtacatcaagggctctggcagagagaacctgtatttccagggaggaggaggcagcggatacatccctgaggcaccaagggacggacaggcctacgtgcgcaaggatggcgagtgggtgctgctgtccacctttctgggccatcatcaccaccaccaccaccactga

SEQ ID NO: 1742 - DNA, 3846 bp, Artificial Sequence
  Description of Artificial Sequence: Synthetic polynucleotide
atgggcatcctgccaagcccaggaatgcccgccctgctgtctctggtgagcctgctgtccgtgctgctgatgggatgcgtggcagagacaggcacacagtgcgtgaacctgaccacaaggacccagctgccccctgcctataccaattctttcacacggggcgtgtactatcccgacaaggtgtttagaagctccgtgctgcactccacacaggatctgtttctgcctttcttttctaacgtgacctggttccacgccatccacgtgtccggcaccaatggcacaaagcggttcgacaatcccgtgctgccttttaacgatggcgtgtacttcgccagcaccgagaagtccaacatcatcagaggctggatctttggcaccacactggactctaagacacagagcctgctgatcgtgaacaatgccaccaacgtggtgatcaaggtgtgcgagttccagttttgtaatgatccattcctgggcgtgtactatcacaagaacaataagtcctggatggagtctgagtttcgcgtgtattctagcgccaacaattgcacatttgagtacgtgagccagcccttcctgatggacctggagggcaagcagggcaatttcaagaacctgagggagttcgtgtttaagaatatcgatggctacttcaagatctacagcaagcacaccccaatcaacctggtgcgcgacctgccacagggattctccgccctggagccactggtggatctgcccatcggcatcaacatcacccggtttcagacactgctggccctgcacagatcctacctgacaccaggcgactcctctagcggatggaccgcaggagctgccgcctactatgtgggctatctgcagccccggaccttcctgctgaagtacaacgagaatggcaccatcacagacgcagtggattgcgccctggaccccctgtctgagacaaagtgtacactgaagagctttaccgtggagaagggcatctatcagacaagcaatttcagggtgcagcctaccgagtccatcgtgcgctttcccaatatcacaaacctgtgcccttttggcgaggtgttcaacgccaccagattcgccagcgtgtacgcctggaatcggaagagaatctccaactgcgtggccgactattctgtgctgtacaactccgcctctttcagcacctttaagtgctatggcgtgtctcccacaaagctgaatgatctgtgctttaccaacgtgtacgccgatagcttcgtgatcaggggagacgaagtgagacagatcgcaccaggacagacaggaaagatcgcagactacaattataagctgcctgacgatttcaccggctgcgtgatcgcctggaactccaacaatctggattctaaagtgggcggcaactacaattatctgtacaggctgtttcgcaagtccaatctgaagccattcgagcgggacatctccacagagatctaccaggccggctctaccccctgcaatggcgtggagggctttaactgttatttccctctgcagtcttacggcttccagccaacaaacggcgtgggctatcagccctacagagtggtggtgctgtcctttgagctgctgcacgcaccagcaacagtgtgcggcccaaagaagtctaccaatctggtgaagaacaagtgcgtgaacttcaacttcaacggactgaccggcacaggcgtgctgaccgagagcaataagaagttcctgccttttcagcagttcggcagggacatcgcagataccacagacgccgtgcgcgaccctcagaccctggagatcctggacatcacaccatgcagcttcggcggcgtgtccgtgatcacaccaggcaccaatacatccaaccaggtggccgtgctgtatcaggacgtgaattgtaccgaggtgcccgtggcaatccacgcagatcagctgacccctacatggcgggtgtactctaccggcagcaacgtgttccagacaagagccggatgcctgatcggagcagagcacgtgaacaatagctatgagtgcgacatccctatcggcgccggcatctgtgccagctaccagacccagacaaactccccatctggagcaggctccgtggccagccagtccatcatcgcctataccatgagcctgggcgccgagaacagcgtggcctactccaacaattctatcgccatccctaccaacttcacaatcagcgtgaccacagagatcctgccagtgtctatgaccaagacaagcgtggactgcacaatgtatatctgtggcgatagcaccgagtgctccaacctgctgctgcagtacggctccttttgtacccagctgaatagagccctgacaggcatcgcccgagagcaggataagaacttactaaatgtgttcgcccaggtgaagcagatctacaagaccccacccatcaaggactttggcggcttcaacttcagccagatcctgcctgatccaagcaagccctccaagaggtcttttatcgaggacctgctgttcaacaaggtgaccctggccgatgccggcttcatcaagcagtatggagattgcctgggagacatcgcagcccgcgacctgatctgtgcccagaagtttaatggcctgaccgtgctgcctccactgctgacagatgagatgatcgcccagtacacagcgtcactgctggccggcaccatcacagcaggatggaccttcggcgcaggagccgccctgcagatcccttttgccatgcagatggcctataggttcaacggcatcggcgtgacccagaatgtgctgtacgagaaccagaagctgatcgccaatcagtttaacagcgccatcggcaagatccaggactctctgtcctctacagccagcgccctgggcaagctgcaggatgtggtgaatcagaacgcccaggccctgaataccctggtgaagcagctgagctccaacttcggcgccatctctagcgtgctgaatgacatcctgagccggctggacccccctgaggcagaggtgcagatcgacaggctgatcacaggccgcctgcagagcctgcagacctacgtgacacagcagctgatcagggcaactgagatcagagcctccgcccaactggccgccgaaaagatgagcgagtgcgtgaaaggacagtccaagagggtggacttttgtggcaagggctatcacctgatgtctttcccacagagcgcccctcacggcgtggtgtttctgcacgtgacctacgtgccagcccaggagaagaacttcaccacagcaccagccatctgccacgatggaaaggcacactttcctagggagggcgtgttcgtgtctaacggcacccactggtttgtgacacagcgcaatttctacgagccacagatcatcaccacagacaatacattcgtgagcggcaactgtgatgtggtgatcggcatcgtgaacaataccgtgtatgatccactgcagcccgagctggactcctttaaggaggagctggataagtacttcaagaatcacacctctcccgacgtggatctgggcgacatctccggcatcaatgcctctgtggtgaacatccagaaggagatcgaccggctgaacgaggtggccaagaatctgaacgagagcctgatcgatctgcaggagctgggcaagtatgagcagtacatcaagggctctggcagagagaacctgtatttccagggaggaggaggcagcggatacatccctgaggcaccaagggacggacaggcctacgtgcgcaaggatggcgagtgggtgctgctgtccacctttctgggccatcatcaccaccaccaccaccactga

SEQ ID NO: 1743 - DNA, 3846 bp, Artificial Sequence
  Description of Artificial Sequence: Synthetic polynucleotide
atgggcatcctgccaagcccaggaatgcccgccctgctgtctctggtgagcctgctgtccgtgctgctgatgggatgcgtggcagagacaggcacacagtgcgtgaacctgaccacaaggacccagctgccccctgcctataccaattctttcacacggggcgtgtactatcccgacaaggtgtttagaagctccgtgctgcactccacacaggatctgtttctgcctttcttttctaacgtgacctggttccacgccatccacgtgtccggcaccaatggcacaaagcggttcgacaatcccgtgctgccttttaacgatggcgtgtacttcgccagcaccgagaagtccaacatcatcagaggctggatctttggcaccacactggactctaagacacagagcctgctgatcgtgaacaatgccaccaacgtggtgatcaaggtgtgcgagttccagttttgtaatgatccattcctgggcgtgtactatcacaagaacaataagtcctggatggagtctgagtttcgcgtgtattctagcgccaacaattgcacatttgagtacgtgagccagcccttcctgatggacctggagggcaagcagggcaatttcaagaacctgagggagttcgtgtttaagaatatcgatggctacttcaagatctacagcaagcacaccccaatcaacctggtgcgcgacctgccacagggattctccgccctggagccactggtggatctgcccatcggcatcaacatcacccggtttcagacactgctggccctgcacagatcctacctgacaccaggcgactcctctagcggatggaccgcaggagctgccgcctactatgtgggctatctgcagccccggaccttcctgctgaagtacaacgagaatggcaccatcacagacgcagtggattgcgccctggaccccctgtctgagacaaagtgtacactgaagagctttaccgtggagaagggcatctatcagacaagcaatttcagggtgcagcctaccgagtccatcgtgcgctttcccaatatcacaaacctgtgcccttttggcgaggtgttcaacgccaccagattcgccagcgtgtacgcctggaatcggaagagaatctccaactgcgtggccgactattctgtgctgtacaactccgcctctttcagcacctttaagtgctatggcgtgtctcccacaaagctgaatgatctgtgctttaccaacgtgtacgccgatagcttcgtgatcaggggagacgaagtgagacagatcgcaccaggacagacaggaaagatcgcagactacaattataagctgcctgacgatttcaccggctgcgtgatcgcctggaactccaacaatctggattctaaagtgggcggcaactacaattatctgtacaggctgtttcgcaagtccaatctgaagccattcgagcgggacatctccacagagatctaccaggccggctctaccccctgcaatggcgtggagggctttaactgttatttccctctgcagtcttacggcttccagccaacaaacggcgtgggctatcagccctacagagtggtggtgctgtcctttgagctgctgcacgcaccagcaacagtgtgcggcccaaagaagtctaccaatctggtgaagaacaagtgcgtgaacttcaacttcaacggactgaccggcacaggcgtgctgaccgagagcaataagaagttcctgccttttcagcagttcggcagggacatcgcagataccacagacgccgtgcgcgaccctcagaccctggagatcctggacatcacaccatgcagcttcggcggcgtgtccgtgatcacaccaggcaccaatacatccaaccaggtggccgtgctgtatcaggacgtgaattgtaccgaggtgcccgtggcaatccacgcagatcagctgacccctacatggcgggtgtactctaccggcagcaacgtgttccagacaagagccggatgcctgatcggagcagagcacgtgaacaatagctatgagtgcgacatccctatcggcgccggcatctgtgccagctaccagacccagacaaactccccatctggagcaggctccgtggccagccagtccatcatcgcctataccatgagcctgggcgccgagaacagcgtggcctactccaacaattctatcgccatccctaccaacttcacaatcagcgtgaccacagagatcctgccagtgtctatgaccaagacaagcgtggactgcacaatgtatatctgtggcgatagcaccgagtgctccaacctgctgctgcagtacggctccttttgtacccagctgaatagagccctggaaggcatcgccgtggagcaggataagaacacacaggaggtgttcgcccaggtgaagcagatctacaagaccccacccatcaaggactttggcggcttcaacttcagccagatcctgcctgatccaagcaagccctccaagaggtcttttatcgaggacctgctgttcaacaaggtgaccctggccgatgccggcttcatcaagcagtatggagattgcctgggagacatcgcagcccgcgacctgatctgtgcccagaagtttaatggcctgaccgtgctgcctccactgctgacagatgagatgatcgcccagtacacatctgccctgctggccggcaccatcacaagcggatggaccttcggcgcaggagccgccctgcagatcccttttgccatgcagatggcctataggttcaacggcatcggcgtgacccagaatgtgctgtacgagaaccagaagctgatcgccaatcagtttaacagcgccatcggcaagatccaggactctctgtcctctacagccagcgccctgggcaagctgcaggatgtggtgaatcagaacgcccaggccctgaataccctggtgaagcagctgagctccaacttcggcgccatctctagcgtgctgaatgacatcctgagccggctggacccccctgaggcagaggtgcagatcgacaggctgatcacaggccgcctgcagagcctgcagacctacgtgacacagcagctgatcagggcagcagagatcagagcctccgccaatctggccgccaccaagatgagcgagtgcgtgctgggacagtccaagagggtggacttttgtggcaagggctatcacctgatgtctttcccacagagcgcccctcacggcgtggtgtttctgcacgtgacctacgtgccagcccaggagaagaacttcaccacagcaccagccatctgccacgatggaaaggcacactttcctagggagggcgtgttcgtgtctaacggcacccactggtttgtgacacagcgcaatttctacgagccacagatcatcaccacagacaatacattcgtgagcggcaactgtgatgtggtgatcggcatcgtgaacaataccgtgtatgatccactgcagcccgagctggactcctttaaggaggagctggataagtacttcaagaatcacacctctcccgacgtggatctgggcgacatctccggcatcaatgcctctgtggtgaacatccagaaggagatcgaccggctgaacgaggtggccaagaatctgaacgagagcctgatcgatctgcaggagctgggcaagtatgagcagtacatcaagggctctggcagagagaacctgtatttccagggaggaggaggcagcggatacatccctgaggcaccaagggacggacaggcctacgtgcgcaaggatggcgagtgggtgctgctgtccacctttctgggccatcatcaccaccaccaccaccactga

SEQ ID NO: 1744 - DNA, 3846 bp, Artificial Sequence
  Description of Artificial Sequence: Synthetic polynucleotide
atgggcatcctgccaagcccaggaatgcccgccctgctgtctctggtgagcctgctgtccgtgctgctgatgggatgcgtggcagagacaggcacacagtgcgtgaacctgaccacaaggacccagctgccccctgcctataccaattctttcacacggggcgtgtactatcccgacaaggtgtttagaagctccgtgctgcactccacacaggatctgtttctgcctttcttttctaacgtgacctggttccacgccatccacgtgtccggcaccaatggcacaaagcggttcgacaatcccgtgctgccttttaacgatggcgtgtacttcgccagcaccgagaagtccaacatcatcagaggctggatctttggcaccacactggactctaagacacagagcctgctgatcgtgaacaatgccaccaacgtggtgatcaaggtgtgcgagttccagttttgtaatgatccattcctgggcgtgtactatcacaagaacaataagtcctggatggagtctgagtttcgcgtgtattctagcgccaacaattgcacatttgagtacgtgagccagcccttcctgatggacctggagggcaagcagggcaatttcaagaacctgagggagttcgtgtttaagaatatcgatggctacttcaagatctacagcaagcacaccccaatcaacctggtgcgcgacctgccacagggattctccgccctggagccactggtggatctgcccatcggcatcaacatcacccggtttcagacactgctggccctgcacagatcctacctgacaccaggcgactcctctagcggatggaccgcatttgctgccgcctactatgtgggctatctgcagccccggaccttcctgctgaagtacaacgagaatggcaccatcacagacgcagtggattgcgccctggaccccctgtctgagacaaagtgtacactgaagagctttaccgtggagaagggcatctatcagacaagcaatttcagggtgcagcctaccgagtccatcgtgcgctttcccaatatcacaaacctgtgcccttttggcgaggtgttcaacgccaccagattcgccagcgtgtacgcctggaatcggaagagaatctccaactgcgtggccgactattctgtgctgtacaactccgcctctttcagcacctttaagtgctatggcgtgtctcccacaaagctgaatgatctgtgctttaccaacgtgtacgccgatagcttcgtgatcaggggagacgaagtgagacagatcgcaccaggacagacaggaaagatcgcagactacaattataagctgcctgacgatttcaccggctgcgtgatcgcctggaactccaacaatctggattctaaagtgggcggcaactacaattatctgtacaggctgtttcgcaagtccaatctgaagccattcgagcgggacatctccacagagatctaccaggccggctctaccccctgcaatggcgtggagggctttaactgttatttccctctgcagtcttacggcttccagccaacaaacggcgtgggctatcagccctacagagtggtggtgctgtcctttgagctgctgcacgcaccagcaacagtgtgcggcccaaagaagtctaccaatctggtgaagaacaagtgcgtgaacttcaacttcaacggactgaccggcacaggcgtgctgaccgagagcaataagaagttcctgccttttcagcagttcggcagggacatcgcagataccacagacgccgtgcgcgaccctcagaccctggagatcctggacatcacaccatgcagcttcggcggcgtgtccgtgatcacaccaggcaccaatacatccaaccaggtggccgtgctgtatcaggacgtgaattgtaccgaggtgcccgtggcaatccacgcagatcagctgacccctacatggcgggtgtactctaccggcagcaacgtgttccagacaagagccggatgcctgatcggagcagagcacgtgaacaatagctatgagtgcgacatccctatcggcgccggcatctgtgccagctaccagacccagacaaactccccatctggagcaggctccgtggccagccagtccatcatcgcctataccatgagcctgggcgccgagaacagcgtggcctactccaacaattctatcgccatccctaccaacttcacaatcagcgtgaccacagagatcctgccagtgtctatgaccaagacaagcgtggactgcacaatgtatatctgtggcgatagcaccgagtgctccaacctgctgctgcagtacggctccttttgtacccagctgaatagagccctgacaggcatcgccgtggagcaggataagaacacacaggaggtgttcgcccaggtgaagcagatctacaagaccccacccatcaaggactttggcggcttcaacttcagccagatcctgcctgatccaagcaagccctccaagaggtcttttatcgaggacctgctgttcaacaaggtgaccctggccgatgccggcttcatcaagcagtatggagattgcctgggagacatcgcagcccgcgacctgatctgtgcccagaagtttaatggcctgaccgtgctgcctccactgctgacagatgagatgatcgcccagtacacatctgccctgctggccggcaccatcacaagcggatggaccttcggcgcaggagccgccctgcagatcccttttgccatgcagatggcctataggttcaacggcatcggcgtgacccagaatgtgctgtacgagaaccagaagctgatcgccaatcagtttaacagcgccatcggcaagatccaggactctctgtcctctacagccagcgccctgggcaagctgcaggatgtggtgaatcagaacgcccaggccctgaataccctggtgaagcagctgagctccaacttcggcgccatctctagcgtgctgaatgacatcctgagccggctggacccccctgaggcagaggtgcagatcgacaggctgatcacaggccgcctgcagagcctgcagacctacgtgacacagcagctgatcagggcagcagagatcagagcctccgccaatctggccgccaccaagatgagcgagtgcgtgctgggacagtccaagagggtggacttttgtggcaagggctatcacctgatgtctttcccacagagcgcccctcacggcgtggtgtttctgcacgtgacctacgtgccagcccaggagaagaacttcaccacagcaccagccatctgccacgatggaaaggcacactttcctagggagggcgtgttcgtgtctaacggcacccactggtttgtgacacagcgcaatttctacgagccacagatcatcaccacagacaatacattcgtgagcggcaactgtgatgtggtgatcggcatcgtgaacaataccgtgtatgatccactgcagcccgagctggactcctttaaggaggagctggataagtacttcaagaatcacacctctcccgacgtggatctgggcgacatctccggcatcaatgcctctgtggtgaacatccagaaggagatcgaccggctgaacgaggtggccaagaatctgaacgagagcctgatcgatctgcaggagctgggcaagtatgagcagtacatcaagggctctggcagagagaacctgtatttccagggaggaggaggcagcggatacatccctgaggcaccaagggacggacaggcctacgtgcgcaaggatggcgagtgggtgctgctgtccacctttctgggccatcatcaccaccaccaccaccactga

SEQ ID NO: 1745 - DNA, 3846 bp, Artificial Sequence
  Description of Artificial Sequence: Synthetic polynucleotide
atgggcatcctgccaagcccaggaatgcccgccctgctgtctctggtgagcctgctgtccgtgctgctgatgggatgcgtggcagagacaggcacacagtgcgtgaacctgaccacaaggacccagctgccccctgcctataccaattctttcacacggggcgtgtactatcccgacaaggtgtttagaagctccgtgctgcactccacacaggatctgtttctgcctttcttttctaacgtgacctggttccacgccatccacgtgtccggcaccaatggcacaaagcggttcgacaatcccgtgctgccttttaacgatggcgtgtacttcgccagcaccgagaagtccaacatcatcagaggctggatctttggcaccacactggactctaagacacagagcctgctgatcgtgaacaatgccaccaacgtggtgatcaaggtgtgcgagttccagttttgtaatgatccattcctgggcgtgtactatcacaagaacaataagtcctggatggagtctgagtttcgcgtgtattctagcgccaacaattgcacatttgagtacgtgagccagcccttcctgatggacctggagggcaagcagggcaatttcaagaacctgagggagttcgtgtttaagaatatcgatggctacttcaagatctacagcaagcacaccccaatcaacctggtgcgcgacctgccacagggattctccgccctggagccactggctgatctgcccatcggcatcaacatcacccggtttcagacactgctggccctgcacagatcctacctgacaccaggcgactcctctagcggatggaccgcaggagctgccgcctactatgtgggctatctgcagccccggaccttcctgctgaagtacaacgagaatggcaccatcacagacgcagtggattgcgccctggaccccctgtctgagacaaagtgtacactgaagagctttaccgtggagaagggcatctatcagacaagcaatttcagggtgcagcctaccgagtccatcgtgcgctttcccaatatcacaaacctgtgcccttttggcgaggtgttcaacgccaccagattcgccagcgtgtacgcctggaatcggaagagaatctccaactgcgtggccgactattctgtgctgtacaactccgcctctttcagcacctttaagtgctatggcgtgtctcccacaaagctgaatgatctgtgctttaccaacgtgtacgccgatagcttcgtgatcaggggagacgaagtgagacagatcgcaccaggacagacaggaaagatcgcagactacaattataagctgcctgacgatttcaccggctgcgtgatcgcctggaactccaacaatctggattctaaagtgggcggcaactacaattatctgtacaggctgtttcgcaagtccaatctgaagccattcgagcgggacatctccacagagatctaccaggccggctctaccccctgcaatggcgtggagggctttaactgttatttccctctgcagtcttacggcttccagccaacaaacggcgtgggctatcagccctacagagtggtggtgctgtcctttgagctgctgcacgcaccagcaacagtgtgcggcccaaagaagtctaccaatctggtgaagaacaagtgcgtgaacttcaacttcaacggactgaccggcacaggcgtgctgaccgagagcaataagaagttcctgccttttcagcagttcggcagggacatcgcagataccacagacgccgtgcgcgaccctcagaccctggagatcctggacatcacaccatgcagcttcggcggcgtgtccgtgatcacaccaggcaccaatacatccaaccaggtggccgtgctgtatcaggacgtgaattgtaccgaggtgcccgtggcaatccacgcagatcagctgacccctacatggcgggtgtactctaccggcagcaacgtgttccagacaagagccggatgcctgatcggagcagagcacgtgaacaatagctatgagtgcgacatccctatcggcgccggcatctgtgccagctaccagacccagacaaactccccatctggagcaggctccgtggccagccagtccatcatcgcctataccatgagcctgggcgccgagaacagcgtggcctactccaacaattctatcgccatccctaccaacttcacaatcagcgtgaccacagagatcctgccagtgtctatgaccaagacaagcgtggactgcacaatgtatatctgtggcgatagcaccgagtgctccaacctgctgctgcagtacggctccttttgtacccagctgaatagagccctgacaggcatcgccgtggagcaggataagaacacacaggaggtgttcgcccaggtgaagcagatctacaagaccccacccatcaaggactttggcggcttcaacttcagccagatcctgcctgatccaagcaagccctccaagaggtcttttatcgaggacctgctgttcaacaaggtgaccctggccgatgccggcttcatcaagcagtatggagattgcctgggagacatcgcagcccgcgacctgatctgtgcccagaagtttaatggcctgaccgtgctgcctccactgctgacagatgagatgatcgcccagtacacatctgccctgctggccggcaccatcacaagcggatggaccttcggcgcaggagccgccctgcagatcccttttgccatgcagatggcctataggttcaacggcatcggcgtgacccagaatgtgctgtacgagaaccagaagctgatcgccaatcagtttaacagcgccatcggcaagatccaggactctctgtcctctacagccagcgccctgggcaagctgcaggatgtggtgaatcagaacgcccaggccctgaataccctggtgaagcagctgagctccaacttcggcgccatctctagcgtgctgaatgacatcctgagccggctggacccccctgaggcagaggtgcagatcgacaggctgatcacaggccgcctgcagagcctgcagacctacgtgacacagcagctgatcagggcagcagagatcagagcctccgccaatctggccgccaccaagatgagcgagtgcgtgctgggacagtccaagagggtggacttttgtggcaagggctatcacctgatgtctttcccacagagcgcccctcacggcgtggtgtttctgcacgtgacctacgtgccagcccaggagaagaacttcaccacagcaccagccatctgccacgatggaaaggcacactttcctagggagggcgtgttcgtgtctaacggcacccactggtttgtgacacagcgcaatttctacgagccacagatcatcaccacagacaatacattcgtgagcggcaactgtgatgtggtgatcggcatcgtgaacaataccgtgtatgatccactgcagcccgagctggactcctttaaggaggagctggataagtacttcaagaatcacacctctcccgacgtggatctgggcgacatctccggcatcaatgcctctgtggtgaacatccagaaggagatcgaccggctgaacgaggtggccaagaatctgaacgagagcctgatcgatctgcaggagctgggcaagtatgagcagtacatcaagggctctggcagagagaacctgtatttccagggaggaggaggcagcggatacatccctgaggcaccaagggacggacaggcctacgtgcgcaaggatggcgagtgggtgctgctgtccacctttctgggccatcatcaccaccaccaccaccactga

SEQ ID NO: 1746 - DNA, 3846 bp, Artificial Sequence
  Description of Artificial Sequence: Synthetic polynucleotide
atgggcatcctgccaagcccaggaatgcccgccctgctgtctctggtgagcctgctgtccgtgctgctgatgggatgcgtggcagagacaggcacacagtgcgtgaacctgaccacaaggacccagctgccccctgcctataccaattctttcacacggggcgtgtactatcccgacaaggtgtttagaagctccgtgctgcactccacacaggatctgtttctgcctttcttttctaacgtgacctggttccacgccatccacgtgtccggcaccaatggcacaaagcggttcgacaatcccgtgctgccttttaacgatggcgtgtacttcgccagcaccgagaagtccaacatcatcagaggctggatctttggcaccacactggactctaagacacagagcctgctgatcgtgaacaatgccaccaacgtggtgatcaaggtgtgcgagttccagttttgtaatgatccattcctgggcgtgtactatcacaagaacaataagtcctggatggagtctgagtttcgcgtgtattctagcgccaacaattgcacatttgagtacgtgagccagcccttcctgatggacctggagggcaagcagggcaatttcaagaacctgagggagttcgtgtttaagaatatcgatggctacttcaagatctacagcaagcacaccccaatcaacctggtgcgcgacctgccacagggattctccgccctggagccactggtgacgctgcccatcggcatcaacatcacccggtttcagacactgctggccctgcacagatcctacctgacaccaggcgactcctctagcggatggaccgcaggagctgccgcctactatgtgggctatctgcagccccggaccttcctgctgaagtacaacgagaatggcaccatcacagacgcagtggattgcgccctggaccccctgtctgagacaaagtgtacactgaagagctttaccgtggagaagggcatctatcagacaagcaatttcagggtgcagcctaccgagtccatcgtgcgctttcccaatatcacaaacctgtgcccttttggcgaggtgttcaacgccaccagattcgccagcgtgtacgcctggaatcggaagagaatctccaactgcgtggccgactattctgtgctgtacaactccgcctctttcagcacctttaagtgctatggcgtgtctcccacaaagctgaatgatctgtgctttaccaacgtgtacgccgatagcttcgtgatcaggggagacgaagtgagacagatcgcaccaggacagacaggaaagatcgcagactacaattataagctgcctgacgatttcaccggctgcgtgatcgcctggaactccaacaatctggattctaaagtgggcggcaactacaattatctgtacaggctgtttcgcaagtccaatctgaagccattcgagcgggacatctccacagagatctaccaggccggctctaccccctgcaatggcgtggagggctttaactgttatttccctctgcagtcttacggcttccagccaacaaacggcgtgggctatcagccctacagagtggtggtgctgtcctttgagctgctgcacgcaccagcaacagtgtgcggcccaaagaagtctaccaatctggtgaagaacaagtgcgtgaacttcaacttcaacggactgaccggcacaggcgtgctgaccgagagcaataagaagttcctgccttttcagcagttcggcagggacatcgcagataccacagacgccgtgcgcgaccctcagaccctggagatcctggacatcacaccatgcagcttcggcggcgtgtccgtgatcacaccaggcaccaatacatccaaccaggtggccgtgctgtatcaggacgtgaattgtaccgaggtgcccgtggcaatccacgcagatcagctgacccctacatggcgggtgtactctaccggcagcaacgtgttccagacaagagccggatgcctgatcggagcagagcacgtgaacaatagctatgagtgcgacatccctatcggcgccggcatctgtgccagctaccagacccagacaaactccccatctggagcaggctccgtggccagccagtccatcatcgcctataccatgagcctgggcgccgagaacagcgtggcctactccaacaattctatcgccatccctaccaacttcacaatcagcgtgaccacagagatcctgccagtgtctatgaccaagacaagcgtggactgcacaatgtatatctgtggcgatagcaccgagtgctccaacctgctgctgcagtacggctccttttgtacccagctgaatagagccctgacaggcatcgccgtggagcaggataagaacacacaggaggtgttcgcccaggtgaagcagatctacaagaccccacccatcaaggactttggcggcttcaacttcagccagatcctgcctgatccaagcaagccctccaagaggtcttttatcgaggacctgctgttcaacaaggtgaccctggccgatgccggcttcatcaagcagtatggagattgcctgggagacatcgcagcccgcgacctgatctgtgcccagaagtttaatggcctgaccgtgctgcctccactgctgacagatgagatgatcgcccagtacacatctgccctgctggccggcaccatcacaagcggatggaccttcggcgcaggagccgccctgcagatcccttttgccatgcagatggcctataggttcaacggcatcggcgtgacccagaatgtgctgtacgagaaccagaagctgatcgccaatcagtttaacagcgccatcggcaagatccaggactctctgtcctctacagccagcgccctgggcaagctgcaggatgtggtgaatcagaacgcccaggccctgaataccctggtgaagcagctgagctccaacttcggcgccatctctagcgtgctgaatgacatcctgagccggctggacccccctgaggcagaggtgcagatcgacaggctgatcacaggccgcctgcagagcctgcagacctacgtgacacagcagctgatcagggcagcagagatcagagcctccgccaatctggccgccaccaagatgagcgagtgcgtgctgggacagtccaagagggtggacttttgtggcaagggctatcacctgatgtctttcccacagagcgcccctcacggcgtggtgtttctgcacgtgacctacgtgccagcccaggagaagaacttcaccacagcaccagccatctgccacgatggaaaggcacactttcctagggagggcgtgttcgtgtctaacggcacccactggtttgtgacacagcgcaatttctacgagccacagatcatcaccacagacaatacattcgtgagcggcaactgtgatgtggtgatcggcatcgtgaacaataccgtgtatgatccactgcagcccgagctggactcctttaaggaggagctggataagtacttcaagaatcacacctctcccgacgtggatctgggcgacatctccggcatcaatgcctctgtggtgaacatccagaaggagatcgaccggctgaacgaggtggccaagaatctgaacgagagcctgatcgatctgcaggagctgggcaagtatgagcagtacatcaagggctctggcagagagaacctgtatttccagggaggaggaggcagcggatacatccctgaggcaccaagggacggacaggcctacgtgcgcaaggatggcgagtgggtgctgctgtccacctttctgggccatcatcaccaccaccaccaccactga

SEQ ID NO: 1747 - DNA, 3846 bp, Artificial Sequence
  Description of Artificial Sequence: Synthetic polynucleotide
atgggcatcctgccaagcccaggaatgcccgccctgctgtctctggtgagcctgctgtccgtgctgctgatgggatgcgtggcagagacaggcacacagtgcgtgaacctgaccacaaggacccagctgccccctgcctataccaattctttcacacggggcgtgtactatcccgacaaggtgtttagaagctccgtgctgcactccacacaggatctgtttctgcctttcttttctaacgtgacctggttccacgccatccacgtgtccggcaccaatggcacaaagcggttcgacaatcccgtgctgccttttaacgatggcgtgtacttcgccagcaccgagaagtccaacatcatcagaggctggatctttggcaccacactggactctaagacacagagcctgctgatcgtgaacaatgccaccaacgtggtgatcaaggtgtgcgagttccagttttgtaatgatccattcctgggcgtgtactatcacaagaacaataagtcctggatggagtctgagtttcgcgtgtattctagcgccaacaattgcacatttgagtacgtgagccagcccttcctgatggacctggagggcaagcagggcaatttcaagaacctgagggagttcgtgtttaagaatatcgatggctacttcaagatctacagcaagcacaccccaatcaacctggtgcgcgacctgccacagggattctccgccctggagccactggtggatctgcccatcggcatcaacatcacccggtttcagacactgctggccctgcacagatcctacctgacaccaggcgactcctctagcggatggaccgcaggagctgccgcctactatgtgggctatctgcagccccggaccttcctgctgaagtacaacgagaatggcaccatcacagacgcagtggattgcgccctggaccccctgtctgagacaaagtgtacactgaagagctttaccgtggagaagggcatctatcagacaagcaatttcagggtgcagcctaccgagtccatcgtgcgctttcccaatatcacaaacctgtgcccttttggcgaggtgttcaacgccaccagattcgccagcgtgtacgcctggaatcggaagagaatctccaactgcgtggccgactattctgtgctgtacaactccgcctctttcagcacctttaagtgctatggcgtgtctcccacaaagctgaatgatctgtgctttaccaacgtgtacgccgatagcttcgtgatcaggggagacgaagtgagacagatcgcaccaggacagacaggaaagatcgcagactacaattataagctgcctgacgatttcaccggctgcgtgatcgcctggaactccaacaatctggattctaaagtgggcggcaactacaattatctgtacaggctgtttcgcaagtccaatctgaagccattcgagcgggacatctccacagagatctaccaggccggctctaccccctgcaatggcgtggagggctttaactgttatttccctctgcagtcttacggcttccagccaacaaacggcgtgggctatcagccctacagagtggtggtgctgtcctttgagctgctgcacgcaccagcaacagtgtgcggcccaaagaagtctaccaatctggtgaagaacaagtgcgtgaacttcaacttcaacggactgaccggcacaggcgtgctgaccgagagcaataagaagttcctgccttttcagcagttcggcagggacatcgcagataccacagacgccgtgcgcgaccctcagaccctggagatcctggacatcacaccatgcagcttcggcggcgtgtccgtgatcacaccaggcaccaatacatccaaccaggtggccgtgctgtatcaggacgtgaattgtaccgaggtgcccgtggcaatccacgcagatcagctgacccctacatggcgggtgtactctaccggcagcaacgtgttccagacacaagccggatgcctgatcggagcagagcacgtgaacaatagctatgagtgcgacatccctatcggcgccggcatctgtgccagctaccagacccagacaaactccccatctggagcaggctccgtggccagccagtccatcatcgcctataccatgagcctgggcgccgagaacagcgtggcctactccaacaattctatcgccatccctaccaacttcacaatcagcgtgaccacagagatcctgccagtgtctatgaccaagacaagcgtggactgcacaatgtatatctgtggcgatagcaccgagtgctccaacctgctgctgcagtacggctccttttgtacccagctgaatagagccctgacaggcatcgccgtggagcaggataagaacacacaggaggtgttcgcccaggtgaagcagatctacaagaccccacccatcaaggactttggcggcttcaacttcagccagatcctgcctgatccaagcaagccctccaagaggtcttttatcgaggacctgctgttcaacaaggtgaccctggccgatgccggcttcatcaagcagtatggagattgcctgggagacatcgcagcccgcgacctgatctgtgcccagaagtttaatggcctgaccgtgctgcctccactgctgacagatgagatgatcgcccagtacacatctgccctgctggccggcaccatcacaagcggatggaccttcggcgcaggagccgccctgcagatcccttttgccatgcagatggcctataggttcaacggcatcggcgtgacccagaatgtgctgtacgagaaccagaagctgatcgccaatcagtttaacagcgccatcggcaagatccaggactctctgtcctctacagccagcgccctgggcaagctgcaggatgtggtgaatcagaacgcccaggccctgaataccctggtgaagcagctgagctccaacttcggcgccatctctagcgtgctgaatgacatcctgagccggctggacccccctgaggcagaggtgcagatcgacaggctgatcacaggccgcctgcagagcctgcagacctacgtgacacagcagctgatcagggcagcagagatcagagcctccgccaatctggccgccaccaagatgagcgagtgcgtgctgggacagtccaagagggtggacttttgtggcaagggctatcacctgatgtctttcccacagagcgcccctcacggcgtggtgtttctgcacgtgacctacgtgccagcccaggagaagaacttcaccacagcaccagccatctgccacgatggaaaggcacactttcctagggagggcgtgttcgtgtctaacggcacccactggtttgtgacacagcgcaatttctacgagccacagatcatcaccacagacaatacattcgtgagcggcaactgtgatgtggtgatcggcatcgtgaacaataccgtgtatgatccactgcagcccgagctggactcctttaaggaggagctggataagtacttcaagaatcacacctctcccgacgtggatctgggcgacatctccggcatcaatgcctctgtggtgaacatccagaaggagatcgaccggctgaacgaggtggccaagaatctgaacgagagcctgatcgatctgcaggagctgggcaagtatgagcagtacatcaagggctctggcagagagaacctgtatttccagggaggaggaggcagcggatacatccctgaggcaccaagggacggacaggcctacgtgcgcaaggatggcgagtgggtgctgctgtccacctttctgggccatcatcaccaccaccaccaccactga

SEQ ID NO: 1748 - DNA, 3846 bp, Artificial Sequence
  Description of Artificial Sequence: Synthetic polynucleotide
atgggcatcctgccaagcccaggaatgcccgccctgctgtctctggtgagcctgctgtccgtgctgctgatgggatgcgtggcagagacaggcacacagtgcgtgaacctgaccacaaggacccagctgccccctgcctataccaattctttcacacggggcgtgtactatcccgacaaggtgtttagaagctccgtgctgcactccacacaggatctgtttctgcctttcttttctaacgtgacctggttccacgccatccacgtgtccggcaccaatggcacaaagcggttcgacaatcccgtgctgccttttaacgatggcgtgtacttcgccagcaccgagaagtccaacatcatcagaggctggatctttggcaccacactggactctaagacacagagcctgctgatcgtgaacaatgccaccaacgtggtgatcaaggtgtgcgagttccagttttgtaatgatccattcctgggcgtgtactatcacaagaacaataagtcctggatggagtctgagtttcgcgtgtattctagcgccaacaattgcacatttgagtacgtgagccagcccttcctgatggacctggagggcaagcagggcaatttcaagaacctgagggagttcgtgtttaagaatatcgatggctacttcaagatctacagcaagcacaccccaatcaacctggtgcgcgacctgccacagggattctccgccctggagccactggtggatctgcccatcggcatcaacatcacccggtttcagacactgctggccctgcacagatcctacctgacaccaggcgactcctctagcggatggaccgcaggagctgccgcctactatgtgggctatctgcagccccggaccttcctgctgaagtacaacgagaatggcaccatcacagacgcagtggattgcgccctggaccccctgtctgagacaaagtgtacactgaagagctttaccgtggagaagggcatctatcagacaagcaatttcagggtgcagcctaccgagtccatcgtgcgctttcccaatatcacaaacctgtgcccttttggcgaggtgttcaacgccaccagattcgccagcgtgtacgcctggaatcggaagagaatctccaactgcgtggccgactattctgtgctgtacaactccgcctctttcagcacctttaagtgctatggcgtgtctcccacaaagctgaatgatctgtgctttaccaacgtgtacgccgatagcttcgtgatcaggggagacgaagtgagacagatcgcaccaggacagacaggaaagatcgcagactacaattataagctgcctgacgatttcaccggctgcgtgatcgcctggaactccaacaatctggattctaaagtgggcggcaactacaattatctgtacaggctgtttcgcaagtccaatctgaagccattcgagcgggacatctccacagagatctaccaggccggctctaccccctgcaatggcgtggagggctttaactgttatttccctctgcagtcttacggcttccagccaacaaacggcgtgggctatcagccctacagagtggtggtgctgtcctttgagctgctgcacgcaccagcaacagtgtgcggcccaaagaagtctaccaatctggtgaagaacaagtgcgtgaacttcaacttcaacggactgaccggcacaggcgtgctgaccgagagcaataagaagttcctgccttttcagcagttcggcagggacatcgcagataccacagacgccgtgcgcgaccctcagaccctggagatcctggacatcacaccatgcagcttcggcggcgtgtccgtgatcacaccaggcaccaatacatccaaccaggtggccgtgctgtatcaggacgtgaattgtaccgaggtgcccgtggcaatccacgcagatcagctgacccctacatggcgggtgtactctaccggcagcaacgtgttccagacaagagccggatgcctgatcggagcagagcacgtgaacaatagctatgagtgcgacatccctatcggcgccggcatctgtgccagctaccagacccagacaaactccccatctggagcaggctccgtggccagccagtccatcatcgcctataccatgagcctgggcgccgagaacagcgtggcctactccaacaattctatcgccatccctaccaacttcacaatcagcgtgaccacagagatcctgccagtgtctatgaccaagacaagcgtggactgcacaatgtatatctgtggcgatagcaccgagtgctccaacctgctgctgcagtacggctccttttgtacccagctgaatagagccctgacaggcatcgccgtggagcaggataagaacacacaggaggtgttcgcccaggtgaagcagatctacaagaccccacccatcaaggactttggcggcttcaacttcagccagatcctgcctgatccaagcaagccctccaagaggtcttttatcgaggacctgctgttcaacaaggtgaccctggccgatgccggcttcatcaagcagtatggagattgcctgggagacatcgcagcccgcgacctgatctgtgcccagaagtttaatggcctgaccgtgctgcctccactgctgacagatgagatgatcgcccagtacacatctgccctgctggccggcaccatcacaagcggatggaccttcggcgcaggagccgccctgcagatcccttttgccatgcagatggcctataggttcaacggcatcggcgtgacccagaatgtgctgtacgagaaccagaagctgatcgccaatcagtttaacagcgccatcggcgctatccaggactctctgtcctctacagccagcgccctgggcaagctgcaggatgtggtgaatcagaacgcccaggccctgaataccctggtgaagcagctgagctccaacttcggcgccatctctagcgtgctgaatgacatcctgagccggctggacccccctgaggcagaggtgcagatcgacaggctgatcacaggccgcctgcagagcctgcagacctacgtgacacagcagctgatcagggcagcagagatcagagcctccgccaatctggccgccaccaagatgagcgagtgcgtgctgggacagtccaagagggtggacttttgtggcaagggctatcacctgatgtctttcccacagagcgcccctcacggcgtggtgtttctgcacgtgacctacgtgccagcccaggagaagaacttcaccacagcaccagccatctgccacgatggaaaggcacactttcctagggagggcgtgttcgtgtctaacggcacccactggtttgtgacacagcgcaatttctacgagccacagatcatcaccacagacaatacattcgtgagcggcaactgtgatgtggtgatcggcatcgtgaacaataccgtgtatgatccactgcagcccgagctggactcctttaaggaggagctggataagtacttcaagaatcacacctctcccgacgtggatctgggcgacatctccggcatcaatgcctctgtggtgaacatccagaaggagatcgaccggctgaacgaggtggccaagaatctgaacgagagcctgatcgatctgcaggagctgggcaagtatgagcagtacatcaagggctctggcagagagaacctgtatttccagggaggaggaggcagcggatacatccctgaggcaccaagggacggacaggcctacgtgcgcaaggatggcgagtgggtgctgctgtccacctttctgggccatcatcaccaccaccaccaccactga

SEQ ID NO: 1749 - DNA, 3846 bp, Artificial Sequence
  Description of Artificial Sequence: Synthetic polynucleotide
atgggcatcctgccaagcccaggaatgcccgccctgctgtctctggtgagcctgctgtccgtgctgctgatgggatgcgtggcagagacaggcacacagtgcgtgaacctgaccacaaggacccagctgccccctgcctataccaattctttcacacggggcgtgtactatcccgacaaggtgtttagaagctccgtgctgcactccacacaggatctgtttctgcctttcttttctaacgtgacctggttccacgccatccacgtgtccggcaccaatggcacaaagcggttcgacaatcccgtgctgccttttaacgatggcgtgtacttcgccagcaccgagaagtccaacatcatcagaggctggatctttggcaccacactggactctaagacacagagcctgctgatcgtgaacaatgccaccaacgtggtgatcaaggtgtgcgagttccagttttgtaatgatccattcctgggcgtgtactatcacaagaacaataagtcctggatggagtctgagtttcgcgtgtattctagcgccaacaattgcacatttgagtacgtgagccagcccttcctgatggacctggagggcaagcagggcaatttcaagaacctgagggagttcgtgtttaagaatatcgatggctacttcaagatctacagcaagcacaccccaatcaacctggtgcgcgacctgccacagggattctccgccctggagccactggtggatctgcccatcggcatcaacatcacccggtttcagacactgctggccctgcacagatcctacctgacaccaggcgactcctctagcggatggaccgcaggagctgccgcctactatgtgggctatctgcagccccggaccttcctgctgaagtacaacgagaatggcaccatcacagacgcagtggattgcgccctggaccccctgtctgagacaaagtgtacactgaagagctttaccgtggagaagggcatctatcagacaagcaatttcagggtgcagcctaccgagtccatcgtgcgctttcccaatatcacaaacctgtgcccttttggcgaggtgttcaacgccaccagattcgccagcgtgtacgcctggaatcggaagagaatctccaactgcgtggccgactattctgtgctgtacaactccgcctctttcagcacctttaagtgctatggcgtgtctcccacaaagctgaatgatctgtgctttaccaacgtgtacgccgatagcttcgtgatcaggggagacgaagtgagacagatcgcaccaggacagacaggaaagatcgcagactacaattataagctgcctgacgatttcaccggctgcgtgatcgcctggaactccaacaatctggattctaaagtgggcggcaactacaattatctgtacaggctgtttcgcaagtccaatctgaagccattcgagcgggacatctccacagagatctaccaggccggctctaccccctgcaatggcgtggagggctttaactgttatttccctctgcagtcttacggcttccagccaacaaacggcgtgggctatcagccctacagagtggtggtgctgtcctttgagctgctgcacgcaccagcaacagtgtgcggcccaaagaagtctaccaatctggtgaagaacaagtgcgtgaacttcaacttcaacggactgaccggcacaggcgtgctgaccgagagcaataagaagttcctgccttttcagcagttcggcagggacatcgcagataccacagacgccgtgcgcgaccctcagaccctggagatcctggacatcacaccatgcagcttcggcggcgtgtccgtgatcacaccaggcaccaatacatccaaccaggtggccgtgctgtatcaggacgtgaattgtaccgaggtgcccgtggcaatccacgcagatcagctgacccctacatggcgggtgtactctaccggcagcaacgtgttccagacaagagccggatgcctgatcggagcagagcacgtgaacaatagctatgagtgcgacatccctatcggcgccggcatctgtgccagctaccagacccagacaaactccccatctggagcaggctccgtggccagccagtccatcatcgcctataccatgagcctgggcgccgagaacagcgtggcctactccaacaattctatcgccatccctaccaacttcacaatcagcgtgaccacagagatcctgccagtgtctatgaccaagacaagcgtggactgcacaatgtatatctgtggcgatagcaccgagtgctccaacctgctgctgcagtacggctccttttgtacccagctgaatagagccctgacaggcatcgccgtggagcaggataagaacacacaggaggtgttcgcccaggtgaagcagatctacaagaccccacccatcaaggactttggcggcttcaacttcagccagatcctgcctgatccaagcaagccctccaagaggtcttttatcgaggacctgctgttcaacaagtggaccctggccgatgccggcttcatcaagcagtatggagattgcctgggagacatcgcagcccgcgacctgatctgtgcccagaagtttaatggcctgaccgtgctgcctccactgctgacagatgagatgatcgcccagtacacatctgccctgctggccggcaccatcacaagcggatggaccttcggcgcaggagccgccctgcagatcccttttgccatgcagatggcctataggttcaacggcatcggcgtgacccagaatgtgctgtacgagaaccagaagctgatcgccaatcagtttaacagcgccatcggcaagatccaggactctctgtcctctacagccagcgccctgggcaagctgcaggatgtggtgaatcagaacgcccaggccctgaataccctggtgaagcagctgagctccaacttcggcgccatctctagcgtgctgaatgacatcctgagccggctggacccccctgaggcagaggtgcagatcgacaggctgatcacaggccgcctgcagagcctgcagacctacgtgacacagcagctgatcagggcagcagagatcagagcctccgccaatctggccgccaccaagatgagcgagtgcgtgctgggacagtccaagagggtggacttttgtggcaagggctatcacctgatgtctttcccacagagcgcccctcacggcgtggtgtttctgcacgtgacctacgtgccagcccaggagaagaacttcaccacagcaccagccatctgccacgatggaaaggcacactttcctagggagggcgtgttcgtgtctaacggcacccactggtttgtgacacagcgcaatttctacgagccacagatcatcaccacagacaatacattcgtgagcggcaactgtgatgtggtgatcggcatcgtgaacaataccgtgtatgatccactgcagcccgagctggactcctttaaggaggagctggataagtacttcaagaatcacacctctcccgacgtggatctgggcgacatctccggcatcaatgcctctgtggtgaacatccagaaggagatcgaccggctgaacgaggtggccaagaatctgaacgagagcctgatcgatctgcaggagctgggcaagtatgagcagtacatcaagggctctggcagagagaacctgtatttccagggaggaggaggcagcggatacatccctgaggcaccaagggacggacaggcctacgtgcgcaaggatggcgagtgggtgctgctgtccacctttctgggccatcatcaccaccaccaccaccactga

SEQ ID NO: 1750 - DNA, 3846 bp, Artificial Sequence
  Description of Artificial Sequence: Synthetic polynucleotide
atgggcatcctgccaagcccaggaatgcccgccctgctgtctctggtgagcctgctgtccgtgctgctgatgggatgcgtggcagagacaggcacacagtgcgtgaacctgaccacaaggacccagctgccccctgcctataccaattctttcacacggggcgtgtactatcccgacaaggtgtttagaagctccgtgctgcactccacacaggatctgtttctgcctttcttttctaacgtgacctggttccacgccatccacgtgtccggcaccaatggcacaaagcggttcgacaatcccgtgctgccttttaacgatggcgtgtacttcgccagcaccgagaagtccaacatcatcagaggctggatctttggcaccacactggactctaagacacagagcctgctgatcgtgaacaatgccaccaacgtggtgatcaaggtgtgcgagttccagttttgtaatgatccattcctgggcgtgtactatcacaagaacaataagtcctggatggagtctgagtttcgcgtgtattctagcgccaacaattgcacatttgagtacgtgagccagcccttcctgatggacctggagggcaagcagggcaatttcaagaacctgagggagttcgtgtttaagaatatcgatggctacttcaagatctacagcaagcacaccccaatcaacctggtgcgcgacctgccacagggattctccgccctggagccactggtggatctgcccatcggcatcaacatcacccggtttcagacactgctggccctgcacagatcctacctgacaccaggcgactcctctagcggatggaccgcaggagctgccgcctactatgtgggctatctgcagccccggaccttcctgctgaagtacaacgagaatggcaccatcacagacgcagtggattgcgccctggaccccctgtctgagacaaagtgtacactgaagagctttaccgtggagaagggcatctatcagacaagcaatttcagggtgcagcctaccgagtccatcgtgcgctttcccaatatcacaaacctgtgcccttttggcgaggtgttcaacgccaccagattcgccagcgtgtacgcctggaatcggaagagaatctccaactgcgtggccgactattctgtgctgtacaactccgcctctttcagcacctttaagtgctatggcgtgtctcccacaaagctgaatgatctgtgctttaccaacgtgtacgccgatagcttcgtgatcaggggagacgaagtgagacagatcgcaccaggacagacaggaaagatcgcagactacaattataagctgcctgacgatttcaccggctgcgtgatcgcctggaactccaacaatctggattctaaagtgggcggcaactacaattatctgtacaggctgtttcgcaagtccaatctgaagccattcgagcgggacatctccacagagatctaccaggccggctctaccccctgcaatggcgtggagggctttaactgttatttccctctgcagtcttacggcttccagccaacaaacggcgtgggctatcagccctacagagtggtggtgctgtcctttgagctgctgcacgcaccagcaacagtgtgcggcccaaagaagtctaccaatctggtgaagaacaagtgcgtgaacttcaacttcaacggactgaccggcacaggcgtgctgaccgagagcaataagaagttcctgccttttcagcagttcggcagggacatcgcagataccacagacgccgtgcgcgaccctcagaccctggagatcctggacatcacaccatgcagcttcggcggcgtgtccgtgatcacaccaggcaccaatacatccaaccaggtggccgtgctgtatcaggacgtgaattgtaccgaggtgcccgtggcaatccacgcagatcagctgacccctacatggcgggtgtactctaccggcagcaacgtgttccagacaagagccggatgcctgatcggagcagagcacgtgaacaatagctatgagtgcgacatccctatcggcgccggcatctgtgccagctaccagacccagacaaactccccatctggagcaggctccgtggccagccagtccatcatcgcctataccatgagcctgggcgccgagaacagcgtggcctactccaacaattctatctcaatccctaccaacttcacaatcagcgtgaccacagagatcctgccagtgtctatgaccaagacaagcgtggactgcacaatgtatatctgtggcgatagcaccgagtgctccaacctgctgctgcagtacggctccttttgtacccagctgaatagagccctgacaggcatcgccgtggagcaggataagaacacacaggaggtgttcgcccaggtgaagcagatctacaagaccccacccatcaaggactttggcggcttcaacttcagccagatcctgcctgatccaagcaagccctccaagaggtcttttatcgaggacctgctgttcaacaaggtgaccctggccgatgccggcttcatcaagcagtatggagattgcctgggagacatcgcagcccgcgacctgatctgtgcccagaagtttaatggcctgaccgtgctgcctccactgctgacagatgagatgatcgcccagtacacatctgccctgctggccggcaccatcacaagcggatggaccttcggcgcaggagccgccctgcagatcccttttgccatgcagatggcctataggttcaacggcatcggcgtgacccagaatgtgctgtacgagaaccagaagctgatcgccaatcagtttaacagcgccatcggcaagatccaggactctctgtcctctacagccagcgccctgggcaagctgcaggatgtggtgaatcagaacgcccaggccctgaataccctggtgaagcagctgagctccaacttcggcgccatctctagcgtgctgaatgacatcctgagccggctggacccccctgaggcagaggtgcagatcgacaggctgatcacaggccgcctgcagagcctgcagacctacgtgacacagcagctgatcagggcagcagagatcagagcctccgccaatctggccgccaccaagatgagcgagtgcgtgctgggacagtccaagagggtggacttttgtggcaagggctatcacctgatgtctttcccacagagcgcccctcacggcgtggtgtttctgcacgtgacctacgtgccagcccaggagaagaacttcaccacagcaccagccatctgccacgatggaaaggcacactttcctagggagggcgtgttcgtgtctaacggcacccactggtttgtgacacagcgcaatttctacgagccacagatcatcaccacagacaatacattcgtgagcggcaactgtgatgtggtgatcggcatcgtgaacaataccgtgtatgatccactgcagcccgagctggactcctttaaggaggagctggataagtacttcaagaatcacacctctcccgacgtggatctgggcgacatctccggcatcaatgcctctgtggtgaacatccagaaggagatcgaccggctgaacgaggtggccaagaatctgaacgagagcctgatcgatctgcaggagctgggcaagtatgagcagtacatcaagggctctggcagagagaacctgtatttccagggaggaggaggcagcggatacatccctgaggcaccaagggacggacaggcctacgtgcgcaaggatggcgagtgggtgctgctgtccacctttctgggccatcatcaccaccaccaccaccactga

SEQ ID NO: 1751 - DNA, 3846 bp, Artificial Sequence
  Description of Artificial Sequence: Synthetic polynucleotide
atgggcatcctgccaagcccaggaatgcccgccctgctgtctctggtgagcctgctgtccgtgctgctgatgggatgcgtggcagagacaggcacacagtgcgtgaacctgaccacaaggacccagctgccccctgcctataccaattctttcacacggggcgtgtactatcccgacaaggtgtttagaagctccgtgctgcactccacacaggatctgtttctgcctttcttttctaacgtgacctggttccacgccatccacgtgtccggcaccaatggcacaaagcggttcgacaatcccgtgctgccttttaacgatggcgtgtacttcgccagcaccgagaagtccaacatcatcagaggctggatctttggcaccacactggactctaagacacagagcctgctgatcgtgaacaatgccaccaacgtggtgatcaaggtgtgcaatttccagttttgtaatgatccattcctgggcgtgtactatcacaagaacaataagtcctggatggagtctgagtttcgcgtgtattctagcgccaacaattgcacatttgagtacgtgagccagcccttcctgatggacctggagggcaagcagggcaatttcaagaacctgagggagttcgtgtttaagaatatcgatggctacttcaagatctacagcaagcacaccccaatcaacctggtgcgcgacctgccacagggattctccgccctggagccactggtggatctgcccatcggcatcaacatcacccggtttcagacactgctggccctgcacagatcctacctgacaccaggcgactcctctagcggatggaccgcaggagctgccgcctactatgtgggctatctgcagccccggaccttcctgctgaagtacaacgagaatggcaccatcacagacgcagtggattgcgccctggaccccctgtctgagacaaagtgtacactgaagagctttaccgtggagaagggcatctatcagacaagcaatttcagggtgcagcctaccgagtccatcgtgcgctttcccaatatcacaaacctgtgcccttttggcgaggtgttcaacgccaccagattcgccagcgtgtacgcctggaatcggaagagaatctccaactgcgtggccgactattctgtgctgtacaactccgcctctttcagcacctttaagtgctatggcgtgtctcccacaaagctgaatgatctgtgctttaccaacgtgtacgccgatagcttcgtgatcaggggagacgaagtgagacagatcgcaccaggacagacaggaaagatcgcagactacaattataagctgcctgacgatttcaccggctgcgtgatcgcctggaactccaacaatctggattctaaagtgggcggcaactacaattatctgtacaggctgtttcgcaagtccaatctgaagccattcgagcgggacatctccacagagatctaccaggccggctctaccccctgcaatggcgtggagggctttaactgttatttccctctgcagtcttacggcttccagccaacaaacggcgtgggctatcagccctacagagtggtggtgctgtcctttgagctgctgcacgcaccagcaacagtgtgcggcccaaagaagtctaccaatctggtgaagaacaagtgcgtgaacttcaacttcaacggactgaccggcacaggcgtgctgaccgagagcaataagaagttcctgccttttcagcagttcggcagggacatcgcagataccacagacgccgtgcgcgaccctcagaccctggagatcctggacatcacaccatgcagcttcggcggcgtgtccgtgatcacaccaggcaccaatacatccaaccaggtggccgtgctgtatcaggacgtgaattgtaccgaggtgcccgtggcaatccacgcagatcagctgacccctacatggcgggtgtactctaccggcagcaacgtgttccagacaagagccggatgcctgatcggagcagagcacgtgaacaatagctatgagtgcgacatccctatcggcgccggcatctgtgccagctaccagacccagacaaactccccatctggagcaggctccgtggccagccagtccatcatcgcctataccatgagcctgggcgccgagaacagcgtggcctactccaacaattctatcgccatccctaccaacttcacaatcagcgtgaccacagagatcctgccagtgtctatgaccaagacaagcgtggactgcacaatgtatatctgtggcgatagcaccgagtgctccaacctgctgctgcagtacggctccttttgtacccagctgaatagagccctgacaggcatcgccgtggagcaggataagaacacacaggaggtgttcgcccaggtgaagcagatctacaagaccccacccatcaaggactttggcggcttcaacttcagccagatcctgcctgatccaagcaagccctccaagaggtcttttatcgaggacctgctgttcaacaaggtgaccctggccgatgccggcttcatcaagcagtatggagattgcctgggagacatcgcagcccgcgacctgatctgtgcccagaagtttaatggcctgaccgtgctgcctccactgctgacagatgagatgatcgcccagtacacatctgccctgctggccggcaccatcacaagcggatggaccttcggcgcaggagccgccctgcagatcccttttgccatgcagatggcctataggttcaacggcatcggcgtgacccagaatgtgctgtacgagaaccagaagctgatcgccaatcagtttaacagcgccatcggcaagatccaggactctctgtcctctacagccagcgccctgggcaagctgcaggatgtggtgaatcagaacgcccaggccctgaataccctggtgaagcagctgagctccaacttcggcgccatctctagcgtgctgaatgacatcctgagccggctggacccccctgaggcagaggtgcagatcgacaggctgatcacaggccgcctgcagagcctgcagacctacgtgacacagcagctgatcagggcagcagagatcagagcctccgccaatctggccgccaccaagatgagcgagtgcgtgctgggacagtccaagagggtggacttttgtggcaagggctatcacctgatgtctttcccacagagcgcccctcacggcgtggtgtttctgcacgtgacctacgtgccagcccaggagaagaacttcaccacagcaccagccatctgccacgatggaaaggcacactttcctagggagggcgtgttcgtgtctaacggcacccactggtttgtgacacagcgcaatttctacgagccacagatcatcaccacagacaatacattcgtgagcggcaactgtgatgtggtgatcggcatcgtgaacaataccgtgtatgatccactgcagcccgagctggactcctttaaggaggagctggataagtacttcaagaatcacacctctcccgacgtggatctgggcgacatctccggcatcaatgcctctgtggtgaacatccagaaggagatcgaccggctgaacgaggtggccaagaatctgaacgagagcctgatcgatctgcaggagctgggcaagtatgagcagtacatcaagggctctggcagagagaacctgtatttccagggaggaggaggcagcggatacatccctgaggcaccaagggacggacaggcctacgtgcgcaaggatggcgagtgggtgctgctgtccacctttctgggccatcatcaccaccaccaccaccactga

SEQ ID NO: 1752 - DNA, 3846 bp, Artificial Sequence
  Description of Artificial Sequence: Synthetic polynucleotide
atgggcatcctgccaagcccaggaatgcccgccctgctgtctctggtgagcctgctgtccgtgctgctgatgggatgcgtggcagagacaggcacacagtgcgtgaacctgaccacaaggacccagctgccccctgcctataccaattctttcacacggggcgtgtactatcccgacaaggtgtttagaagctccgtgctgcactccacacaggatctgtttctgcctttcttttctaacgtgacctggttccacgccatccacgtgtccggcaccaatggcacaaagcggttcgacaatcccgtgctgccttttaacgatggcgtgtacttcgccagcaccgagaagtccaacatcatcagaggctggatctttggcaccacactggactctaagacacagagcctgctgatcgtgaacaatgccaccaacgtggtgatcaaggtgtgcgagttccagttttgtaatgatccattcctgggcgtgtactatcacaagaacaataagtcctggatggagtctgagtttcgcgtgtattctagcgccaacaattgcacatttgagtacgtgagccagcccttcctgatggacctggagggcaagcagggcaatttcaagaacctgagggagttcgtgtttaagaatatcgatggctacttcaagatctacagcaagcacaccccaatcaacctggtgcgcgacctgccacagggattctccgccctggagccactggtggatctgcccatcggcatcaacatcacccggtttcagacactgctggccctgcacagatcctacctgacaccaggcgactcctctagcggatggaccgcaggagctgccgcctactatgtgggctatctgcagccccggaccttcctgctgaagtacaacgagaatggcaccatcacagacgcagtggattgcgccctggaccccctgtctgagacaaagtgtacactgaagagctttaccgtggagaagggcatctatcagacaagcaatttcagggtgcagcctaccgagtccatcgtgcgctttcccaatatcacaaacctgtgcccttttggcgaggtgttcaacgccaccagattcgccagcgtgtacgcctggaatcggaagagaatctccaactgcgtggccgactattctgtgctgtacaactccgcctctttcagcacctttaagtgctatggcgtgtctcccacaaagctgaatgatctgtgctttaccaacgtgtacgccgatagcttcgtgatcaggggagacgaagtgagacagatcgcaccaggacagacaggaaagatcgcagactacaattataagctgcctgacgatttcaccggctgcgtgatcgcctggaactccaacaatctggattctaaagtgggcggcaactacaattatctgtacaggctgtttcgcaagtccaatctgaagccattcgagcgggacatctccacagagatctaccaggccggctctaccccctgcaatggcgtggagggctttaactgttatttccctctgcagtcttacggcttccagccaacaaacggcgtgggctatcagccctacagagtggtggtgctgtcctttgagctgctgcacgcaccagcaacagtgtgcggcccaaagaagtctaccaatctggtgaagaacaagtgcgtgaacttcaacttcaacggactgaccggcacaggcgtgctgaccgagagcaataagaagttcctgccttttcagcagttcggcagggacatcgcagataccacagacgccgtgcgcgaccctcagaccctggagatcctggacatcacaccatgcagcttcggcggcgtgtccgtgatcacaccaggcaccaatacatccaaccaggtggccgtgctgtatcaggacgtgaattgtaccgaggtgcccgtggcaatccacgcagatcagctgacccctacatggcgggtgtactctaccggcagcaacgtgttccagacaagagccggatgcctgatcggagcagagcacgtgaacaatagctatgagtgcgacatccctatcggcgccggcatctgtgccagctaccagacccagacaaactccccatctggagcaggctccgtggccagccagtccatcatcgcctataccatgagcctgggcgccgagaacagcgtggcctactccaacaattctatcgccatccctaccaacttcacaatcagcgtgaccacagagatcctgccagtgtctatgaccaagacaagcgtggactgcacaatgtatatctgtggcgatagcaccgagtgctccaacctgctgctgcagtacggctccttttgtacccagctgaatagagccctgacaggcatcgccgtggagcaggataagaacacacaggaggtgttcgcccaggtgaagcagatctacaagaccccacccatcaaggactttggcggcttcaacttcagccagatcctgcctgatccaagcaagccctccaagaggtcttttatcgaggacctgctgttcaacaaggtgaccctggccgatgccggcttcatcaagcagtatggagattgcctgggagacatcgcagcccgcgacctgatctgtgcccagaagtttaatggcctgaccgtgctgcctccactgctgacagatgagatgatcgcccagtacacatctgccctgctggccggcaccatcacaagcggatggaccttcggcgcaggagccgccctgcagatcccttttgccatgcagatggcctataggttcaacggcatcggcgtgacccagaatgtgctgtacgagaaccagaagctgatcgccaatcagtttaacagcgccatcggcaagatccaggactctctgtcctctacagccagcgccctgggcaagctgcaggatgtggtgaatcagaacgcccaggccctgaataccctggtgaagcagctgagctccaacttcggcgccatctctagcgtgctgaatgacatcctgagccggctggacccccctgaggcagaggtgcagatcgacaggctgatcacaggccgcctgcagagcctgcagacctacgtgacacagcagctgatcagggcagcagagatcagagcctccgccaatctggccgccaccaagatgagcgagtgcgtgctgggacagtccaagagggtggacttttgtggcaagggctatcacctgatgtctttcccacagagcgcccctcacggcgtggtgtttctgcacgtgacctacgtgccagcccaggagaagaacttcaccacagcaccagccatctgccacgatggaaaggcacactttcctagggagggcgtgttcgtgtctaacggcacccactggtttgtgacacagcgcaatttctacgagccacgaatcatcaccacagacaatacattcgtgagcggcaactgtgatgtggtgatcggcatcgtgaacaataccgtgtatgatccactgcagcccgagctggactcctttaaggaggagctggataagtacttcaagaatcacacctctcccgacgtggatctgggcgacatctccggcatcaatgcctctgtggtgaacatccagaaggagatcgaccggctgaacgaggtggccaagaatctgaacgagagcctgatcgatctgcaggagctgggcaagtatgagcagtacatcaagggctctggcagagagaacctgtatttccagggaggaggaggcagcggatacatccctgaggcaccaagggacggacaggcctacgtgcgcaaggatggcgagtgggtgctgctgtccacctttctgggccatcatcaccaccaccaccaccactga

SEQ ID NO: 1753 - DNA, 3846 bp, Artificial Sequence
  Description of Artificial Sequence: Synthetic polynucleotide
atgggcatcctgccaagcccaggaatgcccgccctgctgtctctggtgagcctgctgtccgtgctgctgatgggatgcgtggcagagacaggcacacagtgcgtgaacctgaccacaaggacccagctgccccctgcctataccaattctttcacacggggcgtgtactatcccgacaaggtgtttagaagctccgtgctgcactccacacaggatctgtttctgcctttcttttctaacgtgacctggttccacgccatccacgtgtccggcaccaatggcacaaagcggttcgacaatcccgtgctgccttttaacgatggcgtgtacttcgccagcaccgagaagtccaacatcatcagaggctggatctttggcaccacactggactctaagacacagagcctgctgatcgtgaacaatgccaccaacgtggtgatcaaggtgtgcgagttccagttttgtaatgatccattcctgggcgtgtactatcacaagaacaataagtcctggatggagtctgagtttcgcgtgtattctagcgccaacaattgcacatttgagtacgtgagccagcccttcctgatggacctggagggcaagcagggcaatttcaagaacctgagggagttcgtgtttaagaatatcgatggctacttcaagatctacagcaagcacaccccaatcaacctggtgcgcgacctgccacagggattctccgccctggagccactggtggatctgcccatcggcatcaacatcacccggtttcagacactgctggccctgcacagatcctacctgacaccaggcgactcctctagcggatggaccgcaggagctgccgcctactatgtgggctatctgcagccccggaccttcctgctgaagtacaacgagaatggcaccatcacagacgcagtggattgcgccctggaccccctgtctgagacaaagtgtacactgaagagctttaccgtggagaagggcatctatcagacaagcaatttcagggtgcagcctaccgagtccatcgtgcgctttcccaatatcacaaacctgtgcccttttggcgaggtgttcaacgccaccagattcgccagcgtgtacgcctggaatcggaagagaatctccaactgcgtggccgactattctgtgctgtacaactccgcctctttcagcacctttaagtgctatggcgtgtctcccacaaagctgaatgatctgtgctttaccaacgtgtacgccgatagcttcgtgatcaggggagacgaagtgagacagatcgcaccaggacagacaggaaagatcgcagactacaattataagctgcctgacgatttcaccggctgcgtgatcgcctggaactccaacaatctggattctaaagtgggcggcaactacaattatctgtacaggctgtttcgcaagtccaatctgaagccattcgagcgggacatctccacagagatctaccaggccggctctaccccctgcaatggcgtggagggctttaactgttatttccctctgcagtcttacggcttccagccaacaaacggcgtgggctatcagccctacagagtggtggtgctgtcctttgagctgctgcacgcaccagcaacagtgtgcggcccaaagaagtctaccaatctggtgaagaacaagtgcgtgaacttcaacttcaacggactgaccggcacaggcgtgctgaccgagagcaataagaagttcctgccttttcagcagttcggcagggacatcgcagatgttacagacgccgtgcgcgaccctcagaccctggagatcctggacatcacaccatgcagcttcggcggcgtgtccgtgatcacaccaggcaccaatacatccaaccaggtggccgtgctgtatcaggacgtgaattgtaccgaggtgcccgtggcaatccacgcagatcagctgacccctacatggcgggtgtactctaccggcagcaacgtgttccagacaagagccggatgcctgatcggagcagagcacgtgaacaatagctatgagtgcgacatccctatcggcgccggcatctgtgccagctaccagacccagacaaactccccatctggagcaggctccgtggccagccagtccatcatcgcctataccatgagcctgggcgccgagaacagcgtggcctactccaacaattctatcgccatccctaccaacttcacaatcagcgtgaccacagagatcctgccagtgtctatgaccaagacaagcgtggactgcacaatgtatatctgtggcgatagcaccgagtgctccaacctgctgctgcagtacggctccttttgtacccagctgaatagagccctgacaggcatcgccgtggagcaggataagaacacacaggaggtgttcgcccaggtgaagcagatctacaagaccccacccatcaaggactttggcggcttcaacttcagccagatcctgcctgatccaagcaagccctccaagaggtcttttatcgaggacctgctgttcaacaaggtgaccctggccgatgccggcttcatcaagcagtatggagattgcctgggagacatcgcagcccgcgacctgatctgtgcccagaagtttaatggcctgaccgtgctgcctccactgctgacagatgagatgatcgcccagtacacatctgccctgctggccggcaccatcacaagcggatggaccttcggcgcaggagccgccctgcagatcccttttgccatgcagatggcctataggttcaacggcatcggcgtgacccagaatgtgctgtacgagaaccagaagctgatcgccaatcagtttaacagcgccatcggcaagatccaggactctctgtcctctacagccagcgccctgggcaagctgcaggatgtggtgaatcagaacgcccaggccctgaataccctggtgaagcagctgagctccaacttcggcgccatctctagcgtgctgaatgacatcctgagccggctggacccccctgaggcagaggtgcagatcgacaggctgatcacaggccgcctgcagagcctgcagacctacgtgacacagcagctgatcagggcagcagagatcagagcctccgccaatctggccgccaccaagatgagcgagtgcgtgctgggacagtccaagagggtggacttttgtggcaagggctatcacctgatgtctttcccacagagcgcccctcacggcgtggtgtttctgcacgtgacctacgtgccagcccaggagaagaacttcaccacagcaccagccatctgccacgatggaaaggcacactttcctagggagggcgtgttcgtgtctaacggcacccactggtttgtgacacagcgcaatttctacgagccacagatcatcaccacagacaatacattcgtgagcggcaactgtgatgtggtgatcggcatcgtgaacaataccgtgtatgatccactgcagcccgagctggactcctttaaggaggagctggataagtacttcaagaatcacacctctcccgacgtggatctgggcgacatctccggcatcaatgcctctgtggtgaacatccagaaggagatcgaccggctgaacgaggtggccaagaatctgaacgagagcctgatcgatctgcaggagctgggcaagtatgagcagtacatcaagggctctggcagagagaacctgtatttccagggaggaggaggcagcggatacatccctgaggcaccaagggacggacaggcctacgtgcgcaaggatggcgagtgggtgctgctgtccacctttctgggccatcatcaccaccaccaccaccactga

SEQ ID NO: 1754 - DNA, 3846 bp, Artificial Sequence
  Description of Artificial Sequence: Synthetic polynucleotide
atgggcatcctgccaagcccaggaatgcccgccctgctgtctctggtgagcctgctgtccgtgctgctgatgggatgcgtggcagagacaggcacacagtgcgtgaacctgaccacaaggacccagctgccccctgcctataccaattctttcacacggggcgtgtactatcccgacaaggtgtttagaagctccgtgctgcactccacacaggatctgtttctgcctttcttttctaacgtgacctggttccacgccatccacgtgtccggcaccaatggcacaaagcggttcgacaatcccgtgctgccttttaacgatggcgtgtacttcgccagcaccgagaagtccaacatcatcagaggctggatctttggcaccacactggactctaagacacagagcctgctgatcgtgaacaatgccaccaacgtggtgatcaaggtgtgcgagttccagttttgtaatgatccattcctgggcgtgtactatcacaagaacaataagtcctggatggagtctgagtttcgcgtgtattctagcgccaacaattgcacatttgagtacgtgagccagcccttcctgatggacctggagggcaagcagggcaatttcaagaacctgagggagttcgtgtttaagaatatcgatggctacttcaagatctacagcaagcacaccccaatcaacctggtgcgcgacctgccacagggattctccgccctggagccactggtggatctgcccatcggcatcaacatcacccggtttcagacactgctggccctgcacagatcctacctgacaccaggcgactcctctagcggatggaccgcaggagctgccgcctactatgtgggctatctgcagccccggaccttcctgctgaagtacaacgagaatggcaccatcacagacgcagtggattgcgccctggaccccctgtctgagacaaagtgtacactgaagagctttaccgtggagaagggcatctatcagacaagcaatttcagggtgcagcctaccgagtccatcgtgcgctttcccaatatcacaaacctgtgcccttttggcgaggtgttcaacgccaccagattcgccagcgtgtacgcctggaatcggaagagaatctccaactgcgtggccgactattctgtgctgtacaactccgcctctttcagcacctttaagtgctatggcgtgtctcccacaaagctgaatgatctgtgctttaccaacgtgtacgccgatagcttcgtgatcaggggagacgaagtgagacagatcgcaccaggacagacaggaaagatcgcagactacaattataagctgcctgacgatttcaccggctgcgtgatcgcctggaactccaacaatctggattctaaagtgggcggcaactacaattatctgtacaggctgtttcgcaagtccaatctgaagccattcgagcgggacatctccacagagatctaccaggccggctctaccccctgcaatggcgtggagggctttaactgttatttccctctgcagtcttacggcttccagccaacaaacggcgtgggctatcagccctacagagtggtggtgctgtcctttgagctgctgcacgcaccagcaacagtgtgcggcccaaagaagtctaccaatctggtgaagaacaagtgcgtgaacttcaacttcaacggactgaccggcacaggcgtgctgaccgagagcaataagaagttcctgccttttcagcagttcggcagggacatcgcagataccacagacgccgtgcgcgaccctcagaccctggagatcctggacatcacaccatgcagcttcggcggcgtgtccgtgatcacaccaggcaccaatacatccaaccaggtggccgtgctgtatcaggacgtgaattgtaccgaggtgcccgtggcaatccacgcagatcagctgacccctacatggcgggtgtactctaccggcagcaacgtgttccagacaagagccggatgcctgatcggagcagagcacgtgaacaatagctatgagtgcgacatccctatcggcgccggcatctgtgccagctaccagacccagacaaactccccatctggagcaggctccgtggccagccagtccatcatcgcctataccatgagcctgggcgccgagaacagcgtggcctactccaacaattctatcgccatccctaccaacttcacaatcagcgtgaccacagagatcctgccagtgtctatgaccaagacaagcgtggactgcacaatgtatatctgtggcgatagcaccgagtgctccaacctgctgctgcagtacggctccttttgtacccagctgaatagagccctgacaggcatcgcccaagagcaggataagaacacacaggaggtgttcgcccaggtgaagcagatctacaagaccccacccatcaaggactttggcggcttcaacttcagccagatcctgcctgatccaagcaagccctccaagaggtcttttatcgaggacctgctgttcaacaaggtgaccctggccgatgccggcttcatcaagcagtatggagattgcctgggagacatcgcagcccgcgacctgatctgtgcccagaagtttaatggcctgaccgtgctgcctccactgctgacagatgagatgatcgcccagtacacatctgccctgctggccggcaccatcacaagcggatggaccttcggcgcaggagccgccctgcagatcccttttgccatgcagatggcctataggttcaacggcatcggcgtgacccagaatgtgctgtacgagaaccagaagctgatcgccaatcagtttaacagcgccatcggcaagatccaggactctctgtcctctacagccagcgccctgggcaagctgcaggatgtggtgaatcagaacgcccaggccctgaataccctggtgaagcagctgagctccaacttcggcgccatctctagcgtgctgaatgacatcctgagccggctggacccccctgaggcagaggtgcagatcgacaggctgatcacaggccgcctgcagagcctgcagacctacgtgacacagcagctgatcagggcagcagagatcagagcctccgccaatctggccgccaccaagatgagcgagtgcgtgctgggacagtccaagagggtggacttttgtggcaagggctatcacctgatgtctttcccacagagcgcccctcacggcgtggtgtttctgcacgtgacctacgtgccagcccaggagaagaacttcaccacagcaccagccatctgccacgatggaaaggcacactttcctagggagggcgtgttcgtgtctaacggcacccactggtttgtgacacagcgcaatttctacgagccacagatcatcaccacagacaatacattcgtgagcggcaactgtgatgtggtgatcggcatcgtgaacaataccgtgtatgatccactgcagcccgagctggactcctttaaggaggagctggataagtacttcaagaatcacacctctcccgacgtggatctgggcgacatctccggcatcaatgcctctgtggtgaacatccagaaggagatcgaccggctgaacgaggtggccaagaatctgaacgagagcctgatcgatctgcaggagctgggcaagtatgagcagtacatcaagggctctggcagagagaacctgtatttccagggaggaggaggcagcggatacatccctgaggcaccaagggacggacaggcctacgtgcgcaaggatggcgagtgggtgctgctgtccacctttctgggccatcatcaccaccaccaccaccactga

SEQ ID NO: 1755 - DNA, 3846 bp, Artificial Sequence
  Description of Artificial Sequence: Synthetic polynucleotide
atgggcatcctgccaagcccaggaatgcccgccctgctgtctctggtgagcctgctgtccgtgctgctgatgggatgcgtggcagagacaggcacacagtgcgtgaacctgaccacaaggacccagctgccccctgcctataccaattctttcacacggggcgtgtactatcccgacaaggtgtttagaagctccgtgctgcactccacacaggatctgtttctgcctttcttttctaacgtgacctggttccacgccatccacgtgtccggcaccaatggcacaaagcggttcgacaatcccgtgctgccttttaacgatggcgtgtacttcgccagcaccgagaagtccaacatcatcagaggctggatctttggcaccacactggactctaagacacagagcctgctgatcgtgaacaatgccaccaacgtggtgatcaaggtgtgcgagttccagttttgtaatgatccattcctgggcgtgtactatcacaagaacaataagtcctggatggagtctgagtttcgcgtgtattctagcgccaacaattgcacatttgagtacgtgagccagcccttcctgatggacctggagggcaagcagggcaatttcaagaacctgagggagttcgtgtttaagaatatcgatggctacttcaagatctacagcaagcacaccccaatcaacctggtgcgcgacctgccacagggattctccgccctggagccactggtggatctgcccatcggcatcaacatcacccggtttcagacactgctggccctgcacagatcctacctgacaccaggcgactcctctagcggatggaccgcaggagctgccgcctactatgtgggctatctgcagccccggaccttcctgctgaagtacaacgagaatggcaccatcacagacgcagtggattgcgccctggaccccctgtctgagacaaagtgtacactgaagagctttaccgtggagaagggcatctatcagacaagcaatttcagggtgcagcctaccgagtccatcgtgcgctttcccaatatcacaaacctgtgcccttttggcgaggtgttcaacgccaccagattcgccagcgtgtacgcctggaatcggaagagaatctccaactgcgtggccgactattctgtgctgtacaactccgcctctttcagcacctttaagtgctatggcgtgtctcccacaaagctgaatgatctgtgctttaccaacgtgtacgccgatagcttcgtgatcaggggagacgaagtgagacagatcgcaccaggacagacaggaaagatcgcagactacaattataagctgcctgacgatttcaccggctgcgtgatcgcctggaactccaacaatctggattctaaagtgggcggcaactacaattatctgtacaggctgtttcgcaagtccaatctgaagccattcgagcgggacatctccacagagatctaccaggccggctctaccccctgcaatggcgtggagggctttaactgttatttccctctgcagtcttacggcttccagccaacaaacggcgtgggctatcagccctacagagtggtggtgctgtcctttgagctgctgcacgcaccagcaacagtgtgcggcccaaagaagtctaccaatctggtgaagaacgaatgcgtgaacttcaacttcaacggactgaccggcacaggcgtgctgaccgagagcaataagaagttcctgccttttcagcagttcggcagggacatcgcagataccacagacgccgtgcgcgaccctcagaccctggagatcctggacatcacaccatgcagcttcggcggcgtgtccgtgatcacaccaggcaccaatacatccaaccaggtggccgtgctgtatcaggacgtgaattgtaccgaggtgcccgtggcaatccacgcagatcagctgacccctacatggcgggtgtactctaccggcagcaacgtgttccagacaagagccggatgcctgatcggagcagagcacgtgaacaatagctatgagtgcgacatccctatcggcgccggcatctgtgccagctaccagacccagacaaactccccatctggagcaggctccgtggccagccagtccatcatcgcctataccatgagcctgggcgccgagaacagcgtggcctactccaacaattctatcgccatccctaccaacttcacaatcagcgtgaccacagagatcctgccagtgtctatgaccaagacaagcgtggactgcacaatgtatatctgtggcgatagcaccgagtgctccaacctgctgctgcagtacggctccttttgtacccagctgaatagagccctgacaggcatcgccgtggagcaggataagaacacacaggaggtgttcgcccaggtgaagcagatctacaagaccccacccatcaaggactttggcggcttcaacttcagccagatcctgcctgatccaagcaagccctccaagaggtcttttatcgaggacctgctgttcaacaaggtgaccctggccgatgccggcttcatcaagcagtatggagattgcctgggagacatcgcagcccgcgacctgatctgtgcccagaagtttaatggcctgaccgtgctgcctccactgctgacagatgagatgatcgcccagtacacatctgccctgctggccggcaccatcacaagcggatggaccttcggcgcaggagccgccctgcagatcccttttgccatgcagatggcctataggttcaacggcatcggcgtgacccagaatgtgctgtacgagaaccagaagctgatcgccaatcagtttaacagcgccatcggcaagatccaggactctctgtcctctacagccagcgccctgggcaagctgcaggatgtggtgaatcagaacgcccaggccctgaataccctggtgaagcagctgagctccaacttcggcgccatctctagcgtgctgaatgacatcctgagccggctggacccccctgaggcagaggtgcagatcgacaggctgatcacaggccgcctgcagagcctgcagacctacgtgacacagcagctgatcagggcagcagagatcagagcctccgccaatctggccgccaccaagatgagcgagtgcgtgctgggacagtccaagagggtggacttttgtggcaagggctatcacctgatgtctttcccacagagcgcccctcacggcgtggtgtttctgcacgtgacctacgtgccagcccaggagaagaacttcaccacagcaccagccatctgccacgatggaaaggcacactttcctagggagggcgtgttcgtgtctaacggcacccactggtttgtgacacagcgcaatttctacgagccacagatcatcaccacagacaatacattcgtgagcggcaactgtgatgtggtgatcggcatcgtgaacaataccgtgtatgatccactgcagcccgagctggactcctttaaggaggagctggataagtacttcaagaatcacacctctcccgacgtggatctgggcgacatctccggcatcaatgcctctgtggtgaacatccagaaggagatcgaccggctgaacgaggtggccaagaatctgaacgagagcctgatcgatctgcaggagctgggcaagtatgagcagtacatcaagggctctggcagagagaacctgtatttccagggaggaggaggcagcggatacatccctgaggcaccaagggacggacaggcctacgtgcgcaaggatggcgagtgggtgctgctgtccacctttctgggccatcatcaccaccaccaccaccactga

SEQ ID NO: 1756 - DNA, 3846 bp, Artificial Sequence
  Description of Artificial Sequence: Synthetic polynucleotide
atgggcatcctgccaagcccaggaatgcccgccctgctgtctctggtgagcctgctgtccgtgctgctgatgggatgcgtggcagagacaggcacacagtgcgtgaacctgaccacaaggacccagctgccccctgcctataccaattctttcacacggggcgtgtactatcccgacaaggtgtttagaagctccgtgctgcactccacacaggatctgtttctgcctttcttttctaacgtgacctggttccacgccatccacgtgtccggcaccaatggcacaaagcggttcgacaatcccgtgctgccttttaacgatggcgtgtacttcgccagcaccgagaagtccaacatcatcagaggctggatctttggcaccacactggactctaagacacagagcctgctgatcgtgaacaatgccaccaacgtggtgatcaaggtgtgcgagttccagttttgttacgatccattcctgggcgtgtactatcacaagaacaataagtcctggatggagtctgagtttcgcgtgtattctagcgccaacaattgcacatttgagtacgtgagccagcccttcctgatggacctggagggcaagcagggcaatttcaagaacctgagggagttcgtgtttaagaatatcgatggctacttcaagatctacagcaagcacaccccaatcaacctggtgcgcgacctgccacagggattctccgccctggagccactggtggatctgcccatcggcatcaacatcacccggtttcagacactgctggccctgcacagatcctacctgacaccaggcgactcctctagcggatggaccgcaggagctgccgcctactatgtgggctatctgcagccccggaccttcctgctgaagtacaacgagaatggcaccatcacagacgcagtggattgcgccctggaccccctgtctgagacaaagtgtacactgaagagctttaccgtggagaagggcatctatcagacaagcaatttcagggtgcagcctaccgagtccatcgtgcgctttcccaatatcacaaacctgtgcccttttggcgaggtgttcaacgccaccagattcgccagcgtgtacgcctggaatcggaagagaatctccaactgcgtggccgactattctgtgctgtacaactccgcctctttcagcacctttaagtgctatggcgtgtctcccacaaagctgaatgatctgtgctttaccaacgtgtacgccgatagcttcgtgatcaggggagacgaagtgagacagatcgcaccaggacagacaggaaagatcgcagactacaattataagctgcctgacgatttcaccggctgcgtgatcgcctggaactccaacaatctggattctaaagtgggcggcaactacaattatctgtacaggctgtttcgcaagtccaatctgaagccattcgagcgggacatctccacagagatctaccaggccggctctaccccctgcaatggcgtggagggctttaactgttatttccctctgcagtcttacggcttccagccaacaaacggcgtgggctatcagccctacagagtggtggtgctgtcctttgagctgctgcacgcaccagcaacagtgtgcggcccaaagaagtctaccaatctggtgaagaacaagtgcgtgaacttcaacttcaacggactgaccggcacaggcgtgctgaccgagagcaataagaagttcctgccttttcagcagttcggcagggacatcgcagataccacagacgccgtgcgcgaccctcagaccctggagatcctggacatcacaccatgcagcttcggcggcgtgtccgtgatcacaccaggcaccaatacatccaaccaggtggccgtgctgtatcaggacgtgaattgtaccgaggtgcccgtggcaatccacgcagatcagctgacccctacatggcgggtgtactctaccggcagcaacgtgttccagacaagagccggatgcctgatcggagcagagcacgtgaacaatagctatgagtgcgacatccctatcggcgccggcatctgtgccagctaccagacccagacaaactccccatctggagcaggctccgtggccagccagtccatcatcgcctataccatgagcctgggcgccgagaacagcgtggcctactccaacaattctatcgccatccctaccaacttcacaatcagcgtgaccacagagatcctgccagtgtctatgaccaagacaagcgtggactgcacaatgtatatctgtggcgatagcaccgagtgctccaacctgctgctgcagtacggctccttttgtacccagctgaatagagccctgacaggcatcgccgtggagcaggataagaacacacaggaggtgttcgcccaggtgaagcagatctacaagaccccacccatcaaggactttggcggcttcaacttcagccagatcctgcctgatccaagcaagccctccaagaggtcttttatcgaggacctgctgttcaacaaggtgaccctggccgatgccggcttcatcaagcagtatggagattgcctgggagacatcgcagcccgcgacctgatctgtgcccagaagtttaatggcctgaccgtgctgcctccactgctgacagatgagatgatcgcccagtacacatctgccctgctggccggcaccatcacaagcggatggaccttcggcgcaggagccgccctgcagatcccttttgccatgcagatggcctataggttcaacggcatcggcgtgacccagaatgtgctgtacgagaaccagaagctgatcgccaatcagtttaacagcgccatcggcaagatccaggactctctgtcctctacagccagcgccctgggcaagctgcaggatgtggtgaatcagaacgcccaggccctgaataccctggtgaagcagctgagctccaacttcggcgccatctctagcgtgctgaatgacatcctgagccggctggacccccctgaggcagaggtgcagatcgacaggctgatcacaggccgcctgcagagcctgcagacctacgtgacacagcagctgatcagggcagcagagatcagagcctccgccaatctggccgccaccaagatgagcgagtgcgtgctgggacagtccaagagggtggacttttgtggcaagggctatcacctgatgtctttcccacagagcgcccctcacggcgtggtgtttctgcacgtgacctacgtgccagcccaggagaagaacttcaccacagcaccagccatctgccacgatggaaaggcacactttcctagggagggcgtgttcgtgtctaacggcacccactggtttgtgacacagcgcaatttctacgagccacagatcatcaccacagacaatacattcgtgagcggcaactgtgatgtggtgatcggcatcgtgaacaataccgtgtatgatccactgcagcccgagctggactcctttaaggaggagctggataagtacttcaagaatcacacctctcccgacgtggatctgggcgacatctccggcatcaatgcctctgtggtgaacatccagaaggagatcgaccggctgaacgaggtggccaagaatctgaacgagagcctgatcgatctgcaggagctgggcaagtatgagcagtacatcaagggctctggcagagagaacctgtatttccagggaggaggaggcagcggatacatccctgaggcaccaagggacggacaggcctacgtgcgcaaggatggcgagtgggtgctgctgtccacctttctgggccatcatcaccaccaccaccaccactga

SEQ ID NO: 1757 - DNA, 3846 bp, Artificial Sequence
  Description of Artificial Sequence: Synthetic polynucleotide
atgggcatcctgccaagcccaggaatgcccgccctgctgtctctggtgagcctgctgtccgtgctgctgatgggatgcgtggcagagacaggcacacagtgcgtgaacctgaccacaaggacccagctgccccctgcctataccaattctttcacacggggcgtgtactatcccgacaaggtgtttagaagctccgtgctgcactccacacaggatctgtttctgcctttcttttctaacgtgacctggttccacgccatccacgtgtccggcaccaatggcacaaagcggttcgacaatcccgtgctgccttttaacgatggcgtgtacttcgccagcaccgagaagtccaacatcatcagaggctggatctttggcaccacactggactctaagacacagagcctgctgatcgtgaacaatgccaccaacgtggtgatcaaggtgtgcgagttccagttttgtaatgatccattcctgggcgtgtactatcacaagaacaataagtcctggatggagtctgagtttcgcgtgtattctagcgccaacaattgcacatttgagtacgtgagccagcccttcctgatggacctggagggcaagcagggcaatttcaagaacctgagggagttcgtgtttaagaatatcgatggctacttcaagatctacagcaagcacaccccaatcaacctggtgcgcgacctgccacagggattctccgccctggagccactggtggatctgcccatcggcatcaacatcacccggtttcagacactgctggccctgcacagatcctacctgacaccaggcgactcctctagcggatggaccgcaggagctgccgcctactatgtgggctatctgcagccccggaccttcctgctgaagtacaacgagaatggcaccatcacagacgcagtggattgcgccctggaccccctgtctgagacaaagtgttatctgaagagctttaccgtggagaagggcatctatcagacaagcaatttcagggtgcagcctaccgagtccatcgtgcgctttcccaatatcacaaacctgtgcccttttggcgaggtgttcaacgccaccagattcgccagcgtgtacgcctggaatcggaagagaatctccaactgcgtggccgactattctgtgctgtacaactccgcctctttcagcacctttaagtgctatggcgtgtctcccacaaagctgaatgatctgtgctttaccaacgtgtacgccgatagcttcgtgatcaggggagacgaagtgagacagatcgcaccaggacagacaggaaagatcgcagactacaattataagctgcctgacgatttcaccggctgcgtgatcgcctggaactccaacaatctggattctaaagtgggcggcaactacaattatctgtacaggctgtttcgcaagtccaatctgaagccattcgagcgggacatctccacagagatctaccaggccggctctaccccctgcaatggcgtggagggctttaactgttatttccctctgcagtcttacggcttccagccaacaaacggcgtgggctatcagccctacagagtggtggtgctgtcctttgagctgctgcacgcaccagcaacagtgtgcggcccaaagaagtctaccaatctggtgaagaacaagtgcgtgaacttcaacttcaacggactgaccggcacaggcgtgctgaccgagagcaataagaagttcctgccttttcagcagttcggcagggacatcgcagataccacagacgccgtgcgcgaccctcagaccctggagatcctggacatcacaccatgcagcttcggcggcgtgtccgtgatcacaccaggcaccaatacatccaaccaggtggccgtgctgtatcaggacgtgaattgtaccgaggtgcccgtggcaatccacgcagatcagctgacccctacatggcgggtgtactctaccggcagcaacgtgttccagacaagagccggatgcctgatcggagcagagcacgtgaacaatagctatgagtgcgacatccctatcggcgccggcatctgtgccagctaccagacccagacaaactccccatctggagcaggctccgtggccagccagtccatcatcgcctataccatgagcctgggcgccgagaacagcgtggcctactccaacaattctatcgccatccctaccaacttcacaatcagcgtgaccacagagatcctgccagtgtctatgaccaagacaagcgtggactgcacaatgtatatctgtggcgatagcaccgagtgctccaacctgctgctgcagtacggctccttttgtacccagctgaatagagccctgacaggcatcgccgtggagcaggataagaacacacaggaggtgttcgcccaggtgaagcagatctacaagaccccacccatcaaggactttggcggcttcaacttcagccagatcctgcctgatccaagcaagccctccaagaggtcttttatcgaggacctgctgttcaacaaggtgaccctggccgatgccggcttcatcaagcagtatggagattgcctgggagacatcgcagcccgcgacctgatctgtgcccagaagtttaatggcctgaccgtgctgcctccactgctgacagatgagatgatcgcccagtacacatctgccctgctggccggcaccatcacaagcggatggaccttcggcgcaggagccgccctgcagatcccttttgccatgcagatggcctataggttcaacggcatcggcgtgacccagaatgtgctgtacgagaaccagaagctgatcgccaatcagtttaacagcgccatcggcaagatccaggactctctgtcctctacagccagcgccctgggcaagctgcaggatgtggtgaatcagaacgcccaggccctgaataccctggtgaagcagctgagctccaacttcggcgccatctctagcgtgctgaatgacatcctgagccggctggacccccctgaggcagaggtgcagatcgacaggctgatcacaggccgcctgcagagcctgcagacctacgtgacacagcagctgatcagggcagcagagatcagagcctccgccaatctggccgccaccaagatgagcgagtgcgtgctgggacagtccaagagggtggacttttgtggcaagggctatcacctgatgtctttcccacagagcgcccctcacggcgtggtgtttctgcacgtgacctacgtgccagcccaggagaagaacttcaccacagcaccagccatctgccacgatggaaaggcacactttcctagggagggcgtgttcgtgtctaacggcacccactggtttgtgacacagcgcaatttctacgagccacagatcatcaccacagacaatacattcgtgagcggcaactgtgatgtggtgatcggcatcgtgaacaataccgtgtatgatccactgcagcccgagctggactcctttaaggaggagctggataagtacttcaagaatcacacctctcccgacgtggatctgggcgacatctccggcatcaatgcctctgtggtgaacatccagaaggagatcgaccggctgaacgaggtggccaagaatctgaacgagagcctgatcgatctgcaggagctgggcaagtatgagcagtacatcaagggctctggcagagagaacctgtatttccagggaggaggaggcagcggatacatccctgaggcaccaagggacggacaggcctacgtgcgcaaggatggcgagtgggtgctgctgtccacctttctgggccatcatcaccaccaccaccaccactga

SEQ ID NO: 1758 - DNA, 3846 bp, Artificial Sequence
  Description of Artificial Sequence: Synthetic polynucleotide
atgggcatcctgccaagcccaggaatgcccgccctgctgtctctggtgagcctgctgtccgtgctgctgatgggatgcgtggcagagacaggcacacagtgcgtgaacctgaccacaaggacccagctgccccctgcctataccaattctttcacacggggcgtgtactatcccgacaaggtgtttagaagctccgtgctgcactccacacaggatctgtttctgcctttcttttctaacgtgacctggttccacgccatccacgtgtccggcaccaatggcacaaagcggttcgacaatcccgtgctgccttttaacgatggcgtgtacttcgccagcaccgagaagtccaacatcatcagaggctggatctttggcaccacactggactctaagacacagagcctgctgatcgtgaacaatgccaccaacgtggtgatcaaggtgtgcgagttccagttttgtaatgatccattcctgggcgtgtactatcacaagaacaataagtcctggatggagtctgagtttcgcgtgtattctagcgccaacaattgcacatttgagtacgtgagccagcccttcctgactgacctggagggcaagcagggcaatttcaagaacctgagggagttcgtgtttaagaatatcgatggctacttcaagatctacagcaagcacaccccaatcaacctggtgcgcgacctgccacagggattctccgccctggagccactggtggatctgcccatcggcatcaacatcacccggtttcagacactgctggccctgcacagatcctacctgacaccaggcgactcctctagcggatggaccgcaggagctgccgcctactatgtgggctatctgcagccccggaccttcctgctgaagtacaacgagaatggcaccatcacagacgcagtggattgcgccctggaccccctgtctgagacaaagtgtacactgaagagctttaccgtggagaagggcatctatcagacaagcaatttcagggtgcagcctaccgagtccatcgtgcgctttcccaatatcacaaacctgtgcccttttggcgaggtgttcaacgccaccagattcgccagcgtgtacgcctggaatcggaagagaatctccaactgcgtggccgactattctgtgctgtacaactccgcctctttcagcacctttaagtgctatggcgtgtctcccacaaagctgaatgatctgtgctttaccaacgtgtacgccgatagcttcgtgatcaggggagacgaagtgagacagatcgcaccaggacagacaggaaagatcgcagactacaattataagctgcctgacgatttcaccggctgcgtgatcgcctggaactccaacaatctggattctaaagtgggcggcaactacaattatctgtacaggctgtttcgcaagtccaatctgaagccattcgagcgggacatctccacagagatctaccaggccggctctaccccctgcaatggcgtggagggctttaactgttatttccctctgcagtcttacggcttccagccaacaaacggcgtgggctatcagccctacagagtggtggtgctgtcctttgagctgctgcacgcaccagcaacagtgtgcggcccaaagaagtctaccaatctggtgaagaacaagtgcgtgaacttcaacttcaacggactgaccggcacaggcgtgctgaccgagagcaataagaagttcctgccttttcagcagttcggcagggacatcgcagataccacagacgccgtgcgcgaccctcagaccctggagatcctggacatcacaccatgcagcttcggcggcgtgtccgtgatcacaccaggcaccaatacatccaaccaggtggccgtgctgtatcaggacgtgaattgtaccgaggtgcccgtggcaatccacgcagatcagctgacccctacatggcgggtgtactctaccggcagcaacgtgttccagacaagagccggatgcctgatcggagcagagcacgtgaacaatagctatgagtgcgacatccctatcggcgccggcatctgtgccagctaccagacccagacaaactccccatctggagcaggctccgtggccagccagtccatcatcgcctataccatgagcctgggcgccgagaacagcgtggcctactccaacaattctatcgccatccctaccaacttcacaatcagcgtgaccacagagatcctgccagtgtctatgaccaagacaagcgtggactgcacaatgtatatctgtggcgatagcaccgagtgctccaacctgctgctgcagtacggctccttttgtacccagctgaatagagccctgacaggcatcgccgtggagcaggataagaacacacaggaggtgttcgcccaggtgaagcagatctacaagaccccacccatcaaggactttggcggcttcaacttcagccagatcctgcctgatccaagcaagccctccaagaggtcttttatcgaggacctgctgttcaacaaggtgaccctggccgatgccggcttcatcaagcagtatggagattgcctgggagacatcgcagcccgcgacctgatctgtgcccagaagtttaatggcctgaccgtgctgcctccactgctgacagatgagatgatcgcccagtacacatctgccctgctggccggcaccatcacaagcggatggaccttcggcgcaggagccgccctgcagatcccttttgccatgcagatggcctataggttcaacggcatcggcgtgacccagaatgtgctgtacgagaaccagaagctgatcgccaatcagtttaacagcgccatcggcaagatccaggactctctgtcctctacagccagcgccctgggcaagctgcaggatgtggtgaatcagaacgcccaggccctgaataccctggtgaagcagctgagctccaacttcggcgccatctctagcgtgctgaatgacatcctgagccggctggacccccctgaggcagaggtgcagatcgacaggctgatcacaggccgcctgcagagcctgcagacctacgtgacacagcagctgatcagggcagcagagatcagagcctccgccaatctggccgccaccaagatgagcgagtgcgtgctgggacagtccaagagggtggacttttgtggcaagggctatcacctgatgtctttcccacagagcgcccctcacggcgtggtgtttctgcacgtgacctacgtgccagcccaggagaagaacttcaccacagcaccagccatctgccacgatggaaaggcacactttcctagggagggcgtgttcgtgtctaacggcacccactggtttgtgacacagcgcaatttctacgagccacagatcatcaccacagacaatacattcgtgagcggcaactgtgatgtggtgatcggcatcgtgaacaataccgtgtatgatccactgcagcccgagctggactcctttaaggaggagctggataagtacttcaagaatcacacctctcccgacgtggatctgggcgacatctccggcatcaatgcctctgtggtgaacatccagaaggagatcgaccggctgaacgaggtggccaagaatctgaacgagagcctgatcgatctgcaggagctgggcaagtatgagcagtacatcaagggctctggcagagagaacctgtatttccagggaggaggaggcagcggatacatccctgaggcaccaagggacggacaggcctacgtgcgcaaggatggcgagtgggtgctgctgtccacctttctgggccatcatcaccaccaccaccaccactga

SEQ ID NO: 1759 - DNA, 3846 bp, Artificial Sequence
  Description of Artificial Sequence: Synthetic polynucleotide
atgggcatcctgccaagcccaggaatgcccgccctgctgtctctggtgagcctgctgtccgtgctgctgatgggatgcgtggcagagacaggcacacagtgcgtgaacctgaccacaaggacccagctgccccctgcctataccaattctttcacacggggcgtgtactatcccgacaaggtgtttagaagctccgtgctgcactccacacaggatctgtttctgcctttcttttctaacgtgacctggttccacgccatccacgtgtccggcaccaatggcacaaagcggttcgacaatcccgtgctgccttttaacgatggcgtgtacttcgccagcaccgagaagtccaacatcatcagaggctggatctttggcaccacactggactctaagacacagagcctgctgatcgtgaacaatgccaccaacgtggtgatcaaggtgtgcgagttccagttttgtaatgatccattcctgggcgtgtactatcacaagaacaataagtcctggatggagtctgagtttcgcgtgtattctagcgccaacaattgcacatttgagtacgtgagccagcccttcctgatggacctggagggcaagcagggcaatttcaagaacctgagggagttcgtgtttaagaatatcgatggctacttcaagatctacagcaagcacaccccaatcaacctggtgcgcgacctgccacagggattctccgccctggagccactggtggatctgcccatcggcatcaacatcacccggtttcagacactgctggccctgcacagatcctacctgacaccaggcgactcctctagcggatggaccgcaggagctgccgcctactatgtgggctatctgcagccccggaccttcctgctgaagtacaacgagaatggcaccatcacagacgcagtggattgcgccctggaccccctgtctgagacaaagtgtacactgaagagctttaccgtggagaagggcatctatcagacaagcaatttcagggtgcagcctaccgagtccatcgtgcgctttcccaatatcacaaacctgtgcccttttggcgaggtgttcaacgccaccagattcgccagcgtgtacgcctggaatcggaagagaatctccaactgcgtggccgactattctgtgctgtacaactccgcctctttcagcacctttaagtgctatggcgtgtctcccacaaagctgaatgatctgtgctttaccaacgtgtacgccgatagcttcgtgatcaggggagacgaagtgagacagatcgcaccaggacagacaggaaagatcgcagactacaattataagctgcctgacgatttcaccggctgcgtgatcgcctggaactccaacaatctggattctaaagtgggcggcaactacaattatctgtacaggctgtttcgcaagtccaatctgaagccattcgagcgggacatctccacagagatctaccaggccggctctaccccctgcaatggcgtggagggctttaactgttatttccctctgcagtcttacggcttccagccaacaaacggcgtgggctatcagccctacagagtggtggtgctgtcctttgagctgctgcacgcaccagcaacagtgtgcggcccaaagaagtctaccaatctggtgaagaacaagtgcgtgaacttcaacttcaacggactgaccggcacaggcgtgctgaccgagagcaataagaagttcctgccttttcagcagttcggcagggacatcgcagataccacagacgccgtgcgcgaccctcagaccctggagatcctggacatcacaccatgcagcttcggcggcgtgtccgtgatcacaccaggcaccaatacatccaaccaggtggccgtgctgtatcaggacgtgaattgtaccgaggtgcccgacgcaatccacgcagatcagctgacccctacatggcgggtgtactctaccggcagcaacgtgttccagacaagagccggatgcctgatcggagcagagcacgtgaacaatagctatgagtgcgacatccctatcggcgccggcatctgtgccagctaccagacccagacaaactccccatctggagcaggctccgtggccagccagtccatcatcgcctataccatgagcctgggcgccgagaacagcgtggcctactccaacaattctatcgccatccctaccaacttcacaatcagcgtgaccacagagatcctgccagtgtctatgaccaagacaagcgtggactgcacaatgtatatctgtggcgatagcaccgagtgctccaacctgctgctgcagtacggctccttttgtacccagctgaatagagccctgacaggcatcgccgtggagcaggataagaacacacaggaggtgttcgcccaggtgaagcagatctacaagaccccacccatcaaggactttggcggcttcaacttcagccagatcctgcctgatccaagcaagccctccaagaggtcttttatcgaggacctgctgttcaacaaggtgaccctggccgatgccggcttcatcaagcagtatggagattgcctgggagacatcgcagcccgcgacctgatctgtgcccagaagtttaatggcctgaccgtgctgcctccactgctgacagatgagatgatcgcccagtacacatctgccctgctggccggcaccatcacaagcggatggaccttcggcgcaggagccgccctgcagatcccttttgccatgcagatggcctataggttcaacggcatcggcgtgacccagaatgtgctgtacgagaaccagaagctgatcgccaatcagtttaacagcgccatcggcaagatccaggactctctgtcctctacagccagcgccctgggcaagctgcaggatgtggtgaatcagaacgcccaggccctgaataccctggtgaagcagctgagctccaacttcggcgccatctctagcgtgctgaatgacatcctgagccggctggacccccctgaggcagaggtgcagatcgacaggctgatcacaggccgcctgcagagcctgcagacctacgtgacacagcagctgatcagggcagcagagatcagagcctccgccaatctggccgccaccaagatgagcgagtgcgtgctgggacagtccaagagggtggacttttgtggcaagggctatcacctgatgtctttcccacagagcgcccctcacggcgtggtgtttctgcacgtgacctacgtgccagcccaggagaagaacttcaccacagcaccagccatctgccacgatggaaaggcacactttcctagggagggcgtgttcgtgtctaacggcacccactggtttgtgacacagcgcaatttctacgagccacagatcatcaccacagacaatacattcgtgagcggcaactgtgatgtggtgatcggcatcgtgaacaataccgtgtatgatccactgcagcccgagctggactcctttaaggaggagctggataagtacttcaagaatcacacctctcccgacgtggatctgggcgacatctccggcatcaatgcctctgtggtgaacatccagaaggagatcgaccggctgaacgaggtggccaagaatctgaacgagagcctgatcgatctgcaggagctgggcaagtatgagcagtacatcaagggctctggcagagagaacctgtatttccagggaggaggaggcagcggatacatccctgaggcaccaagggacggacaggcctacgtgcgcaaggatggcgagtgggtgctgctgtccacctttctgggccatcatcaccaccaccaccaccactga

SEQ ID NO: 1760 - DNA, 3846 bp, Artificial Sequence
  Description of Artificial Sequence: Synthetic polynucleotide
atgggcatcctgccaagcccaggaatgcccgccctgctgtctctggtgagcctgctgtccgtgctgctgatgggatgcgtggcagagacaggcacacagtgcgtgaacctgaccacaaggacccagctgccccctgcctataccaattctttcacacggggcgtgtactatcccgacaaggtgtttagaagctccgtgctgcactccacacaggatctgtttctgcctttcttttctaacgtgacctggttccacgccatccacgtgtccggcaccaatggcacaaagcggttcgacaatcccgtgctgccttttaacgatggcgtgtacttcgccagcaccgagaagtccaacatcatcagaggctggatctttggcaccacactggactctaagacacagagcctgctgatcgtgaacaatgccaccaacgtggtgatcaaggtgtgcgagttccagttttgtaatgatccattcctgggcgtgtactatcacaagaacaataagtcctggatggagtctgagtttcgcgtgtattctagcgccaacaattgcacatttgagtacgtgagccagcccttcctgatggacctggagggcaagcagggcaatttcaagaacctgagggagttcgtgtttaagaatatcgatggctacttcaagatctacagcaagcacaccccaatcaacctggtgcgcgacctgccacagggattctccgccctggagccactggtggatctgcccatcggcatcaacatcacccggtttcagacactgctggccctgcacagatcctacctgacaccaggcgactcctctagcggatggaccgcaggagctgccgcctactatgtgggctatctgcagccccggaccttcctgctgaagtacaacgagaatggcaccatcacagacgcagtggattgcgccctggaccccctgtctgagacaaagtgtacactgaagagctttaccgtggagaagggcatctatcagacaagcaatttcagggtgcagcctaccgagtccatcgtgcgctttcccaatatcacaaacctgtgcccttttggcgaggtgttcaacgccaccagattcgccagcgtgtacgcctggaatcggaagagaatctccaactgcgtggccgactattctgtgctgtacaactccgcctctttcagcacctttaagtgctatggcgtgtctcccacaaagctgaatgatctgtgctttaccaacgtgtacgccgatagcttcgtgatcaggggagacgaagtgagacagatcgcaccaggacagacaggaaagatcgcagactacaattataagctgcctgacgatttcaccggctgcgtgatcgcctggaactccaacaatctggattctaaagtgggcggcaactacaattatctgtacaggctgtttcgcaagtccaatctgaagccattcgagcgggacatctccacagagatctaccaggccggctctaccccctgcaatggcgtggagggctttaactgttatttccctctgcagtcttacggcttccagccaacaaacggcgtgggctatcagccctacagagtggtggtgctgtcctttgagctgctgcacgcaccagcaacagtgtgcggcccaaagaagtctaccaatctggtgaagaacaagtgcgtgaacttcaacttcaacggactgaccggcacaggcgtgctgaccgagagcaataagaagttcctgccttttcagcagttcggcagggacatcgcagataccacagacgccgtgcgcgaccctcagaccctggagatcctggacatcacaccatgcagcttcggcggcgtgtccgtgatcacaccaggcaccaatacatccaaccaggtggccgtgctgtatcaggacgtgaattgtaccgaggtgcccgtggcaatccacgcagatcagctgacccctacatggcgggtgtactctaccggcagcaacgtgttccagacaagagccggatgcctgatcggagcagagcacgtgaacaatagctatgagtgcgacatccctatcggcgccggcatctgtgccagctaccagacccagacaaactccccatctggagcaggctccgtggccagccagtccatcatcgcctataccatgagcctgggcgccgagaacagcgtggcctactccaacaattctatcgccatccctaccaacttcacaatcagcgtgaccacagagatcctgccagtgtctatgaccaagacaagcgtggactgcacaatgtatatctgtggcgatagcaccgagtgctccaacctgctgctgcagtacggctccttttgtacccagctgaatagagccctgacaggcatcgccgtggagcaggataagaacacacaggaggtgttcgcccaggtgaagcagatctacaagaccccacccatcaaggactttggcggcttcaacttcagccagatcctgcctgatccaagcaagccctccaagaggtcttttatcgaggacctgctgttcaacaaggtgaccctggccgatgccggcttcatcaagcagtatggagattgcctgggagacatcgcagcccgcgacctgatctgtgcccagaagtttaatggcctgaccgtgctgcctccactgctgacagatgagatgatcgcccagtacacatctgccctgctggccggcaccatcacaagcggatggaccttcggcgcaggagccgccctgcagatcccttttgccatgcagatggcctataggttcaacggcatcggcgtgacccagaatgtgctgtacgagaaccagaagctgatcgccaatcagtttaacagcgccatcggcaagatccaggactctctgtcctctacagccagcgccctgggcaagctgcaggatgtggtgaatcagaacgcccaggccctgaataccctggtgaagcagctgagctccaacttcggcgccatctctagcgtgctgaatgacatcctgagccggctggacccccctgaggcagaggtgcagatcgacaggctgatcacaggccgcctgcagagcctgcagacctacgtgacacagcagctgatcagggcagcagagatcagagcctccgccaatctggccgccaccaagatgagcgagtgcgtgctgggacagtccaagaggtatgacttttgtggcaagggctatcacctgatgtctttcccacagagcgcccctcacggcgtggtgtttctgcacgtgacctacgtgccagcccaggagaagaacttcaccacagcaccagccatctgccacgatggaaaggcacactttcctagggagggcgtgttcgtgtctaacggcacccactggtttgtgacacagcgcaatttctacgagccacagatcatcaccacagacaatacattcgtgagcggcaactgtgatgtggtgatcggcatcgtgaacaataccgtgtatgatccactgcagcccgagctggactcctttaaggaggagctggataagtacttcaagaatcacacctctcccgacgtggatctgggcgacatctccggcatcaatgcctctgtggtgaacatccagaaggagatcgaccggctgaacgaggtggccaagaatctgaacgagagcctgatcgatctgcaggagctgggcaagtatgagcagtacatcaagggctctggcagagagaacctgtatttccagggaggaggaggcagcggatacatccctgaggcaccaagggacggacaggcctacgtgcgcaaggatggcgagtgggtgctgctgtccacctttctgggccatcatcaccaccaccaccaccactga

SEQ ID NO: 1761 - DNA, 3846 bp, Artificial Sequence
  Description of Artificial Sequence: Synthetic polynucleotide
atgggcatcctgccaagcccaggaatgcccgccctgctgtctctggtgagcctgctgtccgtgctgctgatgggatgcgtggcagagacaggcacacagtgcgtgaacctgaccacaaggacccagctgccccctgcctataccaattctttcacacggggcgtgtactatcccgacaagatctttagaagcaacgtgctgcactccacacaggatctgtttctgcctttcttttctaacgtgacctggttccacgcctggcacgtgaaaggcaccaatggcacaaagcggttcgacaatcccgtgctgccttttaacgatggcgtgtacttcgccgcaatagagaagtccaacatcatcagaggctggatctttggcaccacactggactctaagacacagagcctgctgatcgtgaacaatgccaccaacgtggtgatccgcgtgtgcgagttccagttttgtgaaaatccattcctgggcgtgtactatcacaagaacaataagtcctggcgtgaggaagagtttcgctggtattctagcgccaacaattgcacatttgagtacgtgagccagcccttcctgtacgacctgaatggcaagcagggcaatttccatcatctgagggagttcgtgtttaagaatatcgatggctacttcaagatctacagcaagtgggaaccaatcaacctggtgcgcgacctgccacagggattctccccgctggagccactgatggatctgcccatcggcatcaacatcacccattttcagacatttctgtcactgtcgagatcctacaggacaccaggcgactcctctagcggatggaccgcaggagctgccgcctactatgtgggctatctgcagccccggaccttcctgctgaagtacgatgagaatggctatatcacagacgcagtggattgctcactggaccccctgtctgagacaaagtgtaaactgaagagctttaccgtggagaagggcatctatcagacaagcaatttcagggtgcagcctacctatgaaatcgtgcgctttcccaatatcacaaacgaatgcccttttgacgaggtgttcaacgccccgagattcgccagcgtgtacaattgggaacggcacagaatctccaactgcgtggccgactattctgtgctgtacaactccgcctctttcagcacctttcaatgctatggcgtgtctcccacaaagctgaatgatctgtgctttaccaacgtgtacgccgatattttcgtgatcaggggaagtgaagtgagacagatcgcaccaggacagacaggaccaatcgcagactacaattataagctgcctgacgatttcaccggctgcgtgatcgcctggaactccaacaatctggattctactgtgggcggcaactacaattatctgtacaggctgtttcgcaagtccaatatgaagccattcgagcgggacatctccacagaggcgtaccaggccggctgtaccccctgcaatggcgtggagggctttaactgttatttccctctgcagtcttacggcttccagccaacaaacggcgtgggctatcagccctacagagtggtggtgctgaaatttgagctgctgcacgcaccagcaacagtgtgcggcccaaaggatcctaccaatctggtgaagaacaagtgcgtggattacaacttcaacggacgaaccggcacaggcgtgctgaccgagagcaataagaagttcctgccttttcagcagttcggcagggacatcagtgataacacagacgccgtgcgcgaccctacgaccggtgagatcctgtgtatcacaccatgcagcttcggcggcgtgtccgtgatcacaccaggcaccaatacatccaaccaggtggccgtgctgtatcaggacgtgaattgtaccgaggtgcccgaagcaatccactcaaatcagctgcgacctacatggcgggtgtactctaccggcagcaacgtgttccagacaagagccggatgcctgatcggagcagagtatgtgaacaatagctatgagtgcgacatccctatcggcaacggcatctgtgccagctaccagacccagacaaactccccatctggatcaggctccgtgagtagccagtccatcatcgcctataccatgagcctgggcgccgagaacccggtgccttactccaacaatgaaatcgccatccctaccaacttcacaatcagcgtgcaaacagagatcctgccagtgtctatgccgaaggtaagcgtggactgcacaatgtatatctgtggcgatagcaccgagtgcctcaacctgctgagtcagtacggctccttttgtagtcagctggaaagagccctgaacggcatcgcccgcgagcaggataagaacctacttaatgtgttcgcccaggtgaagcagatctacaagaccccacccatcaaggactttggcggcttcaacttcagccagatcctgcctgatccaagcaagccctccaagaggtcttttatcgaggacctgctgttcaacaaggtgaccctggccgatcttggcttcgtaaagcagtataaagattgcctgggagatcaagcagcccgcgacctgatctgtgcccagaagtacaatggcataatggtgctgcctccactgctgacagatgagatgatcgcccagtacacagcgagtctgctggccggcaccatcacagctggatggaccttcggcgcaggagccgccctgcagatcccttttgccatgcagatggcctataggttcaacggcatcggcgtgcaacagaatgtgctgtacgagaaccagaagattatcgccaatcagtttaacaatgccatcggcaatatccaggacggtctgtccactacagccagcgccctgtctaagctgcaggatgtggtgaatcagcaagcccaggccctgaatgaactggtgaagcagctgagctccaacttcggcgccatctctagcgtgataaatgacatctataaccggctggaccaacctgaggcacaagctcagatcgacaggctgatcacaggccgcctgcagagcctgcagacctacgtgacacagcagctgatcagggcaactgagatcagagcctccgcccaactggccgccgaaaagatgagcgagtgcgtgaaaggacagtccaataggtacgggttttgtggcaatggctatcacctgatgtctttcccacagagcgcccctcacggcgtggtgtttctgcacgtgacctacgtgccaactcagtttaagaacttcaccacagcaccagggatctgccacgatggaaaggcatattttcctagggagggcgtgttcgtgtctaacggcacctcatggtatattacacagcgcaatttctacgagccacgacccatcaccacagacaatacattcgtgagcggcaactgtgatgtggtgatcggcatcgtgaacaataccgtgtatgatccactgcagcccgagctggactcctttaaggaggagctggataagtacttcaagaatcacacctctcccgacgtggatctgggcgacatctccggcatcaatgcctctgtggtgaacatccagaaggagatcgaccggctgaacgaggtggccaagaatctgaacgagagcctgatcgatctgcaggagctgggcaagtatgagcagtacatcaagggctctggcagagagaacctgtatttccagggaggaggaggcagcggatacatccctgaggcaccaagggacggacaggcctacgtgcgcaaggatggcgagtgggtgctgctgtccacctttctgggccatcatcaccaccaccaccaccactga

SEQ ID NO: 1762 - DNA, 3846 bp, Artificial Sequence
  Description of Artificial Sequence: Synthetic polynucleotide
atgggcatcctgccaagcccaggaatgcccgccctgctgtctctggtgagcctgctgtccgtgctgctgatgggatgcgtggcagagacaggcacacagtgcgtgaacctgaccacaaggacccagctgccccctgcctataccaattctttcacacggggcgtgtactatcccgacaaggtgtttagaagctccgtgctgcactccacacaggatctgtttctgcctttcttttctaacgtgacctggttccacgccatccacgtgtccggcaccaatggcacaaagcggttcgacaatcccgtgctgccttttaacgatggcgtgtacttcgccagcaccgagaagtccaacatcatcagaggctggatctttggcaccacactggactctaagacacagagcctgctgatcgtgaacaatgccaccaacgtggtgatcaaggtgtgcgagttccagttttgtaatgatccattcctgggcgtgtactatcacaagaacaataagtcctggatggagtctgagtttcgcgtgtattctagcgccaacaattgcacatttgagtacgtgagccagcccttcctgatggacctggagggcaagcagggcaatttcaagcaactgagggagttcgtgtttaagaatatcgatggctacttcaagatctacagcaagcacaccccaatcaacctggtgcgcgacctgccacagggattctccgccctggagccactggtggatctgcccatcggcatcaacatcacccggtttcagacactgctggccctgcacagatcctacctgacaccaggcgactcctctagcggatggaccgcaggagctgccgcctactatgtgggctatctgcagccccggaccttcctgctgaagtacaacgagaatggcaccatcacagacgcagtggattgcgccctggaccccctgtctgagacaaagtgtacactgaagagctttaccgtggagaagggcatctatcagacaagcaatttcagggtgcagcctaccgagtccatcgtgcgctttcccaatatcacaaacctgtgcccttttggcgaggtgttcaacgccaccagattcgccagcgtgtacgcctggaatcggaagagaatctccaactgcgtggccgactattctgtgctgtacaactccgcctctttcagcacctttaagtgctatggcgtgtctcccacaaagctgaatgatctgtgctttaccaacgtgtacgccgatagcttcgtgatcaggggagacgaagtgagacagatcgcaccaggacagacaggaaagatcgcagactacaattataagctgcctgacgatttcaccggctgcgtgatcgcctggaactccaacaatctggattctaaagtgggcggcaactacaattatctgtacaggctgtttcgcaagtccaatctgaagccattcgagcgggacatctccacagagatctaccaggccggctctaccccctgcaatggcgtggagggctttaactgttatttccctctgcagtcttacggcttccagccaacaaacggcgtgggctatcagccctacagagtggtggtgctgtcctttgagctgctgcacgcaccagcaacagtgtgcggcccaaagaagtctaccaatctggtgaagaacaagtgcgtgaacttcaacttcaacggactgaccggcacaggcgtgctgaccgagagcaataagaagttcctgccttttcagcagttcggcagggacatcgcagataccacagacgccgtgcgcgaccctcagaccctggagatcctggacatcacaccatgcagcttcggcggcgtgtccgtgatcacaccaggcaccaatacatccaaccaggtggccgtgctgtatcaggacgtgaattgtaccgaggtgcccgtggcaatccacgcagatcagctgacccctacatggcgggtgtactctaccggcagcaacgtgttccagacaagagccggatgcctgatcggagcagagcacgtgaacaatagctatgagtgcgacatccctatcggcgccggcatctgtgccagctaccagacccagacaaactccccatctggagcaggctccgtggccagccagtccatcatcgcctataccatgagcctgggcgccgagaacagcgtggcctactccaacaattctatcgccatccctaccaacttcacaatcagcgtgaccacagagatcctgccagtgtctatgaccaagacaagcgtggactgcacaatgtatatctgtggcgatagcaccgagtgctccaacctgctgctgcagtacggctccttttgtacccagctgaatagagccctgacaggcatcgccgtggagcaggataagaacacacaggaggtgttcgcccaggtgaagcagatctacaagaccccacccatcaaggactttggcggcttcaacttcagccagatcctgcctgatccaagcaagccctccaagaggtcttttatcgaggacctgctgttcaacaaggtgaccctggccgatgccggcttcatcaagcagtatggagattgcctgggagacatcgcagcccgcgacctgatctgtgcccagaagtttaatggcctgaccgtgctgcctccactgctgacagatgagatgatcgcccagtacacatctgccctgctggccggcaccatcacaagcggatggaccttcggcgcaggagccgccctgcagatcccttttgccatgcagatggcctataggttcaacggcatcggcgtgacccagaatgtgctgtacgagaaccagaagctgatcgccaatcagtttaacagcgccatcggcaagatccaggactctctgtcctctacagccagcgccctgggcaagctgcaggatgtggtgaatcagaacgcccaggccctgaataccctggtgaagcagctgagctccaacttcggcgccatctctagcgtgctgaatgacatcctgagccggctggacccccctgaggcagaggtgcagatcgacaggctgatcacaggccgcctgcagagcctgcagacctacgtgacacagcagctgatcagggcagcagagatcagagcctccgccaatctggccgccaccaagatgagcgagtgcgtgctgggacagtccaagagggtggacttttgtggcaagggctatcacctgatgtctttcccacagagcgcccctcacggcgtggtgtttctgcacgtgacctacgtgccagcccaggagaagaacttcaccacagcaccagccatctgccacgatggaaaggcacactttcctagggagggcgtgttcgtgtctaacggcacccactggtttgtgacacagcgcaatttctacgagccacagatcatcaccacagacaatacattcgtgagcggcaactgtgatgtggtgatcggcatcgtgaacaataccgtgtatgatccactgcagcccgagctggactcctttaaggaggagctggataagtacttcaagaatcacacctctcccgacgtggatctgggcgacatctccggcatcaatgcctctgtggtgaacatccagaaggagatcgaccggctgaacgaggtggccaagaatctgaacgagagcctgatcgatctgcaggagctgggcaagtatgagcagtacatcaagggctctggcagagagaacctgtatttccagggaggaggaggcagcggatacatccctgaggcaccaagggacggacaggcctacgtgcgcaaggatggcgagtgggtgctgctgtccacctttctgggccatcatcaccaccaccaccaccactga

SEQ ID NO: 1763 - DNA, 3846 bp, Artificial Sequence
  Description of Artificial Sequence: Synthetic polynucleotide
atgggcatcctgccaagcccaggaatgcccgccctgctgtctctggtgagcctgctgtccgtgctgctgatgggatgcgtggcagagacaggcacacagtgcgtgaacctgaccacaaggacccagctgccccctgcctataccaattctttcacacggggcgtgtactatcccgacaaggtgtttagaagctccgtgctgcactccacacaggatctgtttctgcctttcttttctaacgtgacctggttccacgccatccacgtgtccggcaccaatggcacaaagcggttcgacaatcccgtgctgccttttaacgatggcgtgtacttcgccagcaccgagaagtccaacatcatcagaggctggatctttggcaccacactggactctaagacacagagcctgctgatcgtgaacaatgccaccaacgtggtgatcaaggtgtgcgagttccagttttgtaatgatccattcctgggcgtgtactatcacaagaacaataagtcctggatggagtctgagtttcgcgtgtattctagcgccaacaattgcacatttgagtacgtgagccagcccttcctgatggacctggagggcaagcagggcaatttcaagaacctgagggagttcgtgtttaagaatatcgatggctacttcaagatctacagcaagcacaccccaatcaacctggtgcgcgacctgccacagggattctccgccctggagccactggtggatctgcccatcggcatcaacatcacccggtttcagacactgctggccctgcacagatcctacctgacaccaggcgactcctctagcggatggaccgcaggagctgccgcctactatgtgggctatctgcagccccggaccttcctgctgaagtacaacgagaatggcaccatcacagacgcagtggattgcgccctggaccccctgtctgagacaaagtgtacactgaagagctttaccgtggagaagggcatctatcagacaagcaatttcagggtgcagcctaccgagtccatcgtgcgctttcccaatatcacaaacctgtgcccttttggcgaggtgttcaacgccaccagattcgccagcgtgtacgcctggaatcggaagagaatctccaactgcgtggccgactattctgtgctgtacaactccgcctctttcagcacctttaagtgctatggcgtgtctcccacaaagctgaatgatctgtgctttaccaacgtgtacgccgatagcttcgtgatcaggggagacgaagtgagacagatcgcaccaggacagacaggaaagatcgcagactacaattataagctgcctgacgatttcaccggctgcgtgatcgcctggaactccaacaatctggattctaaagtgggcggcaactacaattatctgtacaggctgtttcgcaagtccaatctgaagccattcgagcgggacatctccacagagatctaccaggccggctctaccccctgcaatggcgtggagggctttaactgttatttccctctgcagtcttacggcttccagccaacaaacggcgtgggctatcagccctacagagtggtggtgctgtcctttgagctgctgcacgcaccagcaacagtgtgcggcccaaagaagtctaccaatctggtgaagaacaagtgcgtgaacttcaacttcaacggactgaccggcacaggcgtgctgaccgagagcaataagaagttcctgccttttcagcagttcggcagggacatcgcagataccacagacgccgtgcgcgaccctcagaccctggagatcctggacatcacaccatgcagcttcggcggcgtgtccgtgatcacaccaggcaccaatacatccaaccaggtggccgtgctgtatcaggacgtgaattgtaccgaggtgcccgtggcaatccacgcagatcagctgacccctacatggcgggtgtactctaccggcagcaacgtgttccagacaagagccggatgcctgatcggagcagagcacgtgaacaatagctatgagtgcgacatccctatcggcgccggcatctgtgccagctaccagacccagacaaactccccatctggagcaggctccgtggccagccagtccatcatcgcctataccatgagcctgggcgccgagaacagcgtggcctactccaacaattctatcgccatccctaccaacttcacaatcagcgtgaccacagagatcctgccagtgtctatgaccaagacaagcgtggactgcacaatgtatatctgtggcgatagcaccgagtgctccaacctgctgctgcagtacggctccttttgtacccagctgaatagagccctgacaggcatcgccgtggagcaggataagaacacacaggaggtgttcgcccaggtgaagcagatctacaagaccccacccatcaaggactttggcggcttcaacttcagccagatcctgcctgatccaagcaagccctccaagaggtcttttatcgaggacctgctgttcaacaaggtgaccctggccgatgccggcttcatcaagcagtatggagattgcctgggagacatcgcagcccgcgacctgatctgtgcccagaagtttaatggcctgaccgtgctgcctccactgctgacagatgagatgatcgcccagtacacatctgccctgctggccggcaccatcacaagcggatggaccttcggcgcaggagccgccctgcagatcccttttgccatgcagatggcctataggttcaacggcatcggcgtgacccagaatgtgctgtacgagaaccagaagctgatcgccaatcagtttaacagcgccatcggcaagatccagaaatctctgtcctctacagccagcgccctgggcaagctgcaggatgtggtgaatcagaacgcccaggccctgaataccctggtgaagcagctgagctccaacttcggcgccatctctagcgtgctgaatgacatcctgagccggctggacccccctgaggcagaggtgcagatcgacaggctgatcacaggccgcctgcagagcctgcagacctacgtgacacagcagctgatcagggcagcagagatcagagcctccgccaatctggccgccaccaagatgagcgagtgcgtgctgggacagtccaagagggtggacttttgtggcaagggctatcacctgatgtctttcccacagagcgcccctcacggcgtggtgtttctgcacgtgacctacgtgccagcccaggagaagaacttcaccacagcaccagccatctgccacgatggaaaggcacactttcctagggagggcgtgttcgtgtctaacggcacccactggtttgtgacacagcgcaatttctacgagccacagatcatcaccacagacaatacattcgtgagcggcaactgtgatgtggtgatcggcatcgtgaacaataccgtgtatgatccactgcagcccgagctggactcctttaaggaggagctggataagtacttcaagaatcacacctctcccgacgtggatctgggcgacatctccggcatcaatgcctctgtggtgaacatccagaaggagatcgaccggctgaacgaggtggccaagaatctgaacgagagcctgatcgatctgcaggagctgggcaagtatgagcagtacatcaagggctctggcagagagaacctgtatttccagggaggaggaggcagcggatacatccctgaggcaccaagggacggacaggcctacgtgcgcaaggatggcgagtgggtgctgctgtccacctttctgggccatcatcaccaccaccaccaccactga

SEQ ID NO: 1764 - DNA, 3846 bp, Artificial Sequence
  Description of Artificial Sequence: Synthetic polynucleotide
atgggcatcctgccaagcccaggaatgcccgccctgctgtctctggtgagcctgctgtccgtgctgctgatgggatgcgtggcagagacaggcacacagtgcgtgaacctgaccacaaggacccagctgccccctgcctataccaattctttcacacggggcgtgtactatcccgacaaggtgtttagaagctccgtgctgcactccacacaggatctgtttctgcctttcttttctaacgtgacctggttccacgccatccacgtgtccggcaccaatggcacaaagcggttcgacaatcccgtgctgccttttaacgatggcgtgtacttcgccagcaccgagaagtccaacatcatcagaggctggatctttggcaccacactggactctaagacacagagcctgctgatcgtgaacaatgccaccaacgtggtgatcaaggtgtgcgagttccagttttgtaatgatccattcctgggcgtgtactatcacaagaacaataagtcctggatggagtctgagtttcgcgtgtattctagcgccaacaattgcacatttgagtacgtgagccagcccttcctgatggacctggagggcaagcagggcaatttcaagaacctgagggagttcgtgtttaagaatatcgatggctacttcaagatctacagcaagcacaccccaatcaacctggtgcgcgacctgccacagggattctccgccctggagccactggtggatctgcccatcggcatcaacatcacccggtttcagacactgctggccctgcacagatcctacctgacaccaggcgactcctctagcggatggaccgcaggagctgccgcctactatgtgggctatctgcagccccggaccttcctgctgaagtacaacgagaatggcaccatcacagacgcagtggattgcgccctggaccccctgtctgagacaaagtgtacactgaagagctttaccgtggagaagggcatctatcagacaagcaatttcagggtgcagcctaccgagtccatcgtgcgctttcccaatatcacaaacctgtgcccttttggcgaggtgttcaacgccaccagattcgccagcgtgtacgcctggaatcggaagagaatctccaactgcgtggccgactattctgtgctgtacaactccgcctctttcagcacctttaagtgctatggcgtgtctcccacaaagctgaatgatctgtgctttaccaacgtgtacgccgatagcttcgtgatcaggggagacgaagtgagacagatcgcaccaggacagacaggaaagatcgcagactacaattataagctgcctgacgatttcaccggctgcgtgatcgcctggaactccaacaatctggattctaaagtgggcggcaactacaattatctgtacaggctgtttcgcaagtccaatctgaagccattcgagcgggacatctccacagagatctaccaggccggctctaccccctgcaatggcgtggagggctttaactgttatttccctctgcagtcttacggcttccagccaacaaacggcgtgggctatcagccctacagagtggtggtgctgtcctttgagctgctgcacgcaccagcaacagtgtgcggcccaaagaagtctaccaatctggtgaagaacaagtgcgtgaacttcaacttcaacggactgaccggcacaggcgtgctgaccgagagcaataagaagttcctgccttttcagcagttcggcagggacatcgcagataccacagacgccgtgcgcgaccctcagaccctggagatcctggacatcacaccatgcagcttcggcggcgtgtccgtgatcacaccaggcaccaatacatccaaccaggtggccgtgctgtatcaggacgtgaattgtaccgaggtgcccgtggcaatccacgcagatcagctgacccctacatggcgggtgtactctaccggcagcaacgtgttccagacaagagccggatgcctgatcggagcagagcacgtgaacaatagctatgagtgcgacatccctatcggcgccggcatctgtgccagctaccagacccagacaaactccccatctggagcaggctccgtggccagccagtccatcatcgcctataccatgagcctgggcgccgagaacagcgtggcctactccaacaattctatcgccatccctaccaacttcacaatcagcgtgaccacagagatcctgccagtgtctatgaccaagacaagcgtggactgcacaatgtatatctgtggcgatagcaccgagtgctccaacctgctgctgcagtacggctccttttgtacccagctgaatagagccctgacaggcatcgccgtggagcaggataagaacacattggaggtgttcgcccaggtgaagcagatctacaagaccccacccatcaaggactttggcggcttcaacttcagccagatcctgcctgatccaagcaagccctccaagaggtcttttatcgaggacctgctgttcaacaaggtgaccctggccgatgccggcttcatcaagcagtatggagattgcctgggagacatcgcagcccgcgacctgatctgtgcccagaagtttaatggcctgaccgtgctgcctccactgctgacagatgagatgatcgcccagtacacatctgccctgctggccggcaccatcacaagcggatggaccttcggcgcaggagccgccctgcagatcccttttgccatgcagatggcctataggttcaacggcatcggcgtgacccagaatgtgctgtacgagaaccagaagctgatcgccaatcagtttaacagcgccatcggcaagatccaggactctctgtcctctacagccagcgccctgggcaagctgcaggatgtggtgaatcagaacgcccaggccctgaataccctggtgaagcagctgagctccaacttcggcgccatctctagcgtgctgaatgacatcctgagccggctggacccccctgaggcagaggtgcagatcgacaggctgatcacaggccgcctgcagagcctgcagacctacgtgacacagcagctgatcagggcagcagagatcagagcctccgccaatctggccgccaccaagatgagcgagtgcgtgctgggacagtccaagagggtggacttttgtggcaagggctatcacctgatgtctttcccacagagcgcccctcacggcgtggtgtttctgcacgtgacctacgtgccagcccaggagaagaacttcaccacagcaccagccatctgccacgatggaaaggcacactttcctagggagggcgtgttcgtgtctaacggcacccactggtttgtgacacagcgcaatttctacgagccacagatcatcaccacagacaatacattcgtgagcggcaactgtgatgtggtgatcggcatcgtgaacaataccgtgtatgatccactgcagcccgagctggactcctttaaggaggagctggataagtacttcaagaatcacacctctcccgacgtggatctgggcgacatctccggcatcaatgcctctgtggtgaacatccagaaggagatcgaccggctgaacgaggtggccaagaatctgaacgagagcctgatcgatctgcaggagctgggcaagtatgagcagtacatcaagggctctggcagagagaacctgtatttccagggaggaggaggcagcggatacatccctgaggcaccaagggacggacaggcctacgtgcgcaaggatggcgagtgggtgctgctgtccacctttctgggccatcatcaccaccaccaccaccactga

SEQ ID NO: 1765 - DNA, 3846 bp, Artificial Sequence
  Description of Artificial Sequence: Synthetic polynucleotide
atgggcatcctgccaagcccaggaatgcccgccctgctgtctctggtgagcctgctgtccgtgctgctgatgggatgcgtggcagagacaggcacacagtgcgtgaacctgaccacaaggacccagctgccccctgcctataccaattctttcacacggggcgtgtactatcccgacaaggtgtttagaagctccgtgctgcactccacacaggatctgtttctgcctttcttttctaacgtgacctggttccacgccatccacgtgtccggcaccaatggcacaaagcggttcgacaatcccgtgctgccttttaacgatggcgtgtacttcgccagcaccgagaagtccaacatcatcagaggctggatctttggcaccacactggactctaagacacagagcctgctgatcgtgaacaatgccaccaacgtggtgatcaaggtgtgcgagttccagttttgtaatgatccattcctgggcgtgtactatcacaagaacaataagtcctggatggagtctgagtttcgcgtgtattctagcgccaacaattgcacatttgagtacgtgagccagcccttcctgatggacctggagggcaagcagggcaatttcaagaacctgagggagttcgtgtttaagaatatcgatggctacttcaagatctacagcaagcacaccccaatcaacctggtgcgcgacctgccacagggattctccgccctggagccactggtggatctgcccatcggcatcaacatcacccggtttcagacactgctggccctgcacagatcctacctgacaccaggcgactcctctagcggatggaccgcaggagctgccgcctactgggtgggctatctgcagccccggaccttcctgctgaagtacaacgagaatggcaccatcacagacgcagtggattgcgccctggaccccctgtctgagacaaagtgtacactgaagagctttaccgtggagaagggcatctatcagacaagcaatttcagggtgcagcctaccgagtccatcgtgcgctttcccaatatcacaaacctgtgcccttttggcgaggtgttcaacgccaccagattcgccagcgtgtacgcctggaatcggaagagaatctccaactgcgtggccgactattctgtgctgtacaactccgcctctttcagcacctttaagtgctatggcgtgtctcccacaaagctgaatgatctgtgctttaccaacgtgtacgccgatagcttcgtgatcaggggagacgaagtgagacagatcgcaccaggacagacaggaaagatcgcagactacaattataagctgcctgacgatttcaccggctgcgtgatcgcctggaactccaacaatctggattctaaagtgggcggcaactacaattatctgtacaggctgtttcgcaagtccaatctgaagccattcgagcgggacatctccacagagatctaccaggccggctctaccccctgcaatggcgtggagggctttaactgttatttccctctgcagtcttacggcttccagccaacaaacggcgtgggctatcagccctacagagtggtggtgctgtcctttgagctgctgcacgcaccagcaacagtgtgcggcccaaagaagtctaccaatctggtgaagaacaagtgcgtgaacttcaacttcaacggactgaccggcacaggcgtgctgaccgagagcaataagaagttcctgccttttcagcagttcggcagggacatcgcagataccacagacgccgtgcgcgaccctcagaccctggagatcctggacatcacaccatgcagcttcggcggcgtgtccgtgatcacaccaggcaccaatacatccaaccaggtggccgtgctgtatcaggacgtgaattgtaccgaggtgcccgtggcaatccacgcagatcagctgacccctacatggcgggtgtactctaccggcagcaacgtgttccagacaagagccggatgcctgatcggagcagagcacgtgaacaatagctatgagtgcgacatccctatcggcgccggcatctgtgccagctaccagacccagacaaactccccatctggagcaggctccgtggccagccagtccatcatcgcctataccatgagcctgggcgccgagaacagcgtggcctactccaacaattctatcgccatccctaccaacttcacaatcagcgtgaccacagagatcctgccagtgtctatgaccaagacaagcgtggactgcacaatgtatatctgtggcgatagcaccgagtgctccaacctgctgctgcagtacggctccttttgtacccagctgaatagagccctgacaggcatcgccgtggagcaggataagaacacacaggaggtgttcgcccaggtgaagcagatctacaagaccccacccatcaaggactttggcggcttcaacttcagccagatcctgcctgatccaagcaagccctccaagaggtcttttatcgaggacctgctgttcaacaaggtgaccctggccgatgccggcttcatcaagcagtatggagattgcctgggagacatcgcagcccgcgacctgatctgtgcccagaagtttaatggcctgaccgtgctgcctccactgctgacagatgagatgatcgcccagtacacatctgccctgctggccggcaccatcacaagcggatggaccttcggcgcaggagccgccctgcagatcccttttgccatgcagatggcctataggttcaacggcatcggcgtgacccagaatgtgctgtacgagaaccagaagctgatcgccaatcagtttaacagcgccatcggcaagatccaggactctctgtcctctacagccagcgccctgggcaagctgcaggatgtggtgaatcagaacgcccaggccctgaataccctggtgaagcagctgagctccaacttcggcgccatctctagcgtgctgaatgacatcctgagccggctggacccccctgaggcagaggtgcagatcgacaggctgatcacaggccgcctgcagagcctgcagacctacgtgacacagcagctgatcagggcagcagagatcagagcctccgccaatctggccgccaccaagatgagcgagtgcgtgctgggacagtccaagagggtggacttttgtggcaagggctatcacctgatgtctttcccacagagcgcccctcacggcgtggtgtttctgcacgtgacctacgtgccagcccaggagaagaacttcaccacagcaccagccatctgccacgatggaaaggcacactttcctagggagggcgtgttcgtgtctaacggcacccactggtttgtgacacagcgcaatttctacgagccacagatcatcaccacagacaatacattcgtgagcggcaactgtgatgtggtgatcggcatcgtgaacaataccgtgtatgatccactgcagcccgagctggactcctttaaggaggagctggataagtacttcaagaatcacacctctcccgacgtggatctgggcgacatctccggcatcaatgcctctgtggtgaacatccagaaggagatcgaccggctgaacgaggtggccaagaatctgaacgagagcctgatcgatctgcaggagctgggcaagtatgagcagtacatcaagggctctggcagagagaacctgtatttccagggaggaggaggcagcggatacatccctgaggcaccaagggacggacaggcctacgtgcgcaaggatggcgagtgggtgctgctgtccacctttctgggccatcatcaccaccaccaccaccactga

SEQ ID NO: 1766 - DNA, 3846 bp, Artificial Sequence
  Description of Artificial Sequence: Synthetic polynucleotide
atgggcatcctgccaagcccaggaatgcccgccctgctgtctctggtgagcctgctgtccgtgctgctgatgggatgcgtggcagagacaggcacacagtgcgtgaacctgaccacaaggacccagctgccccctgcctataccaattctttcacacggggcgtgtactatcccgacaaggtgtttagaagctccgtgctgcactccacacaggatctgtttctgcctttcttttctaacgtgacctggttccacgccatccacgtgtccggcaccaatggcacaaagcggttcgacaatcccgtgctgccttttaacgatggcgtgtacttcgccagcaccgagaagtccaacatcatcagaggctggatctttggcaccacactggactctaagacacagagcctgctgatcgtgaacaatgccaccaacgtggtgatcaaggtgtgcgagttccagttttgtaatgatccattcctgggcgtgtactatcacaagaacaataagtcctggatggagtctgagtttcgcgtgtattctagcgccaacaattgcacatttgagtacgtgagccagcccttcctgatggacctggagggcaagcagggcaatttcaagaacctgagggagttcgtgtttaagaatatcgatggctacttcaagatctacagcaagcacaccccaatcaacctggtgcgcgacctgccacagggattctccgccctggagccactggtggatctgcccatcggcatcaacatcacccggtttcagacactgctggccctgcacagatcctacctgacaccaggcgactcctctagcggatggaccgcaggagctgccgcctactatgtgggctatctgcagccccggaccttcctgctgaagtacaacgagaatggcaccatcacagacgcagtggattgcgccctggaccccctgtctgagacaaagtgtacactgaagagctttaccgtggagaagggcatctatcagacaagcaatttcagggtgcagcctaccgagtccatcgtgcgctttcccaatatcacaaacctgtgcccttttggcgaggtgttcaacgccaccagattcgccagcgtgtacgcctggaatcggaagagaatctccaactgcgtggccgactattctgtgctgtacaactccgcctctttcagcacctttaagtgctatggcgtgtctcccacaaagctgaatgatctgtgctttaccaacgtgtacgccgatagcttcgtgatcaggggagacgaagtgagacagatcgcaccaggacagacaggaaagatcgcagactacaattataagctgcctgacgatttcaccggctgcgtgatcgcctggaactccaacaatctggattctaaagtgggcggcaactacaattatctgtacaggctgtttcgcaagtccaatctgaagccattcgagcgggacatctccacagagatctaccaggccggctctaccccctgcaatggcgtggagggctttaactgttatttccctctgcagtcttacggcttccagccaacaaacggcgtgggctatcagccctacagagtggtggtgctgtcctttgagctgctgcacgcaccagcaacagtgtgcggcccaaagaagtctaccaatctggtgaagaacaagtgcgtgaacttcaacttcaacggactgaccggcacaggcgtgctgaccgagagcaataagaagttcctgccttttcagcagttcggcagggacatcgcagataccacagacgccgtgcgcgaccctcagaccctggagatcctggacatcacaccatgcagcttcggcggcgtgtccgtgatcacaccaggcaccaatacatccaaccaggtggccgtgctgtatcaggacgtgaattgtaccgaggtgcccgtggcaatccacgcagatcagctgacccctacatggcgggtgtactctaccggcagcaacgtgttccagacaagagccggatgcctgatcggagcagagcacgtgaacaatagctatgagtgcgacatccctatcggcgccggcatctgtgccagctaccagacccagacaaactccccatctggagcaggctccgtggccagccagtccatcatcgcctataccatgagcctgggcgccgagaacagcgtggcctactccaacaattctatcgccatccctaccaacttcacaatcagcgtgaccacagagatcctgccagtgtctatgaccaagacaagcgtggactgcacaatgtatatctgtggcgatagcaccgagtgctccaacctgctgctgcagtacggctccttttgtacccagctgaatagagccctgacaggcatcgccgtggagcaggataagaacacacaggaggtgttcgcccaggtgaagcagatctacaagaccccacccatcaaggactttggcggcttcaacttcagccagatcctgcctgatccaagcaagccctccaagaggtcttttatcgaggacctgctgttcaacaaggtgaccctggccgatgccggcttcatcaagcagtatggagattgcctgggagacatcgcagcccgcgacctgatctgtgcccagaagtttaatggcctgaccgtgctgcctccactgctgacagatgagatgatcgcccagtacacatctgccctgctggccggcaccatcacaagcggatggaccttcggcgcaggagccgccctgcagatcccttttgccatgcagatggcctataggttcaacggcatcggcgtgacccagaatgtgctgtacgagaaccagaagctgatcgccaatcagtttaacagcgccatcaaaaagatccaggactctctgtcctctacagccagcgccctgggcaagctgcaggatgtggtgaatcagaacgcccaggccctgaataccctggtgaagcagctgagctccaacttcggcgccatctctagcgtgctgaatgacatcctgagccggctggacccccctgaggcagaggtgcagatcgacaggctgatcacaggccgcctgcagagcctgcagacctacgtgacacagcagctgatcagggcagcagagatcagagcctccgccaatctggccgccaccaagatgagcgagtgcgtgctgggacagtccaagagggtggacttttgtggcaagggctatcacctgatgtctttcccacagagcgcccctcacggcgtggtgtttctgcacgtgacctacgtgccagcccaggagaagaacttcaccacagcaccagccatctgccacgatggaaaggcacactttcctagggagggcgtgttcgtgtctaacggcacccactggtttgtgacacagcgcaatttctacgagccacagatcatcaccacagacaatacattcgtgagcggcaactgtgatgtggtgatcggcatcgtgaacaataccgtgtatgatccactgcagcccgagctggactcctttaaggaggagctggataagtacttcaagaatcacacctctcccgacgtggatctgggcgacatctccggcatcaatgcctctgtggtgaacatccagaaggagatcgaccggctgaacgaggtggccaagaatctgaacgagagcctgatcgatctgcaggagctgggcaagtatgagcagtacatcaagggctctggcagagagaacctgtatttccagggaggaggaggcagcggatacatccctgaggcaccaagggacggacaggcctacgtgcgcaaggatggcgagtgggtgctgctgtccacctttctgggccatcatcaccaccaccaccaccactga

SEQ ID NO: 1767 - DNA, 3846 bp, Artificial Sequence
  Description of Artificial Sequence: Synthetic polynucleotide
atgggcatcctgccaagcccaggaatgcccgccctgctgtctctggtgagcctgctgtccgtgctgctgatgggatgcgtggcagagacaggcacacagtgcgtgaacctgaccacaaggacccagctgccccctgcctataccaattctttcacacggggcgtgtactatcccgacaaggtgtttagaagctccgtgctgcactccacacaggatctgtttctgcctttcttttctaacgtgacctggttccacgccatccacgtgtccggcaccaatggcacaaagcggttcgacaatcccgtgctgccttttaacgatggcgtgtacttcgccagcaccgagaagtccaacatcatcagaggctggatctttggcaccacactggactctaagacacagagcctgctgatcgtgaacaatgccaccaacgtggtgatcaaggtgtgcgagttccagttttgtaatgatccattcctgggcgtgtactatcacaagaacaataagtcctggatggagtctgagtttcgcgtgtattctagcgccaacaattgcacatttgagtacgtgagccagcccttcctgatggacctggagggcaagcagggcaatttcaagactctgagggagttcgtgtttaagaatatcgatggctacttcaagatctacagcaagcacaccccaatcaacctggtgcgcgacctgccacagggattctccgccctggagccactggtggatctgcccatcggcatcaacatcacccggtttcagacactgctggccctgcacagatcctacctgacaccaggcgactcctctagcggatggaccgcaggagctgccgcctactatgtgggctatctgcagccccggaccttcctgctgaagtacaacgagaatggcaccatcacagacgcagtggattgcgccctggaccccctgtctgagacaaagtgtacactgaagagctttaccgtggagaagggcatctatcagacaagcaatttcagggtgcagcctaccgagtccatcgtgcgctttcccaatatcacaaacctgtgcccttttggcgaggtgttcaacgccaccagattcgccagcgtgtacgcctggaatcggaagagaatctccaactgcgtggccgactattctgtgctgtacaactccgcctctttcagcacctttaagtgctatggcgtgtctcccacaaagctgaatgatctgtgctttaccaacgtgtacgccgatagcttcgtgatcaggggagacgaagtgagacagatcgcaccaggacagacaggaaagatcgcagactacaattataagctgcctgacgatttcaccggctgcgtgatcgcctggaactccaacaatctggattctaaagtgggcggcaactacaattatctgtacaggctgtttcgcaagtccaatctgaagccattcgagcgggacatctccacagagatctaccaggccggctctaccccctgcaatggcgtggagggctttaactgttatttccctctgcagtcttacggcttccagccaacaaacggcgtgggctatcagccctacagagtggtggtgctgtcctttgagctgctgcacgcaccagcaacagtgtgcggcccaaagaagtctaccaatctggtgaagaacaagtgcgtgaacttcaacttcaacggactgaccggcacaggcgtgctgaccgagagcaataagaagttcctgccttttcagcagttcggcagggacatcgcagataccacagacgccgtgcgcgaccctcagaccctggagatcctggacatcacaccatgcagcttcggcggcgtgtccgtgatcacaccaggcaccaatacatccaaccaggtggccgtgctgtatcaggacgtgaattgtaccgaggtgcccgtggcaatccacgcagatcagctgacccctacatggcgggtgtactctaccggcagcaacgtgttccagacaagagccggatgcctgatcggagcagagcacgtgaacaatagctatgagtgcgacatccctatcggcgccggcatctgtgccagctaccagacccagacaaactccccatctggagcaggctccgtggccagccagtccatcatcgcctataccatgagcctgggcgccgagaacagcgtggcctactccaacaattctatcgccatccctaccaacttcacaatcagcgtgaccacagagatcctgccagtgtctatgaccaagacaagcgtggactgcacaatgtatatctgtggcgatagcaccgagtgctccaacctgctgctgcagtacggctccttttgtacccagctgaatagagccctgacaggcatcgccgtggagcaggataagaacacacaggaggtgttcgcccaggtgaagcagatctacaagaccccacccatcaaggactttggcggcttcaacttcagccagatcctgcctgatccaagcaagccctccaagaggtcttttatcgaggacctgctgttcaacaaggtgaccctggccgatgccggcttcatcaagcagtatggagattgcctgggagacatcgcagcccgcgacctgatctgtgcccagaagtttaatggcctgaccgtgctgcctccactgctgacagatgagatgatcgcccagtacacatctgccctgctggccggcaccatcacaagcggatggaccttcggcgcaggagccgccctgcagatcccttttgccatgcagatggcctataggttcaacggcatcggcgtgacccagaatgtgctgtacgagaaccagaagctgatcgccaatcagtttaacagcgccatcggcaagatccaggactctctgtcctctacagccagcgccctgggcaagctgcaggatgtggtgaatcagaacgcccaggccctgaataccctggtgaagcagctgagctccaacttcggcgccatctctagcgtgctgaatgacatcctgagccggctggacccccctgaggcagaggtgcagatcgacaggctgatcacaggccgcctgcagagcctgcagacctacgtgacacagcagctgatcagggcagcagagatcagagcctccgccaatctggccgccaccaagatgagcgagtgcgtgctgggacagtccaagagggtggacttttgtggcaagggctatcacctgatgtctttcccacagagcgcccctcacggcgtggtgtttctgcacgtgacctacgtgccagcccaggagaagaacttcaccacagcaccagccatctgccacgatggaaaggcacactttcctagggagggcgtgttcgtgtctaacggcacccactggtttgtgacacagcgcaatttctacgagccacagatcatcaccacagacaatacattcgtgagcggcaactgtgatgtggtgatcggcatcgtgaacaataccgtgtatgatccactgcagcccgagctggactcctttaaggaggagctggataagtacttcaagaatcacacctctcccgacgtggatctgggcgacatctccggcatcaatgcctctgtggtgaacatccagaaggagatcgaccggctgaacgaggtggccaagaatctgaacgagagcctgatcgatctgcaggagctgggcaagtatgagcagtacatcaagggctctggcagagagaacctgtatttccagggaggaggaggcagcggatacatccctgaggcaccaagggacggacaggcctacgtgcgcaaggatggcgagtgggtgctgctgtccacctttctgggccatcatcaccaccaccaccaccactga

SEQ ID NO: 1768 - DNA, 3846 bp, Artificial Sequence
  Description of Artificial Sequence: Synthetic polynucleotide
atgggcatcctgccaagcccaggaatgcccgccctgctgtctctggtgagcctgctgtccgtgctgctgatgggatgcgtggcagagacaggcacacagtgcgtgaacctgaccacaaggacccagctgccccctgcctataccaattctttcacacggggcgtgtactatcccgacaaggtgtttagaagctccgtgctgcactccacacaggatctgtttctgcctttcttttctaacgtgacctggttccacgccatccacgtgtccggcaccaatggcacaaagcggttcgacaatcccgtgctgccttttaacgatggcgtgtacttcgccagcaccgagaagtccaacatcatcagaggctggatctttggcaccacactggactctaagacacagagcctgctgatcgtgaacaatgccaccaacgtggtgatcaaggtgtgcgagttccagttttgtaatgatccattcctgggcgtgtactatcacaagaacaataagtcctggatggagtctgagtttcgcgtgtattctagcgccaacaattgcacatttgagtacgtgagccagcccttcctgatggacctggagggcaagcagggcaatttcaagaacctgagggagttcgtgtttaagaatatcgatggctacttcaagatctacagcaagcacaccccaatcaacctggtgcgcgacctgccacagggattctccgccctggagccactggtggatctgcccatcggcatcaacatcacccggtttcagacactgctggccctgcacagatcctacctgacaccaggcgactcctctagcggatggaccgcaggagctgccgcctactatgtgggctatctgcagccccggaccttcctgctgaagtacaacgagaatggcaccatcacagacgcagtggattgcgccctggaccccctgtctgagacaaagtgtacactgaagagctttaccgtggagaagggcatctatcagacaagcaatttcagggtgcagcctaccgagtccatcgtgcgctttcccaatatcacaaacctgtgcccttttggcgaggtgttcaacgccaccagattcgccagcgtgtacgcctggaatcggaagagaatctccaactgcgtggccgactattctgtgctgtacaactccgcctctttcagcacctttaagtgctatggcgtgtctcccacaaagctgaatgatctgtgctttaccaacgtgtacgccgatagcttcgtgatcaggggagacgaagtgagacagatcgcaccaggacagacaggaaagatcgcagactacaattataagctgcctgacgatttcaccggctgcgtgatcgcctggaactccaacaatctggattctaaagtgggcggcaactacaattatctgtacaggctgtttcgcaagtccaatctgaagccattcgagcgggacatctccacagagatctaccaggccggctctaccccctgcaatggcgtggagggctttaactgttatttccctctgcagtcttacggcttccagccaacaaacggcgtgggctatcagccctacagagtggtggtgctgtcctttgagctgctgcacgcaccagcaacagtgtgcggcccaaagaagtctaccaatctggtgaagaacaagtgcgtgaacttcaacttcaacggactgaccggcacaggcgtgctgaccgagagcaataagaagttcctgccttttcagcagttcggcagggacatcgcagataccacagacgccgtgcgcgaccctcagaccctggagatcctggacatccgaccatgcagcttcggcggcgtgtccgtgatcacaccaggcaccaatacatccaaccaggtggccgtgctgtatcaggacgtgaattgtaccgaggtgcccgtggcaatccacgcagatcagctgacccctacatggcgggtgtactctaccggcagcaacgtgttccagacaagagccggatgcctgatcggagcagagcacgtgaacaatagctatgagtgcgacatccctatcggcgccggcatctgtgccagctaccagacccagacaaactccccatctggagcaggctccgtggccagccagtccatcatcgcctataccatgagcctgggcgccgagaacagcgtggcctactccaacaattctatcgccatccctaccaacttcacaatcagcgtgaccacagagatcctgccagtgtctatgaccaagacaagcgtggactgcacaatgtatatctgtggcgatagcaccgagtgctccaacctgctgctgcagtacggctccttttgtacccagctgaatagagccctgacaggcatcgccgtggagcaggataagaacacacaggaggtgttcgcccaggtgaagcagatctacaagaccccacccatcaaggactttggcggcttcaacttcagccagatcctgcctgatccaagcaagccctccaagaggtcttttatcgaggacctgctgttcaacaaggtgaccctggccgatgccggcttcatcaagcagtatggagattgcctgggagacatcgcagcccgcgacctgatctgtgcccagaagtttaatggcctgaccgtgctgcctccactgctgacagatgagatgatcgcccagtacacatctgccctgctggccggcaccatcacaagcggatggaccttcggcgcaggagccgccctgcagatcccttttgccatgcagatggcctataggttcaacggcatcggcgtgacccagaatgtgctgtacgagaaccagaagctgatcgccaatcagtttaacagcgccatcggcaagatccaggactctctgtcctctacagccagcgccctgggcaagctgcaggatgtggtgaatcagaacgcccaggccctgaataccctggtgaagcagctgagctccaacttcggcgccatctctagcgtgctgaatgacatcctgagccggctggacccccctgaggcagaggtgcagatcgacaggctgatcacaggccgcctgcagagcctgcagacctacgtgacacagcagctgatcagggcagcagagatcagagcctccgccaatctggccgccaccaagatgagcgagtgcgtgctgggacagtccaagagggtggacttttgtggcaagggctatcacctgatgtctttcccacagagcgcccctcacggcgtggtgtttctgcacgtgacctacgtgccagcccaggagaagaacttcaccacagcaccagccatctgccacgatggaaaggcacactttcctagggagggcgtgttcgtgtctaacggcacccactggtttgtgacacagcgcaatttctacgagccacagatcatcaccacagacaatacattcgtgagcggcaactgtgatgtggtgatcggcatcgtgaacaataccgtgtatgatccactgcagcccgagctggactcctttaaggaggagctggataagtacttcaagaatcacacctctcccgacgtggatctgggcgacatctccggcatcaatgcctctgtggtgaacatccagaaggagatcgaccggctgaacgaggtggccaagaatctgaacgagagcctgatcgatctgcaggagctgggcaagtatgagcagtacatcaagggctctggcagagagaacctgtatttccagggaggaggaggcagcggatacatccctgaggcaccaagggacggacaggcctacgtgcgcaaggatggcgagtgggtgctgctgtccacctttctgggccatcatcaccaccaccaccaccactga

SEQ ID NO: 1769 - DNA, 3846 bp, Artificial Sequence
  Description of Artificial Sequence: Synthetic polynucleotide
atgggcatcctgccaagcccaggaatgcccgccctgctgtctctggtgagcctgctgtccgtgctgctgatgggatgcgtggcagagacaggcacacagtgcgtgaacctgaccacaaggacccagctgccccctgcctataccaattctttcacacggggcgtgtactatcccgacaaggtgtttagaagctccgtgctgcactccacacaggatctgtttctgcctttcttttctaacgtgacctggttccacgccatccacgtgtccggcaccaatggcacaaagcggttcgacaatcccgtgctgccttttaacgatggcgtgtacttcgccagcaccgagaagtccaacatcatcagaggctggatctttggcaccacactggactctaagacacagagcctgctgatcgtgaacaatgccaccaacgtggtgatcaaggtgtgcgagttccagttttgtaatgatccattcctgggcgtgtactatcacaagaacaataagtcctggatggagtctgagtttcgcgtgtattctagcgccaacaattgcacatttgagtacgtgagccagcccttcctgatggacctggagggcaagcagggcaatttcaagaacctgagggagttcgtgtttaagaatatcgatggctacttcaagatctacagcaagcacaccccaatcaacctggtgcgcgacctgccacagggattctccgccctggagccactggtggatctgcccatcggcatcaacatcacccggtttcagacactgctggccctgcacagatcctacctgacaccaggcgactcctctagcggatggaccgcaggagctgccgcctactatgtgggctatctgcagccccggaccttcctgctgaagtacaacgagaatggcaccatcacagacgcagtggattgcgccctggaccccctgtctgagacaaagtgtacactgaagagctttaccgtggagaagggcatctatcagacaagcaatttcagggtgcagcctaccgagtccatcgtgcgctttcccaatatcacaaacctgtgcccttttggcgaggtgttcaacgccaccagattcgccagcgtgtacgcctggaatcggaagagaatctccaactgcgtggccgactattctgtgctgtacaactccgcctctttcagcacctttaagtgctatggcgtgtctcccacaaagctgaatgatctgtgctttaccaacgtgtacgccgatagcttcgtgatcaggggagacgaagtgagacagatcgcaccaggacagacaggaaagatcgcagactacaattataagctgcctgacgatttcaccggctgcgtgatcgcctggaactccaacaatctggattctaaagtgggcggcaactacaattatctgtacaggctgtttcgcaagtccaatctgaagccattcgagcgggacatctccacagagatctaccaggccggctctaccccctgcaatggcgtggagggctttaactgttatttccctctgcagtcttacggcttccagccaacaaacggcgtgggctatcagccctacagagtggtggtgctgtcctttgagctgctgcacgcaccagcaacagtgtgcggcccaaagaagtctaccaatctggtgaagaacaagtgcgtgaacttcaacttcaacggactgaccggcacaggcgtgctgaccgagagcaataagaagttcctgccttttcagcagttcggcagggacatcgcagataccacagacgccgtgcgcgaccctcagaccctggagatcctggacatcacaccatgcagcttcggcggcgtgtccgtgatcacaccaggcaccaatacatccaaccaggtggccgtgctgtatcaggacgtgaattgtaccgaggtgcccgtggcaatccacgcagatcagctgacccctacatggcgggtgtactctaccggcagcaacgtgttccagacaagagccggatgcctgatcggagcagagcacgtgaacaatagctatgagtgcgacatccctatcggcgccggcatctgtgccagctaccagacccagacaaactccccatctggagcaggctccgtggccagccagtccatcatcgcctataccatgagcctgggcgccgagaacagcgtggcctactccaacaattctatcgccatccctaccaacttcacaatcagcgtgaccacagagatcctgccagtgtctatgaccaagacaagcgtggactgcacaatgtatatctgtggcgatagcaccgagtgctccaacctgctgctgcagtacggctccttttgtacccagctgaatagagccctgacaggcatcgccgtggagcaggataagaacacacaggaggtgttcgcccaggtgaagcagatctacaagaccccacccatcaaggactttggcggcttcaacttcagccagatcctgcctgatccaagcaagccctccaagaggtcttttatcgaggacctgctgttcaacaaggtgaccctggccgatgccggcttcatcaagcagtatggagattgcctgggagacatcgcagcccgcgacctgatctgtgcccagaagtttaatggcctgaccgtgctgcctccactgctgacagatgagatgatcgcccagtacacatctgccctgctggccggcaccatcacaacgggatggaccttcggcgcaggagccgccctgcagatcccttttgccatgcagatggcctataggttcaacggcatcggcgtgacccagaatgtgctgtacgagaaccagaagctgatcgccaatcagtttaacagcgccatcggcaagatccaggactctctgtcctctacagccagcgccctgggcaagctgcaggatgtggtgaatcagaacgcccaggccctgaataccctggtgaagcagctgagctccaacttcggcgccatctctagcgtgctgaatgacatcctgagccggctggacccccctgaggcagaggtgcagatcgacaggctgatcacaggccgcctgcagagcctgcagacctacgtgacacagcagctgatcagggcagcagagatcagagcctccgccaatctggccgccaccaagatgagcgagtgcgtgctgggacagtccaagagggtggacttttgtggcaagggctatcacctgatgtctttcccacagagcgcccctcacggcgtggtgtttctgcacgtgacctacgtgccagcccaggagaagaacttcaccacagcaccagccatctgccacgatggaaaggcacactttcctagggagggcgtgttcgtgtctaacggcacccactggtttgtgacacagcgcaatttctacgagccacagatcatcaccacagacaatacattcgtgagcggcaactgtgatgtggtgatcggcatcgtgaacaataccgtgtatgatccactgcagcccgagctggactcctttaaggaggagctggataagtacttcaagaatcacacctctcccgacgtggatctgggcgacatctccggcatcaatgcctctgtggtgaacatccagaaggagatcgaccggctgaacgaggtggccaagaatctgaacgagagcctgatcgatctgcaggagctgggcaagtatgagcagtacatcaagggctctggcagagagaacctgtatttccagggaggaggaggcagcggatacatccctgaggcaccaagggacggacaggcctacgtgcgcaaggatggcgagtgggtgctgctgtccacctttctgggccatcatcaccaccaccaccaccactga

SEQ ID NO: 1770 - DNA, 3846 bp, Artificial Sequence
  Description of Artificial Sequence: Synthetic polynucleotide
atgggcatcctgccaagcccaggaatgcccgccctgctgtctctggtgagcctgctgtccgtgctgctgatgggatgcgtggcagagacaggcacacagtgcgtgaacctgaccacaaggacccagctgccccctgcctataccaattctttcacacggggcgtgtactatcccgacaaggtgtttagaagctccgtgctgcactccacacaggatctgtttctgcctttcttttctaacgtgacctggttccacgccatccacgtgtccggcaccaatggcacaaagcggttcgacaatcccgtgctgccttttaacgatggcgtgtacttcgccagcaccgagaagtccaacatcatcagaggctggatctttggcaccacactggactctaagacacagagcctgctgatcgtgaacaatgccaccaacgtggtgatcaaggtgtgcgagttccagttttgtaatgatccattcctgggcgtgtactatcacaagaacaataagtcctggatggaggcagagtttcgcgtgtattctagcgccaacaattgcacatttgagtacgtgagccagcccttcctgatggacctggagggcaagcagggcaatttcaagaacctgagggagttcgtgtttaagaatatcgatggctacttcaagatctacagcaagcacaccccaatcaacctggtgcgcgacctgccacagggattctccgccctggagccactggtggatctgcccatcggcatcaacatcacccggtttcagacactgctggccctgcacagatcctacctgacaccaggcgactcctctagcggatggaccgcaggagctgccgcctactatgtgggctatctgcagccccggaccttcctgctgaagtacaacgagaatggcaccatcacagacgcagtggattgcgccctggaccccctgtctgagacaaagtgtacactgaagagctttaccgtggagaagggcatctatcagacaagcaatttcagggtgcagcctaccgagtccatcgtgcgctttcccaatatcacaaacctgtgcccttttggcgaggtgttcaacgccaccagattcgccagcgtgtacgcctggaatcggaagagaatctccaactgcgtggccgactattctgtgctgtacaactccgcctctttcagcacctttaagtgctatggcgtgtctcccacaaagctgaatgatctgtgctttaccaacgtgtacgccgatagcttcgtgatcaggggagacgaagtgagacagatcgcaccaggacagacaggaaagatcgcagactacaattataagctgcctgacgatttcaccggctgcgtgatcgcctggaactccaacaatctggattctaaagtgggcggcaactacaattatctgtacaggctgtttcgcaagtccaatctgaagccattcgagcgggacatctccacagagatctaccaggccggctctaccccctgcaatggcgtggagggctttaactgttatttccctctgcagtcttacggcttccagccaacaaacggcgtgggctatcagccctacagagtggtggtgctgtcctttgagctgctgcacgcaccagcaacagtgtgcggcccaaagaagtctaccaatctggtgaagaacaagtgcgtgaacttcaacttcaacggactgaccggcacaggcgtgctgaccgagagcaataagaagttcctgccttttcagcagttcggcagggacatcgcagataccacagacgccgtgcgcgaccctcagaccctggagatcctggacatcacaccatgcagcttcggcggcgtgtccgtgatcacaccaggcaccaatacatccaaccaggtggccgtgctgtatcaggacgtgaattgtaccgaggtgcccgtggcaatccacgcagatcagctgacccctacatggcgggtgtactctaccggcagcaacgtgttccagacaagagccggatgcctgatcggagcagagcacgtgaacaatagctatgagtgcgacatccctatcggcgccggcatctgtgccagctaccagacccagacaaactccccatctggagcaggctccgtggccagccagtccatcatcgcctataccatgagcctgggcgccgagaacagcgtggcctactccaacaattctatcgccatccctaccaacttcacaatcagcgtgaccacagagatcctgccagtgtctatgaccaagacaagcgtggactgcacaatgtatatctgtggcgatagcaccgagtgctccaacctgctgctgcagtacggctccttttgtacccagctgaatagagccctgacaggcatcgccgtggagcaggataagaacacacaggaggtgttcgcccaggtgaagcagatctacaagaccccacccatcaaggactttggcggcttcaacttcagccagatcctgcctgatccaagcaagccctccaagaggtcttttatcgaggacctgctgttcaacaaggtgaccctggccgatgccggcttcatcaagcagtatggagattgcctgggagacatcgcagcccgcgacctgatctgtgcccagaagtttaatggcctgaccgtgctgcctccactgctgacagatgagatgatcgcccagtacacatctgccctgctggccggcaccatcacaagcggatggaccttcggcgcaggagccgccctgcagatcccttttgccatgcagatggcctataggttcaacggcatcggcgtgacccagaatgtgctgtacgagaaccagaagctgatcgccaatcagtttaacagcgccatcggcaagatccaggactctctgtcctctacagccagcgccctgggcaagctgcaggatgtggtgaatcagaacgcccaggccctgaataccctggtgaagcagctgagctccaacttcggcgccatctctagcgtgctgaatgacatcctgagccggctggacccccctgaggcagaggtgcagatcgacaggctgatcacaggccgcctgcagagcctgcagacctacgtgacacagcagctgatcagggcagcagagatcagagcctccgccaatctggccgccaccaagatgagcgagtgcgtgctgggacagtccaagagggtggacttttgtggcaagggctatcacctgatgtctttcccacagagcgcccctcacggcgtggtgtttctgcacgtgacctacgtgccagcccaggagaagaacttcaccacagcaccagccatctgccacgatggaaaggcacactttcctagggagggcgtgttcgtgtctaacggcacccactggtttgtgacacagcgcaatttctacgagccacagatcatcaccacagacaatacattcgtgagcggcaactgtgatgtggtgatcggcatcgtgaacaataccgtgtatgatccactgcagcccgagctggactcctttaaggaggagctggataagtacttcaagaatcacacctctcccgacgtggatctgggcgacatctccggcatcaatgcctctgtggtgaacatccagaaggagatcgaccggctgaacgaggtggccaagaatctgaacgagagcctgatcgatctgcaggagctgggcaagtatgagcagtacatcaagggctctggcagagagaacctgtatttccagggaggaggaggcagcggatacatccctgaggcaccaagggacggacaggcctacgtgcgcaaggatggcgagtgggtgctgctgtccacctttctgggccatcatcaccaccaccaccaccactga

SEQ ID NO: 1771 - DNA, 3846 bp, Artificial Sequence
  Description of Artificial Sequence: Synthetic polynucleotide
atgggcatcctgccaagcccaggaatgcccgccctgctgtctctggtgagcctgctgtccgtgctgctgatgggatgcgtggcagagacaggcacacagtgcgtgaacctgaccacaaggacccagctgccccctgcctataccaattctttcacacggggcgtgtactatcccgacaaggtgtttagaagctccgtgctgcactccacacaggatctgtttctgcctttcttttctaacgtgacctggttccacgccatccacgtgtccggcaccaatggcacaaagcggttcgacaatcccgtgctgccttttaacgatggcgtgtacttcgccagcaccgagaagtccaacatcatcagaggctggatctttggcaccacactggactctaagacacagagcctgctgatcgtgaacaatgccaccaacgtggtgatcaaggtgtgcgagttccagttttgtaatgatccattcctgggcgtgtactatcacaagaacaataagtcctggatggagtctgagtttcgcgtgtattctagcgccaacaattgcacatttgagtacgtgagccagcccttcctgatggacctggagggcaagcagggcaatttcaagaacctgagggagttcgtgtttaagaatatcgatggctacttcaagatctacagcaagcacaccccaatcaacctggtgcgcgacctgccacagggattctccgccctggagccactggtggatctgcccatcggcatcaacatcacccggtttcagacactgctggccctgcacagatcctacctgacaccaggcgactcctctagcggatggaccgcaggagctgccgcctactatgtgggctatctgcagccccggaccttcctgctgaagtacaacgagaatggcaccatcacagacgcagtggattgcgccctggaccccctgtctgagacaaagtgtacactgaagagctttaccgtggagaagggcatctatcagacaagcaatttcagggtgcagcctaccgagtccatcgtgcgctttcccaatatcacaaacctgtgcccttttggcgaggtgttcaacgccaccagattcgccagcgtgtacgcctggaatcggaagagaatctccaactgcgtggccgactattctgtgctgtacaactccgcctctttcagcacctttaagtgctatggcgtgtctcccacaaagctgaatgatctgtgctttaccaacgtgtacgccgatagcttcgtgatcaggggagacgaagtgagacagatcgcaccaggacagacaggaaagatcgcagactacaattataagctgcctgacgatttcaccggctgcgtgatcgcctggaactccaacaatctggattctaaagtgggcggcaactacaattatctgtacaggctgtttcgcaagtccaatctgaagccattcgagcgggacatctccacagagatctaccaggccggctctaccccctgcaatggcgtggagggctttaactgttatttccctctgcagtcttacggcttccagccaacaaacggcgtgggctatcagccctacagagtggtggtgctgtcctttgagctgctgcacgcaccagcaacagtgtgcggcccaaagaagtctaccaatctggtgaagaacaagtgcgtgaacttcaacttcaacggactgaccggcacaggcgtgctgaccgagagcaataagaagttcctgccttttcagcagttcggcagggacatcgcagataccacagacgccgtgcgcgaccctcagaccctggagatcctggacatcacaccatgcagcttcggcggcgtgtccgtgatcacaccaggcaccaatacatccaaccaggtggccgtgctgtatcaggacgtgaattgtaccgaggtgcccgtggcaatccacgcagatcagctgacccctacatggcgggtgtactctaccggcagcaacgtgttccagacaagagccggatgcctgatcggagcagagcacgtgaacaatagctatgagtgcgacatccctatcggcgccggcatctgtgccagctaccagacccagacaaactccccatctggagcaggctccgtggccagccagtccatcatcgcctataccatgagcctgggcgccgagaacagcgtggcctactccaacaattctatcgccatccctaccaacttcacaatcagcgtgaccacagagatcctgccagtgtctatgaccaagacaagcgtggactgcacaatgtatatctgtggcgatagcaccgagtgctccaacctgctgctgcagtacggctccttttgtacccagctgaatagagccctgacaggcatcgccgtggagcaggataagaacacacaggaggtgttcgcccaggtgaagcagatctacaagaccccacccatcaaggactttggcggcttcaacttcagccagatcctgcctgatccaagcaagccctccaagaggtcttttatcgaggacctgctgttcaacaaggtgaccctggccgatgccggcttcatcaagcagtatggagattgcctgggagacatcgatgcccgcgacctgatctgtgcccagaagtttaatggcctgaccgtgctgcctccactgctgacagatgagatgatcgcccagtacacatctgccctgctggccggcaccatcacaagcggatggaccttcggcgcaggagccgccctgcagatcccttttgccatgcagatggcctataggttcaacggcatcggcgtgacccagaatgtgctgtacgagaaccagaagctgatcgccaatcagtttaacagcgccatcggcaagatccaggactctctgtcctctacagccagcgccctgggcaagctgcaggatgtggtgaatcagaacgcccaggccctgaataccctggtgaagcagctgagctccaacttcggcgccatctctagcgtgctgaatgacatcctgagccggctggacccccctgaggcagaggtgcagatcgacaggctgatcacaggccgcctgcagagcctgcagacctacgtgacacagcagctgatcagggcagcagagatcagagcctccgccaatctggccgccaccaagatgagcgagtgcgtgctgggacagtccaagagggtggacttttgtggcaagggctatcacctgatgtctttcccacagagcgcccctcacggcgtggtgtttctgcacgtgacctacgtgccagcccaggagaagaacttcaccacagcaccagccatctgccacgatggaaaggcacactttcctagggagggcgtgttcgtgtctaacggcacccactggtttgtgacacagcgcaatttctacgagccacagatcatcaccacagacaatacattcgtgagcggcaactgtgatgtggtgatcggcatcgtgaacaataccgtgtatgatccactgcagcccgagctggactcctttaaggaggagctggataagtacttcaagaatcacacctctcccgacgtggatctgggcgacatctccggcatcaatgcctctgtggtgaacatccagaaggagatcgaccggctgaacgaggtggccaagaatctgaacgagagcctgatcgatctgcaggagctgggcaagtatgagcagtacatcaagggctctggcagagagaacctgtatttccagggaggaggaggcagcggatacatccctgaggcaccaagggacggacaggcctacgtgcgcaaggatggcgagtgggtgctgctgtccacctttctgggccatcatcaccaccaccaccaccactga

SEQ ID NO: 1772 - DNA, 3846 bp, Artificial Sequence
  Description of Artificial Sequence: Synthetic polynucleotide
atgggcatcctgccaagcccaggaatgcccgccctgctgtctctggtgagcctgctgtccgtgctgctgatgggatgcgtggcagagacaggcacacagtgcgtgaacctgaccacaaggacccagctgccccctgcctataccaattctttcacacggggcgtgtactatcccgacaaggtgtttagaagctccgtgctgcactccacacaggatctgtttctgcctttcttttctaacgtgacctggttccacgccatccacgtgtccggcaccaatggcacaaagcggttcgacaatcccgtgctgccttttaacgatggcgtgtacttcgccagcaccgagaagtccaacatcatcagaggctggatctttggcaccacactggactctaagacacagagcctgctgatcgtgaacaatgccaccaacgtggtgatcaaggtgtgcgagttccagttttgtaatgatccattcctgggcgtgtactatcacaagaacaataagtcctggatggagtctgagtttcgcgtgtattctagcgccaacaattgcacatttgagtacgtgagccagcccttcctgatggacctggatggcaagcagggcaatttcaagaacctgagggagttcgtgtttaagaatatcgatggctacttcaagatctacagcaagcacaccccaatcaacctggtgcgcgacctgccacagggattctccgccctggagccactggtggatctgcccatcggcatcaacatcacccggtttcagacactgctggccctgcacagatcctacctgacaccaggcgactcctctagcggatggaccgcaggagctgccgcctactatgtgggctatctgcagccccggaccttcctgctgaagtacaacgagaatggcaccatcacagacgcagtggattgcgccctggaccccctgtctgagacaaagtgtacactgaagagctttaccgtggagaagggcatctatcagacaagcaatttcagggtgcagcctaccgagtccatcgtgcgctttcccaatatcacaaacctgtgcccttttggcgaggtgttcaacgccaccagattcgccagcgtgtacgcctggaatcggaagagaatctccaactgcgtggccgactattctgtgctgtacaactccgcctctttcagcacctttaagtgctatggcgtgtctcccacaaagctgaatgatctgtgctttaccaacgtgtacgccgatagcttcgtgatcaggggagacgaagtgagacagatcgcaccaggacagacaggaaagatcgcagactacaattataagctgcctgacgatttcaccggctgcgtgatcgcctggaactccaacaatctggattctaaagtgggcggcaactacaattatctgtacaggctgtttcgcaagtccaatctgaagccattcgagcgggacatctccacagagatctaccaggccggctctaccccctgcaatggcgtggagggctttaactgttatttccctctgcagtcttacggcttccagccaacaaacggcgtgggctatcagccctacagagtggtggtgctgtcctttgagctgctgcacgcaccagcaacagtgtgcggcccaaagaagtctaccaatctggtgaagaacaagtgcgtgaacttcaacttcaacggactgaccggcacaggcgtgctgaccgagagcaataagaagttcctgccttttcagcagttcggcagggacatcgcagataccacagacgccgtgcgcgaccctcagaccctggagatcctggacatcacaccatgcagcttcggcggcgtgtccgtgatcacaccaggcaccaatacatccaaccaggtggccgtgctgtatcaggacgtgaattgtaccgaggtgcccgtggcaatccacgcagatcagctgacccctacatggcgggtgtactctaccggcagcaacgtgttccagacaagagccggatgcctgatcggagcagagcacgtgaacaatagctatgagtgcgacatccctatcggcgccggcatctgtgccagctaccagacccagacaaactccccatctggagcaggctccgtggccagccagtccatcatcgcctataccatgagcctgggcgccgagaacagcgtggcctactccaacaattctatcgccatccctaccaacttcacaatcagcgtgaccacagagatcctgccagtgtctatgaccaagacaagcgtggactgcacaatgtatatctgtggcgatagcaccgagtgctccaacctgctgctgcagtacggctccttttgtacccagctgaatagagccctgacaggcatcgccgtggagcaggataagaacacacaggaggtgttcgcccaggtgaagcagatctacaagaccccacccatcaaggactttggcggcttcaacttcagccagatcctgcctgatccaagcaagccctccaagaggtcttttatcgaggacctgctgttcaacaaggtgaccctggccgatgccggcttcatcaagcagtatggagattgcctgggagacatcgcagcccgcgacctgatctgtgcccagaagtttaatggcctgaccgtgctgcctccactgctgacagatgagatgatcgcccagtacacatctgccctgctggccggcaccatcacaagcggatggaccttcggcgcaggagccgccctgcagatcccttttgccatgcagatggcctataggttcaacggcatcggcgtgacccagaatgtgctgtacgagaaccagaagctgatcgccaatcagtttaacagcgccatcggcaagatccaggactctctgtcctctacagccagcgccctgggcaagctgcaggatgtggtgaatcagaacgcccaggccctgaataccctggtgaagcagctgagctccaacttcggcgccatctctagcgtgctgaatgacatcctgagccggctggacccccctgaggcagaggtgcagatcgacaggctgatcacaggccgcctgcagagcctgcagacctacgtgacacagcagctgatcagggcagcagagatcagagcctccgccaatctggccgccaccaagatgagcgagtgcgtgctgggacagtccaagagggtggacttttgtggcaagggctatcacctgatgtctttcccacagagcgcccctcacggcgtggtgtttctgcacgtgacctacgtgccagcccaggagaagaacttcaccacagcaccagccatctgccacgatggaaaggcacactttcctagggagggcgtgttcgtgtctaacggcacccactggtttgtgacacagcgcaatttctacgagccacagatcatcaccacagacaatacattcgtgagcggcaactgtgatgtggtgatcggcatcgtgaacaataccgtgtatgatccactgcagcccgagctggactcctttaaggaggagctggataagtacttcaagaatcacacctctcccgacgtggatctgggcgacatctccggcatcaatgcctctgtggtgaacatccagaaggagatcgaccggctgaacgaggtggccaagaatctgaacgagagcctgatcgatctgcaggagctgggcaagtatgagcagtacatcaagggctctggcagagagaacctgtatttccagggaggaggaggcagcggatacatccctgaggcaccaagggacggacaggcctacgtgcgcaaggatggcgagtgggtgctgctgtccacctttctgggccatcatcaccaccaccaccaccactga

SEQ ID NO: 1773 - DNA, 3846 bp, Artificial Sequence
  Description of Artificial Sequence: Synthetic polynucleotide
atgggcatcctgccaagcccaggaatgcccgccctgctgtctctggtgagcctgctgtccgtgctgctgatgggatgcgtggcagagacaggcacacagtgcgtgaacctgaccacaaggacccagctgccccctgcctataccaattctttcacacggggcgtgtactatcccgacaaggtgtttagaagctccgtgctgcactccacacaggatctgtttctgcctttcttttctaacgtgacctggttccacgccatccacgtgtccggcaccaatggcacaaagcggttcgacaatcccgtgctgccttttaacgatggcgtgtacttcgccagcaccgagaagtccaacatcatcagaggctggatctttggcaccacactggactctaagacacagagcctgctgatcgtgaacaatgccaccaacgtggtgatcaaggtgtgcgagttccagttttgtaatgatccattcctgggcgtgtactatcacaagaacaataagtcctggatggagtctgagtttcgcgtgtattctagcgccaacaattgcacatttgagtacgtgagccagcccttcctgatggacctggagggcaagcagggcaatttcaagaacctgagggagttcgtgtttaagaatatcgatggctacttcaagatctacagcaagcacaccccaatcaacctggtgcgcgacctgccacagggattctccgccctggagccactggtggatctgcccatcggcatcaacatcacccggtttcagacactgctggccctgcacagatcctacctgacaccaggcgactcctctagcggatggaccgcaggagctgccgcctactatgtgggctatctgcagccccggaccttcctgctgaagtacaacgagaatggcaccatcacagacgcagtggattgcgccctggaccccctgtctgagacaaagtgtacactgaagagctttaccgtggagaagggcatctatcagacaagcaatttcagggtgcagcctaccgagtccatcgtgcgctttcccaatatcacaaacctgtgcccttttggcgaggtgttcaacgccaccagattcgccagcgtgtacgcctggaatcggaagagaatctccaactgcgtggccgactattctgtgctgtacaactccgcctctttcagcacctttaagtgctatggcgtgtctcccacaaagctgaatgatctgtgctttaccaacgtgtacgccgatagcttcgtgatcaggggagacgaagtgagacagatcgcaccaggacagacaggaaagatcgcagactacaattataagctgcctgacgatttcaccggctgcgtgatcgcctggaactccaacaatctggattctaaagtgggcggcaactacaattatctgtacaggctgtttcgcaagtccaatctgaagccattcgagcgggacatctccacagagatctaccaggccggctctaccccctgcaatggcgtggagggctttaactgttatttccctctgcagtcttacggcttccagccaacaaacggcgtgggctatcagccctacagagtggtggtgctgtcctttgagctgctgcacgcaccagcaacagtgtgcggcccaaagaagtctaccaatctggtgaagaacaagtgcgtgaacttcaacttcaacggactgaccggcacaggcgtgctgaccgagagcaataagaagttcctgccttttcagcagttcggcagggacatcgcagataccacagacgccgtgcgcgaccctcagaccctggagatcctggacatcacaccatgcagcttcggcggcgtgtccgtgatcacaccaggcaccaatacatccaaccaggtggccgtgctgtatcaggacgtgaattgtacccatgtgcccgtggcaatccacgcagatcagctgacccctacatggcgggtgtactctaccggcagcaacgtgttccagacaagagccggatgcctgatcggagcagagcacgtgaacaatagctatgagtgcgacatccctatcggcgccggcatctgtgccagctaccagacccagacaaactccccatctggagcaggctccgtggccagccagtccatcatcgcctataccatgagcctgggcgccgagaacagcgtggcctactccaacaattctatcgccatccctaccaacttcacaatcagcgtgaccacagagatcctgccagtgtctatgaccaagacaagcgtggactgcacaatgtatatctgtggcgatagcaccgagtgctccaacctgctgctgcagtacggctccttttgtacccagctgaatagagccctgacaggcatcgccgtggagcaggataagaacacacaggaggtgttcgcccaggtgaagcagatctacaagaccccacccatcaaggactttggcggcttcaacttcagccagatcctgcctgatccaagcaagccctccaagaggtcttttatcgaggacctgctgttcaacaaggtgaccctggccgatgccggcttcatcaagcagtatggagattgcctgggagacatcgcagcccgcgacctgatctgtgcccagaagtttaatggcctgaccgtgctgcctccactgctgacagatgagatgatcgcccagtacacatctgccctgctggccggcaccatcacaagcggatggaccttcggcgcaggagccgccctgcagatcccttttgccatgcagatggcctataggttcaacggcatcggcgtgacccagaatgtgctgtacgagaaccagaagctgatcgccaatcagtttaacagcgccatcggcaagatccaggactctctgtcctctacagccagcgccctgggcaagctgcaggatgtggtgaatcagaacgcccaggccctgaataccctggtgaagcagctgagctccaacttcggcgccatctctagcgtgctgaatgacatcctgagccggctggacccccctgaggcagaggtgcagatcgacaggctgatcacaggccgcctgcagagcctgcagacctacgtgacacagcagctgatcagggcagcagagatcagagcctccgccaatctggccgccaccaagatgagcgagtgcgtgctgggacagtccaagagggtggacttttgtggcaagggctatcacctgatgtctttcccacagagcgcccctcacggcgtggtgtttctgcacgtgacctacgtgccagcccaggagaagaacttcaccacagcaccagccatctgccacgatggaaaggcacactttcctagggagggcgtgttcgtgtctaacggcacccactggtttgtgacacagcgcaatttctacgagccacagatcatcaccacagacaatacattcgtgagcggcaactgtgatgtggtgatcggcatcgtgaacaataccgtgtatgatccactgcagcccgagctggactcctttaaggaggagctggataagtacttcaagaatcacacctctcccgacgtggatctgggcgacatctccggcatcaatgcctctgtggtgaacatccagaaggagatcgaccggctgaacgaggtggccaagaatctgaacgagagcctgatcgatctgcaggagctgggcaagtatgagcagtacatcaagggctctggcagagagaacctgtatttccagggaggaggaggcagcggatacatccctgaggcaccaagggacggacaggcctacgtgcgcaaggatggcgagtgggtgctgctgtccacctttctgggccatcatcaccaccaccaccaccactga

SEQ ID NO: 1774 - DNA, 3846 bp, Artificial Sequence
  Description of Artificial Sequence: Synthetic polynucleotide
atgggcatcctgccaagcccaggaatgcccgccctgctgtctctggtgagcctgctgtccgtgctgctgatgggatgcgtggcagagacaggcacacagtgcgtgaacctgaccacaaggacccagctgccccctgcctataccaattctttcacacggggcgtgtactatcccgacaaggtgtttagaagctccgtgctgcactccacacaggatctgtttctgcctttcttttctaacgtgacctggttccacgccatccacgtgtccggcaccaatggcacaaagcggttcgacaatcccgtgctgccttttaacgatggcgtgtacttcgccagcaccgagaagtccaacatcatcagaggctggatctttggcaccacactggactctaagacacagagcctgctgatcgtgaacaatgccaccaacgtggtgatcaaggtgtgcgagttccagttttgtaatgatccattcctgggcgtgtactatcacaagaacaataagtcctggatggagtctgagtttcgcgtgtattctagcgccaacaattgcacatttgagtacgtgagccagcccttcctgatggacctggagggcaagcagggcaatttcaagaacctgagggagttcgtgtttaagaatatcgatggctacttcaagatctacagcaagcacaccccaatcaacctggtgcgcgacctgccacagggattctccgccctggagccactggtggatctgcccatcggcatcaacatcacccggtttcagacactgctggccctgcacagatcctacctgacaccaggcgactcctctagcggatggaccgcaggagctgccgcctactatgtgggctatctgcagccccggaccttcctgctgaagtacaacgagaatggcaccatcacagacgcagtggattgcgccctggaccccctgtctgagacaaagtgtacactgaagagctttaccgtggagaagggcatctatcagacaagcaatttcagggtgcagcctaccgagtccatcgtgcgctttcccaatatcacaaacctgtgcccttttggcgaggtgttcaacgccaccagattcgccagcgtgtacgcctggaatcggaagagaatctccaactgcgtggccgactattctgtgctgtacaactccgcctctttcagcacctttaagtgctatggcgtgtctcccacaaagctgaatgatctgtgctttaccaacgtgtacgccgatagcttcgtgatcaggggagacgaagtgagacagatcgcaccaggacagacaggaaagatcgcagactacaattataagctgcctgacgatttcaccggctgcgtgatcgcctggaactccaacaatctggattctaaagtgggcggcaactacaattatctgtacaggctgtttcgcaagtccaatctgaagccattcgagcgggacatctccacagagatctaccaggccggctctaccccctgcaatggcgtggagggctttaactgttatttccctctgcagtcttacggcttccagccaacaaacggcgtgggctatcagccctacagagtggtggtgctgtcctttgagctgctgcacgcaccagcaacagtgtgcggcccaaagaagtctaccaatctggtgaagaacaagtgcgtgaacttcaacttcaacggactgaccggcacaggcgtgctgaccgagagcaataagaagttcctgccttttcagcagttcggcagggacatcgcagataccacagacgccgtgcgcgaccctcagaccctggagatcctggacatcacaccatgcagcttcggcggcgtgtccgtgatcacaccaggcaccaatacatccaaccaggtggccgtgctgtatcaggacgtgaattgtaccgaggtgcccgtggcaatccacgcagatcagctgacccctacatggcgggtgtactctaccggcagcaacgtgttccagacaagagccggatgcctgatcggagcagagcacgtgaacaatagctatgagtgcgacatccctatcggcgccggcatctgtgccagctaccagacccagacaaactccccatctggagcaggctccgtggccagccagtccatcatcgcctataccatgagcctgggcgccgagaacagcgtggcctactccaacaattctatcgccatccctaccaacttcacaatcagcgtgaccacagagatcctgccagtgtctatgaccaagacaagcgtggactgcacaatgtatatctgtggcgatagcaccgagtgctccaacctgctgctgcagtacggctccttttgtacccagctgaatagagccctgacaggcatcgccgtggagcaggataagaacacacaggaggtgttcgcccaggtgaagcagatctacaagaccccacccatcaaggactttggcggcttcaacttcagccagatcctgcctgatccaagcaagccctccaagaggtcttttatcgaggacctgctgttcaacaagctaaccctggccgatgccggcttcatcaagcagtatggagattgcctgggagacatcgcagcccgcgacctgatctgtgcccagaagtttaatggcctgaccgtgctgcctccactgctgacagatgagatgatcgcccagtacacatctgccctgctggccggcaccatcacaagcggatggaccttcggcgcaggagccgccctgcagatcccttttgccatgcagatggcctataggttcaacggcatcggcgtgacccagaatgtgctgtacgagaaccagaagctgatcgccaatcagtttaacagcgccatcggcaagatccaggactctctgtcctctacagccagcgccctgggcaagctgcaggatgtggtgaatcagaacgcccaggccctgaataccctggtgaagcagctgagctccaacttcggcgccatctctagcgtgctgaatgacatcctgagccggctggacccccctgaggcagaggtgcagatcgacaggctgatcacaggccgcctgcagagcctgcagacctacgtgacacagcagctgatcagggcagcagagatcagagcctccgccaatctggccgccaccaagatgagcgagtgcgtgctgggacagtccaagagggtggacttttgtggcaagggctatcacctgatgtctttcccacagagcgcccctcacggcgtggtgtttctgcacgtgacctacgtgccagcccaggagaagaacttcaccacagcaccagccatctgccacgatggaaaggcacactttcctagggagggcgtgttcgtgtctaacggcacccactggtttgtgacacagcgcaatttctacgagccacagatcatcaccacagacaatacattcgtgagcggcaactgtgatgtggtgatcggcatcgtgaacaataccgtgtatgatccactgcagcccgagctggactcctttaaggaggagctggataagtacttcaagaatcacacctctcccgacgtggatctgggcgacatctccggcatcaatgcctctgtggtgaacatccagaaggagatcgaccggctgaacgaggtggccaagaatctgaacgagagcctgatcgatctgcaggagctgggcaagtatgagcagtacatcaagggctctggcagagagaacctgtatttccagggaggaggaggcagcggatacatccctgaggcaccaagggacggacaggcctacgtgcgcaaggatggcgagtgggtgctgctgtccacctttctgggccatcatcaccaccaccaccaccactga

SEQ ID NO: 1775 - DNA, 3846 bp, Artificial Sequence
  Description of Artificial Sequence: Synthetic polynucleotide
atgggcatcctgccaagcccaggaatgcccgccctgctgtctctggtgagcctgctgtccgtgctgctgatgggatgcgtggcagagacaggcacacagtgcgtgaacctgaccacaaggacccagctgccccctgcctataccaattctttcacacggggcgtgtactatcccgacaagatttttagaagcaacgtgctgcactccacacaggatctgtttctgcctttcttttctaacgtgacctggttccacgccctccacgtgaaaggcaccaatggcacaaagcggttcgacaatcccgtgctgccttttaacgatggcgtgtacttcgccgctatcgagaagtccaacatcatcagaggctggatctttggcaccacactggactctaagacacagagcctgctgatcgtgaacaatgccaccaacgtggtgatccgagtgtgcgagttccagttttgtgaaaatccattcctgggcgtgtactatcacaagaacaataagtcctggcgcgaggaagagtggcgcgtgtattctagcgccaacaattgcacatttgagtacgtgagccagcccttcctgtacgacctgaatggcaagcagggcaatttccatcatctgagggagttcgtgtttaagaatatcgatggctacttctatatctacagcaagtgggaaccaatcaacctggtgcgcgacctgccacagggattctccgccctggagccactgatggatctgcccatcggcatcaacatcacccattttcagacatttctgagtctgtcaagatcctaccggacaccaggcgactcctctagcggatggaccgcaggagctgccgcctactatgtgggctatctgcagccccggaccttcctgctgaagtacgatgagaatggctatatcacagacgcagtggattgctcactggaccccctgtctgagacaaagtgtaaactgaagagctttaccgtggagaagggcatctatcagacaagcaatttcagggtgcagcctacctacgaaatcgtgcgctttcccaatatcacaaacgcatgcccttttgatgaggtgttcaacgccaccagattcgccagcgtgtacaactggaatcggcaaagaatctccaactgcgtggccgactattctgtgctgtacaactccgcctctttcagcacctttcaatgctatggcgtgtctcccacaaagctgaatgatctgtgctttaccaacgtgtacgccgatatattcgtgatcaggggaagtgaagtgagacagatcgcaccaggacagacaggaactatcgcagactacaattataagctgcctgacgatttcaccggctgcgtgatcgcctggaactccaacaatctggattctacggtgggcggcaactacaattatctgtacaggctgtttcgcaagtccaatatgaagccattcgagcgggacatctccacagaggcttaccaggccggctgtaccccctgcaatggcgtggagggctttaactgttatttccctctgcagtcttacggcttccagccaacaaacggcgtgggctatcagccctacagagtggtggtgctgaaatttgagctgctgcacgcaccagcaacagtgtgcggcccaaaggactctaccaatctggtgaagaacaagtgcgtggattataacttcaacggacgtaccggcacaggcgtgctgaccgagagcaataagaagttcctgccttttcagcagttcggcagggacatcagtgataatctagacgccgtgcgcgaccctactaccggtgagatcctgtgtatcacaccatgcagcttcggcggcgtgtccgtgatcacaccaggcaccaatacatccaaccaggtggccgtgctgtatcaggacgtgaattgtaccgaggtgcccgaagcaatccactcaaatcagctgaggcctacatggcgggtgtactctaccggcagcaacgtgttccagacaagagccggatgcctgatcggagcagagtatgtgaacaatagctatgagtgcgacatccctatcggcaacggcatctgtgccagctaccagacccagacaaactccccatctggatcaggctccgtgagtagccagtccatcatcgcctataccatgagcctgggcgccgagaacactgtggcctactccaacaataacatcgccatccctaccaacttcacaatcagcgtgcaaacagagatcctgccagtgtctatgaccaaggtaagcgtggactgcacaatgtatatctgtggcgatagcacccgatgccttaacctgctgaaacagtacggctccttttgtgatcagctggaaagagccctgaacggcatcgcccgcgagcaggataagaaccttttgaatgtgttcgcccaggtgaagcagatctacaagaccccacccatcaaggactttggcggcttcaacttcagccagatcctgcctgatccaagcaagccctccaagaggtcttttatcgaggacctgctgttcaacaaggtgaccctggccgatctcggcttcgtaaagcagtataaagattgcctgggagatcaagcagcccgcgacctgatctgtgcccagaagtacaatggcataatggtgctgcctccactgctgacagatgagatgatcgcccagtacacagctagtctgctggccggcaccatcacagctggatggaccttcggcgcaggagccgccctggttatcccttttgccatgcagatggcctataggttcaacggcatcggcgtgcaacagaatgtgctgtacgagaaccagaagattatcgccaatcagtttaacaatgccatcggcaatatccaggacggactgtccactacagccagcgccctgtcaaagctgcaggatgtggtgaatcagcaagcccaggccctgaatgaactggtgaagcagctgagctccaacttcggcgccatctctagcgtgataaatgacatctataatcggctggacccccctgaggcagaggctcagatcgacaggctgatcacaggccgcctgcagagcctgcagacctacgtgacacagcagctgatcagggcaactgagatcagagcctccgcccaactggccgccgaaaagatgagcgagtgcgtgaaaggacagtccaataggtatggtttttgtggcaatggctatcacctgatgtctttcccacagagcgcccctcacggcgtggtgtttctgcacgtgacctacgtgccaactcagtttaagaacttcaccacagcaccaggtatctgccacgatggaaaggcatattttcctagggagggcgtgttcgtgtctaacggcaccgaatggtacataacacagcgcaatttctacgagccacggatcatcaccacagacaatacattcgtgagcggcaactgtgatgtggtgatcggcatcgtgaacaataccgtgtatgatccactgcagcccgagctggactcctttaaggaggagctggataagtacttcaagaatcacacctctcccgacgtggatctgggcgacatctccggcatcaatgcctctgtggtgaacatccagaaggagatcgaccggctgaacgaggtggccaagaatctgaacgagagcctgatcgatctgcaggagctgggcaagtatgagcagtacatcaagggctctggcagagagaacctgtatttccagggaggaggaggcagcggatacatccctgaggcaccaagggacggacaggcctacgtgcgcaaggatggcgagtgggtgctgctgtccacctttctgggccatcatcaccaccaccaccaccactga

SEQ ID NO: 1776 - DNA, 3846 bp, Artificial Sequence
  Description of Artificial Sequence: Synthetic polynucleotide
atgggcatcctgccaagcccaggaatgcccgccctgctgtctctggtgagcctgctgtccgtgctgctgatgggatgcgtggcagagacaggcacacagtgcgtgaacctgaccacaaggacccagctgccccctgcctataccaattctttcacacggggcgtgtactatcccgacaaggtgtttagaagctccgtgctgcactccacacaggatctgtttctgcctttcttttctaacgtgacctggttccacgccatccacgtgtccggcaccaatggcacaaagcggttcgacaatcccgtgctgccttttaacgatggcgtgtacttcgccagcaccgagaagtccaacatcatcagaggctggatctttggcaccacactggactctaagacacagagcctgctgatcgtgaacaatgccaccaacgtggtgatcaaggtgtgcgagttccagttttgtaatgatccattcctgggcgtgtactatcacaagaacaataagtcctggatggagtctgagtttcgcgtgtattctagcgccaacaattgcacatttgagtacgtgagccagcccttcctgatggacctggagggcaagcagggcaatttcaagaacctgagggagttcgtgtttaagaatatcgatggctacttcaagatctacagcaagcacaccccaatcaacctggtgcgcgacctgccacagggattctccgccctggagccactggtggatctgcccatcggcatcaacatcacccggtttcagacactgctggccctgcacagatcctacctgacaccaggcgactcctctagcggatggaccgcaggagctgccgcctactatgtgggctatctgcagccccggaccttcctgctgaagtacaacgagaatggcaccatcacagacgcagtggattgcgccctggaccccctgtctgagacaaagtgtacactgaagagctttaccgtggagaagggcatctatcagacaagcaatttcagggtgcagcctaccgagtccatcgtgcgctttcccaatatcacaaacctgtgcccttttggcgaggtgttcaacgccaccagattcgccagcgtgtacgcctggaatcggaagagaatctccaactgcgtggccgactattctgtgctgtacaactccgcctctttcagcacctttaagtgctatggcgtgtctcccacaaagctgaatgatctgtgctttaccaacgtgtacgccgatagcttcgtgatcaggggagacgaagtgagacagatcgcaccaggacagacaggaaagatcgcagactacaattataagctgcctgacgatttcaccggctgcgtgatcgcctggaactccaacaatctggattctaaagtgggcggcaactacaattatctgtacaggctgtttcgcaagtccaatctgaagccattcgagcgggacatctccacagagatctaccaggccggctctaccccctgcaatggcgtggagggctttaactgttatttccctctgcagtcttacggcttccagccaacaaacggcgtgggctatcagccctacagagtggtggtgctgtcctttgagctgctgcacgcaccagcaacagtgtgcggcccaaagaagtctaccaatctggtgaagaacaagtgcgtgaacttcaacttcaacggactgaccggcacaggcgtgctgaccgagagcaataagaagttcctgccttttcagcagttcggcagggacatcgcagataccacagacgccgtgcgcgaccctcagaccctggagatcctggacatcacaccatgcagcttcggcggcgtgtccgtgatcacaccaggcaccaatacatccaaccaggtggccgtgctgtatcaggacgtgaattgtaccgaggtgcccgtggcaatccacgcagatcagctgacccctacatggcgggtgtactctaccggcagcaacgtgttccagacaagagccggatgcctgatcggagcagagcacgtgaacaatagctatgagtgcgacatccctatcggcgccggcatctgtgccagctaccagacccagacaaactccccatctggagcaggctccgtggccagccagtccatcatcgcctataccatgagcctgggcgccgagaacagcgtggcctactccaacaattctatcgccatccctaccaacttcacaatcagcgtgaccacagagatcctgccagtgtctatgaccaagacaagcgtggactgcacaatgtatatctgtggcgatagcaccgagtgctccaacctgctgctgcagtacggctccttttgtacccagctgaatagagccctgacaggcatcgccgtggagcaggataagaacacacaggaggtgttcgcccaggtgaagcagatctacaagaccccacccatcaaggactttggcggcttcaacttcagccagatcctgcctgatccaagcaagccctccaagaggtcttttatcgaggacctgctgttcaacaaggtgaccctggccgatgccggcttcatcaagcagtatggagattgcctgggagacatcgcagcccgcgacctgatctgtgcccagaagtttaatggcctgaccgtgctgcctccactgctgacagatgagatgatcgcccagtacacatctgccctgctggccggcaccatcacaagcggatggaccttcggcgcaggagccgccctgcagatcccttttgccatgcagatggcctataggttcaacggcatcggcgtgacccagaatgtgctgtacgagaaccagaagctgatcgccaatcagtttaacagcgccatcggcaagatccaggactctctgtcctctacagccagcgccctgggcaagctgcaggatgtggtgaatcagaacgcccaggccctgaataccctggtgaagcagctgagctccaacttcggcgccatctctagcgtgctgaatgacatcctgagccggctggacccccctgaggcagaggtgcagatcgacaggctgatcacaggccgcctgcagagcctgcagacctacgtgacacagcagctgatcagggcagcagagatcagagcctccgccaatctggccgccaccaagatgagcgagtgcgtgctgggacagtccaagagggtggacttttgtggcaagggctatcacctgatgtctttcccacagagcgcccctcacggcgtggtgtttctgcacgtgacctacgtgccagcccaggagaagaacttcaccacagcaccagccatctgccacgatggaaaggcacactttcctagggagggcgtgttcgtgtctaacggcaccatgtggtttgtgacacagcgcaatttctacgagccacagatcatcaccacagacaatacattcgtgagcggcaactgtgatgtggtgatcggcatcgtgaacaataccgtgtatgatccactgcagcccgagctggactcctttaaggaggagctggataagtacttcaagaatcacacctctcccgacgtggatctgggcgacatctccggcatcaatgcctctgtggtgaacatccagaaggagatcgaccggctgaacgaggtggccaagaatctgaacgagagcctgatcgatctgcaggagctgggcaagtatgagcagtacatcaagggctctggcagagagaacctgtatttccagggaggaggaggcagcggatacatccctgaggcaccaagggacggacaggcctacgtgcgcaaggatggcgagtgggtgctgctgtccacctttctgggccatcatcaccaccaccaccaccactga

SEQ ID NO: 1777 - DNA, 3846 bp, Artificial Sequence
  Description of Artificial Sequence: Synthetic polynucleotide
atgggcatcctgccaagcccaggaatgcccgccctgctgtctctggtgagcctgctgtccgtgctgctgatgggatgcgtggcagagacaggcacacagtgcgtgaacctgaccacaaggacccagctgccccctgcctataccaattctttcacacggggcgtgtactatcccgacaaggtgtttagaagctccgtgctgcactccacacaggatctgtttctgcctttcttttctaacgtgacctggttccacgccatccacgtgtccggcaccaatggcacaaagcggttcgacaatcccgtgctgccttttaacgatggcgtgtacttcgccagcaccgagaagtccaacatcatcagaggctggatctttggcaccacactggactctaagacacagagcctgctgatcgtgaacaatgccaccaacgtggtgatcaaggtgtgcgagttccagttttgtaatgatccattcctgggcgtgtactatcacaagaacaataagtcctggatggagtctgagtttcgcgtgtattctagcgccaacaattgcacatttgagtacgtgagccagcccttcctgatggacctggagggcaagcagggcaatttcaagaacctgagggagttcgtgtttaagaatatcgatggctacttcaagatctacagcaagcacaccccaatcaacctggtgcgcgacctgccacagggattctccgccctggagccactggtggatctgcccatcggcatcaacatcacccggtttcagacactgctggccctgcacagatcctacctgacaccaggcgactcctctagcggatggaccgcaggagctgccgcctactatgtgggctatctgcagccccggaccttcctgctgaagtacaacgagaatggcaccatcacagacgcagtggattgcgccctggaccccctgtctgagacaaagtgtacactgaagagctttaccgtggagaagggcatctatcagacaagcaatttcagggtgcagcctaccgagtccatcgtgcgctttcccaatatcacaaacctgtgcccttttggcgaggtgttcaacgccaccagattcgccagcgtgtacgcctggaatcggaagagaatctccaactgcgtggccgactattctgtgctgtacaactccgcctctttcagcacctttaagtgctatggcgtgtctcccacaaagctgaatgatctgtgctttaccaacgtgtacgccgatagcttcgtgatcaggggagacgaagtgagacagatcgcaccaggacagacaggaaagatcgcagactacaattataagctgcctgacgatttcaccggctgcgtgatcgcctggaactccaacaatctggattctaaagtgggcggcaactacaattatctgtacaggctgtttcgcaagtccaatctgaagccattcgagcgggacatctccacagagatctaccaggccggctctaccccctgcaatggcgtggagggctttaactgttatttccctctgcagtcttacggcttccagccaacaaacggcgtgggctatcagccctacagagtggtggtgctgtcctttgagctgctgcacgcaccagcaacagtgtgcggcccaaagaagtctaccaatctggtgaagaacaagtgcgtgaacttcaacttcaacggactgaccggcacaggcgtgctgaccgagagcaataagaagttcctgccttttcagcagttcggcagggacatcgcagataccacagacgccgtgcgcgaccctcagaccctggagatcctggacatcacaccatgcagcttcggcggcgtgtccgtgatcacaccaggcaccaatacatccaaccaggtggccgtgctgtatcaggacgtgaattgtaccgaggtgcccgtggcaatccacgcagatcagctgacccctacatggcgggtgtactctaccggcagcaacgtgttccagacaagagccggatgcctgatcggagcagagcacgtgaacaatagctatgagtgcgacatccctatcggcgccggcatctgtgccagctaccagacccagacaaactccccatctggagcaggctccgtggccagccagtccatcatcgcctataccatgagcctgggcgccgagaacagcgtggcctactccaacaattctatcgccatccctaccaacttcacaatcagcgtgaccacagagatcctgccagtgtctatgaccaagacaagcgtggactgcacaatgtatatctgtggcgatagcaccgagtgctccaacctgctgctgcagtacggctccttttgtacccagctgaatagagccctgacaggcatcgccgtggagcaggataagaacacacaggaggtgttcgcccaggtgaagcagatctacaagaccccacccatcaaggactttggcggcttcaacttcagccagatcctgcctgatccaagcaagccctccaagaggtcttttatcgaggacctgctgttcaacaaggtgaccctggccgatgccggcttcatcaagcagtatggagattgcctgggagacatcgcagcccgcgacctgatctgtgcccagaagtttaatggcctgaccgtgctgcctccactgctgacagatgagatgatcgcccagtacacatctgccctgctggccggcaccatcacaagcggatggaccttcggcgcaggagccgccctgcagatcccttttgccatgcagatggcctataggttcaacggcatcggcgtgacccagaatgtgctgtacgagaaccagaagctgatcgccaatcagtttaacagcgccatcggcaagatccaggactctctgtcctctacagccagcgccctgggcaagctgcaggatgtggtgaatcagaacgcccaggccctgaataccctggtgaagcagctgagctccaacttcggcgccatctctagcgtgctgaatgacatcctgagccggctggacccccctgaggcagaggtgcagatcgacaggctgatcacaggccgcctgcagagcctgcagacctacgtgacacagcagctgatcagggcagcagagatcagagcctccgccaatctggccgccaccaagatgagcgagtgcgtgctgggacagtccaagagggtggacttttgtggcaagggctatcacctgatgtctttcccacagagcgcccctcacggcgtggtgtttctgcacgtgacctacgtgccagcccaggagaagaacttcaccacagcaccagccatctgccacgatggaaaggcacactttcctagggagggcgtgttcgtgtctaacggcaccaaatggtttgtgacacagcgcaatttctacgagccacagatcatcaccacagacaatacattcgtgagcggcaactgtgatgtggtgatcggcatcgtgaacaataccgtgtatgatccactgcagcccgagctggactcctttaaggaggagctggataagtacttcaagaatcacacctctcccgacgtggatctgggcgacatctccggcatcaatgcctctgtggtgaacatccagaaggagatcgaccggctgaacgaggtggccaagaatctgaacgagagcctgatcgatctgcaggagctgggcaagtatgagcagtacatcaagggctctggcagagagaacctgtatttccagggaggaggaggcagcggatacatccctgaggcaccaagggacggacaggcctacgtgcgcaaggatggcgagtgggtgctgctgtccacctttctgggccatcatcaccaccaccaccaccactga

SEQ ID NO: 1778 - DNA, 3846 bp, Artificial Sequence
  Description of Artificial Sequence: Synthetic polynucleotide
atgggcatcctgccaagcccaggaatgcccgccctgctgtctctggtgagcctgctgtccgtgctgctgatgggatgcgtggcagagacaggcacacagtgcgtgaacctgaccacaaggacccagctgccccctgcctataccaattctttcacacggggcgtgtactatcccgacaaggtgtttagaagctccgtgctgcactccacacaggatctgtttctgcctttcttttctaacgtgacctggttccacgccatccacgtgtccggcaccaatggcacaaagcggttcgacaatcccgtgctgccttttaacgatggcgtgtacttcgccagcaccgagaagtccaacatcatcagaggctggatctttggcaccacactggactctaagacacagagcctgctgatcgtgaacaatgccaccaacgtggtgatcaaggtgtgcgagttccagttttgtaatgatccattcctgggcgtgtactatcacaagaacaataagtcctggatggagtctgagtttcgcgtgtattctagcgccaacaattgcacatttgagtacgtgagccagcccttcctgatggacctggagggcaagcagggcaatttcaagaacctgagggagttcgtgtttaagaatatcgatggctacttcaagatctacagcaagcacaccccaatcaacctggtgcgcgacctgccacagggattctccgccctggagccactggtggatctgcccatcggcatcaacatcacccggtttcagacactgctggccctgcacagatcctacctgacaccaggcgactcctctagcggatggaccgcaggagctgccgcctactatgtgggctatctgcagccccggaccttcctgctgaagtacaacgagaatggcaccatcacagacgcagtggattgcgccctggaccccctgtctgagacaaagtgtacactgaagagctttaccgtggagaagggcatctatcagacaagcaatttcagggtgcagcctaccgagtccatcgtgcgctttcccaatatcacaaacctgtgcccttttggcgaggtgttcaacgccaccagattcgccagcgtgtacgcctggaatcggaagagaatctccaactgcgtggccgactattctgtgctgtacaactccgcctctttcagcacctttaagtgctatggcgtgtctcccacaaagctgaatgatctgtgctttaccaacgtgtacgccgatagcttcgtgatcaggggagacgaagtgagacagatcgcaccaggacagacaggaaagatcgcagactacaattataagctgcctgacgatttcaccggctgcgtgatcgcctggaactccaacaatctggattctaaagtgggcggcaactacaattatctgtacaggctgtttcgcaagtccaatctgaagccattcgagcgggacatctccacagagatctaccaggccggctctaccccctgcaatggcgtggagggctttaactgttatttccctctgcagtcttacggcttccagccaacaaacggcgtgggctatcagccctacagagtggtggtgctgtcctttgagctgctgcacgcaccagcaacagtgtgcggcccaaagaagtctaccaatctggtgaagaacaagtgcgtgaacttcaacttcaacggactgaccggcacaggcgtgctgaccgagagcaataagaagttcctgccttttcagcagttcggcagggacatcgcagataccacagacgccgtgcgcgaccctcagaccctggagatcctggacatcacaccatgcagcttcggcggcgtgtccgtgatcacaccaggcaccaatacatccaaccaggtggccgtgctgtatcaggacgtgaattgtaccgaggtgcccgtggcaatccacgcagatcagctgacccctacatggcgggtgtactctaccggcagcaacgtgttccagacaagagccggatgcctgatcggagcagagcacgtgaacaatagctatgagtgcgacatccctatcggcgccggcatctgtgccagctaccagacccagacaaactccccatctggagcaggctccgtggccagccagtccatcatcgcctataccatgagcctgggcgccgagaacagcgtggcctactccaacaattctatcgccatccctaccaacttcacaatcagcgtgaccacagagatcctgccagtgtctatgaccaagacaagcgtggactgcacaatgtatatctgtggcgatagcaccgagtgctccaacctgctgctgcagtacggctccttttgtacccagctgaatagagccctgacaggcatcgccgtggagcaggataagaacacacaggaggtgttcgcccaggtgaagcagatctacaagaccccacccatcaaggactttggcggcttcaacttcagccagatcctgcctgatccaagcaagccctccaagaggtcttttatcgaggacctgctgttcaacaagataaccctggccgatgccggcttcatcaagcagtatggagattgcctgggagacatcgcagcccgcgacctgatctgtgcccagaagtttaatggcctgaccgtgctgcctccactgctgacagatgagatgatcgcccagtacacatctgccctgctggccggcaccatcacaagcggatggaccttcggcgcaggagccgccctgcagatcccttttgccatgcagatggcctataggttcaacggcatcggcgtgacccagaatgtgctgtacgagaaccagaagctgatcgccaatcagtttaacagcgccatcggcaagatccaggactctctgtcctctacagccagcgccctgggcaagctgcaggatgtggtgaatcagaacgcccaggccctgaataccctggtgaagcagctgagctccaacttcggcgccatctctagcgtgctgaatgacatcctgagccggctggacccccctgaggcagaggtgcagatcgacaggctgatcacaggccgcctgcagagcctgcagacctacgtgacacagcagctgatcagggcagcagagatcagagcctccgccaatctggccgccaccaagatgagcgagtgcgtgctgggacagtccaagagggtggacttttgtggcaagggctatcacctgatgtctttcccacagagcgcccctcacggcgtggtgtttctgcacgtgacctacgtgccagcccaggagaagaacttcaccacagcaccagccatctgccacgatggaaaggcacactttcctagggagggcgtgttcgtgtctaacggcacccactggtttgtgacacagcgcaatttctacgagccacagatcatcaccacagacaatacattcgtgagcggcaactgtgatgtggtgatcggcatcgtgaacaataccgtgtatgatccactgcagcccgagctggactcctttaaggaggagctggataagtacttcaagaatcacacctctcccgacgtggatctgggcgacatctccggcatcaatgcctctgtggtgaacatccagaaggagatcgaccggctgaacgaggtggccaagaatctgaacgagagcctgatcgatctgcaggagctgggcaagtatgagcagtacatcaagggctctggcagagagaacctgtatttccagggaggaggaggcagcggatacatccctgaggcaccaagggacggacaggcctacgtgcgcaaggatggcgagtgggtgctgctgtccacctttctgggccatcatcaccaccaccaccaccactga

SEQ ID NO: 1779 - DNA, 3846 bp, Artificial Sequence
  Description of Artificial Sequence: Synthetic polynucleotide
atgggcatcctgccaagcccaggaatgcccgccctgctgtctctggtgagcctgctgtccgtgctgctgatgggatgcgtggcagagacaggcacacagtgcgtgaacctgaccacaaggacccagctgccccctgcctataccaattctttcacacggggcgtgtactatcccgacaaggtgtttagaagctccgtgctgcactccacacaggatctgtttctgcctttcttttctaacgtgacctggttccacgccatccacgtgtccggcaccaatggcacaaagcggttcgacaatcccgtgctgccttttaacgatggcgtgtacttcgccagcaccgagaagtccaacatcatcagaggctggatctttggcaccacactggactctaagacacagagcctgctgatcgtgaacaatgccaccaacgtggtgatcaaggtgtgcgagttccagttttgtaatgatccattcctgggcgtgtactatcacaagaacaataagtcctggatggagtctgagtttcgcgtgtattctagcgccaacaattgcacatttgagtacgtgagccagcccttcctgatggacctggagggcaagcagggcaatttcaagaacctgagggagttcgtgtttaagaatatcgatggctacttcaagatctacagcaagcacaccccaatcaacctggtgcgcgacctgccacagggattctccgccctggagccactggtggatctgcccatcggcatcaacatcacccggtttcagacactgctggccctgcacagatcctacctgacaccaggcgactcctctagcggatggaccgcaggagctgccgcctactatgtgggctatctgcagccccggaccttcctgctgaagtacaacgagaatggcaccatcacagacgcagtggattgcgccctggaccccctgtctgagacaaagtgtacactgaagagctttaccgtggagaagggcatctatcagacaagcaatttcagggtgcagcctaccgagtccatcgtgcgctttcccaatatcacaaacctgtgcccttttggcgaggtgttcaacgccaccagattcgccagcgtgtacgcctggaatcggaagagaatctccaactgcgtggccgactattctgtgctgtacaactccgcctctttcagcacctttaagtgctatggcgtgtctcccacaaagctgaatgatctgtgctttaccaacgtgtacgccgatagcttcgtgatcaggggagacgaagtgagacagatcgcaccaggacagacaggaaagatcgcagactacaattataagctgcctgacgatttcaccggctgcgtgatcgcctggaactccaacaatctggattctaaagtgggcggcaactacaattatctgtacaggctgtttcgcaagtccaatctgaagccattcgagcgggacatctccacagagatctaccaggccggctctaccccctgcaatggcgtggagggctttaactgttatttccctctgcagtcttacggcttccagccaacaaacggcgtgggctatcagccctacagagtggtggtgctgtcctttgagctgctgcacgcaccagcaacagtgtgcggcccaaagaagtctaccaatctggtgaagaacaagtgcgtgaacttcaacttcaacggactgaccggcacaggcgtgctgaccgagagcaataagaagttcctgccttttcagcagttcggcagggacatcgcagattgtacagacgccgtgcgcgaccctcagaccctggagatcctggacatcacaccatgcagcttcggcggcgtgtccgtgatcacaccaggcaccaatacatccaaccaggtggccgtgctgtatcaggacgtgaattgtaccgaggtgcccgtggcaatccacgcagatcagctgacccctacatggcgggtgtactctaccggcagcaacgtgttccagacaagagccggatgcctgatcggagcagagcacgtgaacaatagctatgagtgcgacatccctatcggcgccggcatctgtgccagctaccagacccagacaaactccccatctggagcaggctccgtggccagccagtccatcatcgcctataccatgagcctgggcgccgagaacagcgtggcctactccaacaattctatcgccatccctaccaacttcacaatcagcgtgaccacagagatcctgccagtgtctatgaccaagacaagcgtggactgcacaatgtatatctgtggcgatagcaccgagtgctccaacctgctgctgcagtacggctccttttgtacccagctgaatagagccctgacaggcatcgccgtggagcaggataagaacacacaggaggtgttcgcccaggtgaagcagatctacaagaccccacccatcaaggactttggcggcttcaacttcagccagatcctgcctgatccaagcaagccctccaagaggtcttttatcgaggacctgctgttcaacaaggtgaccctggccgatgccggcttcatcaagcagtatggagattgcctgggagacatcgcagcccgcgacctgatctgtgcccagaagtttaatggcctgaccgtgctgcctccactgctgacagatgagatgatcgcccagtacacatctgccctgctggccggcaccatcacaagcggatggaccttcggcgcaggagccgccctgcagatcccttttgccatgcagatggcctataggttcaacggcatcggcgtgacccagaatgtgctgtacgagaaccagaagctgatcgccaatcagtttaacagcgccatcggcaagatccaggactctctgtcctctacagccagcgccctgggcaagctgcaggatgtggtgaatcagaacgcccaggccctgaataccctggtgaagcagctgagctccaacttcggcgccatctctagcgtgctgaatgacatcctgagccggctggacccccctgaggcagaggtgcagatcgacaggctgatcacaggccgcctgcagagcctgcagacctacgtgacacagcagctgatcagggcagcagagatcagagcctccgccaatctggccgccaccaagatgagcgagtgcgtgctgggacagtccaagagggtggacttttgtggcaagggctatcacctgatgtctttcccacagagcgcccctcacggcgtggtgtttctgcacgtgacctacgtgccagcccaggagaagaacttcaccacagcaccagccatctgccacgatggaaaggcacactttcctagggagggcgtgttcgtgtctaacggcacccactggtttgtgacacagcgcaatttctacgagccacagatcatcaccacagacaatacattcgtgagcggcaactgtgatgtggtgatcggcatcgtgaacaataccgtgtatgatccactgcagcccgagctggactcctttaaggaggagctggataagtacttcaagaatcacacctctcccgacgtggatctgggcgacatctccggcatcaatgcctctgtggtgaacatccagaaggagatcgaccggctgaacgaggtggccaagaatctgaacgagagcctgatcgatctgcaggagctgggcaagtatgagcagtacatcaagggctctggcagagagaacctgtatttccagggaggaggaggcagcggatacatccctgaggcaccaagggacggacaggcctacgtgcgcaaggatggcgagtgggtgctgctgtccacctttctgggccatcatcaccaccaccaccaccactga

SEQ ID NO: 1780 - DNA, 3846 bp, Artificial Sequence
  Description of Artificial Sequence: Synthetic polynucleotide
atgggcatcctgccaagcccaggaatgcccgccctgctgtctctggtgagcctgctgtccgtgctgctgatgggatgcgtggcagagacaggcacacagtgcgtgaacctgaccacaaggacccagctgccccctgcctataccaattctttcacacggggcgtgtactatcccgacaaggtgtttagaagctccgtgctgcactccacacaggatctgtttctgcctttcttttctaacgtgacctggttccacgccatccacgtgtccggcaccaatggcacaaagcggttcgacaatcccgtgctgccttttaacgatggcgtgtacttcgccagcaccgagaagtccaacatcatcagaggctggatctttggcaccacactggactctaagacacagagcctgctgatcgtgaacaatgccaccaacgtggtgatcaaggtgtgcgagttccagttgtgtaatgatccattcctgggcgtgtactatcacaagaacaataagtcctggatggagtctgagtttcgcgtgtattctagcgccaacaattgcacatttgagtacgtgagccagcccttcctgatggacctggagggcaagcagggcaatttcaagaacctgagggagttcgtgtttaagaatatcgatggctacttcaagatctacagcaagcacaccccaatcaacctggtgcgcgacctgccacagggattctccgccctggagccactggtggatctgcccatcggcatcaacatcacccggtttcagacactgctggccctgcacagatcctacctgacaccaggcgactcctctagcggatggaccgcaggagctgccgcctactatgtgggctatctgcagccccggaccttcctgctgaagtacaacgagaatggcaccatcacagacgcagtggattgcgccctggaccccctgtctgagacaaagtgtacactgaagagctttaccgtggagaagggcatctatcagacaagcaatttcagggtgcagcctaccgagtccatcgtgcgctttcccaatatcacaaacctgtgcccttttggcgaggtgttcaacgccaccagattcgccagcgtgtacgcctggaatcggaagagaatctccaactgcgtggccgactattctgtgctgtacaactccgcctctttcagcacctttaagtgctatggcgtgtctcccacaaagctgaatgatctgtgctttaccaacgtgtacgccgatagcttcgtgatcaggggagacgaagtgagacagatcgcaccaggacagacaggaaagatcgcagactacaattataagctgcctgacgatttcaccggctgcgtgatcgcctggaactccaacaatctggattctaaagtgggcggcaactacaattatctgtacaggctgtttcgcaagtccaatctgaagccattcgagcgggacatctccacagagatctaccaggccggctctaccccctgcaatggcgtggagggctttaactgttatttccctctgcagtcttacggcttccagccaacaaacggcgtgggctatcagccctacagagtggtggtgctgtcctttgagctgctgcacgcaccagcaacagtgtgcggcccaaagaagtctaccaatctggtgaagaacaagtgcgtgaacttcaacttcaacggactgaccggcacaggcgtgctgaccgagagcaataagaagttcctgccttttcagcagttcggcagggacatcgcagataccacagacgccgtgcgcgaccctcagaccctggagatcctggacatcacaccatgcagcttcggcggcgtgtccgtgatcacaccaggcaccaatacatccaaccaggtggccgtgctgtatcaggacgtgaattgtaccgaggtgcccgtggcaatccacgcagatcagctgacccctacatggcgggtgtactctaccggcagcaacgtgttccagacaagagccggatgcctgatcggagcagagcacgtgaacaatagctatgagtgcgacatccctatcggcgccggcatctgtgccagctaccagacccagacaaactccccatctggagcaggctccgtggccagccagtccatcatcgcctataccatgagcctgggcgccgagaacagcgtggcctactccaacaattctatcgccatccctaccaacttcacaatcagcgtgaccacagagatcctgccagtgtctatgaccaagacaagcgtggactgcacaatgtatatctgtggcgatagcaccgagtgctccaacctgctgctgcagtacggctccttttgtacccagctgaatagagccctgacaggcatcgccgtggagcaggataagaacacacaggaggtgttcgcccaggtgaagcagatctacaagaccccacccatcaaggactttggcggcttcaacttcagccagatcctgcctgatccaagcaagccctccaagaggtcttttatcgaggacctgctgttcaacaaggtgaccctggccgatgccggcttcatcaagcagtatggagattgcctgggagacatcgcagcccgcgacctgatctgtgcccagaagtttaatggcctgaccgtgctgcctccactgctgacagatgagatgatcgcccagtacacatctgccctgctggccggcaccatcacaagcggatggaccttcggcgcaggagccgccctgcagatcccttttgccatgcagatggcctataggttcaacggcatcggcgtgacccagaatgtgctgtacgagaaccagaagctgatcgccaatcagtttaacagcgccatcggcaagatccaggactctctgtcctctacagccagcgccctgggcaagctgcaggatgtggtgaatcagaacgcccaggccctgaataccctggtgaagcagctgagctccaacttcggcgccatctctagcgtgctgaatgacatcctgagccggctggacccccctgaggcagaggtgcagatcgacaggctgatcacaggccgcctgcagagcctgcagacctacgtgacacagcagctgatcagggcagcagagatcagagcctccgccaatctggccgccaccaagatgagcgagtgcgtgctgggacagtccaagagggtggacttttgtggcaagggctatcacctgatgtctttcccacagagcgcccctcacggcgtggtgtttctgcacgtgacctacgtgccagcccaggagaagaacttcaccacagcaccagccatctgccacgatggaaaggcacactttcctagggagggcgtgttcgtgtctaacggcacccactggtttgtgacacagcgcaatttctacgagccacagatcatcaccacagacaatacattcgtgagcggcaactgtgatgtggtgatcggcatcgtgaacaataccgtgtatgatccactgcagcccgagctggactcctttaaggaggagctggataagtacttcaagaatcacacctctcccgacgtggatctgggcgacatctccggcatcaatgcctctgtggtgaacatccagaaggagatcgaccggctgaacgaggtggccaagaatctgaacgagagcctgatcgatctgcaggagctgggcaagtatgagcagtacatcaagggctctggcagagagaacctgtatttccagggaggaggaggcagcggatacatccctgaggcaccaagggacggacaggcctacgtgcgcaaggatggcgagtgggtgctgctgtccacctttctgggccatcatcaccaccaccaccaccactga

SEQ ID NO: 1781 - DNA, 3846 bp, Artificial Sequence
  Description of Artificial Sequence: Synthetic polynucleotide
atgggcatcctgccaagcccaggaatgcccgccctgctgtctctggtgagcctgctgtccgtgctgctgatgggatgcgtggcagagacaggcacacagtgcgtgaacctgaccacaaggacccagctgccccctgcctataccaattctttcacacggggcgtgtactatcccgacaagatctttagaagcaacgtgctgcactccacacaggatctgtttctgcctttcttttctaacgtgacctggttccacgccttacacgtgaaaggcaccaatggcacaaagcggttcgacaatcccgtgctgccttttaacgatggcgtgtacttcgccgctattgagaagtccaacatcatcagaggctggatctttggcaccacactggactctaagacacagagcctgctgatcgtgaacaatgccaccaacgtggtgatccgcgtgtgcgagttccagttttgtgaaaatccattcctgggcgtgtactatcacaagaacaataagtcctggagggaggaagagtggcgctggtattctagcgccaacaattgcacatttgagtacgtgagccagcccttcctgtacgacctgaatggcaagcagggcaatttccatcatctgagggagttcgtgtttaagaatatcgatggctacttcaagatctacagcaagtgggaaccaatcaacctggtgcgcgacctgccacagggattctccgccctggagccactgatggatctgcccatcggcatcaacatcacccactttcagacatttctgtcactgtcaagatcctaccgtacaccaggcgactcctctagcggatggaccgcaggagctgccgcctactatgtgggctatctgcagccccggaccttcctgctgaagtacgatgagaatggctatatcacagacgcagtggattgcagtctggaccccctgtctgagacaaagtgtaaactgaagagctttaccgtggagaagggcatctatcagacaagcaatttcagggtgcagcctacctatgaaatcgtgcgctttcccaatatcacaaacgaatgcccttttgatgaggtgttcaacgccaccagattcgccagcgtgtacaactggaatcggcaaagaatctccaactgcgtggccgactattctgtgctgtacaactccgcctctttcagcacctttcaatgctatggcgtgtctcccacaaagctgaatgatctgtgctttaccaacgtgtacgccgatatattcgtgatcaggggatcggaagtgagacagatcgcaccaggacagacaggagaaatcgcagactacaattataagctgcctgacgatttcaccggctgcgtgatcgcctggaactccaacaatctggattctacggtgggcggcaactacaattatctgtacaggctgtttcgcaagtccaatatgaagccattcgagcgggacatctccacagagcaataccaggccggctgtaccccctgcaatggcgtggagggctttaactgttatttccctctgcagtcttacggcttccagccaacaaacggcgtgggctatcagccctacagagtggtggtgctgaaatttgagctgctgcacgcaccagcaacagtgtgcggcccaaaggattctaccaatctggtgaagaacaagtgcgtggattataacttcaacggacgaaccggcacaggcgtgctgaccgagagcaataagaagttcctgccttttcagcagttcggcagggacatcagtgataacttagacgccgtgcgcgaccctactaccggggagatcctgtgtatcacaccatgcagcttcggcggcgtgtccgtgatcacaccaggcaccaatacatccaaccaggtggccgtgctgtatcaggacgtgaattgtaccgaggtgcccaatgcaatccactcaaaccagctgcgacctacatggcgggtgtactctaccggcagcaacgtgttccagacaagagccggatgcctgatcggagcagagcacgtgaacaatagctatgagtgcgacatccctatcggcaatggcatctgtgccagctaccagacccagacaaactccccatctggatcaggctccgtgagtagccagtccatcatcgcctataccatgagcctgggcgccgagaacacggtggcctactccaacaataatatcgccatccctaccaacttcacaatcagcgtgcaaacagagatcctgccagtgtctatgaccaaggttagcgtggactgcacaatgtatatctgtggcgatagcaccgagtgccttaacctgctgagtcagtacggctccttttgttcacagctggaaagagccctgaacggcatcgcccgcgagcaggataagaacctcttgaacgtgttcgcccaggtgaagcagatctacaagaccccacccatcaaggactttggcggcttcaacttcagccagatcctgcctgatccaagcaagccctccaagaggtcttttatcgaggacctgctgttcaacaaggtgaccctggccgatttgggcttcgtcaagcagtataaagattgcctgggagatcaagcagcccgcgacctgatctgtgcccagaagtataatggcataatggtgctgcctccactgctgacagatgagatgatcgcccagtacacagcgtcactgctggccggcaccatcacagcgggatggaccttcggcgcaggagccgccctgcagatcccttttgccatgcagatggcctataggttcaacggcatcggcgtgcaacagaatgtgctgtacgagaaccagaagattatcgccaatcagtttaacaatgccatcggcaatatccaggacggactgtccactacagccagcgccctgtcgaagctgcaggatgtggtgaatcagcaagcccaggccctgaatgaactggtgaagcagctgagctccaacttcggcgccatctctagcgtgataaatgacatctacaatcggctggacccccctgaggcacaagctcagatcgacaggctgatcacaggccgcctgcagagcctgcagacctacgtgacacagcagctgatcagggcaactgagatcagagcctccgcccaactggccgccgaaaagatgagcgagtgcgtgaaaggacagtccaacaggtatgggttttgtggcaatggctatcacctgatgtctttcccacagagcgcccctcacggcgtggtgtttctgcacgtgacctacgtgccaactcagtttaagaacttcaccacagcaccaggtatctgccacgatggaaaggcatactttcctagggagggcgtgttcgtgtctaacggcaccgaatggtacataacacagcgcaatttctacgagccacgtatcatcaccacagacaatacattcgtgagcggcaactgtgatgtggtgatcggcatcgtgaacaataccgtgtatgatccactgcagcccgagctggactcctttaaggaggagctggataagtacttcaagaatcacacctctcccgacgtggatctgggcgacatctccggcatcaatgcctctgtggtgaacatccagaaggagatcgaccggctgaacgaggtggccaagaatctgaacgagagcctgatcgatctgcaggagctgggcaagtatgagcagtacatcaagggctctggcagagagaacctgtatttccagggaggaggaggcagcggatacatccctgaggcaccaagggacggacaggcctacgtgcgcaaggatggcgagtgggtgctgctgtccacctttctgggccatcatcaccaccaccaccaccactga

SEQ ID NO: 1782 - DNA, 3846 bp, Artificial Sequence
  Description of Artificial Sequence: Synthetic polynucleotide
atgggcatcctgccaagcccaggaatgcccgccctgctgtctctggtgagcctgctgtccgtgctgctgatgggatgcgtggcagagacaggcacacagtgcgtgaacctgaccacaaggacccagctgccccctgcctataccaattctttcacacggggcgtgtactatcccgacaaggtgtttagaagctccgtgctgcactccacacaggatctgtttctgcctttcttttctaacgtgacctggttccacgccatccacgtgtccggcaccaatggcacaaagcggttcgacaatcccgtgctgccttttaacgatggcgtgtacttcgccagcaccgagaagtccaacatcatcagaggctggatctttggcaccacactggactctaagacacagagcctgctgatcgtgaacaatgccaccaacgtggtgatcaaggtgtgcgagttccagttttgtaatgatccattcctgggcgtgtactatcacaagaacaataagtcctggatggagtctgagtttcgcgtgtattctagcgccaacaattgcacatttgagtacgtgagccagcccttcctgatggacctggagggcaagcagggcaatttcaagaacctgagggagttcgtgtttaagaatatcgatggctacttcaagatctacagcaagcacaccccaatcaacctggtgcgcgacctgccacagggattctccgccctggagccactggtggatctgcccatcggcatcaacatcacccggtttcagacactgctggccctgcacagatcctacctgacaccaggcgactcctctagcggatggaccgcaggagctgccgcctactatgtgggctatctgcagccccggaccttcctgctgaagtacaacgagaatggcaccatcacagacgcagtggattgcgccctggaccccctgtctgagacaaagtgtacactgaagagctttaccgtggagaagggcatctatcagacaagcaatttcagggtgcagcctaccgagtccatcgtgcgctttcccaatatcacaaacctgtgcccttttggcgaggtgttcaacgccaccagattcgccagcgtgtacgcctggaatcggaagagaatctccaactgcgtggccgactattctgtgctgtacaactccgcctctttcagcacctttaagtgctatggcgtgtctcccacaaagctgaatgatctgtgctttaccaacgtgtacgccgatagcttcgtgatcaggggagacgaagtgagacagatcgcaccaggacagacaggaaagatcgcagactacaattataagctgcctgacgatttcaccggctgcgtgatcgcctggaactccaacaatctggattctaaagtgggcggcaactacaattatctgtacaggctgtttcgcaagtccaatctgaagccattcgagcgggacatctccacagagatctaccaggccggctctaccccctgcaatggcgtggagggctttaactgttatttccctctgcagtcttacggcttccagccaacaaacggcgtgggctatcagccctacagagtggtggtgctgtcctttgagctgctgcacgcaccagcaacagtgtgcggcccaaagaagtctaccaatctggtgaagaacaagtgcgtgaacttcaacttcaacggactgaccggcacaggcgtgctgaccgagagcaataagaagttcctgccttttcagcagttcggcagggacatcgcagataccacagacgccgtgcgcgaccctcagaccctggagatcctggacatcacaccatgcagcttcggcggcgtgtccgtgatcacaccaggcaccaatacatccaaccaggtggccgtgctgtatcaggacgtgaattgtaccgaggtgcccgtggcaatccacgcagatcagctgacccctacatggcgggtgtactctaccggcagcaacgtgttccagacaagagccggatgcctgatcggagcagagcacgtgaacaatagctatgagtgcgacatccctatcggcgccggcatctgtgccagctaccagacccagacaaactccccatctggagcaggctccgtggccagccagtccatcatcgcctataccatgagcctgggcgccgagaacagcgtggcctactccaacaattctatcgccatccctaccaacttcacaatcagcgtgaccacagagatcctgccagtgtctatgaccaagacaagcgtggactgcacaatgtatatctgtggcgatagctcggagtgctccaacctgctgctgcagtacggctccttttgtacccagctgaatagagccctgacaggcatcgccgtggagcaggataagaacacacaggaggtgttcgcccaggtgaagcagatctacaagaccccacccatcaaggactttggcggcttcaacttcagccagatcctgcctgatccaagcaagccctccaagaggtcttttatcgaggacctgctgttcaacaaggtgaccctggccgatgccggcttcatcaagcagtatggagattgcctgggagacatcgcagcccgcgacctgatctgtgcccagaagtttaatggcctgaccgtgctgcctccactgctgacagatgagatgatcgcccagtacacatctgccctgctggccggcaccatcacaagcggatggaccttcggcgcaggagccgccctgcagatcccttttgccatgcagatggcctataggttcaacggcatcggcgtgacccagaatgtgctgtacgagaaccagaagctgatcgccaatcagtttaacagcgccatcggcaagatccaggactctctgtcctctacagccagcgccctgggcaagctgcaggatgtggtgaatcagaacgcccaggccctgaataccctggtgaagcagctgagctccaacttcggcgccatctctagcgtgctgaatgacatcctgagccggctggacccccctgaggcagaggtgcagatcgacaggctgatcacaggccgcctgcagagcctgcagacctacgtgacacagcagctgatcagggcagcagagatcagagcctccgccaatctggccgccaccaagatgagcgagtgcgtgctgggacagtccaagagggtggacttttgtggcaagggctatcacctgatgtctttcccacagagcgcccctcacggcgtggtgtttctgcacgtgacctacgtgccagcccaggagaagaacttcaccacagcaccagccatctgccacgatggaaaggcacactttcctagggagggcgtgttcgtgtctaacggcacccactggtttgtgacacagcgcaatttctacgagccacagatcatcaccacagacaatacattcgtgagcggcaactgtgatgtggtgatcggcatcgtgaacaataccgtgtatgatccactgcagcccgagctggactcctttaaggaggagctggataagtacttcaagaatcacacctctcccgacgtggatctgggcgacatctccggcatcaatgcctctgtggtgaacatccagaaggagatcgaccggctgaacgaggtggccaagaatctgaacgagagcctgatcgatctgcaggagctgggcaagtatgagcagtacatcaagggctctggcagagagaacctgtatttccagggaggaggaggcagcggatacatccctgaggcaccaagggacggacaggcctacgtgcgcaaggatggcgagtgggtgctgctgtccacctttctgggccatcatcaccaccaccaccaccactga

SEQ ID NO: 1783 - DNA, 3846 bp, Artificial Sequence
  Description of Artificial Sequence: Synthetic polynucleotide
atgggcatcctgccaagcccaggaatgcccgccctgctgtctctggtgagcctgctgtccgtgctgctgatgggatgcgtggcagagacaggcacacagtgcgtgaacctgaccacaaggacccagctgccccctgcctataccaattctttcacacggggcgtgtactatcccgacaaggtgtttagaagctccgtgctgcactccacacaggatctgtttctgcctttcttttctaacgtgacctggttccacgccatccacgtgtccggcaccaatggcacaaagcggttcgacaatcccgtgctgccttttaacgatggcgtgtacttcgccagcaccgagaagtccaacatcatcagaggctggatctttggcaccacactggactctaagacacagagcctgctgatcgtgaacaatgccaccaacgtggtgatcaaggtgtgcgagttccagttttgtaatgatccattcctgggcgtgtactatcacaagaacaataagtcctggatggagtctgagtttcgcgtgtattctagcgccaacaattgcacatttgagtacgtgagccagcccttcctgatggacctggagggcaagcagggcaatttcaagaacctgagggagttcgtgtttaagaatatcgatggctacttcaagatctacagcaagcacaccccaatcaacctggtgcgcgacctgccacagggattctccgccctggagccactggtggatctgcccatcggcatcaacatcacccggtttcagacactgctggccctgcacagatcctacctgacaccaggcgactcctctagcggatggaccgcaggagctgccgcctactatgtgggctatctgcagccccggaccttcctgctgaagtacaacgagaatggcaccatcacagacgcagtggattgcgccctggaccccctgtctgagacaaagtgtacactgaagagctttaccgtggagaagggcatctatcagacaagcaatttcagggtgcagcctaccgagtccatcgtgcgctttcccaatatcacaaacctgtgcccttttggcgaggtgttcaacgccaccagattcgccagcgtgtacgcctggaatcggaagagaatctccaactgcgtggccgactattctgtgctgtacaactccgcctctttcagcacctttaagtgctatggcgtgtctcccacaaagctgaatgatctgtgctttaccaacgtgtacgccgatagcttcgtgatcaggggagacgaagtgagacagatcgcaccaggacagacaggaaagatcgcagactacaattataagctgcctgacgatttcaccggctgcgtgatcgcctggaactccaacaatctggattctaaagtgggcggcaactacaattatctgtacaggctgtttcgcaagtccaatctgaagccattcgagcgggacatctccacagagatctaccaggccggctctaccccctgcaatggcgtggagggctttaactgttatttccctctgcagtcttacggcttccagccaacaaacggcgtgggctatcagccctacagagtggtggtgctgtcctttgagctgctgcacgcaccagcaacagtgtgcggcccaaagaagtctaccaatctggtgaagaacaagtgcgtgaacttcaacttcaacggactgaccggcacaggcgtgctgaccgagagcaataagaagttcctgccttttcagcagttcggcagggacatcgcagataccacagacgccgtgcgcgaccctcagaccctggagatcctggacatcacaccatgcagcttcggcggcgtgtccgtgatcacaccaggcaccaatacatccaaccaggtggccgtgctgtatcaggacgtgaattgtaccgaggtgcccgtggcaatccacgcagatcagctgacccctacatggcgggtgtactctaccggcagcaacgtgttccagacaagagccggatgcctgatcggagcagagcacgtgaacaatagctatgagtgcgacatccctatcggcgccggcatctgtgccagctaccagacccagacaaactccccatctggagcaggctccgtggccagccagtccatcatcgcctataccatgagcctgggcgccgagaacagcgtggcctactccaacaattctatcgccatccctaccaacttcacaatcagcgtgaccacagagatcctgccagtgtctatgaccaagacaagcgtggactgcacaatgtatatctgtggcgatagcaccgagtgctccaacctgctgctgcagtacggctccttttgtacccagctgaatagagccctgacaggcatcgccgtggagcaggataagaacacacaggaggtgttcgcccaggtgaagcagatctacaagaccccacccatcaaggactttggcggcttcaacttcagccagatcctgcctgatccaagcaagccctccaagaggtcttttatcgaggacctgctgttcaacaaggtgaccctggccgatgccggcttcatcaagcagtatggagattgcctgggagacatcgcagcccgcgacctgatctgtgcccagaagtttaatggcctgaccgtgctgcctccactgctgacagatgagatgatcgcccagtacacatctgccctgctggccggcaccatcacaagcggatggaccttcggcgcaggagccgccctgcagatcccttttgccatgcagatggcctataggttcaacggcatcggcgtgacccagaatgtgctgtacgagaaccagaagctgatcgccaatcagtttaacagcgccatcggcaagatccaggactctctgtcctctacagccagcgccctgggcaagctgcaggatgtggtgaatcagaacgcccaggccctgaataccctggtgaagcagctgagctccaacttcggcgccatctctagcgtgctgaatgacatcctgagccggctggacccccctgaggcagaggtgcagatcgacaggctgatcacaggccgcctgcagagcctgcagacctacgtgacacagcagctgatcagggcagcagagatcagagcctccgccaatctggccgccaccaagatgagcgagtgcgtgctgggacagtccaagagggtggacttttgtggcaagggctatcacctgatgtctttcccacagagcgcccctcacggcgtggtgtttctgcacgtgacctacgtgccagcccaggagaagaacttcaccacagcaccagccatctgccacgatggaaaggcacactttcctagggagggcgtgttcgtgtctaacggcacccactggtttgtgacacagcgcaatttctacgagccacagatcatcaccacagacaatacattcgtgagcggcagttgtgatgtggtgatcggcatcgtgaacaataccgtgtatgatccactgcagcccgagctggactcctttaaggaggagctggataagtacttcaagaatcacacctctcccgacgtggatctgggcgacatctccggcatcaatgcctctgtggtgaacatccagaaggagatcgaccggctgaacgaggtggccaagaatctgaacgagagcctgatcgatctgcaggagctgggcaagtatgagcagtacatcaagggctctggcagagagaacctgtatttccagggaggaggaggcagcggatacatccctgaggcaccaagggacggacaggcctacgtgcgcaaggatggcgagtgggtgctgctgtccacctttctgggccatcatcaccaccaccaccaccactga

SEQ ID NO: 1784 - DNA, 3846 bp, Artificial Sequence
  Description of Artificial Sequence: Synthetic polynucleotide
atgggcatcctgccaagcccaggaatgcccgccctgctgtctctggtgagcctgctgtccgtgctgctgatgggatgcgtggcagagacaggcacacagtgcgtgaacctgaccacaaggacccagctgccccctgcctataccaattctttcacacggggcgtgtactatcccgacaaggtgtttagaagctccattctgcactccacacaggatctgtttctgcctttcttttctaacgtgacctggttccacgccatccacgtgtccggcaccaatggcacaaagcggttcgacaatcccgtgctgccttttaacgatggcgtgtacttcgccagcaccgagaagtccaacatcatcagaggctggatctttggcaccacactggactctaagacacagagcctgctgatcgtgaacaatgccaccaacgtggtgatcaaggtgtgcgagttccagttttgtaatgatccattcctgggcgtgtactatcacaagaacaataagtcctggatggagtctgagtttcgcgtgtattctagcgccaacaattgcacatttgagtacgtgagccagcccttcctgatggacctggagggcaagcagggcaatttcaagaacctgagggagttcgtgtttaagaatatcgatggctacttcaagatctacagcaagcacaccccaatcaacctggtgcgcgacctgccacagggattctccgccctggagccactggtggatctgcccatcggcatcaacatcacccggtttcagacactgctggccctgcacagatcctacctgacaccaggcgactcctctagcggatggaccgcaggagctgccgcctactatgtgggctatctgcagccccggaccttcctgctgaagtacaacgagaatggcaccatcacagacgcagtggattgcgccctggaccccctgtctgagacaaagtgtacactgaagagctttaccgtggagaagggcatctatcagacaagcaatttcagggtgcagcctaccgagtccatcgtgcgctttcccaatatcacaaacctgtgcccttttggcgaggtgttcaacgccaccagattcgccagcgtgtacgcctggaatcggaagagaatctccaactgcgtggccgactattctgtgctgtacaactccgcctctttcagcacctttaagtgctatggcgtgtctcccacaaagctgaatgatctgtgctttaccaacgtgtacgccgatagcttcgtgatcaggggagacgaagtgagacagatcgcaccaggacagacaggaaagatcgcagactacaattataagctgcctgacgatttcaccggctgcgtgatcgcctggaactccaacaatctggattctaaagtgggcggcaactacaattatctgtacaggctgtttcgcaagtccaatctgaagccattcgagcgggacatctccacagagatctaccaggccggctctaccccctgcaatggcgtggagggctttaactgttatttccctctgcagtcttacggcttccagccaacaaacggcgtgggctatcagccctacagagtggtggtgctgtcctttgagctgctgcacgcaccagcaacagtgtgcggcccaaagaagtctaccaatctggtgaagaacaagtgcgtgaacttcaacttcaacggactgaccggcacaggcgtgctgaccgagagcaataagaagttcctgccttttcagcagttcggcagggacatcgcagataccacagacgccgtgcgcgaccctcagaccctggagatcctggacatcacaccatgcagcttcggcggcgtgtccgtgatcacaccaggcaccaatacatccaaccaggtggccgtgctgtatcaggacgtgaattgtaccgaggtgcccgtggcaatccacgcagatcagctgacccctacatggcgggtgtactctaccggcagcaacgtgttccagacaagagccggatgcctgatcggagcagagcacgtgaacaatagctatgagtgcgacatccctatcggcgccggcatctgtgccagctaccagacccagacaaactccccatctggagcaggctccgtggccagccagtccatcatcgcctataccatgagcctgggcgccgagaacagcgtggcctactccaacaattctatcgccatccctaccaacttcacaatcagcgtgaccacagagatcctgccagtgtctatgaccaagacaagcgtggactgcacaatgtatatctgtggcgatagcaccgagtgctccaacctgctgctgcagtacggctccttttgtacccagctgaatagagccctgacaggcatcgccgtggagcaggataagaacacacaggaggtgttcgcccaggtgaagcagatctacaagaccccacccatcaaggactttggcggcttcaacttcagccagatcctgcctgatccaagcaagccctccaagaggtcttttatcgaggacctgctgttcaacaaggtgaccctggccgatgccggcttcatcaagcagtatggagattgcctgggagacatcgcagcccgcgacctgatctgtgcccagaagtttaatggcctgaccgtgctgcctccactgctgacagatgagatgatcgcccagtacacatctgccctgctggccggcaccatcacaagcggatggaccttcggcgcaggagccgccctgcagatcccttttgccatgcagatggcctataggttcaacggcatcggcgtgacccagaatgtgctgtacgagaaccagaagctgatcgccaatcagtttaacagcgccatcggcaagatccaggactctctgtcctctacagccagcgccctgggcaagctgcaggatgtggtgaatcagaacgcccaggccctgaataccctggtgaagcagctgagctccaacttcggcgccatctctagcgtgctgaatgacatcctgagccggctggacccccctgaggcagaggtgcagatcgacaggctgatcacaggccgcctgcagagcctgcagacctacgtgacacagcagctgatcagggcagcagagatcagagcctccgccaatctggccgccaccaagatgagcgagtgcgtgctgggacagtccaagagggtggacttttgtggcaagggctatcacctgatgtctttcccacagagcgcccctcacggcgtggtgtttctgcacgtgacctacgtgccagcccaggagaagaacttcaccacagcaccagccatctgccacgatggaaaggcacactttcctagggagggcgtgttcgtgtctaacggcacccactggtttgtgacacagcgcaatttctacgagccacagatcatcaccacagacaatacattcgtgagcggcaactgtgatgtggtgatcggcatcgtgaacaataccgtgtatgatccactgcagcccgagctggactcctttaaggaggagctggataagtacttcaagaatcacacctctcccgacgtggatctgggcgacatctccggcatcaatgcctctgtggtgaacatccagaaggagatcgaccggctgaacgaggtggccaagaatctgaacgagagcctgatcgatctgcaggagctgggcaagtatgagcagtacatcaagggctctggcagagagaacctgtatttccagggaggaggaggcagcggatacatccctgaggcaccaagggacggacaggcctacgtgcgcaaggatggcgagtgggtgctgctgtccacctttctgggccatcatcaccaccaccaccaccactga

SEQ ID NO: 1785 - DNA, 3846 bp, Artificial Sequence
  Description of Artificial Sequence: Synthetic polynucleotide
atgggcatcctgccaagcccaggaatgcccgccctgctgtctctggtgagcctgctgtccgtgctgctgatgggatgcgtggcagagacaggcacacagtgcgtgaacctgaccacaaggacccagctgccccctgcctataccaattctttcacacggggcgtgtactatcccgacaaggtgtttagaagctccgtgctgcactccacacaggatctgtttctgcctttcttttctaacgtgacctggttccacgccatccacgtgtccggcaccaatggcacaaagcggttcgacaatcccgtgctgccttttaacgatggcgtgtacttcgccagcaccgagaagtccaacatcatcagaggctggatctttggcaccacactggactctaagacacagagcctgctgatcgtgaacaatgccaccaacgtggtgatcaaggtgtgcgagttccagttttgtaatgatccattcctgggcgtgtactatcacaagaacaataagtcctggatggagtctgagtttcgcgtgtattctagcgccaacaattgcacatttgagtacgtgagccagcccttcctgatggacctggagggcaagcagggcaatttcaagaacctgagggagttcgtgtttaagaatatcgatggctacttcaagatctacagcaagcacaccccaatcaacctggtgcgcgacctgccacagggattctccgccctgccgccactggtggatctgcccatcggcatcaacatcacccggtttcagacactgctggccctgcacagatcctacctgacaccaggcgactcctctagcggatggaccgcaggagctgccgcctactatgtgggctatctgcagccccggaccttcctgctgaagtacaacgagaatggcaccatcacagacgcagtggattgcgccctggaccccctgtctgagacaaagtgtacactgaagagctttaccgtggagaagggcatctatcagacaagcaatttcagggtgcagcctaccgagtccatcgtgcgctttcccaatatcacaaacctgtgcccttttggcgaggtgttcaacgccaccagattcgccagcgtgtacgcctggaatcggaagagaatctccaactgcgtggccgactattctgtgctgtacaactccgcctctttcagcacctttaagtgctatggcgtgtctcccacaaagctgaatgatctgtgctttaccaacgtgtacgccgatagcttcgtgatcaggggagacgaagtgagacagatcgcaccaggacagacaggaaagatcgcagactacaattataagctgcctgacgatttcaccggctgcgtgatcgcctggaactccaacaatctggattctaaagtgggcggcaactacaattatctgtacaggctgtttcgcaagtccaatctgaagccattcgagcgggacatctccacagagatctaccaggccggctctaccccctgcaatggcgtggagggctttaactgttatttccctctgcagtcttacggcttccagccaacaaacggcgtgggctatcagccctacagagtggtggtgctgtcctttgagctgctgcacgcaccagcaacagtgtgcggcccaaagaagtctaccaatctggtgaagaacaagtgcgtgaacttcaacttcaacggactgaccggcacaggcgtgctgaccgagagcaataagaagttcctgccttttcagcagttcggcagggacatcgcagataccacagacgccgtgcgcgaccctcagaccctggagatcctggacatcacaccatgcagcttcggcggcgtgtccgtgatcacaccaggcaccaatacatccaaccaggtggccgtgctgtatcaggacgtgaattgtaccgaggtgcccgtggcaatccacgcagatcagctgacccctacatggcgggtgtactctaccggcagcaacgtgttccagacaagagccggatgcctgatcggagcagagcacgtgaacaatagctatgagtgcgacatccctatcggcgccggcatctgtgccagctaccagacccagacaaactccccatctggagcaggctccgtggccagccagtccatcatcgcctataccatgagcctgggcgccgagaacagcgtggcctactccaacaattctatcgccatccctaccaacttcacaatcagcgtgaccacagagatcctgccagtgtctatgaccaagacaagcgtggactgcacaatgtatatctgtggcgatagcaccgagtgctccaacctgctgctgcagtacggctccttttgtacccagctgaatagagccctgacaggcatcgccgtggagcaggataagaacacacaggaggtgttcgcccaggtgaagcagatctacaagaccccacccatcaaggactttggcggcttcaacttcagccagatcctgcctgatccaagcaagccctccaagaggtcttttatcgaggacctgctgttcaacaaggtgaccctggccgatgccggcttcatcaagcagtatggagattgcctgggagacatcgcagcccgcgacctgatctgtgcccagaagtttaatggcctgaccgtgctgcctccactgctgacagatgagatgatcgcccagtacacatctgccctgctggccggcaccatcacaagcggatggaccttcggcgcaggagccgccctgcagatcccttttgccatgcagatggcctataggttcaacggcatcggcgtgacccagaatgtgctgtacgagaaccagaagctgatcgccaatcagtttaacagcgccatcggcaagatccaggactctctgtcctctacagccagcgccctgggcaagctgcaggatgtggtgaatcagaacgcccaggccctgaataccctggtgaagcagctgagctccaacttcggcgccatctctagcgtgctgaatgacatcctgagccggctggacccccctgaggcagaggtgcagatcgacaggctgatcacaggccgcctgcagagcctgcagacctacgtgacacagcagctgatcagggcagcagagatcagagcctccgccaatctggccgccaccaagatgagcgagtgcgtgctgggacagtccaagagggtggacttttgtggcaagggctatcacctgatgtctttcccacagagcgcccctcacggcgtggtgtttctgcacgtgacctacgtgccagcccaggagaagaacttcaccacagcaccagccatctgccacgatggaaaggcacactttcctagggagggcgtgttcgtgtctaacggcacccactggtttgtgacacagcgcaatttctacgagccacagatcatcaccacagacaatacattcgtgagcggcaactgtgatgtggtgatcggcatcgtgaacaataccgtgtatgatccactgcagcccgagctggactcctttaaggaggagctggataagtacttcaagaatcacacctctcccgacgtggatctgggcgacatctccggcatcaatgcctctgtggtgaacatccagaaggagatcgaccggctgaacgaggtggccaagaatctgaacgagagcctgatcgatctgcaggagctgggcaagtatgagcagtacatcaagggctctggcagagagaacctgtatttccagggaggaggaggcagcggatacatccctgaggcaccaagggacggacaggcctacgtgcgcaaggatggcgagtgggtgctgctgtccacctttctgggccatcatcaccaccaccaccaccactga

SEQ ID NO: 1786 - DNA, 3846 bp, Artificial Sequence
  Description of Artificial Sequence: Synthetic polynucleotide
atgggcatcctgccaagcccaggaatgcccgccctgctgtctctggtgagcctgctgtccgtgctgctgatgggatgcgtggcagagacaggcacacagtgcgtgaacctgaccacaaggacccagctgccccctgcctataccaattctttcacacggggcgtgtactatcccgacaaggtgtttagaagctccgtgctgcactccacacaggatctgtttctgcctttcttttctaacgtgacctggttccacgccatccacgtgtccggcaccaatggcacaaagcggttcgacaatcccgtgctgccttttaacgatggcgtgtacttcgccagcaccgagaagtccaacatcatcagaggctggatctttggcaccacactggactctaagacacagagcctgctgatcgtgaacaatgccaccaacgtggtgatcaaggtgtgcgagttccagttttgtaatgatccattcctgggcgtgtactatcacaagaacaataagtcctggatggagtctgagtttcgcgtgtattctagcgccaacaattgcacatttgagtacgtgagccagcccttcctgatggacctggagggcaagcagggcaatttcaagaacctgagggagttcgtgtttaagaatatcgatggctacttcaagatctacagcaagcacaccccaatcaacctggtgcgcgacctgccacagggattctccgccctggagccactggtggatctgcccatcggcatcaacatcacccggtttcagacactgctggccctgcacagatcctacctgacaccaggcgactcctctagcggatggaccgcaggagctgccgcctactatgtgggctatctgcagccccggaccttcctgctgaagtacaacgagaatggcaccatcacagacgcagtggattgcgccctggaccccctgtctgagacaaagtgtacactgaagagctttaccgtggagaagggcatctatcagacaagcaatttcagggtgcagcctaccgagtccatcgtgcgctttcccaatatcacaaacctgtgcccttttggcgaggtgttcaacgccaccagattcgccagcgtgtacgcctggaatcggaagagaatctccaactgcgtggccgactattctgtgctgtacaactccgcctctttcagcacctttaagtgctatggcgtgtctcccacaaagctgaatgatctgtgctttaccaacgtgtacgccgatagcttcgtgatcaggggagacgaagtgagacagatcgcaccaggacagacaggaaagatcgcagactacaattataagctgcctgacgatttcaccggctgcgtgatcgcctggaactccaacaatctggattctaaagtgggcggcaactacaattatctgtacaggctgtttcgcaagtccaatctgaagccattcgagcgggacatctccacagagatctaccaggccggctctaccccctgcaatggcgtggagggctttaactgttatttccctctgcagtcttacggcttccagccaacaaacggcgtgggctatcagccctacagagtggtggtgctgtcctttgagctgctgcacgcaccagcaacagtgtgcggcccaaagaagtctaccaatctggtgaagaacaagtgcgtgaacttcaacttcaacggactgaccggcacaggcgtgctgaccgagagcaataagaagttcctgccttttcagcagttcggcagggacatcgcagataccacagacgccgtgcgcgaccctcagaccctggagatcctggacatcacaccatgcagcttcggcggcgtgtccgtgatcacaccaggcaccaatacatccaaccaggtggccgtgctgtatcaggacgtgaattgtaccgaggtgcccgtggcaatccacgcagatcagctgacccctacatggcgggtgtactctaccggcagcaacgtgttccagacaagagccggatgcctgatcggagcagagcacgtgaacaatagctatgagtgcgacatccctatcggcgccggcatctgtgccagctaccagacccagacaaactccccatctggagcaggctccgtggccagccagtccatcatcgcctataccatgagcctgggcgccgagaacagcgtggcctactccaacaattctatcgccatccctaccaacttcacaatcagcgtgaccacagagatcctgccagtgtctatgaccaagacaagcgtggactgcacaatgtatatctgtggcgatagcaccgagtgctccaacctgctgctgcagtacggctccttttgtacccagctgaatagagccctgaggggcatcgccgtggagcaggataagaacacacaggaggtgttcgcccaggtgaagcagatctacaagaccccacccatcaaggactttggcggcttcaacttcagccagatcctgcctgatccaagcaagccctccaagaggtcttttatcgaggacctgctgttcaacaaggtgaccctggccgatgccggcttcatcaagcagtatggagattgcctgggagacatcgcagcccgcgacctgatctgtgcccagaagtttaatggcctgaccgtgctgcctccactgctgacagatgagatgatcgcccagtacacatctgccctgctggccggcaccatcacaagcggatggaccttcggcgcaggagccgccctgcagatcccttttgccatgcagatggcctataggttcaacggcatcggcgtgacccagaatgtgctgtacgagaaccagaagctgatcgccaatcagtttaacagcgccatcggcaagatccaggactctctgtcctctacagccagcgccctgggcaagctgcaggatgtggtgaatcagaacgcccaggccctgaataccctggtgaagcagctgagctccaacttcggcgccatctctagcgtgctgaatgacatcctgagccggctggacccccctgaggcagaggtgcagatcgacaggctgatcacaggccgcctgcagagcctgcagacctacgtgacacagcagctgatcagggcagcagagatcagagcctccgccaatctggccgccaccaagatgagcgagtgcgtgctgggacagtccaagagggtggacttttgtggcaagggctatcacctgatgtctttcccacagagcgcccctcacggcgtggtgtttctgcacgtgacctacgtgccagcccaggagaagaacttcaccacagcaccagccatctgccacgatggaaaggcacactttcctagggagggcgtgttcgtgtctaacggcacccactggtttgtgacacagcgcaatttctacgagccacagatcatcaccacagacaatacattcgtgagcggcaactgtgatgtggtgatcggcatcgtgaacaataccgtgtatgatccactgcagcccgagctggactcctttaaggaggagctggataagtacttcaagaatcacacctctcccgacgtggatctgggcgacatctccggcatcaatgcctctgtggtgaacatccagaaggagatcgaccggctgaacgaggtggccaagaatctgaacgagagcctgatcgatctgcaggagctgggcaagtatgagcagtacatcaagggctctggcagagagaacctgtatttccagggaggaggaggcagcggatacatccctgaggcaccaagggacggacaggcctacgtgcgcaaggatggcgagtgggtgctgctgtccacctttctgggccatcatcaccaccaccaccaccactga

SEQ ID NO: 1787 - DNA, 3846 bp, Artificial Sequence
  Description of Artificial Sequence: Synthetic polynucleotide
atgggcatcctgccaagcccaggaatgcccgccctgctgtctctggtgagcctgctgtccgtgctgctgatgggatgcgtggcagagacaggcacacagtgcgtgaacctgaccacaaggacccagctgccccctgcctataccaattctttcacacggggcgtgtactatcccgacaaggtgtttagaagctccgtgctgcactccacacaggatctgtttctgcctttcttttctaacgtgacctggttccacgccatccacgtgtccggcaccaatggcacaaagcggttcgacaatcccgtgctgccttttaacgatggcgtgtacttcgccagcaccgagaagtccaacatcatcagaggctggatctttggcaccacactggactctaagacacagagcctgctgatcgtgaacaatgccaccaacgtggtgatcaaggtgtgcgagttccagttttgtaatgatccattcctgggcgtgtactatcacaagaacaataagtcctggatggagtctgagtttcgcgtgtattctagcgccaacaattgcacatttgagtacgtgagccagcccttcctgatggacctggagggcaagcagggcaatttcaagaacctgagggagttcgtgtttaagaatatcgatggctacttcaagatctacagcaagcacaccccaatcaacctggtgcgcgacctgccacagggattctccgccctggagccactggtggatctgcccatcggcatcaacatcacccggtttcagacactgctggccctgcacagatcctacctgacaccaggcgactcctctagcggatggaccgcaggagctgccgcctactatgtgggctatctgcagccccggaccttcctgctgaagtacaacgagaatggcaccatcacagacgcagtggattgcgccctggaccccctgtctgagacaaagtgtacactgaagagctttaccgtggagaagggcatctatcagacaagcaatttcagggtgcagcctaccgagtccatcgtgcgctttcccaatatcacaaacctgtgcccttttggcgaggtgttcaacgccaccagattcgccagcgtgtacgcctggaatcggaagagaatctccaactgcgtggccgactattctgtgctgtacaactccgcctctttcagcacctttaagtgctatggcgtgtctcccacaaagctgaatgatctgtgctttaccaacgtgtacgccgatagcttcgtgatcaggggagacgaagtgagacagatcgcaccaggacagacaggaaagatcgcagactacaattataagctgcctgacgatttcaccggctgcgtgatcgcctggaactccaacaatctggattctaaagtgggcggcaactacaattatctgtacaggctgtttcgcaagtccaatctgaagccattcgagcgggacatctccacagagatctaccaggccggctctaccccctgcaatggcgtggagggctttaactgttatttccctctgcagtcttacggcttccagccaacaaacggcgtgggctatcagccctacagagtggtggtgctgtcctttgagctgctgcacgcaccagcaacagtgtgcggcccaaagaagtctaccaatctggtgaagaacaagtgcgtgaacttcaacttcaacggactgaccggcacaggcgtgctgaccgagagcaataagaagttcctgccttttcagcagttcggcagggacgtcgcagataccacagacgccgtgcgcgaccctcagaccctggagatcctggacatcacaccatgcagcttcggcggcgtgtccgtgatcacaccaggcaccaatacatccaaccaggtggccgtgctgtatcaggacgtgaattgtaccgaggtgcccgtggcaatccacgcagatcagctgacccctacatggcgggtgtactctaccggcagcaacgtgttccagacaagagccggatgcctgatcggagcagagcacgtgaacaatagctatgagtgcgacatccctatcggcgccggcatctgtgccagctaccagacccagacaaactccccatctggagcaggctccgtggccagccagtccatcatcgcctataccatgagcctgggcgccgagaacagcgtggcctactccaacaattctatcgccatccctaccaacttcacaatcagcgtgaccacagagatcctgccagtgtctatgaccaagacaagcgtggactgcacaatgtatatctgtggcgatagcaccgagtgctccaacctgctgctgcagtacggctccttttgtacccagctgaatagagccctgacaggcatcgccgtggagcaggataagaacacacaggaggtgttcgcccaggtgaagcagatctacaagaccccacccatcaaggactttggcggcttcaacttcagccagatcctgcctgatccaagcaagccctccaagaggtcttttatcgaggacctgctgttcaacaaggtgaccctggccgatgccggcttcatcaagcagtatggagattgcctgggagacatcgcagcccgcgacctgatctgtgcccagaagtttaatggcctgaccgtgctgcctccactgctgacagatgagatgatcgcccagtacacatctgccctgctggccggcaccatcacaagcggatggaccttcggcgcaggagccgccctgcagatcccttttgccatgcagatggcctataggttcaacggcatcggcgtgacccagaatgtgctgtacgagaaccagaagctgatcgccaatcagtttaacagcgccatcggcaagatccaggactctctgtcctctacagccagcgccctgggcaagctgcaggatgtggtgaatcagaacgcccaggccctgaataccctggtgaagcagctgagctccaacttcggcgccatctctagcgtgctgaatgacatcctgagccggctggacccccctgaggcagaggtgcagatcgacaggctgatcacaggccgcctgcagagcctgcagacctacgtgacacagcagctgatcagggcagcagagatcagagcctccgccaatctggccgccaccaagatgagcgagtgcgtgctgggacagtccaagagggtggacttttgtggcaagggctatcacctgatgtctttcccacagagcgcccctcacggcgtggtgtttctgcacgtgacctacgtgccagcccaggagaagaacttcaccacagcaccagccatctgccacgatggaaaggcacactttcctagggagggcgtgttcgtgtctaacggcacccactggtttgtgacacagcgcaatttctacgagccacagatcatcaccacagacaatacattcgtgagcggcaactgtgatgtggtgatcggcatcgtgaacaataccgtgtatgatccactgcagcccgagctggactcctttaaggaggagctggataagtacttcaagaatcacacctctcccgacgtggatctgggcgacatctccggcatcaatgcctctgtggtgaacatccagaaggagatcgaccggctgaacgaggtggccaagaatctgaacgagagcctgatcgatctgcaggagctgggcaagtatgagcagtacatcaagggctctggcagagagaacctgtatttccagggaggaggaggcagcggatacatccctgaggcaccaagggacggacaggcctacgtgcgcaaggatggcgagtgggtgctgctgtccacctttctgggccatcatcaccaccaccaccaccactga

SEQ ID NO: 1788 - DNA, 3846 bp, Artificial Sequence
  Description of Artificial Sequence: Synthetic polynucleotide
atgggcatcctgccaagcccaggaatgcccgccctgctgtctctggtgagcctgctgtccgtgctgctgatgggatgcgtggcagagacaggcacacagtgcgtgaacctgaccacaaggacccagctgccccctgcctataccaattctttcacacggggcgtgtactatcccgacaaggtgtttagaagctccgtgctgcactccacacaggatctgtttctgcctttcttttctaacgtgacctggttccacgccatccacgtgtccggcaccaatggcacaaagcggttcgacaatcccgtgctgccttttaacgatggcgtgtacttcgccagcaccgagaagtccaacatcatcagaggctggatctttggcaccacactggacggaaagacacagagcctgctgatcgtgaacaatgccaccaacgtggtgatcaaggtgtgcgagttccagttttgtaatgatccattcctgggcgtgtactatcacaagaacaataagtcctggatggagtctgagtttcgcgtgtattctagcgccaacaattgcacatttgagtacgtgagccagcccttcctgatggacctggagggcaagcagggcaatttcaagaacctgagggagttcgtgtttaagaatatcgatggctacttcaagatctacagcaagcacaccccaatcaacctggtgcgcgacctgccacagggattctccgccctggagccactggtggatctgcccatcggcatcaacatcacccggtttcagacactgctggccctgcacagatcctacctgacaccaggcgactcctctagcggatggaccgcaggagctgccgcctactatgtgggctatctgcagccccggaccttcctgctgaagtacaacgagaatggcaccatcacagacgcagtggattgcgccctggaccccctgtctgagacaaagtgtacactgaagagctttaccgtggagaagggcatctatcagacaagcaatttcagggtgcagcctaccgagtccatcgtgcgctttcccaatatcacaaacctgtgcccttttggcgaggtgttcaacgccaccagattcgccagcgtgtacgcctggaatcggaagagaatctccaactgcgtggccgactattctgtgctgtacaactccgcctctttcagcacctttaagtgctatggcgtgtctcccacaaagctgaatgatctgtgctttaccaacgtgtacgccgatagcttcgtgatcaggggagacgaagtgagacagatcgcaccaggacagacaggaaagatcgcagactacaattataagctgcctgacgatttcaccggctgcgtgatcgcctggaactccaacaatctggattctaaagtgggcggcaactacaattatctgtacaggctgtttcgcaagtccaatctgaagccattcgagcgggacatctccacagagatctaccaggccggctctaccccctgcaatggcgtggagggctttaactgttatttccctctgcagtcttacggcttccagccaacaaacggcgtgggctatcagccctacagagtggtggtgctgtcctttgagctgctgcacgcaccagcaacagtgtgcggcccaaagaagtctaccaatctggtgaagaacaagtgcgtgaacttcaacttcaacggactgaccggcacaggcgtgctgaccgagagcaataagaagttcctgccttttcagcagttcggcagggacatcgcagataccacagacgccgtgcgcgaccctcagaccctggagatcctggacatcacaccatgcagcttcggcggcgtgtccgtgatcacaccaggcaccaatacatccaaccaggtggccgtgctgtatcaggacgtgaattgtaccgaggtgcccgtggcaatccacgcagatcagctgacccctacatggcgggtgtactctaccggcagcaacgtgttccagacaagagccggatgcctgatcggagcagagcacgtgaacaatagctatgagtgcgacatccctatcggcgccggcatctgtgccagctaccagacccagacaaactccccatctggagcaggctccgtggccagccagtccatcatcgcctataccatgagcctgggcgccgagaacagcgtggcctactccaacaattctatcgccatccctaccaacttcacaatcagcgtgaccacagagatcctgccagtgtctatgaccaagacaagcgtggactgcacaatgtatatctgtggcgatagcaccgagtgctccaacctgctgctgcagtacggctccttttgtacccagctgaatagagccctgacaggcatcgccgtggagcaggataagaacacacaggaggtgttcgcccaggtgaagcagatctacaagaccccacccatcaaggactttggcggcttcaacttcagccagatcctgcctgatccaagcaagccctccaagaggtcttttatcgaggacctgctgttcaacaaggtgaccctggccgatgccggcttcatcaagcagtatggagattgcctgggagacatcgcagcccgcgacctgatctgtgcccagaagtttaatggcctgaccgtgctgcctccactgctgacagatgagatgatcgcccagtacacatctgccctgctggccggcaccatcacaagcggatggaccttcggcgcaggagccgccctgcagatcccttttgccatgcagatggcctataggttcaacggcatcggcgtgacccagaatgtgctgtacgagaaccagaagctgatcgccaatcagtttaacagcgccatcggcaagatccaggactctctgtcctctacagccagcgccctgggcaagctgcaggatgtggtgaatcagaacgcccaggccctgaataccctggtgaagcagctgagctccaacttcggcgccatctctagcgtgctgaatgacatcctgagccggctggacccccctgaggcagaggtgcagatcgacaggctgatcacaggccgcctgcagagcctgcagacctacgtgacacagcagctgatcagggcagcagagatcagagcctccgccaatctggccgccaccaagatgagcgagtgcgtgctgggacagtccaagagggtggacttttgtggcaagggctatcacctgatgtctttcccacagagcgcccctcacggcgtggtgtttctgcacgtgacctacgtgccagcccaggagaagaacttcaccacagcaccagccatctgccacgatggaaaggcacactttcctagggagggcgtgttcgtgtctaacggcacccactggtttgtgacacagcgcaatttctacgagccacagatcatcaccacagacaatacattcgtgagcggcaactgtgatgtggtgatcggcatcgtgaacaataccgtgtatgatccactgcagcccgagctggactcctttaaggaggagctggataagtacttcaagaatcacacctctcccgacgtggatctgggcgacatctccggcatcaatgcctctgtggtgaacatccagaaggagatcgaccggctgaacgaggtggccaagaatctgaacgagagcctgatcgatctgcaggagctgggcaagtatgagcagtacatcaagggctctggcagagagaacctgtatttccagggaggaggaggcagcggatacatccctgaggcaccaagggacggacaggcctacgtgcgcaaggatggcgagtgggtgctgctgtccacctttctgggccatcatcaccaccaccaccaccactga

SEQ ID NO: 1789 - DNA, 3846 bp, Artificial Sequence
  Description of Artificial Sequence: Synthetic polynucleotide
atgggcatcctgccaagcccaggaatgcccgccctgctgtctctggtgagcctgctgtccgtgctgctgatgggatgcgtggcagagacaggcacacagtgcgtgaacctgaccacaaggacccagctgccccctgcctataccaattctttcacacggggcgtgtactatcccgacaaggtgtttagaagctccgtgctgcactccacacaggatctgtttctgcctttcttttctaacgtgacctggttccacgccatccacgtgtccggcaccaatggcacaaagcggttcgacaatcccgtgctgccttttaacgatggcgtgtacttcgccagcaccgagaagtccaacatcatcagaggctggatctttggcaccacactggactctaagacacagagcctgctgatcgtgaacaatgccaccaacgtggtgatcaaggtgtgcgagttccagttttgtaatgatccattcctgggcgtgtactatcacaagaacaataagtcctggatggagtctgagtttcgcgtgtattctagcgccaacaattgcacatttgagtacgtgagccagcccttcctgatggacctggagggcaagcagggcaatttcaagaacctgagggagttcgtgtttaagaatatcgatggctacttcaagatctacagcaagcacaccccaatcaacctggtgcgcgacctgccacagggattctccgccctggagccactggtggatctgcccatcggcatcaacatcacccggtttcagacactgctggccctgcacagatcctacctgacaccaggcgactcctctagcggatggaccgcaggagctgccgcctactatgtgggctatctgcagccccggaccttcctgctgaagtacaacgagaatggcaccatcacagacgcagtggattgcgccctggaccccctgtctgagacaaagtgtacactgaagagctttaccgtggagaagggcatctatcagacaagcaatttcagggtgcagcctaccgagtccatcgtgcgctttcccaatatcacaaacctgtgcccttttggcgaggtgttcaacgccaccagattcgccagcgtgtacgcctggaatcggaagagaatctccaactgcgtggccgactattctgtgctgtacaactccgcctctttcagcacctttaagtgctatggcgtgtctcccacaaagctgaatgatctgtgctttaccaacgtgtacgccgatagcttcgtgatcaggggagacgaagtgagacagatcgcaccaggacagacaggaaagatcgcagactacaattataagctgcctgacgatttcaccggctgcgtgatcgcctggaactccaacaatctggattctaaagtgggcggcaactacaattatctgtacaggctgtttcgcaagtccaatctgaagccattcgagcgggacatctccacagagatctaccaggccggctctaccccctgcaatggcgtggagggctttaactgttatttccctctgcagtcttacggcttccagccaacaaacggcgtgggctatcagccctacagagtggtggtgctgtcctttgagctgctgcacgcaccagcaacagtgtgcggcccaaagaagtctaccaatctggtgaagaacaagtgcgtgaacttcaacttcaacggactgaccggcacaggcgtgctgaccgagagcaataagaagttcctgccttttcagcagttcggcagggacatcgcagataccacagacgccgtgcgcgaccctcagaccctggagatcctggacatcacaccatgcagcttcggcggcgtgtccgtgatcacaccaggcaccaatacatccaaccaggtggccgtgctgtatcaggacgtgaattgtaccgaggtgcccgtggcaatccacgcagatcagctgcgacctacatggcgggtgtactctaccggcagcaacgtgttccagacaagagccggatgcctgatcggagcagagcacgtgaacaatagctatgagtgcgacatccctatcggcgccggcatctgtgccagctaccagacccagacaaactccccatctggagcaggctccgtggccagccagtccatcatcgcctataccatgagcctgggcgccgagaacagcgtggcctactccaacaattctatcgccatccctaccaacttcacaatcagcgtgaccacagagatcctgccagtgtctatgaccaagacaagcgtggactgcacaatgtatatctgtggcgatagcaccgagtgctccaacctgctgctgcagtacggctccttttgtacccagctgaatagagccctgacaggcatcgccgtggagcaggataagaacacacaggaggtgttcgcccaggtgaagcagatctacaagaccccacccatcaaggactttggcggcttcaacttcagccagatcctgcctgatccaagcaagccctccaagaggtcttttatcgaggacctgctgttcaacaaggtgaccctggccgatgccggcttcatcaagcagtatggagattgcctgggagacatcgcagcccgcgacctgatctgtgcccagaagtttaatggcctgaccgtgctgcctccactgctgacagatgagatgatcgcccagtacacatctgccctgctggccggcaccatcacaagcggatggaccttcggcgcaggagccgccctgcagatcccttttgccatgcagatggcctataggttcaacggcatcggcgtgacccagaatgtgctgtacgagaaccagaagctgatcgccaatcagtttaacagcgccatcggcaagatccaggactctctgtcctctacagccagcgccctgggcaagctgcaggatgtggtgaatcagaacgcccaggccctgaataccctggtgaagcagctgagctccaacttcggcgccatctctagcgtgctgaatgacatcctgagccggctggacccccctgaggcagaggtgcagatcgacaggctgatcacaggccgcctgcagagcctgcagacctacgtgacacagcagctgatcagggcagcagagatcagagcctccgccaatctggccgccaccaagatgagcgagtgcgtgctgggacagtccaagagggtggacttttgtggcaagggctatcacctgatgtctttcccacagagcgcccctcacggcgtggtgtttctgcacgtgacctacgtgccagcccaggagaagaacttcaccacagcaccagccatctgccacgatggaaaggcacactttcctagggagggcgtgttcgtgtctaacggcacccactggtttgtgacacagcgcaatttctacgagccacagatcatcaccacagacaatacattcgtgagcggcaactgtgatgtggtgatcggcatcgtgaacaataccgtgtatgatccactgcagcccgagctggactcctttaaggaggagctggataagtacttcaagaatcacacctctcccgacgtggatctgggcgacatctccggcatcaatgcctctgtggtgaacatccagaaggagatcgaccggctgaacgaggtggccaagaatctgaacgagagcctgatcgatctgcaggagctgggcaagtatgagcagtacatcaagggctctggcagagagaacctgtatttccagggaggaggaggcagcggatacatccctgaggcaccaagggacggacaggcctacgtgcgcaaggatggcgagtgggtgctgctgtccacctttctgggccatcatcaccaccaccaccaccactga

SEQ ID NO: 1790 - DNA, 3846 bp, Artificial Sequence
  Description of Artificial Sequence: Synthetic polynucleotide
atgggcatcctgccaagcccaggaatgcccgccctgctgtctctggtgagcctgctgtccgtgctgctgatgggatgcgtggcagagacaggcacacagtgcgtgaacctgaccacaaggacccagctgccccctgcctataccaattctttcacacggggcgtgtactatcccgacaaggtgtttagaagctccgtgctgcactccacacaggatctgtttctgcctttcttttctaacgtgacctggttccacgccatccacgtgtccggcaccaatggcacaaagcggttcgacaatcccgtgctgccttttaacgatggcgtgtacttcgccagcaccgagaagtccaacatcatcagaggctggatctttggcaccacactggactctaagacacagagcctgctgatcgtgaacaatgccaccaacgtggtgatcaaggtgtgcgagttccagttttgtaatgatccattcctgggcgtgtactatcacaagaacaataagtcctggatggagtctgagtttcgcgtgtattctagcgccaacaattgcacatttgagtacgtgagccagcccttcctgatggacctggagggcaagcagggcaatttcaagaacctgagggagttcgtgtttaagaatatcgatggctacttcaagatctacagcaagcacaccccaatcaacctggtgcgcgacctgccacagggattctccgccctggagccactggtggatctgcccatcggcatcaacatcacccggtttcagacactgctggccctgcacagatcctacctgacaccaggcgactcctctagcggatggaccgcaggagctgccgcctactatgtgggctatctgcagccccggaccttcctgctgaagtacaacgagaatggcaccatcacagacgcagtggattgcgcccatgaccccctgtctgagacaaagtgtacactgaagagctttaccgtggagaagggcatctatcagacaagcaatttcagggtgcagcctaccgagtccatcgtgcgctttcccaatatcacaaacctgtgcccttttggcgaggtgttcaacgccaccagattcgccagcgtgtacgcctggaatcggaagagaatctccaactgcgtggccgactattctgtgctgtacaactccgcctctttcagcacctttaagtgctatggcgtgtctcccacaaagctgaatgatctgtgctttaccaacgtgtacgccgatagcttcgtgatcaggggagacgaagtgagacagatcgcaccaggacagacaggaaagatcgcagactacaattataagctgcctgacgatttcaccggctgcgtgatcgcctggaactccaacaatctggattctaaagtgggcggcaactacaattatctgtacaggctgtttcgcaagtccaatctgaagccattcgagcgggacatctccacagagatctaccaggccggctctaccccctgcaatggcgtggagggctttaactgttatttccctctgcagtcttacggcttccagccaacaaacggcgtgggctatcagccctacagagtggtggtgctgtcctttgagctgctgcacgcaccagcaacagtgtgcggcccaaagaagtctaccaatctggtgaagaacaagtgcgtgaacttcaacttcaacggactgaccggcacaggcgtgctgaccgagagcaataagaagttcctgccttttcagcagttcggcagggacatcgcagataccacagacgccgtgcgcgaccctcagaccctggagatcctggacatcacaccatgcagcttcggcggcgtgtccgtgatcacaccaggcaccaatacatccaaccaggtggccgtgctgtatcaggacgtgaattgtaccgaggtgcccgtggcaatccacgcagatcagctgacccctacatggcgggtgtactctaccggcagcaacgtgttccagacaagagccggatgcctgatcggagcagagcacgtgaacaatagctatgagtgcgacatccctatcggcgccggcatctgtgccagctaccagacccagacaaactccccatctggagcaggctccgtggccagccagtccatcatcgcctataccatgagcctgggcgccgagaacagcgtggcctactccaacaattctatcgccatccctaccaacttcacaatcagcgtgaccacagagatcctgccagtgtctatgaccaagacaagcgtggactgcacaatgtatatctgtggcgatagcaccgagtgctccaacctgctgctgcagtacggctccttttgtacccagctgaatagagccctgacaggcatcgccgtggagcaggataagaacacacaggaggtgttcgcccaggtgaagcagatctacaagaccccacccatcaaggactttggcggcttcaacttcagccagatcctgcctgatccaagcaagccctccaagaggtcttttatcgaggacctgctgttcaacaaggtgaccctggccgatgccggcttcatcaagcagtatggagattgcctgggagacatcgcagcccgcgacctgatctgtgcccagaagtttaatggcctgaccgtgctgcctccactgctgacagatgagatgatcgcccagtacacatctgccctgctggccggcaccatcacaagcggatggaccttcggcgcaggagccgccctgcagatcccttttgccatgcagatggcctataggttcaacggcatcggcgtgacccagaatgtgctgtacgagaaccagaagctgatcgccaatcagtttaacagcgccatcggcaagatccaggactctctgtcctctacagccagcgccctgggcaagctgcaggatgtggtgaatcagaacgcccaggccctgaataccctggtgaagcagctgagctccaacttcggcgccatctctagcgtgctgaatgacatcctgagccggctggacccccctgaggcagaggtgcagatcgacaggctgatcacaggccgcctgcagagcctgcagacctacgtgacacagcagctgatcagggcagcagagatcagagcctccgccaatctggccgccaccaagatgagcgagtgcgtgctgggacagtccaagagggtggacttttgtggcaagggctatcacctgatgtctttcccacagagcgcccctcacggcgtggtgtttctgcacgtgacctacgtgccagcccaggagaagaacttcaccacagcaccagccatctgccacgatggaaaggcacactttcctagggagggcgtgttcgtgtctaacggcacccactggtttgtgacacagcgcaatttctacgagccacagatcatcaccacagacaatacattcgtgagcggcaactgtgatgtggtgatcggcatcgtgaacaataccgtgtatgatccactgcagcccgagctggactcctttaaggaggagctggataagtacttcaagaatcacacctctcccgacgtggatctgggcgacatctccggcatcaatgcctctgtggtgaacatccagaaggagatcgaccggctgaacgaggtggccaagaatctgaacgagagcctgatcgatctgcaggagctgggcaagtatgagcagtacatcaagggctctggcagagagaacctgtatttccagggaggaggaggcagcggatacatccctgaggcaccaagggacggacaggcctacgtgcgcaaggatggcgagtgggtgctgctgtccacctttctgggccatcatcaccaccaccaccaccactga

SEQ ID NO: 1791 - DNA, 3846 bp, Artificial Sequence
  Description of Artificial Sequence: Synthetic polynucleotide
atgggcatcctgccaagcccaggaatgcccgccctgctgtctctggtgagcctgctgtccgtgctgctgatgggatgcgtggcagagacaggcacacagtgcgtgaacctgaccacaaggacccagctgccccctgcctataccaattctttcacacggggcgtgtactatcccgacaaggtgtttagaagctccgtgctgcactccacacaggatctgtttctgcctttcttttctaacgtgacctggttccacgccatccacgtgtccggcaccaatggcacaaagcggttcgacaatcccgtgctgccttttaacgatggcgtgtacttcgccagcaccgagaagtccaacatcatcagaggctggatctttggcaccacactggactctaagacacagagcctgctgatcgtgaacaatgccaccaacgtggtgatcaaggtgtgcgagttccagttttgtaatgatccattcctgggcgtgtactatcacaagaacaataagtcctggatggagtctgagtttcgcgtgtattctagcgccaacaattgcacatttgagtacgtgagccagcccttcctgatggacctggagggcaagcagggcaatttcaagaacctgagggagttcgtgtttaagaatatcgatggctacttcaagatctacagcaagcacaccccaatcaacctggtgcgcgacctgccacagggattctccgccctggagccactggtggatctgcccatcggcatcaacatcacccggtttcagacactgctggccctgcacagatcctacctgacaccaggcgactcctctagcggatggaccgcaggagctgccgcctactatgtgggctatctgcagccccggaccttcctgctgaagtacaacgagaatggcaccatcacagacgcagtggattgcgccctggaccccctgtctgagacaaagtgtacactgaagagctttaccgtggagaagggcatctatcagacaagcaatttcagggtgcagcctaccgagtccatcgtgcgctttcccaatatcacaaacctgtgcccttttggcgaggtgttcaacgccaccagattcgccagcgtgtacgcctggaatcggaagagaatctccaactgcgtggccgactattctgtgctgtacaactccgcctctttcagcacctttaagtgctatggcgtgtctcccacaaagctgaatgatctgtgctttaccaacgtgtacgccgatagcttcgtgatcaggggagacgaagtgagacagatcgcaccaggacagacaggaaagatcgcagactacaattataagctgcctgacgatttcaccggctgcgtgatcgcctggaactccaacaatctggattctaaagtgggcggcaactacaattatctgtacaggctgtttcgcaagtccaatctgaagccattcgagcgggacatctccacagagatctaccaggccggctctaccccctgcaatggcgtggagggctttaactgttatttccctctgcagtcttacggcttccagccaacaaacggcgtgggctatcagccctacagagtggtggtgctgtcctttgagctgctgcacgcaccagcaacagtgtgcggcccaaagaagtctaccaatctggtgaagaacaagtgcgtgaacttcaacttcaacggactgaccggcacaggcgtgctgaccgagagcaataagaagttcctgccttttcagcagttcggcagggacatcgcagataccacagacgccgtgcgcgaccctcagaccctggagatcctggacatcacaccatgcagcttcggcggcgtgtccgtgatcacaccaggcaccaatacatccaaccaggtggccgtgctgtatcaggacgtgaattgtaccgaggtgccccatgcaatccacgcagatcagctgacccctacatggcgggtgtactctaccggcagcaacgtgttccagacaagagccggatgcctgatcggagcagagcacgtgaacaatagctatgagtgcgacatccctatcggcgccggcatctgtgccagctaccagacccagacaaactccccatctggagcaggctccgtggccagccagtccatcatcgcctataccatgagcctgggcgccgagaacagcgtggcctactccaacaattctatcgccatccctaccaacttcacaatcagcgtgaccacagagatcctgccagtgtctatgaccaagacaagcgtggactgcacaatgtatatctgtggcgatagcaccgagtgctccaacctgctgctgcagtacggctccttttgtacccagctgaatagagccctgacaggcatcgccgtggagcaggataagaacacacaggaggtgttcgcccaggtgaagcagatctacaagaccccacccatcaaggactttggcggcttcaacttcagccagatcctgcctgatccaagcaagccctccaagaggtcttttatcgaggacctgctgttcaacaaggtgaccctggccgatgccggcttcatcaagcagtatggagattgcctgggagacatcgcagcccgcgacctgatctgtgcccagaagtttaatggcctgaccgtgctgcctccactgctgacagatgagatgatcgcccagtacacatctgccctgctggccggcaccatcacaagcggatggaccttcggcgcaggagccgccctgcagatcccttttgccatgcagatggcctataggttcaacggcatcggcgtgacccagaatgtgctgtacgagaaccagaagctgatcgccaatcagtttaacagcgccatcggcaagatccaggactctctgtcctctacagccagcgccctgggcaagctgcaggatgtggtgaatcagaacgcccaggccctgaataccctggtgaagcagctgagctccaacttcggcgccatctctagcgtgctgaatgacatcctgagccggctggacccccctgaggcagaggtgcagatcgacaggctgatcacaggccgcctgcagagcctgcagacctacgtgacacagcagctgatcagggcagcagagatcagagcctccgccaatctggccgccaccaagatgagcgagtgcgtgctgggacagtccaagagggtggacttttgtggcaagggctatcacctgatgtctttcccacagagcgcccctcacggcgtggtgtttctgcacgtgacctacgtgccagcccaggagaagaacttcaccacagcaccagccatctgccacgatggaaaggcacactttcctagggagggcgtgttcgtgtctaacggcacccactggtttgtgacacagcgcaatttctacgagccacagatcatcaccacagacaatacattcgtgagcggcaactgtgatgtggtgatcggcatcgtgaacaataccgtgtatgatccactgcagcccgagctggactcctttaaggaggagctggataagtacttcaagaatcacacctctcccgacgtggatctgggcgacatctccggcatcaatgcctctgtggtgaacatccagaaggagatcgaccggctgaacgaggtggccaagaatctgaacgagagcctgatcgatctgcaggagctgggcaagtatgagcagtacatcaagggctctggcagagagaacctgtatttccagggaggaggaggcagcggatacatccctgaggcaccaagggacggacaggcctacgtgcgcaaggatggcgagtgggtgctgctgtccacctttctgggccatcatcaccaccaccaccaccactga

SEQ ID NO: 1792 - DNA, 3846 bp, Artificial Sequence
  Description of Artificial Sequence: Synthetic polynucleotide
atgggcatcctgccaagcccaggaatgcccgccctgctgtctctggtgagcctgctgtccgtgctgctgatgggatgcgtggcagagacaggcacacagtgcgtgaacctgaccacaaggacccagctgccccctgcctataccaattctttcacacggggcgtgtactatcccgacaaggtgtttagaagctccgtgctgcactccacacaggatctgtttctgcctttcttttctaacgtgacctggttccacgccatccacgtgtccggcaccaatggcacaaagcggttcgacaatcccgtgctgccttttaacgatggcgtgtacttcgccagcaccgagaagtccaacatcatcagaggctggatctttggcaccacactggactctaagacacagagcctgctgatcgtgaacaatgccaccaacgtggtgatcaaggtgtgcgagttccagttttgtaatgatccattcctgggcgtgtactatcacaagaacaataagtcctggatggagtctgagtttcgcgtgtattctagcgccaacaattgcacatttgagtacgtgagccagcccttcctgatggacctggagggcaagcagggcaatttcaagaacctgagggagttcgtgtttaagaatatcgatggctacttcaagatctacagcaagcacaccccaatcaacctggtgcgcgacctgccacagggattctccgccctggagccactggtgaatctgcccatcggcatcaacatcacccggtttcagacactgctggccctgcacagatcctacctgacaccaggcgactcctctagcggatggaccgcaggagctgccgcctactatgtgggctatctgcagccccggaccttcctgctgaagtacaacgagaatggcaccatcacagacgcagtggattgcgccctggaccccctgtctgagacaaagtgtacactgaagagctttaccgtggagaagggcatctatcagacaagcaatttcagggtgcagcctaccgagtccatcgtgcgctttcccaatatcacaaacctgtgcccttttggcgaggtgttcaacgccaccagattcgccagcgtgtacgcctggaatcggaagagaatctccaactgcgtggccgactattctgtgctgtacaactccgcctctttcagcacctttaagtgctatggcgtgtctcccacaaagctgaatgatctgtgctttaccaacgtgtacgccgatagcttcgtgatcaggggagacgaagtgagacagatcgcaccaggacagacaggaaagatcgcagactacaattataagctgcctgacgatttcaccggctgcgtgatcgcctggaactccaacaatctggattctaaagtgggcggcaactacaattatctgtacaggctgtttcgcaagtccaatctgaagccattcgagcgggacatctccacagagatctaccaggccggctctaccccctgcaatggcgtggagggctttaactgttatttccctctgcagtcttacggcttccagccaacaaacggcgtgggctatcagccctacagagtggtggtgctgtcctttgagctgctgcacgcaccagcaacagtgtgcggcccaaagaagtctaccaatctggtgaagaacaagtgcgtgaacttcaacttcaacggactgaccggcacaggcgtgctgaccgagagcaataagaagttcctgccttttcagcagttcggcagggacatcgcagataccacagacgccgtgcgcgaccctcagaccctggagatcctggacatcacaccatgcagcttcggcggcgtgtccgtgatcacaccaggcaccaatacatccaaccaggtggccgtgctgtatcaggacgtgaattgtaccgaggtgcccgtggcaatccacgcagatcagctgacccctacatggcgggtgtactctaccggcagcaacgtgttccagacaagagccggatgcctgatcggagcagagcacgtgaacaatagctatgagtgcgacatccctatcggcgccggcatctgtgccagctaccagacccagacaaactccccatctggagcaggctccgtggccagccagtccatcatcgcctataccatgagcctgggcgccgagaacagcgtggcctactccaacaattctatcgccatccctaccaacttcacaatcagcgtgaccacagagatcctgccagtgtctatgaccaagacaagcgtggactgcacaatgtatatctgtggcgatagcaccgagtgctccaacctgctgctgcagtacggctccttttgtacccagctgaatagagccctgacaggcatcgccgtggagcaggataagaacacacaggaggtgttcgcccaggtgaagcagatctacaagaccccacccatcaaggactttggcggcttcaacttcagccagatcctgcctgatccaagcaagccctccaagaggtcttttatcgaggacctgctgttcaacaaggtgaccctggccgatgccggcttcatcaagcagtatggagattgcctgggagacatcgcagcccgcgacctgatctgtgcccagaagtttaatggcctgaccgtgctgcctccactgctgacagatgagatgatcgcccagtacacatctgccctgctggccggcaccatcacaagcggatggaccttcggcgcaggagccgccctgcagatcccttttgccatgcagatggcctataggttcaacggcatcggcgtgacccagaatgtgctgtacgagaaccagaagctgatcgccaatcagtttaacagcgccatcggcaagatccaggactctctgtcctctacagccagcgccctgggcaagctgcaggatgtggtgaatcagaacgcccaggccctgaataccctggtgaagcagctgagctccaacttcggcgccatctctagcgtgctgaatgacatcctgagccggctggacccccctgaggcagaggtgcagatcgacaggctgatcacaggccgcctgcagagcctgcagacctacgtgacacagcagctgatcagggcagcagagatcagagcctccgccaatctggccgccaccaagatgagcgagtgcgtgctgggacagtccaagagggtggacttttgtggcaagggctatcacctgatgtctttcccacagagcgcccctcacggcgtggtgtttctgcacgtgacctacgtgccagcccaggagaagaacttcaccacagcaccagccatctgccacgatggaaaggcacactttcctagggagggcgtgttcgtgtctaacggcacccactggtttgtgacacagcgcaatttctacgagccacagatcatcaccacagacaatacattcgtgagcggcaactgtgatgtggtgatcggcatcgtgaacaataccgtgtatgatccactgcagcccgagctggactcctttaaggaggagctggataagtacttcaagaatcacacctctcccgacgtggatctgggcgacatctccggcatcaatgcctctgtggtgaacatccagaaggagatcgaccggctgaacgaggtggccaagaatctgaacgagagcctgatcgatctgcaggagctgggcaagtatgagcagtacatcaagggctctggcagagagaacctgtatttccagggaggaggaggcagcggatacatccctgaggcaccaagggacggacaggcctacgtgcgcaaggatggcgagtgggtgctgctgtccacctttctgggccatcatcaccaccaccaccaccactga

SEQ ID NO: 1793 - DNA, 3846 bp, Artificial Sequence
  Description of Artificial Sequence: Synthetic polynucleotide
atgggcatcctgccaagcccaggaatgcccgccctgctgtctctggtgagcctgctgtccgtgctgctgatgggatgcgtggcagagacaggcacacagtgcgtgaacctgaccacaaggacccagctgccccctgcctataccaattctttcacacggggcgtgtactatcccgacaaggtgtttagaagctccgtgctgcactccacacaggatctgtttctgcctttcttttctaacgtgacctggttccacgccatccacgtgtccggcaccaatggcacaaagcggttcgacaatcccgtgctgccttttaacgatggcgtgtacttcgccagcaccgagaagtccaacatcatcagaggctggatctttggcaccacactggactctaagacacagagcctgctgatcgtgaacaatgccaccaacgtggtgatcaaggtgtgcgagttccagttttgtaatgatccattcctgggcgtgtactatcacaagaacaataagtcctggatggagtctgagtttcgcgtgtattctagcgccaacaattgcacatttgagtacgtgagccagcccttcctgatggacctggagggcaagcagggcaatttcaagaacctgagggagttcgtgtttaagaatatcgatggctacttcaagatctacagcaagcacaccccaatcaacctggtgcgcgacctgccacagggattctccgccctggagccactggtggatctgcccatcggcatcaacatcacccggtttcagacactgctggccctgcacagatcctacctgacaccaggcgactcctctagcggatggaccgcaggatcagccgcctactatgtgggctatctgcagccccggaccttcctgctgaagtacaacgagaatggcaccatcacagacgcagtggattgcgccctggaccccctgtctgagacaaagtgtacactgaagagctttaccgtggagaagggcatctatcagacaagcaatttcagggtgcagcctaccgagtccatcgtgcgctttcccaatatcacaaacctgtgcccttttggcgaggtgttcaacgccaccagattcgccagcgtgtacgcctggaatcggaagagaatctccaactgcgtggccgactattctgtgctgtacaactccgcctctttcagcacctttaagtgctatggcgtgtctcccacaaagctgaatgatctgtgctttaccaacgtgtacgccgatagcttcgtgatcaggggagacgaagtgagacagatcgcaccaggacagacaggaaagatcgcagactacaattataagctgcctgacgatttcaccggctgcgtgatcgcctggaactccaacaatctggattctaaagtgggcggcaactacaattatctgtacaggctgtttcgcaagtccaatctgaagccattcgagcgggacatctccacagagatctaccaggccggctctaccccctgcaatggcgtggagggctttaactgttatttccctctgcagtcttacggcttccagccaacaaacggcgtgggctatcagccctacagagtggtggtgctgtcctttgagctgctgcacgcaccagcaacagtgtgcggcccaaagaagtctaccaatctggtgaagaacaagtgcgtgaacttcaacttcaacggactgaccggcacaggcgtgctgaccgagagcaataagaagttcctgccttttcagcagttcggcagggacatcgcagataccacagacgccgtgcgcgaccctcagaccctggagatcctggacatcacaccatgcagcttcggcggcgtgtccgtgatcacaccaggcaccaatacatccaaccaggtggccgtgctgtatcaggacgtgaattgtaccgaggtgcccgtggcaatccacgcagatcagctgacccctacatggcgggtgtactctaccggcagcaacgtgttccagacaagagccggatgcctgatcggagcagagcacgtgaacaatagctatgagtgcgacatccctatcggcgccggcatctgtgccagctaccagacccagacaaactccccatctggagcaggctccgtggccagccagtccatcatcgcctataccatgagcctgggcgccgagaacagcgtggcctactccaacaattctatcgccatccctaccaacttcacaatcagcgtgaccacagagatcctgccagtgtctatgaccaagacaagcgtggactgcacaatgtatatctgtggcgatagcaccgagtgctccaacctgctgctgcagtacggctccttttgtacccagctgaatagagccctgacaggcatcgccgtggagcaggataagaacacacaggaggtgttcgcccaggtgaagcagatctacaagaccccacccatcaaggactttggcggcttcaacttcagccagatcctgcctgatccaagcaagccctccaagaggtcttttatcgaggacctgctgttcaacaaggtgaccctggccgatgccggcttcatcaagcagtatggagattgcctgggagacatcgcagcccgcgacctgatctgtgcccagaagtttaatggcctgaccgtgctgcctccactgctgacagatgagatgatcgcccagtacacatctgccctgctggccggcaccatcacaagcggatggaccttcggcgcaggagccgccctgcagatcccttttgccatgcagatggcctataggttcaacggcatcggcgtgacccagaatgtgctgtacgagaaccagaagctgatcgccaatcagtttaacagcgccatcggcaagatccaggactctctgtcctctacagccagcgccctgggcaagctgcaggatgtggtgaatcagaacgcccaggccctgaataccctggtgaagcagctgagctccaacttcggcgccatctctagcgtgctgaatgacatcctgagccggctggacccccctgaggcagaggtgcagatcgacaggctgatcacaggccgcctgcagagcctgcagacctacgtgacacagcagctgatcagggcagcagagatcagagcctccgccaatctggccgccaccaagatgagcgagtgcgtgctgggacagtccaagagggtggacttttgtggcaagggctatcacctgatgtctttcccacagagcgcccctcacggcgtggtgtttctgcacgtgacctacgtgccagcccaggagaagaacttcaccacagcaccagccatctgccacgatggaaaggcacactttcctagggagggcgtgttcgtgtctaacggcacccactggtttgtgacacagcgcaatttctacgagccacagatcatcaccacagacaatacattcgtgagcggcaactgtgatgtggtgatcggcatcgtgaacaataccgtgtatgatccactgcagcccgagctggactcctttaaggaggagctggataagtacttcaagaatcacacctctcccgacgtggatctgggcgacatctccggcatcaatgcctctgtggtgaacatccagaaggagatcgaccggctgaacgaggtggccaagaatctgaacgagagcctgatcgatctgcaggagctgggcaagtatgagcagtacatcaagggctctggcagagagaacctgtatttccagggaggaggaggcagcggatacatccctgaggcaccaagggacggacaggcctacgtgcgcaaggatggcgagtgggtgctgctgtccacctttctgggccatcatcaccaccaccaccaccactga

SEQ ID NO: 1794 - DNA, 3846 bp, Artificial Sequence
  Description of Artificial Sequence: Synthetic polynucleotide
atgggcatcctgccaagcccaggaatgcccgccctgctgtctctggtgagcctgctgtccgtgctgctgatgggatgcgtggcagagacaggcacacagtgcgtgaacctgaccacaaggacccagctgccccctgcctataccaattctttcacacggggcgtgtactatcccgacaaggtgtttagaagctccgtgctgcactccacacaggatctgtttctgcctttcttttctaacgtgacctggttccacgccatccacgtgtccggcaccaatggcacaaagcggttcgacaatcccgtgctgccttttaacgatggcgtgtacttcgccagcaccgagaagtccaacatcatcagaggctggatctttggcaccacactggactctaagacacagagcctgctgatcgtgaacaatgccaccaacgtggtgatcaaggtgtgcgagttccagttttgtaatgatccattcctgggcgtgtactatcacaagaacaataagtcctggatggagtctgagtttcgcgtgtattctagcgccaacaattgcacatttgagtacgtgagcgaccccttcctgatggacctggagggcaagcagggcaatttcaagaacctgagggagttcgtgtttaagaatatcgatggctacttcaagatctacagcaagcacaccccaatcaacctggtgcgcgacctgccacagggattctccgccctggagccactggtggatctgcccatcggcatcaacatcacccggtttcagacactgctggccctgcacagatcctacctgacaccaggcgactcctctagcggatggaccgcaggagctgccgcctactatgtgggctatctgcagccccggaccttcctgctgaagtacaacgagaatggcaccatcacagacgcagtggattgcgccctggaccccctgtctgagacaaagtgtacactgaagagctttaccgtggagaagggcatctatcagacaagcaatttcagggtgcagcctaccgagtccatcgtgcgctttcccaatatcacaaacctgtgcccttttggcgaggtgttcaacgccaccagattcgccagcgtgtacgcctggaatcggaagagaatctccaactgcgtggccgactattctgtgctgtacaactccgcctctttcagcacctttaagtgctatggcgtgtctcccacaaagctgaatgatctgtgctttaccaacgtgtacgccgatagcttcgtgatcaggggagacgaagtgagacagatcgcaccaggacagacaggaaagatcgcagactacaattataagctgcctgacgatttcaccggctgcgtgatcgcctggaactccaacaatctggattctaaagtgggcggcaactacaattatctgtacaggctgtttcgcaagtccaatctgaagccattcgagcgggacatctccacagagatctaccaggccggctctaccccctgcaatggcgtggagggctttaactgttatttccctctgcagtcttacggcttccagccaacaaacggcgtgggctatcagccctacagagtggtggtgctgtcctttgagctgctgcacgcaccagcaacagtgtgcggcccaaagaagtctaccaatctggtgaagaacaagtgcgtgaacttcaacttcaacggactgaccggcacaggcgtgctgaccgagagcaataagaagttcctgccttttcagcagttcggcagggacatcgcagataccacagacgccgtgcgcgaccctcagaccctggagatcctggacatcacaccatgcagcttcggcggcgtgtccgtgatcacaccaggcaccaatacatccaaccaggtggccgtgctgtatcaggacgtgaattgtaccgaggtgcccgtggcaatccacgcagatcagctgacccctacatggcgggtgtactctaccggcagcaacgtgttccagacaagagccggatgcctgatcggagcagagcacgtgaacaatagctatgagtgcgacatccctatcggcgccggcatctgtgccagctaccagacccagacaaactccccatctggagcaggctccgtggccagccagtccatcatcgcctataccatgagcctgggcgccgagaacagcgtggcctactccaacaattctatcgccatccctaccaacttcacaatcagcgtgaccacagagatcctgccagtgtctatgaccaagacaagcgtggactgcacaatgtatatctgtggcgatagcaccgagtgctccaacctgctgctgcagtacggctccttttgtacccagctgaatagagccctgacaggcatcgccgtggagcaggataagaacacacaggaggtgttcgcccaggtgaagcagatctacaagaccccacccatcaaggactttggcggcttcaacttcagccagatcctgcctgatccaagcaagccctccaagaggtcttttatcgaggacctgctgttcaacaaggtgaccctggccgatgccggcttcatcaagcagtatggagattgcctgggagacatcgcagcccgcgacctgatctgtgcccagaagtttaatggcctgaccgtgctgcctccactgctgacagatgagatgatcgcccagtacacatctgccctgctggccggcaccatcacaagcggatggaccttcggcgcaggagccgccctgcagatcccttttgccatgcagatggcctataggttcaacggcatcggcgtgacccagaatgtgctgtacgagaaccagaagctgatcgccaatcagtttaacagcgccatcggcaagatccaggactctctgtcctctacagccagcgccctgggcaagctgcaggatgtggtgaatcagaacgcccaggccctgaataccctggtgaagcagctgagctccaacttcggcgccatctctagcgtgctgaatgacatcctgagccggctggacccccctgaggcagaggtgcagatcgacaggctgatcacaggccgcctgcagagcctgcagacctacgtgacacagcagctgatcagggcagcagagatcagagcctccgccaatctggccgccaccaagatgagcgagtgcgtgctgggacagtccaagagggtggacttttgtggcaagggctatcacctgatgtctttcccacagagcgcccctcacggcgtggtgtttctgcacgtgacctacgtgccagcccaggagaagaacttcaccacagcaccagccatctgccacgatggaaaggcacactttcctagggagggcgtgttcgtgtctaacggcacccactggtttgtgacacagcgcaatttctacgagccacagatcatcaccacagacaatacattcgtgagcggcaactgtgatgtggtgatcggcatcgtgaacaataccgtgtatgatccactgcagcccgagctggactcctttaaggaggagctggataagtacttcaagaatcacacctctcccgacgtggatctgggcgacatctccggcatcaatgcctctgtggtgaacatccagaaggagatcgaccggctgaacgaggtggccaagaatctgaacgagagcctgatcgatctgcaggagctgggcaagtatgagcagtacatcaagggctctggcagagagaacctgtatttccagggaggaggaggcagcggatacatccctgaggcaccaagggacggacaggcctacgtgcgcaaggatggcgagtgggtgctgctgtccacctttctgggccatcatcaccaccaccaccaccactga

SEQ ID NO: 1795 - protein, 1281 aa, Artificial Sequence
  Description of Artificial Sequence: Synthetic polypeptide
MGILPSPGMPALLSLVSLLSVLLMGCVAETGTQCVNLTTRTQLPPAYTNSFTRGVYYPDKVFRSSVLHSTQDLFLPFFSNVTWFHAIHVSGTNGTKRFDNPVLPFNDGVYFASTEKSNIIRGWIFGTTLDSKTQSLLIVNNATNVVIKVCEFQFCNDPFLGVYYHKNNKSWMESEFRVYSSANNCTFEYVSQPFLMDLEGKQGNFKNLREFVFKNIDGYFKIYSKHTPINLVRDLPQGFSALEPLVDLPIGINITRFQTLLALHRSYLTPGDSSSGWTAGAAAYYVGYLQPRTFLLKYNENGTITDAVDCALDPLSETKCTLKSFTVEKGIYQTSNFRVQPTESIVRFPNITNLCPFGEVFNATRFASVYAWNRKRISNCVADYSVLYNSASFSTFKCYGVSPTKLNDLCFTNVYADSFVIRGDEVRQIAPGQTGKIADYNYKLPDDFTGCVIAWNSNNLDSKVGGNYNYLYRLFRKSNLKPFERDISTEIYQAGSTPCNGVEGFNCYFPLQSYGFQPTNGVGYQPYRVVVLSFELLHAPATVCGPKKSTNLVKNKCVNFNFNGLTGTGVLTESNKKFLPFQQFGRDIADTTDAVRDPQTLEILDITPCSFGGVSVITPGTNTSNQVAVLYQDVNCTEVPVAIHADQLTPTWRVYSTGSNVFQTRAGCLIGAEHVNNSYECDIPIGAGICASYQTQTNSPSGAGSVASQSIIAYTMSLGAENSVAYSNNSIAIPTNFTISVTTEILPVSMTKTSVDCTMYICGDSTECSNLLLQYGSFCTQLNRALTGIAVEQDKNTQEVFAQVKQIYKTPPIKDFGGFNFSQILPDPSKPSKRSFIEDLLFNKVTLADAGFIKQYGDCLGDIAARDLICAQKFNGLTVLPPLLTDEMIAQYTSALLAGTITSGWTFGAGAALQIPFAMQMAYRFNGIGVTQNVLYENQKLIANQFNSAIGKIQDSLSSTASALGKLQDVVNQNAQALNTLVKQLSSNFGAISSVLNDILSRLDPPEAEVQVDRLITGRLQSLQTYVTQQLIRAAEIRASANLAATKMSECVLGQSKRVDFCGKGYHLMSFPQSAPHGVVFLHVTYVPAQEKNFTTAPAICHDGKAHFPREGVFVSNGTHWFVTQRNFYEPQIITTDNTFVSGNCDVVIGIVNNTVYDPLQPELDSFKEELDKYFKNHTSPDVDLGDISGINASVVNIQKEIDRLNEVAKNLNESLIDLQELGKYEQYIKGSGRENLYFQGGGGSGYIPEAPRDGQAYVRKDGEWVLLSTFLGHHHHHHHH

SEQ ID NO: 1796 - protein, 1281 aa, Artificial Sequence
  Description of Artificial Sequence: Synthetic polypeptide
MGILPSPGMPALLSLVSLLSVLLMGCVAETGTQCVNLTTRTQLPPAYTNSFTRGVYYPDKVFRSSVLHSTQDLFLPFFSNVTWFHAIHVSGTNGTKRFDNPVLPFNDGVYFASTEKSNIIRGWIFGTTLDSKTQSLLIVNNATNVVIKVCEFQFCNDPFLGVYYHKNNKSWMESEFRVYSSANNCTFEYVSQPFLMDLEGKQGNFKNLREFVFKNIDGYFKIYSKHTPINLVRDLPQGFSALEPLVDLPIGINITRFQTLLALHRSYLTPGDSSSGWTAGAAAYYVGYLQPRTFLLKYNENGTITDAVDCALDPLSETKCTLKSFTVEKGIYQTSNFRVQPTESIVRFPNITNLCPFGEVFNATRFASVYAWNRKRISNCVADYSVLYNSASFSTFKCYGVSPTKLNDLCFTNVYADSFVIRGDEVRQIAPGQTGKIADYNYKLPDDFTGCVIAWNSNNLDSKVGGNYNYLYRLFRKSNLKPFERDISTEIYQAGSTPCNGVEGFNCYFPLQSYGFQPTNGVGYQPYRVVVLSFELLHAPATVCGPKKSTNLVKNKCVNFNFNGLTGTGVLTESNKKFLPFQQFGRDIADTTDAVRDPQTNEILDITPCSFGGVSVITPGTNTSNQVAVLYQDVNCTEVPVAIHADQLTPTWRVYSTGSNVFQTRAGCLIGAEHVNNSYECDIPIGAGICASYQTQTNSPSGAGSVASQSIIAYTMSLGAENSVAYSNNSIAIPTNFTISVTTEILPVSMTKTSVDCTMYICGDSTECSNLLLQYGSFCTQLNRALTGIAVEQDKNTQEVFAQVKQIYKTPPIKDFGGFNFSQILPDPSKPSKRSFIEDLLFNKVTLADAGFIKQYGDCLGDIAARDLICAQKFNGLTVLPPLLTDEMIAQYTSALLAGTITSGWTFGAGAALQIPFAMQMAYRFNGIGVTQNVLYENQKLIANQFNSAIGKIQDSLSSTASALGKLQDVVNQNAQALNTLVKQLSSNFGAISSVLNDILSRLDPPEAEVQIDRLITGRLQSLQTYVTQQLIRAAEIRASANLAATKMSECVLGQSKRVDFCGKGYHLMSFPQSAPHGVVFLHVTYVPAQEKNFTTAPAICHDGKAHFPREGVFVSNGTHWFVTQRNFYEPQIITTDNTFVSGNCDVVIGIVNNTVYDPLQPELDSFKEELDKYFKNHTSPDVDLGDISGINASVVNIQKEIDRLNEVAKNLNESLIDLQELGKYEQYIKGSGRENLYFQGGGGSGYIPEAPRDGQAYVRKDGEWVLLSTFLGHHHHHHHH

SEQ ID NO: 1797 - protein, 1281 aa, Artificial Sequence
  Description of Artificial Sequence: Synthetic polypeptide
MGILPSPGMPALLSLVSLLSVLLMGCVAETGTQCVNLTTRTQLPPAYTNSFTRGVYYPDKVFRSSVLHSTQDLFLPFFSNVTWFHAIHVSGTNGTKRFDNPVLPFNDGVYFASTEKSNIIRGWIFGTTLDSKTQSLLIVNNATNVVIKVCEFQFCNDPFLGVYYHKNNKSWMESEFRVYSSANNCTFEYVSQPFLMDLEGKQGNFKNLREFVFKNIDGYFKIYSKHTPINLVRDLPQGFSALEPLVDLPIGINITRFQTLLALHRSYLTPGDSSSGWTAGAAAYYVGYLQPRTFLLKYNENGTITDAVDCALDPLSETKCTLKSFTVEKGIYQTSNFRVQPTESIVRFPNITNLCPFGEVFNATRFASVYAWNRKRISNCVADYSVLYNSASFSTFKCYGVSPTKLNDLCFTNVYADSFVIRGDEVRQIAPGQTGKIADYNYKLPDDFTGCVIAWNSNNLDSKVGGNYNYLYRLFRKSNLKPFERDISTEIYQAGSTPCNGVEGFNCYFPLQSYGFQPTNGVGYQPYRVVVLSFELLHAPATVCGPKKSTNLVKNKCVNFNFNGLTGTGVLTESNKKFLPFQQFGRDIADTTDAVRDPQTLEILDITPCSFGGVSVITPGTNTSNQVAVLYQDVNCTEVPVAIHADQLTPTWRVYSTGSNVFQTRAGCLIGAEHVNNSYECDIPIGAGICASYQTQTNSPSGAGSVASQSIIAYTMSLGAENSVAYSNNSIAIPTNFTISVTTEILPVSMTKTSVDCTMYICGDSTECSNLLLQYGSFCTQLNRALTGIAVEQDKNTQEVFAQVKQIYKTPPIKDFGGFNFSQILPDPSKPSKRSFIEDLLFNKVTLADAGFIKQYGDCLGDIAARDLICAQKFNGLTVLPPLLTDEMIAQYTSALLAGTITSGWTFGAGAALQIPFAMQMAYRFNGIGVTQNVLYENQKLIANQFNSAIGNIQDSLSSTASALGKLQDVVNQNAQALNTLVKQLSSNFGAISSVLNDILSRLDPPEAEVQIDRLITGRLQSLQTYVTQQLIRAAEIRASANLAATKMSECVLGQSKRVDFCGKGYHLMSFPQSAPHGVVFLHVTYVPAQEKNFTTAPAICHDGKAHFPREGVFVSNGTHWFVTQRNFYEPQIITTDNTFVSGNCDVVIGIVNNTVYDPLQPELDSFKEELDKYFKNHTSPDVDLGDISGINASVVNIQKEIDRLNEVAKNLNESLIDLQELGKYEQYIKGSGRENLYFQGGGGSGYIPEAPRDGQAYVRKDGEWVLLSTFLGHHHHHHHH

SEQ ID NO: 1798 - protein, 1281 aa, Artificial Sequence
  Description of Artificial Sequence: Synthetic polypeptide
MGILPSPGMPALLSLVSLLSVLLMGCVAETGTQCVNLTTRTQLPPAYTNSFTRGVYYPDKVFRSSVLHSTQDLFLPFFSNVTWFHAIHVSGTNGTKRFDNPVLPFNDGVYFASTEKSNIIRGWIFGTTLDSKTQSLLIVNNATNVVIKVCEFQFCNDPFLGVYYHKNNKSWMESEFRVYSSANNCTFEYVSQPFLMDLEGKQGNFKNLREFVFKNIDGYFKIYSKHTPINLVRDLPQGFSALEPLVDLPIGINITRFQTLLALHRSYLTPGDSSSGWTAGAAAYYVGYLQPRTFLLKYNENGTITDAVDCALDPLSETKCTLKSFTVEKGIYQTSNFRVQPTESIVRFPNITNLCPFGEVFNATRFASVYAWNRKRISNCVADYSVLYNSASFSTFKCYGVSPTKLNDLCFTNVYADSFVIRGDEVRQIAPGQTGKIADYNYKLPDDFTGCVIAWNSNNLDSKVGGNYNYLYRLFRKSNLKPFERDISTEIYQAGSTPCNGVEGFNCYFPLQSYGFQPTNGVGYQPYRVVVLSFELLHAPATVCGPKKSTNLVKNKCVNFNFNGLTGTGVLTESNKKFLPFQQFGRDIADTTDAVRDPQTLEILDITPCSFGGVSVITPGTNTSNQVAVLYQDVNCTEVPVAIHADQLTPTWRVYSTGSNVFQTRAGCLIGAEHVNNSYECDIPIGAGICASYQTQTNSPSGAGSVASQSIIAYTMSLGAENSVAYSNNSIAIPTNFAISVTTEILPVSMTKTSVDCTMYICGDSTECSNLLLQYGSFCTQLNRALTGIAVEQDKNTQEVFAQVKQIYKTPPIKDFGGFNFSQILPDPSKPSKRSFIEDLLFNKVTLADAGFIKQYGDCLGDIAARDLICAQKFNGLTVLPPLLTDEMIAQYTSALLAGTITSGWTFGAGAALQIPFAMQMAYRFNGIGVTQNVLYENQKLIANQFNSAIGKIQDSLSSTASALGKLQDVVNQNAQALNTLVKQLSSNFGAISSVLNDILSRLDPPEAEVQIDRLITGRLQSLQTYVTQQLIRAAEIRASANLAATKMSECVLGQSKRVDFCGKGYHLMSFPQSAPHGVVFLHVTYVPAQEKNFTTAPAICHDGKAHFPREGVFVSNGTHWFVTQRNFYEPQIITTDNTFVSGNCDVVIGIVNNTVYDPLQPELDSFKEELDKYFKNHTSPDVDLGDISGINASVVNIQKEIDRLNEVAKNLNESLIDLQELGKYEQYIKGSGRENLYFQGGGGSGYIPEAPRDGQAYVRKDGEWVLLSTFLGHHHHHHHH

SEQ ID NO: 1799 - protein, 1281 aa, Artificial Sequence
  Description of Artificial Sequence: Synthetic polypeptide
MGILPSPGMPALLSLVSLLSVLLMGCVAETGTQCVNLTTRTQLPPAYTNSFTRGVYYPDKVFRSSVLHSTQDLFLPFFSNVTWFHAIHVSGTNGTKRFDNPVLPFNDGIYFASTEKSNIIRGWIFGTTLDSKTQSLLIVNNATNVVIKVCEFQFCNDPFLGVYYHKNNKSWMESEFRVYSSANNCTFEYVSQPFLMDLEGKQGNFKNLREFVFKNIDGYFKIYSKHTPINLVRDLPQGFSALEPLVDLPIGINITRFQTLLALHRSYLTPGDSSSGWTAGAAAYYVGYLQPRTFLLKYNENGTITDAVDCALDPLSETKCTLKSFTVEKGIYQTSNFRVQPTESIVRFPNITNLCPFGEVFNATRFASVYAWNRKRISNCVADYSVLYNSASFSTFKCYGVSPTKLNDLCFTNVYADSFVIRGDEVRQIAPGQTGKIADYNYKLPDDFTGCVIAWNSNNLDSKVGGNYNYLYRLFRKSNLKPFERDISTEIYQAGSTPCNGVEGFNCYFPLQSYGFQPTNGVGYQPYRVVVLSFELLHAPATVCGPKKSTNLVKNKCVNFNFNGLTGTGVLTESNKKFLPFQQFGRDIADTTDAVRDPQTLEILDITPCSFGGVSVITPGTNTSNQVAVLYQDVNCTEVPVAIHADQLTPTWRVYSTGSNVFQTRAGCLIGAEHVNNSYECDIPIGAGICASYQTQTNSPSGAGSVASQSIIAYTMSLGAENSVAYSNNSIAIPTNFTISVTTEILPVSMTKTSVDCTMYICGDSTECSNLLLQYGSFCTQLNRALTGIAVEQDKNTQEVFAQVKQIYKTPPIKDFGGFNFSQILPDPSKPSKRSFIEDLLFNKVTLADAGFIKQYGDCLGDIAARDLICAQKFNGLTVLPPLLTDEMIAQYTSALLAGTITSGWTFGAGAALQIPFAMQMAYRFNGIGVTQNVLYENQKLIANQFNSAIGKIQDSLSSTASALGKLQDVVNQNAQALNTLVKQLSSNFGAISSVLNDILSRLDPPEAEVQIDRLITGRLQSLQTYVTQQLIRAAEIRASANLAATKMSECVLGQSKRVDFCGKGYHLMSFPQSAPHGVVFLHVTYVPAQEKNFTTAPAICHDGKAHFPREGVFVSNGTHWFVTQRNFYEPQIITTDNTFVSGNCDVVIGIVNNTVYDPLQPELDSFKEELDKYFKNHTSPDVDLGDISGINASVVNIQKEIDRLNEVAKNLNESLIDLQELGKYEQYIKGSGRENLYFQGGGGSGYIPEAPRDGQAYVRKDGEWVLLSTFLGHHHHHHHH

SEQ ID NO: 1800 - protein, 1281 aa, Artificial Sequence
  Description of Artificial Sequence: Synthetic polypeptide
MGILPSPGMPALLSLVSLLSVLLMGCVAETGTQCVNLTTRTQLPPAYTNSFTRGVYYPDKVFRSSVLHSTQDLFLPFFSNVTWFHAIHVSGTNGTKRFDNPVLPFNDGVYFASTEKSNIIRGWIFGTTLDSKTQSLLIVNNATNVVIKVCEFQFCNDPFLGVYYHKNNKSWMESEFRVYSSANNCTFEYVSQPFLMDLEGKQGNFKNLREFVFKNIDGYFKIYSKHTPINLVRDLPQGFSALEPLVDLPIGINITRFQTLLALHRSYLTPGDSSSGWTAGAAAYYVGYLQPRTFLLKYNENGTITDAVDCALDPLSETKCTLKSFTVEKGIYQTSNFRVQPTESIVRFPNITNLCPFGEVFNATRFASVYAWNRKRISNCVADYSVLYNSASFSTFKCYGVSPTKLNDLCFTNVYADSFVIRGDEVRQIAPGQTGKIADYNYKLPDDFTGCVIAWNSNNLDSKVGGNYNYLYRLFRKSNLKPFERDISTEIYQAGSTPCNGVEGFNCYFPLQSYGFQPTNGVGYQPYRVVVLSFELLHAPATVCGPKKSTNLVKNKCVNFNFNGLTGTGVLTESNKKFLPFQQFGRDIADTTDAVRDPQTLEILDITPCSFGGVSVITPGTNTSNQVAVLYQDVNCTEVPVAIHADQLTPTWRVYSTGSNVFQTRAGCLIGAEHVNNSYECDIPIGAGICASYQTQTNSPSGAGSVASQSIIAYTMSLGAENSVAYSNNSIAIPTNFTISVTTEILPVSMTKTSVDCTMYICGDSTECSNLLLQYGSFCTQLNRALTGIAVEQDKNTQEVFAQVKQIYKTPPIKDFGGFNFSQILPDPSKPSKRSFIEDLLFNKVTLADAGFIKQYGDCLGDIAARDLICAQKFNGLTVLPPLLTDEMIAQYTSALLAGTITSGWTFGAGAALQIPFAMQMAYRFNGIGVTQNVLYENQKLIANQFNRAIGKIQDSLSSTASALGKLQDVVNQNAQALNTLVKQLSSNFGAISSVLNDILSRLDPPEAEVQIDRLITGRLQSLQTYVTQQLIRAAEIRASANLAATKMSECVLGQSKRVDFCGKGYHLMSFPQSAPHGVVFLHVTYVPAQEKNFTTAPAICHDGKAHFPREGVFVSNGTHWFVTQRNFYEPQIITTDNTFVSGNCDVVIGIVNNTVYDPLQPELDSFKEELDKYFKNHTSPDVDLGDISGINASVVNIQKEIDRLNEVAKNLNESLIDLQELGKYEQYIKGSGRENLYFQGGGGSGYIPEAPRDGQAYVRKDGEWVLLSTFLGHHHHHHHH

SEQ ID NO: 1801 - protein, 1281 aa, Artificial Sequence
  Description of Artificial Sequence: Synthetic polypeptide
MGILPSPGMPALLSLVSLLSVLLMGCVAETGTQCVNLTTRTQLPPAYTNSFTRGVYYPDKVFRSSVLHSTQDLFLPFFSNVTWFHAIHVSGTNGTKRFDNPVLPFNDGVYFASTEKSNIIRGWIFGTTLDSKTQSLLIVNNATNVVIKVCEFQFCNDPFLGVYYHKNNKSWMESEFRVYSSANNCTFEYVSQPFLMDLEGKQGNFKNLREFVFKNIDGYFKIYSKHTPINLVRDLPQGFSALEPLVDLPIGINITRFQTLLALHRSYLTPGDSSSGWTAGAAAYYVGYLQPRTFLLKYNENGTITDAVDCALDPLSETKCTLKSFTVEKGIYQTSNFRVQPTESIVRFPNITNLCPFGEVFNATRFASVYAWNRKRISNCVADYSVLYNSASFSTFKCYGVSPTKLNDLCFTNVYADSFVIRGDEVRQIAPGQTGKIADYNYKLPDDFTGCVIAWNSNNLDSKVGGNYNYLYRLFRKSNLKPFERDISTEIYQAGSTPCNGVEGFNCYFPLQSYGFQPTNGVGYQPYRVVVLSFELLHAPATVCGPKKSTNLVKNKCVNFNFNGLTGTGVLTESNKKFLPFQQFGRDIADTTDAVRDPQTLEILDITPCSFGGVSVITPGTNTSNQVAVLYQDVNCTEVPVAIHADQLTPTWRVYSTGSNVFQTRAGCLIGAEHVNNSYECDIPIGAGICASYQTQTNSPSGAGSVASQSIIAYTMSLGAENSVAYSNNSIAIPTNFTISVTTEILPVSMTKTSVDCTMYICGDSTECSNLLLQYGSFCTQLNRALTGIAVEQDKNTQEVFAQVKQIYKTPPIKDFGGFNFSQILPDPSKPSKRSFIEDLLFNKVTLADAGFIKQYGDCLGDIAARDLICAQKFNGLTVLPPLLTDEMIAQYTSALLAGTITSGWTFGAGAALQIPFAMQMAYRFNGIGVTQNVLYENQKLIANQFNSAIGKIQDSLSSTASALGKLQDVVNQNAQALNTLVKQLSSNFGAISSVLNDILSRLDKPEAEVQIDRLITGRLQSLQTYVTQQLIRAAEIRASANLAATKMSECVLGQSKRVDFCGKGYHLMSFPQSAPHGVVFLHVTYVPAQEKNFTTAPAICHDGKAHFPREGVFVSNGTHWFVTQRNFYEPQIITTDNTFVSGNCDVVIGIVNNTVYDPLQPELDSFKEELDKYFKNHTSPDVDLGDISGINASVVNIQKEIDRLNEVAKNLNESLIDLQELGKYEQYIKGSGRENLYFQGGGGSGYIPEAPRDGQAYVRKDGEWVLLSTFLGHHHHHHHH

SEQ ID NO: 1802 - protein, 1281 aa, Artificial Sequence
  Description of Artificial Sequence: Synthetic polypeptide
MGILPSPGMPALLSLVSLLSVLLMGCVAETGTQCVNLTTRTQLPPAYTNSFTRGVYYPDKVFRSSVLHSTQDLFLPFFSNVTWFHAIHVSGTNGTKRFDNPVLPFNDGVYFASTEKSNIIRGWIFGTTLDSKTQSLLIVNNATNVVIKVCEFQFCNDPFLGVYYHKNNKSWMESEFRVYSSANNCTFEYVSQPFLMDLEGKQGNFKNLREFVFKNIDGYFKIYSKHTPINLVRDLPQGFSALEPLVDLPIGINITRFQTLLALHRSYLTPGDSSSGWTAGAAAYYVGYLQPRTFLLKYNENGTITDAVDCALDPLSETKCTLKSFTVEKGIYQTSNFRVQPTESIVRFPNITNLCPFGEVFNATRFASVYAWNRKRISNCVADYSVLYNSASFSTFKCYGVSPTKLNDLCFTNVYADSFVIRGDEVRQIAPGQTGKIADYNYKLPDDFTGCVIAWNSNNLDSKVGGNYNYLYRLFRKSNLKPFERDISTEIYQAGSTPCNGVEGFNCYFPLQSYGFQPTNGVGYQPYRVVVLSFELLHAPATVCGPKKSTNLVKNKCVNFNFNGLTGTGVLTESNKKFLPFQQFGRDIADTTDAVRDPQTSEILDITPCSFGGVSVITPGTNTSNQVAVLYQDVNCTEVPVAIHADQLTPTWRVYSTGSNVFQTRAGCLIGAEHVNNSYECDIPIGAGICASYQTQTNSPSGAGSVASQSIIAYTMSLGAENSVAYSNNSIAIPTNFTISVTTEILPVSMTKTSVDCTMYICGDSTECSNLLLQYGSFCTQLNRALTGIAVEQDKNTQEVFAQVKQIYKTPPIKDFGGFNFSQILPDPSKPSKRSFIEDLLFNKVTLADAGFIKQYGDCLGDIAARDLICAQKFNGLTVLPPLLTDEMIAQYTSALLAGTITSGWTFGAGAALQIPFAMQMAYRFNGIGVTQNVLYENQKLIANQFNSAIGKIQDSLSSTASALGKLQDVVNQNAQALNTLVKQLSSNFGAISSVLNDILSRLDPPEAEVQIDRLITGRLQSLQTYVTQQLIRAAEIRASANLAATKMSECVLGQSKRVDFCGKGYHLMSFPQSAPHGVVFLHVTYVPAQEKNFTTAPAICHDGKAHFPREGVFVSNGTHWFVTQRNFYEPQIITTDNTFVSGNCDVVIGIVNNTVYDPLQPELDSFKEELDKYFKNHTSPDVDLGDISGINASVVNIQKEIDRLNEVAKNLNESLIDLQELGKYEQYIKGSGRENLYFQGGGGSGYIPEAPRDGQAYVRKDGEWVLLSTFLGHHHHHHHH

SEQ ID NO: 1803 - protein, 1281 aa, Artificial Sequence
  Description of Artificial Sequence: Synthetic polypeptide
MGILPSPGMPALLSLVSLLSVLLMGCVAETGTQCVNLTTRTQLPPAYTNSFTRGVYYPDKVFRSSVLHSTQDLFLPFFSNVTWFHAIHVSGTNGTKRFDNPVLPFNDGVYFASTEKSNIIRGWIFGTTLDSKTQSLLIVNNATNVVIKVCEFQFCNDPFLGVYYHKNNKSWMESEFRVYSSANNCTFEYVSQPFLMDLEGKQGNFKNLREFVFKNIDGYFKIYSKHTPINLVRDLPQGFSALEPLVDLPIGINITRFQTLLALHRSYLTPGDSSSGWTAGAAAYYVGYLQPRTFLLKYNENGTITDAVDCALDPLSETKCTLKSFTVEKGIYQTSNFRVQPTESIVRFPNITNLCPFGEVFNATRFASVYAWNRKRISNCVADYSVLYNSASFSTFKCYGVSPTKLNDLCFTNVYADSFVIRGDEVRQIAPGQTGKIADYNYKLPDDFTGCVIAWNSNNLDSKVGGNYNYLYRLFRKSNLKPFERDISTEIYQAGSTPCNGVEGFNCYFPLQSYGFQPTNGVGYQPYRVVVLSFELLHAPATVCGPKKSTNLVKNKCVNFNFNGLTGTGVLTESNKKFLPFQQFGRDIADTTDAVRDPQTLEILDITPCSFGGVSVITPGTNTSNQVAVLYQDVNCTEVPVAIHADQLTPTWRVYSTGSNVFQTRAGCLIGAEHVNNSYECDIPIGAGICASYQTQTNSPSGAGSVASQSIIAYTMSLGAENSVAYSNNSIAIPTNFTISVTTEILPVSMTKTSVDCTMYICGDSTECSNLLLQYGSFCTQLNRALTGIAVEQDKNTQEVFAQVKQIYKTPPIKDFGGFNFSQILPDPSKPSKRSFIEDLLFNKVTLADAGFIKQYGDCLGDIAARDLICAQKFNGLTVLPPLLTDEMIAQYTSALLAGTITSGWTFGAGAALQIPFAMQMAYRFNGIGVTQNVLYENQKLIANQFNSAIGKIQDSLSSTASALGKLQDVVNQNAQALNTLVKQLSSNFGAISSVLNDILSRLDPPEAEVQIDRLITGRLQSLQTYVTQQLIRAAEIRASANLAATKMSECVLGQSKRVDFCGKGYHLMSFPQSAPHGVVFLHVTYVPAQEKNFTTAPAICHDGKAHFPREGVFVSNGTHWFVTQRNFYEPQIITTDNTFVSGNCDVVIGIINNTVYDPLQPELDSFKEELDKYFKNHTSPDVDLGDISGINASVVNIQKEIDRLNEVAKNLNESLIDLQELGKYEQYIKGSGRENLYFQGGGGSGYIPEAPRDGQAYVRKDGEWVLLSTFLGHHHHHHHH

SEQ ID NO: 1804 - protein, 1281 aa, Artificial Sequence
  Description of Artificial Sequence: Synthetic polypeptide
MGILPSPGMPALLSLVSLLSVLLMGCVAETGTQCVNLTTRTQLPPAYTNSFTRGVYYPDKVFRSSVLHSTQDLFLPFFSNVTWFHAIHVSGTNGTKRFDNPVLPFNDGVYFASTEKSNIIRGWIFGTTLDSKTQSLLIVNNATNVVIKVCEFQFCNDPFLGVYYHKNNKSWMESEFRVYSSANNCTFEYVSQPFLMDLEGKQGNFKNLREFVFKNIDGYFKIYSKHTPINLVRDLPQGFSALEPLVDLPIGINITRFQTLLALHRSYLTPGDSSSGWTAGAAAYYVGYLQPRTFLLKYNENGTITDAVDCALDPLSETKCTLKSFTVEKGIYQTSNFRVQPTESIVRFPNITNLCPFGEVFNATRFASVYAWNRKRISNCVADYSVLYNSASFSTFKCYGVSPTKLNDLCFTNVYADSFVIRGDEVRQIAPGQTGKIADYNYKLPDDFTGCVIAWNSNNLDSKVGGNYNYLYRLFRKSNLKPFERDISTEIYQAGSTPCNGVEGFNCYFPLQSYGFQPTNGVGYQPYRVVVLSFELLHAPATVCGPKKSTNLVKNKCVNFNFNGLTGTGVLTESNKKFLPFQQFGRDIADTTDAVRDPQTLEILDITPCSFGGVSVITPGTNTSNQVAVLYQDVNCTEVPVAIHADQLTPTWRVYSTGSNVFQTRAGCLIGAEHVNNSYECDIPIGAGICASYQTQTNSPSGAGSVASQSIIAYTMSLGAENSVAYSNNSIAIPTNFTISVTTEILPVSMTKTSVDCTMYICGDSTECSNLLLQYGSFCTQLNRALTGIAVEQDKNTQEVFAQVKQIYKTPPIKDFGGFNFSQILPDPSKPSKRSAIEDLLFNKVTLADAGFIKQYGDCLGDIAARDLICAQKFNGLTVLPPLLTDEMIAQYTSALLAGTITSGWTFGAGAALQIPFAMQMAYRFNGIGVTQNVLYENQKLIANQFNSAIGKIQDSLSSTASALGKLQDVVNQNAQALNTLVKQLSSNFGAISSVLNDILSRLDPPEAEVQIDRLITGRLQSLQTYVTQQLIRAAEIRASANLAATKMSECVLGQSKRVDFCGKGYHLMSFPQSAPHGVVFLHVTYVPAQEKNFTTAPAICHDGKAHFPREGVFVSNGTHWFVTQRNFYEPQIITTDNTFVSGNCDVVIGIVNNTVYDPLQPELDSFKEELDKYFKNHTSPDVDLGDISGINASVVNIQKEIDRLNEVAKNLNESLIDLQELGKYEQYIKGSGRENLYFQGGGGSGYIPEAPRDGQAYVRKDGEWVLLSTFLGHHHHHHHH

SEQ ID NO: 1805 - protein, 1281 aa, Artificial Sequence
  Description of Artificial Sequence: Synthetic polypeptide
MGILPSPGMPALLSLVSLLSVLLMGCVAETGTQCVNLTTRTQLPPAYTNSFTRGVYYPDKVFRSSVLHSTQDLFLPFFSNVTWFHAIHVSGTNGTKRFDNPVLPFNDGVYFASTEKSNIIRGWIFGTTLDSKTQSLLIVNNATNVVIKVCEFQFCNDPFLGVYYHKNNKSWMESEFRVYSSANNCTFEYVSQPFLMDLEGKQGNFKNLREFVFKNIDGYFKIYSKHTPINLVRDLPQGFSALEPLVDLPIGINITRFQTLLALHRSYLTPGDSSSGWTAGAAAYYVGYLQPRTFLLKYNENGTITDAVDCALDPLSETKCTLKSFTVEKGIYQTSNFRVQPTESIVRFPNITNLCPFGEVFNATRFASVYAWNRKRISNCVADYSVLYNSASFSTFKCYGVSPTKLNDLCFTNVYADSFVIRGDEVRQIAPGQTGKIADYNYKLPDDFTGCVIAWNSNNLDSKVGGNYNYLYRLFRKSNLKPFERDISTEIYQAGSTPCNGVEGFNCYFPLQSYGFQPTNGVGYQPYRVVVLSFELLHAPATVCGPKKSTNLVKNKCVNFNFNGLTGTGVLTESNKKFLPFQQFGRDIADTTDAVRDPQTLEILDITPCSFGGVSVITPGTNTSNQVAVLYQDVNCTDVPTAIHADQLTPTWRVYSTGSNVFQTRAGCLIGAEHVNNSYECDIPIGAGICASYQTQTNSPSGAGSVASQSIIAYTMSLGAENSVAYSNNSIAIPTNFTISVTTEILPVSMTKTSVDCTMYICGDSTECSNLLLQYGSFCTQLNRALTGIAVEQDKNTQEVFAQVKQIYKTPPIKDFGGFNFSQILPDPSKPSKRSFIEDLLFNKVTLADAGFIKQYGDCLGDIAARDLICAQKFNGLTVLPPLLTDEMIAQYTSALLAGTITSGWTFGAGAALQIPFAMQMAYRFNGIGVTQNVLYENQKLIANQFNSAIGKIQDSLSSTASALGKLQDVVNQNAQALNTLVKQLSSNFGAISSVLNDILSRLDPPEAEVQIDRLITGRLQSLQTYVTQQLIRAAEIRASANLAATKMSECVLGQSKRVDFCGKGYHLMSFPQSAPHGVVFLHVTYVPAQEKNFTTAPAICHDGKAHFPREGVFVSNGTHWFVTQRNFYEPQIITTDNTFVSGNCDVVIGIVNNTVYDPLQPELDSFKEELDKYFKNHTSPDVDLGDISGINASVVNIQKEIDRLNEVAKNLNESLIDLQELGKYEQYIKGSGRENLYFQGGGGSGYIPEAPRDGQAYVRKDGEWVLLSTFLGHHHHHHHH

SEQ ID NO: 1806 - protein, 1281 aa, Artificial Sequence
  Description of Artificial Sequence: Synthetic polypeptide
MGILPSPGMPALLSLVSLLSVLLMGCVAETGTQCVNLTTRTQLPPAYTNSFTRGVYYPDKVFRSSVLHSTQDLFLPFFSNVTWFHAIHVSGTNGTKRFDNPVLPFNDGVYFASTEKSNIIRGWIFGTTLDSKTQSLLIVNNATNVVIKVCEFQFCNDPFLGVYYHKNNKSWMESEFRVYSSANNCTFEYVSQPFLMDLEGKQGNFKNLREFVFKNIDGYFKIYSKHTPINLVRDLPQGFSALEPLVDLPIGINITRFQTLLALHRSYLTPGDSSSGWTAGAAAYYVGYLQPRTFLLKYNENGTITDAVDCALDPLSETKCTLKSFTVEKGIYQTSNFRVQPTESIVRFPNITNLCPFGEVFNATRFASVYAWNRKRISNCVADYSVLYNSASFSTFKCYGVSPTKLNDLCFTNVYADSFVIRGDEVRQIAPGQTGKIADYNYKLPDDFTGCVIAWNSNNLDSKVGGNYNYLYRLFRKSNLKPFERDISTEIYQAGSTPCNGVEGFNCYFPLQSYGFQPTNGVGYQPYRVVVLSFELLHAPATVCGPKKSTNLVKNKCVNFNFNGLTGTGVLTESNKKFLPFQQFGRDIADTTDAVRDPQTLEILDITPCSFGGVSVITPGTNTSNQVAVLYQDVNCTEVPVAIHADQLTPTWRVYSTGSNVFQTRAGCLIGAEHVNNSYECDIPIGAGICASYQTQTNSPSGAGSVASQSIIAYTMSLGAENSVAYSNNSIAIPTNFTISVTTEILPVSMTKTSVDCTMYICGDSTECSNLLLQYGSFCTQLNRALTGIAVEQDKNTQEVFAQVKQIYKTPPIKDFGGFNFSQILPDPSKPSKRSFIEDLLFNKVTLADLGFVKQYKDCLGDQAARDLICAQKFNGLTVLPPLLTDEMIAQYTSALLAGTITSGWTFGAGAALQIPFAMQMAYRFNGIGVTQNVLYENQKLIANQFNSAIGKIQDGLSTTASALSKLQDVVNQNAQALNTLVKQLSSNFGAISSVLNDILSRLDPPEAEVQIDRLITGRLQSLQTYVTQQLIRAAEIRASANLAATKMSECVLGQSKRVDFCGKGYHLMSFPQSAPHGVVFLHVTYVPAQEKNFTTAPAICHDGKAHFPREGVFVSNGTHWFVTQRNFYEPQIITTDNTFVSGNCDVVIGIVNNTVYDPLQPELDSFKEELDKYFKNHTSPDVDLGDISGINASVVNIQKEIDRLNEVAKNLNESLIDLQELGKYEQYIKGSGRENLYFQGGGGSGYIPEAPRDGQAYVRKDGEWVLLSTFLGHHHHHHHH

SEQ ID NO: 1807 - protein, 1281 aa, Artificial Sequence
  Description of Artificial Sequence: Synthetic polypeptide
MGILPSPGMPALLSLVSLLSVLLMGCVAETGTQCVNLTTRTQLPPAYTNSFTRGVYYPDKVFRSSVLHSTQDLFLPFFSNVTWFHAIHVSGTNGTKRFDNPVLPFNDGVYFASTEKSNIIRGWIFGTTLDSKTQSLLIVNNATNVVIKVCEFQFCNDPFLGVYYHKNNKSWMESEFRVYSSANNCTFEYVSQPFLMDLEGKQGNFKNLREFVFKNIDGYFKIYSKHTPINLVRDLPQGFSALEPLVDLPIGINITRFQTLLALHRSYLTPGDSSSGWTAGAAAYYVGYLQPRTFLLKYNENGTITDAVDCALDPLSETKCTLKSFTVEKGIYQTSNFRVQPTYEIVRFPNITNLCPFGEVFNATRFASVYAWNRKRISNCVADYSVLYNSASFSTFKCYGVSPTKLNDLCFTNVYADSFVIRGDEVRQIAPGQTGKIADYNYKLPDDFTGCVIAWNSNNLDSKVGGNYNYLYRLFRKSNLKPFERDISTEIYQAGSTPCNGVEGFNCYFPLQSYGFQPTNGVGYQPYRVVVLSFELLHAPATVCGPKDSTNLVKNKCVDYNFNGRTGTGVLTESNKKFLPFQQFGRDISDTTDAVRDPTTGEILCITPCSFGGVSVITPGTNTSNQVAVLYQDVNCTEVPVAIHADQLTPTWRVYSTGSNVFQTRAGCLIGAEHVNNSYECDIPIGAGICASYQTQTNSPSGAGSVASQSIIAYTMSLGAENSVAYSNNSIAIPTNFTISVTTEILPVSMTKTSVDCTMYICGDSTECSNLLLQYGSFCTQLNRALTGIAVEQDKNTQEVFAQVKQIYKTPPIKDFGGFNFSQILPDPSKPSKRSFIEDLLFNKVTLADAGFIKQYGDCLGDIAARDLICAQKFNGLTVLPPLLTDEMIAQYTSALLAGTITSGWTFGAGAALQIPFAMQMAYRFNGIGVTQNVLYENQKLIANQFNSAIGKIQDSLSSTASALGKLQDVVNQNAQALNTLVKQLSSNFGAISSVLNDILSRLDPPEAEVQIDRLITGRLQSLQTYVTQQLIRAAEIRASANLAATKMSECVLGQSKRVDFCGKGYHLMSFPQSAPHGVVFLHVTYVPAQEKNFTTAPAICHDGKAHFPREGVFVSNGTHWFVTQRNFYEPQIITTDNTFVSGNCDVVIGIVNNTVYDPLQPELDSFKEELDKYFKNHTSPDVDLGDISGINASVVNIQKEIDRLNEVAKNLNESLIDLQELGKYEQYIKGSGRENLYFQGGGGSGYIPEAPRDGQAYVRKDGEWVLLSTFLGHHHHHHHH

SEQ ID NO: 1808 - protein, 1281 aa, Artificial Sequence
  Description of Artificial Sequence: Synthetic polypeptide
MGILPSPGMPALLSLVSLLSVLLMGCVAETGTQCVNLTTRTQLPPAYTNSFTRGVYYPDKVFRSSVLHSTQDLFLPFFSNVTWFHAIHVSGTNGTKRFDNPVLPFNDGVYFASTEKSNIIRGWIFGTTLDSKTQSLLIVNNATNVVIKVCEFQFCNDPFLGVYYHKNNKSWMESEFRVYSSANNCTFEYVSQPFLMDLEGKQGNFKNLREFVFKNIDGYFKIYSKHTPINLVRDLPQGFSALEPLVDLPIGINITRFQTLLALHRSYLTPGDSSSGWTAGAAAYYVGYLQPRTFLLKYNENGTITDAVDCALDPLSETKCTLKSFTVEKGIYQTSNFRVQPTESIVRFPNITNLCPFGEVFNATRFASVYAWNRKRISNCVADYSVLYNSASFSTFKCYGVSPTKLNDLCFTNVYADSFVIRGDEVRQIAPGQTGKIADYNYKLPDDFTGCVIAWNSNNLDSKVGGNYNYLYRLFRKSNLKPFERDISTEIYQAGSTPCNGVEGFNCYFPLQSYGFQPTNGVGYQPYRVVVLSFELLHAPATVCGPKKSTNLVKNKCVNFNFNGLTGTGVLTESNKKFLPFQQFGRDIADTTDAVRDPQTLEILDITPCSFGGVSVITPGTNTSNQVAVLYQDVNCTEVPVAIHADQLTPTWRVYSTGSNVFQTRAGCLIGAEHVNNSYECDIPIGAGICASYQTQTNSPSGAGSVASQSIIAYTMSLGAENSVAYSNNSIAIPTNFTISVTTEILPVSMTKTSVDCTMYICGDSTECSNLLLQYGSFCTQLNRALTGIAVEQDKNTQEVFAQVKQIYKTPPIKDFGGFNFSQILPDPSKPSKRSFIEDLLFNKVTLADAGFIKQYGDCLGDIAARDLICAQKFNGLTVLPPLLTDEMIAQYTSALLAGTITSGWTFGAGAALQIPFAMQMAYRFNGIGVTQNVLYENQKLIANQFNSAIGKIQDSLSSTASALGKLQDVVNQNAQALNTLVKQLSSNFGAISSVLNDILSRLDPPEAEVQIDRLITGRLQSLQTYVTQQLIRATEIRASANLAATKMSECVLGQSKRVDFCGKGYHLMSFPQSAPHGVVFLHVTYVPAQEKNFTTAPAICHDGKAHFPREGVFVSNGTHWFVTQRNFYEPQIITTDNTFVSGNCDVVIGIVNNTVYDPLQPELDSFKEELDKYFKNHTSPDVDLGDISGINASVVNIQKEIDRLNEVAKNLNESLIDLQELGKYEQYIKGSGRENLYFQGGGGSGYIPEAPRDGQAYVRKDGEWVLLSTFLGHHHHHHHH

SEQ ID NO: 1809 - protein, 1281 aa, Artificial Sequence
  Description of Artificial Sequence: Synthetic polypeptide
MGILPSPGMPALLSLVSLLSVLLMGCVAETGTQCVNLTTRTQLPPAYTNSFTRGVYYPDKVFRSSVLHSTQDLFLPFFSNVTWFHAIHVSGTNGTKRFDNPVLPFNDGVYFASTEKSNIIRGWIFGTTLDSKTQSLLIVNNATNVVIKVCEFQFCNDPFLGVYYHKNNKSWMESEFRVYSSANNCTFEYVSQPFLMDLEGKQGNFKNLREFVFKNIDGYFKIYSGHTPINLVRDLPQGFSALEPLVDLPIGINITRFQTLLALHRSYLTPGDSSSGWTAGAAAYYVGYLQPRTFLLKYNENGTITDAVDCALDPLSETKCTLKSFTVEKGIYQTSNFRVQPTESIVRFPNITNLCPFGEVFNATRFASVYAWNRKRISNCVADYSVLYNSASFSTFKCYGVSPTKLNDLCFTNVYADSFVIRGDEVRQIAPGQTGKIADYNYKLPDDFTGCVIAWNSNNLDSKVGGNYNYLYRLFRKSNLKPFERDISTEIYQAGSTPCNGVEGFNCYFPLQSYGFQPTNGVGYQPYRVVVLSFELLHAPATVCGPKKSTNLVKNKCVNFNFNGLTGTGVLTESNKKFLPFQQFGRDIADTTDAVRDPQTLEILDITPCSFGGVSVITPGTNTSNQVAVLYQDVNCTEVPVAIHADQLTPTWRVYSTGSNVFQTRAGCLIGAEHVNNSYECDIPIGAGICASYQTQTNSPSGAGSVASQSIIAYTMSLGAENSVAYSNNSIAIPTNFTISVTTEILPVSMTKTSVDCTMYICGDSTECSNLLLQYGSFCTQLNRALTGIAVEQDKNTQEVFAQVKQIYKTPPIKDFGGFNFSQILPDPSKPSKRSFIEDLLFNKVTLADAGFIKQYGDCLGDIAARDLICAQKFNGLTVLPPLLTDEMIAQYTSALLAGTITSGWTFGAGAALQIPFAMQMAYRFNGIGVTQNVLYENQKLIANQFNSAIGKIQDSLSSTASALGKLQDVVNQNAQALNTLVKQLSSNFGAISSVLNDILSRLDPPEAEVQIDRLITGRLQSLQTYVTQQLIRAAEIRASANLAATKMSECVLGQSKRVDFCGKGYHLMSFPQSAPHGVVFLHVTYVPAQEKNFTTAPAICHDGKAHFPREGVFVSNGTHWFVTQRNFYEPQIITTDNTFVSGNCDVVIGIVNNTVYDPLQPELDSFKEELDKYFKNHTSPDVDLGDISGINASVVNIQKEIDRLNEVAKNLNESLIDLQELGKYEQYIKGSGRENLYFQGGGGSGYIPEAPRDGQAYVRKDGEWVLLSTFLGHHHHHHHH

SEQ ID NO: 1810 - protein, 1281 aa, Artificial Sequence
  Description of Artificial Sequence: Synthetic polypeptide
MGILPSPGMPALLSLVSLLSVLLMGCVAETGTQCVNLTTRTQLPPAYTNSFTRGVYYPDKVFRSSVLHSTQDLFLPFFSNVTWFHAIHVSGTNGTKRFDNPVLPFNDGVYFASTEKSNIIRGWIFGTTLDSKTQSLLIVNNATNVVIKVCEFQFCNDPFLGVYYHKNNKSWMESEFRVYSSANNCTFEYVSQPFLMDLEGKQGNFKNLREFVFKNIDGYFKIYSKWTPINLVRDLPQGFSALEPLVDLPIGINITRFQTLLALHRSYLTPGDSSSGWTAGAAAYYVGYLQPRTFLLKYNENGTITDAVDCALDPLSETKCTLKSFTVEKGIYQTSNFRVQPTESIVRFPNITNLCPFGEVFNATRFASVYAWNRKRISNCVADYSVLYNSASFSTFKCYGVSPTKLNDLCFTNVYADSFVIRGDEVRQIAPGQTGKIADYNYKLPDDFTGCVIAWNSNNLDSKVGGNYNYLYRLFRKSNLKPFERDISTEIYQAGSTPCNGVEGFNCYFPLQSYGFQPTNGVGYQPYRVVVLSFELLHAPATVCGPKKSTNLVKNKCVNFNFNGLTGTGVLTESNKKFLPFQQFGRDIADTTDAVRDPQTLEILDITPCSFGGVSVITPGTNTSNQVAVLYQDVNCTEVPVAIHADQLTPTWRVYSTGSNVFQTRAGCLIGAEHVNNSYECDIPIGAGICASYQTQTNSPSGAGSVASQSIIAYTMSLGAENSVAYSNNSIAIPTNFTISVTTEILPVSMTKTSVDCTMYICGDSTECSNLLLQYGSFCTQLNRALTGIAVEQDKNTQEVFAQVKQIYKTPPIKDFGGFNFSQILPDPSKPSKRSFIEDLLFNKVTLADAGFIKQYGDCLGDIAARDLICAQKFNGLTVLPPLLTDEMIAQYTSALLAGTITSGWTFGAGAALQIPFAMQMAYRFNGIGVTQNVLYENQKLIANQFNSAIGKIQDSLSSTASALGKLQDVVNQNAQALNTLVKQLSSNFGAISSVLNDILSRLDPPEAEVQIDRLITGRLQSLQTYVTQQLIRAAEIRASANLAATKMSECVLGQSKRVDFCGKGYHLMSFPQSAPHGVVFLHVTYVPAQEKNFTTAPAICHDGKAHFPREGVFVSNGTHWFVTQRNFYEPQIITTDNTFVSGNCDVVIGIVNNTVYDPLQPELDSFKEELDKYFKNHTSPDVDLGDISGINASVVNIQKEIDRLNEVAKNLNESLIDLQELGKYEQYIKGSGRENLYFQGGGGSGYIPEAPRDGQAYVRKDGEWVLLSTFLGHHHHHHHH

SEQ ID NO: 1811 - protein, 1281 aa, Artificial Sequence
  Description of Artificial Sequence: Synthetic polypeptide
MGILPSPGMPALLSLVSLLSVLLMGCVAETGTQCVNLTTRTQLPPAYTNSFTRGVYYPDKVFRSSVLHSTQDLFLPFFSNVTWFHAIHVSGTNGTKRFDNPVLPFNDGVYFASTEKSNIIRGWIFGTTLDSKTQSLLIVNNATNVVIKVCEFQFCNDPFLGVYYHKNNKSWMESEFRVYSSANNCTFEYVSQPFLMDLEGKQGNFKNLREFVFKNIDGYFKIYSKHTPINLVRDLPQGFSALEPLVDLPIGINITRFQTLLALHRSYLTPGDSSSGWTAGAAAYYVGYLQPRTFLLKYNENGTITDAVDCALDPLSETKCTLKSFTVEKGIYQTSNFRVQPTESIVRFPNITNLCPFGEVFNATRFASVYAWNRKRISNCVADYSVLYNSASFSTFKCYGVSPTKLNDLCFTNVYADSFVIRGDEVRQIAPGQTGKIADYNYKLPDDFTGCVIAWNSNNLDSKVGGNYNYLYRLFRKSNLKPFERDISTEIYQAGSTPCNGVEGFNCYFPLQSYGFQPTNGVGYQPYRVVVLSFELLHAPATVCGPKKSTNLVKNKCVNFNFNGLTGTGVLTESNKKFLPFQQFGRDIADTTDAVRDPQTLEILDITPCSFGGVSVITPGTNTSNQVAVLYQDVNCTEVPVAIHADQLTPTWRVYSTGSNVFQTRAGCLIGAEHVNNSYECDIPIGAGICASYQTQTNSPSGAGSVASQSIIAYTMSLGAENSVPYSNNSIAIPTNFTISVTTEILPVSMTKTSVDCTMYICGDSTECSNLLLQYGSFCTQLNRALTGIAVEQDKNTQEVFAQVKQIYKTPPIKDFGGFNFSQILPDPSKPSKRSFIEDLLFNKVTLADAGFIKQYGDCLGDIAARDLICAQKFNGLTVLPPLLTDEMIAQYTSALLAGTITSGWTFGAGAALQIPFAMQMAYRFNGIGVTQNVLYENQKLIANQFNSAIGKIQDSLSSTASALGKLQDVVNQNAQALNTLVKQLSSNFGAISSVLNDILSRLDPPEAEVQIDRLITGRLQSLQTYVTQQLIRAAEIRASANLAATKMSECVLGQSKRVDFCGKGYHLMSFPQSAPHGVVFLHVTYVPAQEKNFTTAPAICHDGKAHFPREGVFVSNGTHWFVTQRNFYEPQIITTDNTFVSGNCDVVIGIVNNTVYDPLQPELDSFKEELDKYFKNHTSPDVDLGDISGINASVVNIQKEIDRLNEVAKNLNESLIDLQELGKYEQYIKGSGRENLYFQGGGGSGYIPEAPRDGQAYVRKDGEWVLLSTFLGHHHHHHHH

SEQ ID NO: 1812 - protein, 1281 aa, Artificial Sequence
  Description of Artificial Sequence: Synthetic polypeptide
MGILPSPGMPALLSLVSLLSVLLMGCVAETGTQCVNLTTRTQLPPAYTNSFTRGVYYPDKVFRSSVLHSTQDLFLPFFSNVTWFHAIHVSGTNGTKRFDNPVLPFNDGVYFASTEKSNIIRGWIFGTTLDSKTQSLLIVNNATNVVIKVCEFQFCNDPFLGVYYHKNNKSWMESEFRVYSSANNCTFEYVSQPFLMDLEGKQGNFKNLREFVFKNIDGYFKIYSKHTPINLVRDLPQGFSALEPLVDLPIGINITRFQTLLALHRSYLTPGDSSSGWTAGAAAYYVGYLQPRTFLLKYNENGTITDAVDCALDPLSETKCTLKSFTVEKGIYQTSNFRVQPTESIVRFPNITNLCPFGEVFNATRFASVYAWNRKRISNCVADYSVLYNSASFSTFKCYGVSPTKLNDLCFTNVYADSFVIRGDEVRQIAPGQTGKIADYNYKLPDDFTGCVIAWNSNNLDSKVGGNYNYLYRLFRKSNLKPFERDISTEIYQAGSTPCNGVEGFNCYFPLQSYGFQPTNGVGYQPYRVVVLSFELLHAPATVCGPKKSTNLVKNKCVNFNFNGLTGTGVLTESNKKFLPFQQFGRDIADTTDAVRDPQTLEILDITPCSFGGVSVITPGTNTSNQVAVLYQDVNCTEVPVAIHADQLTPTWRVYSTGSNVFQTRAGCLIGAEHVNNSYECDIPIGAGICASYQTQTNSPSGAGSVASQSIIAYTMSLGAENSVAYSNNSIAIPTNFTISVTTEILPVSMTKTSVDCTMYICGDSTECSNLLLQYGSFCTQLNRALTGIAVEQDKNTQEVFAQVKQIYKTPPIKDFGGFNFSQILPDPSKPSKRSFIEDLLFNKVTLADAGFIKQYGDCLGDIAARDLICAQKFNGLTVLPPLLTDEMIAQYTSALLAGTITSGWTFGAGAALQIPFAMQMAYRFNGIGVTQNVLYENQKLIANQFNSAIGKIQDSLSSTASALGKLQDVVNQNAQALNTLVKQLSSNFGAISSVINDILSRLDPPEAEVQIDRLITGRLQSLQTYVTQQLIRAAEIRASANLAATKMSECVLGQSKRVDFCGKGYHLMSFPQSAPHGVVFLHVTYVPAQEKNFTTAPAICHDGKAHFPREGVFVSNGTHWFVTQRNFYEPQIITTDNTFVSGNCDVVIGIVNNTVYDPLQPELDSFKEELDKYFKNHTSPDVDLGDISGINASVVNIQKEIDRLNEVAKNLNESLIDLQELGKYEQYIKGSGRENLYFQGGGGSGYIPEAPRDGQAYVRKDGEWVLLSTFLGHHHHHHHH

SEQ ID NO: 1813 - protein, 1281 aa, Artificial Sequence
  Description of Artificial Sequence: Synthetic polypeptide
MGILPSPGMPALLSLVSLLSVLLMGCVAETGTQCVNLTTRTQLPPAYTNSFTRGVYYPDKVFRSSVLHSTQDLFLPFFSNVTWFHAIHVSGTNGTKRFDNPVLPFNDGVYFASTEKSNIIRGWIFGTTLDSKTQSLLIVNNATNVVIKVCEFQFCNDPFLGVYYHKNNKSWMESEFRVYSSANNCTFEYVSQPFLMDLEGKQGNFKNLREFVFKNIDGYFKIYSKHTPINLVRDLPQGFSALEPNVDLPIGINITRFQTLLALHRSYLTPGDSSSGWTAGAAAYYVGYLQPRTFLLKYNENGTITDAVDCALDPLSETKCTLKSFTVEKGIYQTSNFRVQPTESIVRFPNITNLCPFGEVFNATRFASVYAWNRKRISNCVADYSVLYNSASFSTFKCYGVSPTKLNDLCFTNVYADSFVIRGDEVRQIAPGQTGKIADYNYKLPDDFTGCVIAWNSNNLDSKVGGNYNYLYRLFRKSNLKPFERDISTEIYQAGSTPCNGVEGFNCYFPLQSYGFQPTNGVGYQPYRVVVLSFELLHAPATVCGPKKSTNLVKNKCVNFNFNGLTGTGVLTESNKKFLPFQQFGRDIADTTDAVRDPQTLEILDITPCSFGGVSVITPGTNTSNQVAVLYQDVNCTEVPVAIHADQLTPTWRVYSTGSNVFQTRAGCLIGAEHVNNSYECDIPIGAGICASYQTQTNSPSGAGSVASQSIIAYTMSLGAENSVAYSNNSIAIPTNFTISVTTEILPVSMTKTSVDCTMYICGDSTECSNLLLQYGSFCTQLNRALTGIAVEQDKNTQEVFAQVKQIYKTPPIKDFGGFNFSQILPDPSKPSKRSFIEDLLFNKVTLADAGFIKQYGDCLGDIAARDLICAQKFNGLTVLPPLLTDEMIAQYTSALLAGTITSGWTFGAGAALQIPFAMQMAYRFNGIGVTQNVLYENQKLIANQFNSAIGKIQDSLSSTASALGKLQDVVNQNAQALNTLVKQLSSNFGAISSVLNDILSRLDPPEAEVQIDRLITGRLQSLQTYVTQQLIRAAEIRASANLAATKMSECVLGQSKRVDFCGKGYHLMSFPQSAPHGVVFLHVTYVPAQEKNFTTAPAICHDGKAHFPREGVFVSNGTHWFVTQRNFYEPQIITTDNTFVSGNCDVVIGIVNNTVYDPLQPELDSFKEELDKYFKNHTSPDVDLGDISGINASVVNIQKEIDRLNEVAKNLNESLIDLQELGKYEQYIKGSGRENLYFQGGGGSGYIPEAPRDGQAYVRKDGEWVLLSTFLGHHHHHHHH

SEQ ID NO: 1814 - protein, 1281 aa, Artificial Sequence
  Description of Artificial Sequence: Synthetic polypeptide
MGILPSPGMPALLSLVSLLSVLLMGCVAETGTQCVNLTTRTQLPPAYTNSFTRGVYYPDKVFRSSVLHSTQDLFLPFFSNVTWFHAIHVSGTNGTKRFDNPVLPFNDGVYFASTEKSNIIRGWIFGTTLDSKTQSLLIVNNATNVVIKVCEFQFCNDPFLGVYYHKNNKSWMESEFRVYSSANNCTFEYVSQPFLMDLEGKQGNFKNLREFVFKNIDGYFKIYSKHTPINLVRDLPQGFSALEPLVDLPIGINITRFQTLLALHRSYLTPGDSSSGWTAGAAAYYVGYLQPRTFLLKYNENGTITDAVDCALDPLSETKCTLKSFTVEKGIYQTSNFRVQPTESIVRFPNITNLCPFGEVFNATRFASVYAWNRKRISNCVADYSVLYNSASFSTFKCYGVSPTKLNDLCFTNVYADSFVIRGDEVRQIAPGQTGKIADYNYKLPDDFTGCVIAWNSNNLDSKVGGNYNYLYRLFRKSNLKPFERDISTEIYQAGSTPCNGVEGFNCYFPLQSYGFQPTNGVGYQPYRVVVLSFELLHAPATVCGPKKSTNLVKNKCVNFNFNGLTGTGVLTESNKKFLPFQQFGRDIADTTDAVRDPQTLEILDITPCSFGGVSVITPGTNTSNQVAVLYQDVNCTEVPVAIHADQLTPTWRVYSTGSNVFQTRAGCLIGAEHVNNSYECDIPIGAGICASYQTQTNSPSGAGSVASQSIIAYTMSLGAENSVAYSNNSIAIPTNFTISVTTEILPVSMTKTSVDCTMYICGDSTECSNLLLQYGSFCTQLNRALTGIAVEQDKNTQEVFAQVKQIYKTPPIKDFGGFNFSQILPDPSKPSKRSFIEDLLFNKVTLADAGFIKQYGDCMGDIAARDLICAQKFNGLTVLPPLLTDEMIAQYTSALLAGTITSGWTFGAGAALQIPFAMQMAYRFNGIGVTQNVLYENQKLIANQFNSAIGKIQDSLSSTASALGKLQDVVNQNAQALNTLVKQLSSNFGAISSVLNDILSRLDPPEAEVQIDRLITGRLQSLQTYVTQQLIRAAEIRASANLAATKMSECVLGQSKRVDFCGKGYHLMSFPQSAPHGVVFLHVTYVPAQEKNFTTAPAICHDGKAHFPREGVFVSNGTHWFVTQRNFYEPQIITTDNTFVSGNCDVVIGIVNNTVYDPLQPELDSFKEELDKYFKNHTSPDVDLGDISGINASVVNIQKEIDRLNEVAKNLNESLIDLQELGKYEQYIKGSGRENLYFQGGGGSGYIPEAPRDGQAYVRKDGEWVLLSTFLGHHHHHHHH

SEQ ID NO: 1815 - protein, 1281 aa, Artificial Sequence
  Description of Artificial Sequence: Synthetic polypeptide
MGILPSPGMPALLSLVSLLSVLLMGCVAETGTQCVNLTTRTQLPPAYTNSFTRGVYYPDKVFRSSVLHSTQDLFLPFFSNVTWFHAIHVSGTNGTKRFDNPVLPFNDGVYFASTEKSNIIRGWIFGTTLDSKTQSLLIVNNATNVVIKVCEFQFCNDPFLGVYYHKNNKSWMESEFRVYSSANNCTFEYVEQPFLMDLEGKQGNFKNLREFVFKNIDGYFKIYSKHTPINLVRDLPQGFSALEPLVDLPIGINITRFQTLLALHRSYLTPGDSSSGWTAGAAAYYVGYLQPRTFLLKYNENGTITDAVDCALDPLSETKCTLKSFTVEKGIYQTSNFRVQPTESIVRFPNITNLCPFGEVFNATRFASVYAWNRKRISNCVADYSVLYNSASFSTFKCYGVSPTKLNDLCFTNVYADSFVIRGDEVRQIAPGQTGKIADYNYKLPDDFTGCVIAWNSNNLDSKVGGNYNYLYRLFRKSNLKPFERDISTEIYQAGSTPCNGVEGFNCYFPLQSYGFQPTNGVGYQPYRVVVLSFELLHAPATVCGPKKSTNLVKNKCVNFNFNGLTGTGVLTESNKKFLPFQQFGRDIADTTDAVRDPQTLEILDITPCSFGGVSVITPGTNTSNQVAVLYQDVNCTEVPVAIHADQLTPTWRVYSTGSNVFQTRAGCLIGAEHVNNSYECDIPIGAGICASYQTQTNSPSGAGSVASQSIIAYTMSLGAENSVAYSNNSIAIPTNFTISVTTEILPVSMTKTSVDCTMYICGDSTECSNLLLQYGSFCTQLNRALTGIAVEQDKNTQEVFAQVKQIYKTPPIKDFGGFNFSQILPDPSKPSKRSFIEDLLFNKVTLADAGFIKQYGDCLGDIAARDLICAQKFNGLTVLPPLLTDEMIAQYTSALLAGTITSGWTFGAGAALQIPFAMQMAYRFNGIGVTQNVLYENQKLIANQFNSAIGKIQDSLSSTASALGKLQDVVNQNAQALNTLVKQLSSNFGAISSVLNDILSRLDPPEAEVQIDRLITGRLQSLQTYVTQQLIRAAEIRASANLAATKMSECVLGQSKRVDFCGKGYHLMSFPQSAPHGVVFLHVTYVPAQEKNFTTAPAICHDGKAHFPREGVFVSNGTHWFVTQRNFYEPQIITTDNTFVSGNCDVVIGIVNNTVYDPLQPELDSFKEELDKYFKNHTSPDVDLGDISGINASVVNIQKEIDRLNEVAKNLNESLIDLQELGKYEQYIKGSGRENLYFQGGGGSGYIPEAPRDGQAYVRKDGEWVLLSTFLGHHHHHHHH

SEQ ID NO: 1816 - protein, 1281 aa, Artificial Sequence
  Description of Artificial Sequence: Synthetic polypeptide
MGILPSPGMPALLSLVSLLSVLLMGCVAETGTQCVNLTTRTQLPPAYTNSFTRGVYYPDKVFRSSVLHSTQDLFLPFFSNVTWFHAIHVSGTNGTKRFDNPVLPFNDGVYFASTEKSNIIRGWIFGTTLDSKTQSLLIVNNATNVVIKVCEFQFCNDPFLGVYYHKNNKSWMESEFRVYSSANNCTFEYVSQPFLMDLEGKQGNFKNLREFVFKNIDGYFKIYSKHTPINLVRDLPQGFSALEPLVDLPIGINITRFQTLLALHRSYLTPGDSSSGWTAGAAAYYVGYLQPRTFLLKYNENGTITDAVDCALDPLSETKCTLKSFTVEKGIYQTSNFRVQPTESIVRFPNITNLCPFGEVFNATRFASVYAWNRKRISNCVADYSVLYNSASFSTFKCYGVSPTKLNDLCFTNVYADSFVIRGDEVRQIAPGQTGKIADYNYKLPDDFTGCVIAWNSNNLDSKVGGNYNYLYRLFRKSNLKPFERDISTEIYQAGSTPCNGVEGFNCYFPLQSYGFQPTNGVGYQPYRVVVLSFELLHAPATVCGPKKSTNLVKNKCVNFNFNGLTGTGVLTESNKKFLPFQQFGRDIADTTDAVRDPQTLEILDITPCSFGGVSVVTPGTNTSNQVAVLYQDVNCTEVPVAIHADQLTPTWRVYSTGSNVFQTRAGCLIGAEHVNNSYECDIPIGAGICASYQTQTNSPSGAGSVASQSIIAYTMSLGAENSVAYSNNSIAIPTNFTISVTTEILPVSMTKTSVDCTMYICGDSTECSNLLLQYGSFCTQLNRALTGIAVEQDKNTQEVFAQVKQIYKTPPIKDFGGFNFSQILPDPSKPSKRSFIEDLLFNKVTLADAGFIKQYGDCLGDIAARDLICAQKFNGLTVLPPLLTDEMIAQYTSALLAGTITSGWTFGAGAALQIPFAMQMAYRFNGIGVTQNVLYENQKLIANQFNSAIGKIQDSLSSTASALGKLQDVVNQNAQALNTLVKQLSSNFGAISSVLNDILSRLDPPEAEVQIDRLITGRLQSLQTYVTQQLIRAAEIRASANLAATKMSECVLGQSKRVDFCGKGYHLMSFPQSAPHGVVFLHVTYVPAQEKNFTTAPAICHDGKAHFPREGVFVSNGTHWFVTQRNFYEPQIITTDNTFVSGNCDVVIGIVNNTVYDPLQPELDSFKEELDKYFKNHTSPDVDLGDISGINASVVNIQKEIDRLNEVAKNLNESLIDLQELGKYEQYIKGSGRENLYFQGGGGSGYIPEAPRDGQAYVRKDGEWVLLSTFLGHHHHHHHH

SEQ ID NO: 1817 - protein, 1281 aa, Artificial Sequence
  Description of Artificial Sequence: Synthetic polypeptide
MGILPSPGMPALLSLVSLLSVLLMGCVAETGTQCVNLTTRTQLPPAYTNSFTRGVYYPDKVFRSSVLHSTQDLFLPFFSNVTWFHAIHVSGTNGTKRFDNPVLPFNDGVYFASTEKSNIIRGWIFGTTLDSKTQSLLIVNNATNVVIKVCEFQFCNDPFLGVYYHKNNKSWMESEFRVYSSANNCTFEYVSQPFLLDLEGKQGNFKNLREFVFKNIDGYFKIYSKHTPINLVRDLPQGFSALEPLVDLPIGINITRFQTLLALHRSYLTPGDSSSGWTAGAAAYYVGYLQPRTFLLKYNENGTITDAVDCALDPLSETKCTLKSFTVEKGIYQTSNFRVQPTESIVRFPNITNLCPFGEVFNATRFASVYAWNRKRISNCVADYSVLYNSASFSTFKCYGVSPTKLNDLCFTNVYADSFVIRGDEVRQIAPGQTGKIADYNYKLPDDFTGCVIAWNSNNLDSKVGGNYNYLYRLFRKSNLKPFERDISTEIYQAGSTPCNGVEGFNCYFPLQSYGFQPTNGVGYQPYRVVVLSFELLHAPATVCGPKKSTNLVKNKCVNFNFNGLTGTGVLTESNKKFLPFQQFGRDIADTTDAVRDPQTLEILDITPCSFGGVSVITPGTNTSNQVAVLYQDVNCTEVPVAIHADQLTPTWRVYSTGSNVFQTRAGCLIGAEHVNNSYECDIPIGAGICASYQTQTNSPSGAGSVASQSIIAYTMSLGAENSVAYSNNSIAIPTNFTISVTTEILPVSMTKTSVDCTMYICGDSTECSNLLLQYGSFCTQLNRALTGIAVEQDKNTQEVFAQVKQIYKTPPIKDFGGFNFSQILPDPSKPSKRSFIEDLLFNKVTLADAGFIKQYGDCLGDIAARDLICAQKFNGLTVLPPLLTDEMIAQYTSALLAGTITSGWTFGAGAALQIPFAMQMAYRFNGIGVTQNVLYENQKLIANQFNSAIGKIQDSLSSTASALGKLQDVVNQNAQALNTLVKQLSSNFGAISSVLNDILSRLDPPEAEVQIDRLITGRLQSLQTYVTQQLIRAAEIRASANLAATKMSECVLGQSKRVDFCGKGYHLMSFPQSAPHGVVFLHVTYVPAQEKNFTTAPAICHDGKAHFPREGVFVSNGTHWFVTQRNFYEPQIITTDNTFVSGNCDVVIGIVNNTVYDPLQPELDSFKEELDKYFKNHTSPDVDLGDISGINASVVNIQKEIDRLNEVAKNLNESLIDLQELGKYEQYIKGSGRENLYFQGGGGSGYIPEAPRDGQAYVRKDGEWVLLSTFLGHHHHHHHH

SEQ ID NO: 1818 - protein, 1281 aa, Artificial Sequence
  Description of Artificial Sequence: Synthetic polypeptide
MGILPSPGMPALLSLVSLLSVLLMGCVAETGTQCVNLTTRTQLPPAYTNSFTRGVYYPDKVFRSSVLHSTQDLFLPFFSNVTWFHAIHVSGTNGTKRFDNPVLPFNDGVYFASTEKSNIIRGWIFGTTLDSKTQSLLIVNNATNVVIKVCEFQFCNDPFLGVYYHKNNKSWMESEFRVYSSANNCTFEYVSQPFLMDLEGKQGNFKNLREFVFKNIDGYFKIYSKHTPINLVRDLPQGFSALEPLVDLPIGINITRFQTLLALHRSYLTPGDSSSGWTAGAAAYYVGYLQPRTFLLKYNENGTITDAVDCALDPLSETKCKLKSFTVEKGIYQTSNFRVQPTESIVRFPNITNLCPFGEVFNATRFASVYAWNRKRISNCVADYSVLYNSASFSTFKCYGVSPTKLNDLCFTNVYADSFVIRGDEVRQIAPGQTGKIADYNYKLPDDFTGCVIAWNSNNLDSKVGGNYNYLYRLFRKSNLKPFERDISTEIYQAGSTPCNGVEGFNCYFPLQSYGFQPTNGVGYQPYRVVVLSFELLHAPATVCGPKKSTNLVKNKCVNFNFNGLTGTGVLTESNKKFLPFQQFGRDIADTTDAVRDPQTLEILDITPCSFGGVSVITPGTNTSNQVAVLYQDVNCTEVPVAIHADQLTPTWRVYSTGSNVFQTRAGCLIGAEHVNNSYECDIPIGAGICASYQTQTNSPSGAGSVASQSIIAYTMSLGAENSVAYSNNSIAIPTNFTISVTTEILPVSMTKTSVDCTMYICGDSTECSNLLLQYGSFCTQLNRALTGIAVEQDKNTQEVFAQVKQIYKTPPIKDFGGFNFSQILPDPSKPSKRSFIEDLLFNKVTLADAGFIKQYGDCLGDIAARDLICAQKFNGLTVLPPLLTDEMIAQYTSALLAGTITSGWTFGAGAALQIPFAMQMAYRFNGIGVTQNVLYENQKLIANQFNSAIGKIQDSLSSTASALGKLQDVVNQNAQALNTLVKQLSSNFGAISSVLNDILSRLDPPEAEVQIDRLITGRLQSLQTYVTQQLIRAAEIRASANLAATKMSECVLGQSKRVDFCGKGYHLMSFPQSAPHGVVFLHVTYVPAQEKNFTTAPAICHDGKAHFPREGVFVSNGTHWFVTQRNFYEPQIITTDNTFVSGNCDVVIGIVNNTVYDPLQPELDSFKEELDKYFKNHTSPDVDLGDISGINASVVNIQKEIDRLNEVAKNLNESLIDLQELGKYEQYIKGSGRENLYFQGGGGSGYIPEAPRDGQAYVRKDGEWVLLSTFLGHHHHHHHH

SEQ ID NO: 1819 - protein, 1281 aa, Artificial Sequence
  Description of Artificial Sequence: Synthetic polypeptide
MGILPSPGMPALLSLVSLLSVLLMGCVAETGTQCVNLTTRTQLPPAYTNSFTRGVYYPDKVFRSSVLHSTQDLFLPFFSNVTWFHAIHVSGTNGTKRFDNPVLPFNDGVYFASTEKSNIIRGWIFGTTLDSKTQSLLIVNNATNVVIKVCEFQFCNDPFLGVYYHKNNKSWMESEFRVYSSANNCTFEYVSQPFLMDLEGKQGNFKNLREFVFKNIDGYFKIYSKHTPINLVRDLPQGFSALEPLVDLPIGINITRFQTLLALHRSYLTPGDSSSGWTAGAAAYYVGYLQPRTFLLKYNENGTITDAVDCALDPLSETKCTLKSFTVEKGIYQTSNFRVQPTESIVRFPNITNLCPFGEVFNATRFASVYAWNRKRISNCVADYSVLYNSASFSTFKCYGVSPTKLNDLCFTNVYADSFVIRGDEVRQIAPGQTGKIADYNYKLPDDFTGCVIAWNSNNLDSKVGGNYNYLYRLFRKSNLKPFERDISTEIYQAGSTPCNGVEGFNCYFPLQSYGFQPTNGVGYQPYRVVVLSFELLHAPATVCGPKKSTNLVKNKCVNFNFNGLTGTGVLTESNKKFLPFQQFGRDIADTTDAVRDPQTLEILDITPCSFGGVSVITPGTNTSNQVAVLYQDVNCTEVPVAIHADQLTPTWRVYSTGSNVFQTRAGCLIGAEHVNNSYECDIPIGAGICASYQTQTNSPSGAGSVASQSIIAYTMSLGAENSVAYSNNSIAIPTNFTISVTTEILPVSMTKTSVDCTMYICGDSTECSNLLLQYGSFCTQLNRALTGIAVEQDKNTQEVFAQVKQIYKTPPIKDFGGFNFSQILPDPSKPSKRSFIEDLLFNKVTLADAGFIKQYGDCLGDIAARDLICAQKFNGLTVLPPLLTDEMIAQYTSALLAGTITSGWTFGAGAALQIPFAMQMAYRFNGIGVTQNVLYENQKLIANQFNNAIGNIQDSLSTTASALGKLQDVVNQNAQALNTLVKQLSSNFGAISSVLNDILSRLDPPEAEVQIDRLITGRLQSLQTYVTQQLIRAAEIRASANLAATKMSECVLGQSKRVDFCGKGYHLMSFPQSAPHGVVFLHVTYVPAQEKNFTTAPAICHDGKAHFPREGVFVSNGTHWFVTQRNFYEPQIITTDNTFVSGNCDVVIGIVNNTVYDPLQPELDSFKEELDKYFKNHTSPDVDLGDISGINASVVNIQKEIDRLNEVAKNLNESLIDLQELGKYEQYIKGSGRENLYFQGGGGSGYIPEAPRDGQAYVRKDGEWVLLSTFLGHHHHHHHH

SEQ ID NO: 1820 - protein, 1281 aa, Artificial Sequence
  Description of Artificial Sequence: Synthetic polypeptide
MGILPSPGMPALLSLVSLLSVLLMGCVAETGTQCVNLTTRTQLPPAYTNSFTRGVYYPDKVFRSSVLHSTQDLFLPFFSNVTWFHAIHVSGTNGTKRFDNPVLPFNDGVYFASTEKSNIIRGWIFGTTLDSKTQSLLIVNNATNVVIKVCEFQFCNDPFLGVYYHKNNKSWMESEFRVYSSANNCTFEYVSQPFLMDLEGKQGNFKNLREFVFKNIDGYFKIYSKHTPINLVRDLPQGFSALEPLVDLPIGINITRFQTLLALHRSYLTPGDSSSGWTAGAAAYYVGYLQPRTFLLKYNENGTITDAVDCALDPLSETKCTLKSFTVEKGIYQTSNFRVQPTESIVRFPNITNLCPFGEVFNATRFASVYAWNRKRISNCVADYSVLYNSASFSTFKCYGVSPTKLNDLCFTNVYADSFVIRGDEVRQIAPGQTGKIADYNYKLPDDFTGCVIAWNSNNLDSKVGGNYNYLYRLFRKSNLKPFERDISTEIYQAGSTPCNGVEGFNCYFPLQSYGFQPTNGVGYQPYRVVVLSFELLHAPATVCGPKKSTNLVKNKCVNFNFNGLTGTGVLTESNKKFLPFQQFGRDIADTTDAVRDPQTLEILDITPCSFGGVSVITPGTNTSNQVAVLYQDVNCTEVPVAIHADQLTPTWRVYSTGSNVFQTRAGCLIGAEHVNNSYECDIPIGAGICASYQTQTNSPSGAGSVASQSIIAYTMSLGAENSVAYSNNSIAIPTNFTISVTTEILPVSMTKTSVDCTMYICGDSTRCSNLLLQYGSFCTQLNRALTGIAVEQDKNTQEVFAQVKQIYKTPPIKDFGGFNFSQILPDPSKPSKRSFIEDLLFNKVTLADAGFIKQYGDCLGDIAARDLICAQKFNGLTVLPPLLTDEMIAQYTSALLAGTITSGWTFGAGAALQIPFAMQMAYRFNGIGVTQNVLYENQKLIANQFNSAIGKIQDSLSSTASALGKLQDVVNQNAQALNTLVKQLSSNFGAISSVLNDILSRLDPPEAEVQIDRLITGRLQSLQTYVTQQLIRAAEIRASANLAATKMSECVLGQSKRVDFCGKGYHLMSFPQSAPHGVVFLHVTYVPAQEKNFTTAPAICHDGKAHFPREGVFVSNGTHWFVTQRNFYEPQIITTDNTFVSGNCDVVIGIVNNTVYDPLQPELDSFKEELDKYFKNHTSPDVDLGDISGINASVVNIQKEIDRLNEVAKNLNESLIDLQELGKYEQYIKGSGRENLYFQGGGGSGYIPEAPRDGQAYVRKDGEWVLLSTFLGHHHHHHHH

SEQ ID NO: 1821 - protein, 1281 aa, Artificial Sequence
  Description of Artificial Sequence: Synthetic polypeptide
MGILPSPGMPALLSLVSLLSVLLMGCVAETGTQCVNLTTRTQLPPAYTNSFTRGVYYPDKVFRSSVLHSTQDLFLPFFSNVTWFHAIHVSGTNGTKRFDNPVLPFNDGVYFASTEKSNIIRGWIFGTTLDSKTQSLLIVNNATNVVIKVCEFQFCNDPFLGVYYHKNNKSWMESEFRVYSSANNCTFEYVSQSFLMDLEGKQGNFKNLREFVFKNIDGYFKIYSKHTPINLVRDLPQGFSALEPLVDLPIGINITRFQTLLALHRSYLTPGDSSSGWTAGAAAYYVGYLQPRTFLLKYNENGTITDAVDCALDPLSETKCTLKSFTVEKGIYQTSNFRVQPTESIVRFPNITNLCPFGEVFNATRFASVYAWNRKRISNCVADYSVLYNSASFSTFKCYGVSPTKLNDLCFTNVYADSFVIRGDEVRQIAPGQTGKIADYNYKLPDDFTGCVIAWNSNNLDSKVGGNYNYLYRLFRKSNLKPFERDISTEIYQAGSTPCNGVEGFNCYFPLQSYGFQPTNGVGYQPYRVVVLSFELLHAPATVCGPKKSTNLVKNKCVNFNFNGLTGTGVLTESNKKFLPFQQFGRDIADTTDAVRDPQTLEILDITPCSFGGVSVITPGTNTSNQVAVLYQDVNCTEVPVAIHADQLTPTWRVYSTGSNVFQTRAGCLIGAEHVNNSYECDIPIGAGICASYQTQTNSPSGAGSVASQSIIAYTMSLGAENSVAYSNNSIAIPTNFTISVTTEILPVSMTKTSVDCTMYICGDSTECSNLLLQYGSFCTQLNRALTGIAVEQDKNTQEVFAQVKQIYKTPPIKDFGGFNFSQILPDPSKPSKRSFIEDLLFNKVTLADAGFIKQYGDCLGDIAARDLICAQKFNGLTVLPPLLTDEMIAQYTSALLAGTITSGWTFGAGAALQIPFAMQMAYRFNGIGVTQNVLYENQKLIANQFNSAIGKIQDSLSSTASALGKLQDVVNQNAQALNTLVKQLSSNFGAISSVLNDILSRLDPPEAEVQIDRLITGRLQSLQTYVTQQLIRAAEIRASANLAATKMSECVLGQSKRVDFCGKGYHLMSFPQSAPHGVVFLHVTYVPAQEKNFTTAPAICHDGKAHFPREGVFVSNGTHWFVTQRNFYEPQIITTDNTFVSGNCDVVIGIVNNTVYDPLQPELDSFKEELDKYFKNHTSPDVDLGDISGINASVVNIQKEIDRLNEVAKNLNESLIDLQELGKYEQYIKGSGRENLYFQGGGGSGYIPEAPRDGQAYVRKDGEWVLLSTFLGHHHHHHHH

SEQ ID NO: 1822 - protein, 1281 aa, Artificial Sequence
  Description of Artificial Sequence: Synthetic polypeptide
MGILPSPGMPALLSLVSLLSVLLMGCVAETGTQCVNLTTRTQLPPAYTNSFTRGVYYPDDIFRSSVLHSTQDLFLPFFSNVTWFHAIHVSGTNGTKRFDNPVLPFNDGVYFASTEKSNIIRGWIFGTTLDSKTQSLLIVNNATNVVIKVCEFQFCNDPFLGVYYHKNNKSWMESEFRVYSSANNCTFEYVSQPFLMDLEGKQGNFKNLREFVFKNIDGYFKIYSKHTPINLVRDLPQGFSALKPLVKLPIGINITRFQTLLALHRSYLTPGDSSSGWTAGAAAYYVGYLQPRTFLLKYNENGTITDAVDCALDPLSETKCTLKSFTVEKGIYQTSNFRVQPTESIVRFPNITNLCPFGEVFNATRFASVYAWNRKRISNCVADYSVLYNSASFSTFKCYGVSPTKLNDLCFTNVYADSFVIRGDEVRQIAPGQTGKIADYNYKLPDDFTGCVIAWNSNNLDSKVGGNYNYLYRLFRKSNLKPFERDISTEIYQAGSTPCNGVEGFNCYFPLQSYGFQPTNGVGYQPYRVVVLSFELLHAPATVCGPKKSTNLVKNKCVNFNFNGLTGTGVLTESNKKFLPFQQFGRDIADTTDAVRDPQTLEILDITPCSFGGVSVITPGTNTSNQVAVLYQDVNCTEVPVAIHADQLTPTWRVYSTGSNVFQTRAGCLIGAEHVNNSYECDIPIGAGICASYQTQTNSPSGAGSVASQSIIAYTMSLGAENSVAYSNNSIAIPTNFTISVTTEILPVSMTKTSVDCTMYICGDSTECSNLLLQYGSFCTQLNRALTGIAVEQDKNTQEVFAQVKQIYKTPPIKDFGGFNFSQILPDPSKPSKRSFIEDLLFNKVTLADAGFIKQYGDCLGDIAARDLICAQKFNGLTVLPPLLTDEMIAQYTSALLAGTITSGWTFGAGAALQIPFAMQMAYRFNGIGVTQNVLYENQKLIANQFNSAIGKIQDSLSSTASALGKLQDVVNQNAQALNTLVKQLSSNFGAISSVLNDILSRLDPPEAEVQIDRLITGRLQSLQTYVTQQLIRAAEIRASANLAATKMSECVLGQSKRVDFCGKGYHLMSFPQSAPHGVVFLHVTYVPAQEKNFTTAPAICHDGKAHFPREGVFVSNGTHWFVTQRNFYEPQIITTDNTFVSGNCDVVIGIVNNTVYDPLQPELDSFKEELDKYFKNHTSPDVDLGDISGINASVVNIQKEIDRLNEVAKNLNESLIDLQELGKYEQYIKGSGRENLYFQGGGGSGYIPEAPRDGQAYVRKDGEWVLLSTFLGHHHHHHHH

SEQ ID NO: 1823 - protein, 1281 aa, Artificial Sequence
  Description of Artificial Sequence: Synthetic polypeptide
MGILPSPGMPALLSLVSLLSVLLMGCVAETGTQCVNLTTRTQLPPAYTNSFTRGVYYPDKIFRSSVLHLTQDLFLPFFSNVTWFHAIHVSGTNGTKRFDNPVLPFNDGVYFAATEKSNIIRGWIFGTTLDSKTQSLLIVNNATNVVIKVCEFQFCNDPFLGVYYHKNNKSWMESEFRVYSSANNCTFEYVSQPFLMDLEGKQGNFKNLREFVFKNIDGYFKIYSKHTPINLVRDLPQGFSALKPLVKLPIGINITRFQTLLALHRSYLTPGDSSSGWTAGAAAYYVGYLQPRTFLLKYNENGTITDAVDCALDPLSETKCTLKSFTVEKGIYQTSNFRVQPTESIVRFPNITNLCPFGEVFNATRFASVYAWNRKRISNCVADYSVLYNSASFSTFKCYGVSPTKLNDLCFTNVYADSFVIRGDEVRQIAPGQTGKIADYNYKLPDDFTGCVIAWNSNNLDSKVGGNYNYLYRLFRKSNLKPFERDISTEIYQAGSTPCNGVEGFNCYFPLQSYGFQPTNGVGYQPYRVVVLSFELLHAPATVCGPKKSTNLVKNKCVNFNFNGLTGTGVLTESNKKFLPFQQFGRDISDTTDAVRDPQTLEILDITPCSFGGVSVITPGTNTSNQVAVLYQDVNCTDVPVAIHADQLTPTWRVYSTGSNVFQTQAGCLIGAEHVNNSYECDIPIGAGICASYQTQTNSPSGAGSVASQSIIAYTMSLGAENSVAYSNNSIAIPTNFTISVTTEILPVSMTKTSVDCTMYICGDSTECSNLLLQYGSFCTQLNRALTGIAVEQDKNTQEVFAQVKQIYKTPPIKDFGGFNFSQILPDPSKPSKRSFIEDLLFNKVTLADAGFIKQYGDCLGDIAARDLICAQKFNGLTVLPPLLTDEMIAAYTAALLAGTATAGWTFGAGAALQIPFAMQMAYRFNGIGVTQNVLYENQKLIANQFNSAIGKIQDSLSSTASALGKLQDVVNQNAQALNTLVKQLSSNFGAISSVLNDILSRLDPPEAEVQIDRLITGRLQSLQTYVTQQLIRAAEIRASANLAATKMSECVLGQSKRVDFCGKGYHLMSFPQSAPHGVVFLHVTYVPAQEKNFTTAPAICHDGKAHFPREGVFVSNGTHWFVTQRNFYEPQIITTDNTFVSGNCDVVIGIVNNTVYDPLQPELDSFKEELDKYFKNHTSPDVDLGDISGINASVVNIQKEIDRLNEVAKNLNESLIDLQELGKYEQYIKGSGRENLYFQGGGGSGYIPEAPRDGQAYVRKDGEWVLLSTFLGHHHHHHHH

SEQ ID NO: 1824 - protein, 1281 aa, Artificial Sequence
  Description of Artificial Sequence: Synthetic polypeptide
MGILPSPGMPALLSLVSLLSVLLMGCVAETGTQCVNLTTRTQLPPAYTNSFTRGVYYPDKVFRSSVLHSTQDLFLPFFSNVTWFHAIHVSGTNGTKRFDNPVLPFNDGVYFASTEKSNIIRGWIFGTTLDSKTQSLLIVNNATNVVIKVCEFQFCNDPFLGVYYHKNNKSWMESEFRVYSSANNCTFEYVSQPFLMDLEGKQGNFKNLREFVFKNIDGYFKIYSKHTPINLVRDLPQGFSALEPLVDLPIGINITRFQTLLALHRSYLTPGDSSSGWTAGAAAYYVGYLQPRTFLLKYNENGTITDAVDCALDPLSETKCTLKSFTVEKGIYQTSNFRVQPTESIVRFPNITNLCPFGEVFNATRFASVYAWNRKRISNCVADYSVLYNSASFSTFKCYGVSPTKLNDLCFTNVYADSFVIRGDEVRQIAPGQTGKIADYNYKLPDDFTGCVIAWNSNNLDSKVGGNYNYLYRLFRKSNLKPFERDISTEIYQAGSTPCNGVEGFNCYFPLQSYGFQPTNGVGYQPYRVVVLSFELLHAPATVCGPKKSTNLVKNKCVNFNFNGLTGTGVLTESNKKFLPFQQFGRDIADTTDAVRDPQTLEILDITPCSFGGVSVITPGTNTSNQVAVLYQDVNCTEVPVAIHADQLTPTWRVYSTGSNVFQTRAGCLIGAEHVNNSYECDIPIGAGICASYQTQTNSPSGAGSVASQSIIAYTMSLGAENSVAYSNNSIAIPTNFTISVTTEILPVSMTKTSVDCTMYICGDSTECSNLLLQYGSFCTQLNRALTGIAVEQDKNTQEVFAQVKQIYKTPPIKDFGGFNFSQILPDPSKPSKRSFIEDLLFNKVTLADAGFIKQYGDCLGDIAARDLICAQKFNGLTVLPPLLTDEMIAQYTSALLAGTITSGWTFGAGAALQIPFAMQMAYRFNGIGVTQNVLYENQKLIANQFNSAIGKIQDSLSSTASALGKLQDVVNQNAQALNTLVKQLSSNFGAISSVLNDIYSRLDPPEAEVQIDRLITGRLQSLQTYVTQQLIRAAEIRASANLAATKMSECVLGQSKRVDFCGKGYHLMSFPQSAPHGVVFLHVTYVPAQEKNFTTAPAICHDGKAHFPREGVFVSNGTHWFVTQRNFYEPQIITTDNTFVSGNCDVVIGIVNNTVYDPLQPELDSFKEELDKYFKNHTSPDVDLGDISGINASVVNIQKEIDRLNEVAKNLNESLIDLQELGKYEQYIKGSGRENLYFQGGGGSGYIPEAPRDGQAYVRKDGEWVLLSTFLGHHHHHHHH

SEQ ID NO: 1825 - protein, 1281 aa, Artificial Sequence
  Description of Artificial Sequence: Synthetic polypeptide
MGILPSPGMPALLSLVSLLSVLLMGCVAETGTQCVNLTTRTQLPPAYTNSFTRGVYYPDKVFRSSVLHSTQDLFLPFFSNVTWFHAIHVSGTNGTKRFDNPVLPFNDGVYFASTEKSNIIRGWIFGTTLDSKTQSLLIVNNATNVVIKVCEFQFCNDPFLGVYYHKNNKSWMESEFRVYSSANNCTFEYVSQPFLMDLEGKQGNFKNLREFVFKNIDGYFKIYSKHTPINLVRDLPQGFSALEPLVDLPIGINITRFQTFLALHRSYLTPGDSSSGWTAGAAAYYVGYLQPRTFLLKYNENGTITDAVDCALDPLSETKCTLKSFTVEKGIYQTSNFRVQPTESIVRFPNITNLCPFGEVFNATRFASVYAWNRKRISNCVADYSVLYNSASFSTFKCYGVSPTKLNDLCFTNVYADSFVIRGDEVRQIAPGQTGKIADYNYKLPDDFTGCVIAWNSNNLDSKVGGNYNYLYRLFRKSNLKPFERDISTEIYQAGSTPCNGVEGFNCYFPLQSYGFQPTNGVGYQPYRVVVLSFELLHAPATVCGPKKSTNLVKNKCVNFNFNGLTGTGVLTESNKKFLPFQQFGRDIADTTDAVRDPQTLEILDITPCSFGGVSVITPGTNTSNQVAVLYQDVNCTEVPVAIHADQLTPTWRVYSTGSNVFQTRAGCLIGAEHVNNSYECDIPIGAGICASYQTQTNSPSGAGSVASQSIIAYTMSLGAENSVAYSNNSIAIPTNFTISVTTEILPVSMTKTSVDCTMYICGDSTECSNLLLQYGSFCTQLNRALTGIAVEQDKNTQEVFAQVKQIYKTPPIKDFGGFNFSQILPDPSKPSKRSFIEDLLFNKVTLADAGFIKQYGDCLGDIAARDLICAQKFNGLTVLPPLLTDEMIAQYTSALLAGTITSGWTFGAGAALQIPFAMQMAYRFNGIGVTQNVLYENQKLIANQFNSAIGKIQDSLSSTASALGKLQDVVNQNAQALNTLVKQLSSNFGAISSVLNDILSRLDPPEAEVQIDRLITGRLQSLQTYVTQQLIRAAEIRASANLAATKMSECVLGQSKRVDFCGKGYHLMSFPQSAPHGVVFLHVTYVPAQEKNFTTAPAICHDGKAHFPREGVFVSNGTHWFVTQRNFYEPQIITTDNTFVSGNCDVVIGIVNNTVYDPLQPELDSFKEELDKYFKNHTSPDVDLGDISGINASVVNIQKEIDRLNEVAKNLNESLIDLQELGKYEQYIKGSGRENLYFQGGGGSGYIPEAPRDGQAYVRKDGEWVLLSTFLGHHHHHHHH

SEQ ID NO: 1826 - protein, 1281 aa, Artificial Sequence
  Description of Artificial Sequence: Synthetic polypeptide
MGILPSPGMPALLSLVSLLSVLLMGCVAETGTQCVNLTTRTQLPPAYTNSFTRGVYYPDKVFRSSVLHSTQDLFLPFFSNVTWFHAIHVSGTNGTKRFDNPVLPFNDGVYFASTEKSNIIRGWIFGTTLDSKTQSLLIVNNATNVVIKVCEFQFCNDPFLGVYYHKNNKSWMESEFRVYSSANNCTFEYVSQPFLMDLEGKQGNFKNLREFVFKNIDGYFKIYSKHTPINLVRDLPQGFSALEPLVDLPIGINITRFQTLLALHRSYLTPGDSSSGWTAGAAAYYVGYLQPRTFLLKYNENGTITDAVDCALDPLSETKCTLKSFTVEKGIYQTSNFRVQPTESIVRFPNITNLCPFGEVFNATRFASVYAWNRKRISNCVADYSVLYNSASFSTFKCYGVSPTKLNDLCFTNVYADSFVIRGDEVRQIAPGQTGKIADYNYKLPDDFTGCVIAWNSNNLDSKVGGNYNYLYRLFRKSNLKPFERDISTEIYQAGSTPCNGVEGFNCYFPLQSYGFQPTNGVGYQPYRVVVLSFELLHAPATVCGPKKSTNLVKNKCVNFNFNGLTGTGVLTESNKKFLPFQQFGRDIADTTDAVRDPQTLEILDITPCSFGGVSVITPGTNTSNQVAVLYQDVNCTEVPVAIHADQLTPTWRVYSTGSNVFQTRAGCLIGAEHVNNSYECDIPIGAGICASYQTQTNSPSGAGSVASQSIIAYTMSLGAENSVAYSNNSIAIPTNFTISVTTEILPVSMTKTSVDCTMYICGDSTECSNLLLQYGSFCTQLNRALTGIAVEQDKNTQEVFAQVKQIYKTPPIKDFGGFNFSQILPDPSKPSKRSFIEDLLFNKVTLADAGFIKQYGDCLGDIAARDLICAQKFNGLTVLPPLLTDEMIAQYTSALLAGTITSGWTFGAGAALVIPFAMQMAYRFNGIGVTQNVLYENQKLIANQFNSAIGKIQDSLSSTASALGKLQDVVNQNAQALNTLVKQLSSNFGAISSVLNDILSRLDPPEAEVQIDRLITGRLQSLQTYVTQQLIRAAEIRASANLAATKMSECVLGQSKRVDFCGKGYHLMSFPQSAPHGVVFLHVTYVPAQEKNFTTAPAICHDGKAHFPREGVFVSNGTHWFVTQRNFYEPQIITTDNTFVSGNCDVVIGIVNNTVYDPLQPELDSFKEELDKYFKNHTSPDVDLGDISGINASVVNIQKEIDRLNEVAKNLNESLIDLQELGKYEQYIKGSGRENLYFQGGGGSGYIPEAPRDGQAYVRKDGEWVLLSTFLGHHHHHHHH

SEQ ID NO: 1827 - protein, 1281 aa, Artificial Sequence
  Description of Artificial Sequence: Synthetic polypeptide
MGILPSPGMPALLSLVSLLSVLLMGCVAETGTQCVNLTTRTQLPPAYTNSFTRGVYYPDKVFRSSVLHSTQDLFLPFFSNVTWFHAIHVSGTNGTKRFDNPVLPFNDGVYFASTEKSNIIRGWIFGTTLDSKTQSLLIVNNATNVVIKVCEFQFCNDPFLGVYYHKNNKSWMESEFRVYSSANNCTFEYVSQPFLMDLEGKQGNFKNLREFVFKNIDGYFKIYSKHTPINLVRDLPQGFSALEPLVDLPIGINITRFQTLLALHRSYLTPGDSSSGWTAGAAAYYVGYLQPRTFLLKYNENGTITDAVDCALDPLSETKCTLKSFTVEKGIYQTSNFRVQPTESIVRFPNITNLCPFGEVFNATRFASVYAWNRKRISNCVADYSVLYNSASFSTFKCYGVSPTKLNDLCFTNVYADSFVIRGDEVRQIAPGQTGKIADYNYKLPDDFTGCVIAWNSNNLDSKVGGNYNYLYRLFRKSNLKPFERDISTEIYQAGSTPCNGVEGFNCYFPLQSYGFQPTNGVGYQPYRVVVLSFELLHAPATVCGPKKSTNLVKNKCVNFNFNGLTGTGVLTESNKKFLPFQQFGRDIADTTDAVRDPQTLEILDITPCSFGGVSVITPGTNTSNQVAVLYQDVNCTEVPVAIHADQLTPTWRVYSTGSNVFQTRAGCLIGAEHVNNSYECDIPIGAGICASYQTQTNSPSGAGSVASQSIIAYTMSLGAENSVAYSNNSIAIPTNFTISVTTEILPVSMTKTSVDCTMYICGDSTECSNLLLQYGSFCTQLNRALTGIAVEQDKNTQEVFAQVKQIYKTPPIKDFGGFNFSQILPDPSKPSKRSFIEDLLFNKVTLADAGFIKQYGDCLGDIAARDLICAQKFNGLTVLPPLLTDEMIAQYTSALLAGTITSGWTFGAGAALQIPFAMQMAYRFNGIGVTQNVLYENQKLIANQFNSAIGKIQDSLSSTANALGKLQDVVNQNAQALNTLVKQLSSNFGAISSVLNDILSRLDPPEAEVQIDRLITGRLQSLQTYVTQQLIRAAEIRASANLAATKMSECVLGQSKRVDFCGKGYHLMSFPQSAPHGVVFLHVTYVPAQEKNFTTAPAICHDGKAHFPREGVFVSNGTHWFVTQRNFYEPQIITTDNTFVSGNCDVVIGIVNNTVYDPLQPELDSFKEELDKYFKNHTSPDVDLGDISGINASVVNIQKEIDRLNEVAKNLNESLIDLQELGKYEQYIKGSGRENLYFQGGGGSGYIPEAPRDGQAYVRKDGEWVLLSTFLGHHHHHHHH

SEQ ID NO: 1828 - protein, 1281 aa, Artificial Sequence
  Description of Artificial Sequence: Synthetic polypeptide
MGILPSPGMPALLSLVSLLSVLLMGCVAETGTQCVNLTTRTQLPPAYTNSFTRGVYYPDKVFRSSVLHSTQDLFLPFFSNVTWFHAIHVSGTNGTKRFDNPVLPFNDGVYFASTEKSNIIRGWIFGTTLDSKTQSLLIVNNATNVVIKVCEFQFCNDPFLGVYYHKNNKSWMESEFRVYSSANNCTFEYVSQPFLMDLNGKQGNFKNLREFVFKNIDGYFKIYSKHTPINLVRDLPQGFSALEPLVDLPIGINITRFQTLLALHRSYLTPGDSSSGWTAGAAAYYVGYLQPRTFLLKYNENGTITDAVDCALDPLSETKCTLKSFTVEKGIYQTSNFRVQPTESIVRFPNITNLCPFGEVFNATRFASVYAWNRKRISNCVADYSVLYNSASFSTFKCYGVSPTKLNDLCFTNVYADSFVIRGDEVRQIAPGQTGKIADYNYKLPDDFTGCVIAWNSNNLDSKVGGNYNYLYRLFRKSNLKPFERDISTEIYQAGSTPCNGVEGFNCYFPLQSYGFQPTNGVGYQPYRVVVLSFELLHAPATVCGPKKSTNLVKNKCVNFNFNGLTGTGVLTESNKKFLPFQQFGRDIADTTDAVRDPQTLEILDITPCSFGGVSVITPGTNTSNQVAVLYQDVNCTEVPVAIHADQLTPTWRVYSTGSNVFQTRAGCLIGAEHVNNSYECDIPIGAGICASYQTQTNSPSGAGSVASQSIIAYTMSLGAENSVAYSNNSIAIPTNFTISVTTEILPVSMTKTSVDCTMYICGDSTECSNLLLQYGSFCTQLNRALTGIAVEQDKNTQEVFAQVKQIYKTPPIKDFGGFNFSQILPDPSKPSKRSFIEDLLFNKVTLADAGFIKQYGDCLGDIAARDLICAQKFNGLTVLPPLLTDEMIAQYTSALLAGTITSGWTFGAGAALQIPFAMQMAYRFNGIGVTQNVLYENQKLIANQFNSAIGKIQDSLSSTASALGKLQDVVNQNAQALNTLVKQLSSNFGAISSVLNDILSRLDPPEAEVQIDRLITGRLQSLQTYVTQQLIRAAEIRASANLAATKMSECVLGQSKRVDFCGKGYHLMSFPQSAPHGVVFLHVTYVPAQEKNFTTAPAICHDGKAHFPREGVFVSNGTHWFVTQRNFYEPQIITTDNTFVSGNCDVVIGIVNNTVYDPLQPELDSFKEELDKYFKNHTSPDVDLGDISGINASVVNIQKEIDRLNEVAKNLNESLIDLQELGKYEQYIKGSGRENLYFQGGGGSGYIPEAPRDGQAYVRKDGEWVLLSTFLGHHHHHHHH

SEQ ID NO: 1829 - protein, 1281 aa, Artificial Sequence
  Description of Artificial Sequence: Synthetic polypeptide
MGILPSPGMPALLSLVSLLSVLLMGCVAETGTQCVNLTTRTQLPPAYTNSFTRGVYYPDKVFRSSVLHSTQDLFLPFFSNVTWFHAIHVSGTNGTKRFDNPVLPFNDGVYFASTEKSNIIRGWIFGTTLDSKTQSLLIVNNATNVVIKVCEFQFCNDPFLGVYYHKNNKSWMESEFRVYSSANNCTFEYVSQPFLMDLEGKQGNFKNLREFVFKNIDGYFKIYSKHTPINLVRDLPQGFSALEPLVDLPIGINITRFQTLLALHRSYLTPGDSSSGWTAGAAAYYVGYLQPRTFLLKYNENGTITDAVDCALDPLSETKCTLKSFTVEKGIYQTSNFRVQPTESIVRFPNITNLCPFGEVFNATRFASVYAWNRKRISNCVADYSVLYNSASFSTFKCYGVSPTKLNDLCFTNVYADSFVIRGDEVRQIAPGQTGKIADYNYKLPDDFTGCVIAWNSNNLDSKVGGNYNYLYRLFRKSNLKPFERDISTEIYQAGSTPCNGVEGFNCYFPLQSYGFQPTNGVGYQPYRVVVLSFELLHAPATVCGPKKSTNLVKNKCVNFNFNGLTGTGVLTESNKKFLPFQQFGRDIADTTDAVRDPQTLEILDITPCSFGGVSVITPGTNTSNEVAVLYQDVNCTEVPVAIHADQLTPTWRVYSTGSNVFQTRAGCLIGAEHVNNSYECDIPIGAGICASYQTQTNSPSGAGSVASQSIIAYTMSLGAENSVAYSNNSIAIPTNFTISVTTEILPVSMTKTSVDCTMYICGDSTECSNLLLQYGSFCTQLNRALTGIAVEQDKNTQEVFAQVKQIYKTPPIKDFGGFNFSQILPDPSKPSKRSFIEDLLFNKVTLADAGFIKQYGDCLGDIAARDLICAQKFNGLTVLPPLLTDEMIAQYTSALLAGTITSGWTFGAGAALQIPFAMQMAYRFNGIGVTQNVLYENQKLIANQFNSAIGKIQDSLSSTASALGKLQDVVNQNAQALNTLVKQLSSNFGAISSVLNDILSRLDPPEAEVQIDRLITGRLQSLQTYVTQQLIRAAEIRASANLAATKMSECVLGQSKRVDFCGKGYHLMSFPQSAPHGVVFLHVTYVPAQEKNFTTAPAICHDGKAHFPREGVFVSNGTHWFVTQRNFYEPQIITTDNTFVSGNCDVVIGIVNNTVYDPLQPELDSFKEELDKYFKNHTSPDVDLGDISGINASVVNIQKEIDRLNEVAKNLNESLIDLQELGKYEQYIKGSGRENLYFQGGGGSGYIPEAPRDGQAYVRKDGEWVLLSTFLGHHHHHHHH

SEQ ID NO: 1830 - protein, 1281 aa, Artificial Sequence
  Description of Artificial Sequence: Synthetic polypeptide
MGILPSPGMPALLSLVSLLSVLLMGCVAETGTQCVNLTTRTQLPPAYTNSFTRGVYYPDKVFRSSVLHSTQDLFLPFFSNVTWFHAIHVSGTNGTKRFDNPVLPFNDGVYFASTEKSNIIRGWIFGTTLDSKTQSLLIVNNATNVVIKVCEFQFCNDPFLGVYYHKNNKSWMESEFRVYSSANNCTFEYVSQPFLMDLEGKQGNFKNLREFVFKNIDGYFKIYSKHTPINLVRDLPQGFSALEPLVDLPIGINITRFQTLLALHRSYLTPGDSSSGWTAGAAAYYVGYLQPRTFLLKYNENGTITDAVDCSLDPLSETKCKLKSFTVEKGIYQTSNFRVQPTESIVRFPNITNLCPFGEVFNATRFASVYAWNRKRISNCVADYSVLYNSASFSTFKCYGVSPTKLNDLCFTNVYADSFVIRGDEVRQIAPGQTGKIADYNYKLPDDFTGCVIAWNSNNLDSKVGGNYNYLYRLFRKSNLKPFERDISTEIYQAGSTPCNGVEGFNCYFPLQSYGFQPTNGVGYQPYRVVVLSFELLHAPATVCGPKKSTNLVKNKCVNFNFNGLTGTGVLTESNKKFLPFQQFGRDIADTTDAVRDPQTLEILDITPCSFGGVSVITPGTNTSNQVAVLYQDVNCTEVPEAIHSNQLRPTWRVYSTGSNVFQTRAGCLIGAEHVNNSYECDIPIGNGICASYQTQTNSPSGSGSVSSQSIIAYTMSLGAENSVAYSNNSIAIPTNFTISVTTEILPVSMTKTSVDCTMYICGDSTECSNLLLQYGSFCTQLNRALTGIAVEQDKNTQEVFAQVKQIYKTPPIKDFGGFNFSQILPDPSKPSKRSFIEDLLFNKVTLADAGFIKQYGDCLGDIAARDLICAQKFNGLTVLPPLLTDEMIAQYTSALLAGTITSGWTFGAGAALQIPFAMQMAYRFNGIGVTQNVLYENQKLIANQFNSAIGKIQDSLSSTASALGKLQDVVNQNAQALNTLVKQLSSNFGAISSVLNDILSRLDPPEAEVQIDRLITGRLQSLQTYVTQQLIRAAEIRASANLAATKMSECVLGQSKRVDFCGKGYHLMSFPQSAPHGVVFLHVTYVPAQEKNFTTAPAICHDGKAHFPREGVFVSNGTHWFVTQRNFYEPQIITTDNTFVSGNCDVVIGIVNNTVYDPLQPELDSFKEELDKYFKNHTSPDVDLGDISGINASVVNIQKEIDRLNEVAKNLNESLIDLQELGKYEQYIKGSGRENLYFQGGGGSGYIPEAPRDGQAYVRKDGEWVLLSTFLGHHHHHHHH

SEQ ID NO: 1831 - protein, 1281 aa, Artificial Sequence
  Description of Artificial Sequence: Synthetic polypeptide
MGILPSPGMPALLSLVSLLSVLLMGCVAETGTQCVNLTTRTQLPPAYTNSFTRGVYYPDKVFRSSVLHSTQDLFLPFFSNVTWFHAIHVSGTNGTKRFDNPVLPFNDGVYFASTEKSNIIRGWIFGTTLDSKTQSLLIVNNATNVVIKVCEFQFCNDPFLGVYYHKNNKSWMESEFRVYSSANNCTFEYVSQPFEMDLEGKQGNFKNLREFVFKNIDGYFKIYSKHTPINLVRDLPQGFSALEPLVDLPIGINITRFQTLLALHRSYLTPGDSSSGWTAGAAAYYVGYLQPRTFLLKYNENGTITDAVDCALDPLSETKCTLKSFTVEKGIYQTSNFRVQPTESIVRFPNITNLCPFGEVFNATRFASVYAWNRKRISNCVADYSVLYNSASFSTFKCYGVSPTKLNDLCFTNVYADSFVIRGDEVRQIAPGQTGKIADYNYKLPDDFTGCVIAWNSNNLDSKVGGNYNYLYRLFRKSNLKPFERDISTEIYQAGSTPCNGVEGFNCYFPLQSYGFQPTNGVGYQPYRVVVLSFELLHAPATVCGPKKSTNLVKNKCVNFNFNGLTGTGVLTESNKKFLPFQQFGRDIADTTDAVRDPQTLEILDITPCSFGGVSVITPGTNTSNQVAVLYQDVNCTEVPVAIHADQLTPTWRVYSTGSNVFQTRAGCLIGAEHVNNSYECDIPIGAGICASYQTQTNSPSGAGSVASQSIIAYTMSLGAENSVAYSNNSIAIPTNFTISVTTEILPVSMTKTSVDCTMYICGDSTECSNLLLQYGSFCTQLNRALTGIAVEQDKNTQEVFAQVKQIYKTPPIKDFGGFNFSQILPDPSKPSKRSFIEDLLFNKVTLADAGFIKQYGDCLGDIAARDLICAQKFNGLTVLPPLLTDEMIAQYTSALLAGTITSGWTFGAGAALQIPFAMQMAYRFNGIGVTQNVLYENQKLIANQFNSAIGKIQDSLSSTASALGKLQDVVNQNAQALNTLVKQLSSNFGAISSVLNDILSRLDPPEAEVQIDRLITGRLQSLQTYVTQQLIRAAEIRASANLAATKMSECVLGQSKRVDFCGKGYHLMSFPQSAPHGVVFLHVTYVPAQEKNFTTAPAICHDGKAHFPREGVFVSNGTHWFVTQRNFYEPQIITTDNTFVSGNCDVVIGIVNNTVYDPLQPELDSFKEELDKYFKNHTSPDVDLGDISGINASVVNIQKEIDRLNEVAKNLNESLIDLQELGKYEQYIKGSGRENLYFQGGGGSGYIPEAPRDGQAYVRKDGEWVLLSTFLGHHHHHHHH

SEQ ID NO: 1832 - protein, 1281 aa, Artificial Sequence
  Description of Artificial Sequence: Synthetic polypeptide
MGILPSPGMPALLSLVSLLSVLLMGCVAETGTQCVNLTTRTQLPPAYTNSFTRGVYYPDKVFRSDVLHSTQDLFLPFFSNVTWFHAIHVSGTNGTKRFDNPVLPFNDGVYFASTEKSNIIRGWIFGTTLDSKTQSLLIVNNATNVVIKVCEFQFCDNPFLGVYYHKNNKSWMEKEFRVYSSANNCTFEYVSQPFLMDLGGKQGNFKWLREFVFKNIDGYFKIYSKHTPINLVRDLPQGFSALEPLMDLPIGINITRFQTLLALHRSYLTPGDSSSGWTAGAAAYYVGYLQPRTFLLKYNENGTITDAVDCAYDPLSETKCTLKSFTVEKGIYQTSNFRVQPTESIVRFPNITNLCPFGEVFNATRFASVYAWNRKRISNCVADYSVLYNSASFSTFKCYGVSPTKLNDLCFTNVYADSFVIRGDEVRQIAPGQTGKIADYNYKLPDDFTGCVIAWNSNNLDSKVGGNYNYLYRLFRKSNLKPFERDISTEIYQAGSTPCNGVEGFNCYFPLQSYGFQPTNGVGYQPYRVVVLSFELLHAPATVCGPKKSTNLVKNKCVNFNFNGLTGTGVLTESNKKFLPFQQFGRDIADNTDAVRDPQTLEILDITPCSFGGVSVITPGTNTSNQVAVLYQDVNCTEVPNAIHADQLTPTWRVYSTGSNVFQTRAGCLIGAEHVNNSYECDIPIGAGICASYQTQTNSPSGAGSVASQSIIAYTMSLGAENSVAYSNNSIAIPTNFTISVTTEILPVSMTKTSVDCTMYICGDSTECSNLLLQYGSFCTQLNRALQGIAREQDKNTQEVFAQVKQIYKTPPIKDFGGFNFSQILPDPSKPSKRSFIEDLLFNKVTLADAGFIKQYGDCLGDIAARDLICAQKFNGLTVLPPLLTDEMIAQYTSALLAGTITSGWTFGAGAALQIPFAMQMAYRFNGIGVTQNVLYENQKLIANQFNKAIGKIQDSLSSTASALGKLQDVVNQNAQALNTLVKQLSSNFGAISSVLNDILSRLDPPEAEVQIDRLITGRLQSLQTYVTQQLIRAAEIRASANLAATKMSECVLGQSKRVDFCGKGYHLMSFPQSAPHGVVFLHVTYVPAQEKNFTTAPAICHDGKAFFPREGVFVSNGTQWFVTQRNFYEPQIITTDNTFVSGNCDVVIGIVNNTVYDPLQPELDSFKEELDKYFKNHTSPDVDLGDISGINASVVNIQKEIDRLNEVAKNLNESLIDLQELGKYEQYIKGSGRENLYFQGGGGSGYIPEAPRDGQAYVRKDGEWVLLSTFLGHHHHHHHH

SEQ ID NO: 1833 - protein, 1281 aa, Artificial Sequence
  Description of Artificial Sequence: Synthetic polypeptide
MGILPSPGMPALLSLVSLLSVLLMGCVAETGTQCVNLTTRTQLPPAYTNSFTRGVYYPDDVFRSSVLHSTQDLFLPFFSNVTWFHAIHVSGTNGTKRFDNPVLPFNDGVYFASTEKSNIIRGWIFGTTLDSKTQSLLIVNNATNVVIKVCEFQFCNDPFLGVYYHKNNKSWMESEFRVYSSANNCTFEYVSQPFLMDLEGKQGNFKNLREFVFKNIDGYFKIYSKHTPINLVRDLPQGFSALEPLVDLPIGINITRFQTLLALHRSYLTPGDSSSGWTAGAAAYYVGYLQPRTFLLKYNENGTITDAVDCALDPLSETKCTLKSFTVEKGIYQTSNFRVQPTESIVRFPNITNLCPFGEVFNATRFASVYAWNRKRISNCVADYSVLYNSASFSTFKCYGVSPTKLNDLCFTNVYADSFVIRGDEVRQIAPGQTGKIADYNYKLPDDFTGCVIAWNSNNLDSKVGGNYNYLYRLFRKSNLKPFERDISTEIYQAGSTPCNGVEGFNCYFPLQSYGFQPTNGVGYQPYRVVVLSFELLHAPATVCGPKKSTNLVKNKCVNFNFNGLTGTGVLTESNKKFLPFQQFGRDIADTTDAVRDPQTLEILDITPCSFGGVSVITPGTNTSNQVAVLYQDVNCTEVPVAIHADQLTPTWRVYSTGSNVFQTRAGCLIGAEHVNNSYECDIPIGAGICASYQTQTNSPSGAGSVASQSIIAYTMSLGAENSVAYSNNSIAIPTNFTISVTTEILPVSMTKTSVDCTMYICGDSTECSNLLLQYGSFCTQLNRALTGIAVEQDKNTQEVFAQVKQIYKTPPIKDFGGFNFSQILPDPSKPSKRSFIEDLLFNKVTLADAGFIKQYGDCLGDIAARDLICAQKFNGLTVLPPLLTDEMIAQYTSALLAGTITSGWTFGAGAALQIPFAMQMAYRFNGIGVTQNVLYENQKLIANQFNSAIGKIQDSLSSTASALGKLQDVVNQNAQALNTLVKQLSSNFGAISSVLNDILSRLDPPEAEVQIDRLITGRLQSLQTYVTQQLIRAAEIRASANLAATKMSECVLGQSKRVDFCGKGYHLMSFPQSAPHGVVFLHVTYVPAQEKNFTTAPAICHDGKAHFPREGVFVSNGTHWFVTQRNFYEPQIITTDNTFVSGNCDVVIGIVNNTVYDPLQPELDSFKEELDKYFKNHTSPDVDLGDISGINASVVNIQKEIDRLNEVAKNLNESLIDLQELGKYEQYIKGSGRENLYFQGGGGSGYIPEAPRDGQAYVRKDGEWVLLSTFLGHHHHHHHH

SEQ ID NO: 1834 - protein, 1281 aa, Artificial Sequence
  Description of Artificial Sequence: Synthetic polypeptide
MGILPSPGMPALLSLVSLLSVLLMGCVAETGTQCVNLTTRTQLPPAYTNSFTRGVYYPDKIFRSSVLHLTQDLFLPFFSNVTWFHAIHVSGTNGTKRFDNPVLPFNDGVYFAATEKSNIIRGWIFGTTLDSKTQSLLIVNNATNVVIKVCEFQFCNDPFLGVYYHKNNKSWMESEFRVYSSANNCTFEYVSQPFLMDLEGKQGNFKNLREFVFKNIDGYFKIYSKYTPINLVRDLPQGFSALEPLVKLPIGINITRFQTLLALHRSYLTPGDSSSGWTAGAAAYYVGYLQPRTFLLKYNENGTITDAVDCALDPLSETKCTLKSFTVEKGIYQTSNFRVQPTESIVRFPNITNLCPFGEVFNATRFASVYAWNRKRISNCVADYSVLYNSASFSTFKCYGVSPTKLNDLCFTNVYADSFVIRGDEVRQIAPGQTGKIADYNYKLPDDFTGCVIAWNSNNLDSKVGGNYNYLYRLFRKSNLKPFERDISTEIYQAGSTPCNGVEGFNCYFPLQSYGFQPTNGVGYQPYRVVVLSFELLHAPATVCGPKKSTNLVKNKCVNFNFNGLTGTGVLTESNKKFLPFQQFGRDISDTTDAVRDPQTLEILDITPCSFGGVSVITPGTNTSNQVAVLYQDVNCTDVPVAIHADQLTPTWRVYSTGSNVFQTQAGCLIGAEHVNNSYECDIPIGAGICASYQTQTNSPSGAGSVASQSIIAYTMSLGAENSVAYSNNSIAIPTNFTISVTTEILPVSMTKTSVDCTMYICGDSTECSNLLLQYGSFCTQLNRALTGIAVEQDKNTQEVFAQVKQIYKTPPIKDFGGFNFSQILPDPSKPSKRSFIEDLLFNKVTLADAGFIKQYGDCLGDIAARDLICAQKFNGLTVLPPLLTDEMIAQYTAALLAGTATAGWTFGAGAALQIPFAMQMAYRFNGIGVTQNVLYENQKLIANQFNSAIGKIQDSLSSTASALGKLQDVVNQNAQALNTLVKQLSSNFGAISSVLNDILSRLDPPEAEVQIDRLITGRLQSLQTYVTQQLIRAAEIRASANLAATKMSECVLGQSKRVDFCGKGYHLMSFPQSAPHGVVFLHVTYVPAQEKNFTTAPAICHDGKAHFPREGVFVSNGTHWFVTQRNFYEPQIITTDNTFVSGNCDVVIGIVNNTVYDPLQPELDSFKEELDKYFKNHTSPDVDLGDISGINASVVNIQKEIDRLNEVAKNLNESLIDLQELGKYEQYIKGSGRENLYFQGGGGSGYIPEAPRDGQAYVRKDGEWVLLSTFLGHHHHHHHH

SEQ ID NO: 1835 - protein, 1281 aa, Artificial Sequence
  Description of Artificial Sequence: Synthetic polypeptide
MGILPSPGMPALLSLVSLLSVLLMGCVAETGTQCVNLTTRTQLPPAYTNSFTRGVYYPDKVFRSSVLHSTQDLFLPFFSNVTWFHAIHVSGTNGTKRFDNPVLPFNDGVYFASTEKSNIIRGWIFGTTLDSKTQSLLIVNNATNVVIKVCEFQFCNDPFLGVYYHKNNKSWMESEFRVYSSANNCTFEYVSQPFLMDLEGKQGNFKNLREFVFKNIDGYFKIYSKHTPINLVRDLPQGFSALEPLVDLPIGINITRFQTLLALHRSYLTPGDSSSGWTAGAAAYYVGYLQPRTFLLKYNENGTITDAVDCALDPLSETKCTLKSFTVEKGIYQTSNFRVQPTESIVRFPNITNLCPFGEVFNATRFASVYAWNRKRISNCVADYSVLYNSASFSTFKCYGVSPTKLNDLCFTNVYADSFVIRGDEVRQIAPGQTGKIADYNYKLPDDFTGCVIAWNSNNLDSKVGGNYNYLYRLFRKSNLKPFERDISTEIYQAGSTPCNGVEGFNCYFPLQSYGFQPTNGVGYQPYRVVVLSFELLHAPATVCGPKKSTNLVKNKCVNFNFNGLTGTGVLTESNKKFLPFQQFGRDIADTTDAVRDPQTLEILDITPCSFGGVSVITPGTNTSNQVAVLYQDVNCTEVPVAIHADQLTPTWRVYSTGSNVFQTRAGCLIGAEHVNNSYECDIPIGAGICASYQTQTNSPSGAGSVASQSIIAYTMSLGAENSVAYSNNSIAIPTNFTISVTTEILPVSMTKTSVDCTMYICGDSTECSNLLLQYGSFCTQLNRALTGIAVEQDKNTQEVFAQVKQIYKTPPIKDFGGFNFSQILPDPSKPSKRSFIEDLLFNKVTLADAGFIKQYGDCLGDIAARDLICAQKFNGLTVLPPLLTDEMIAQYTSALLAGTITSGWTFGAGAALQIPFAMQMAYRFNGIGVTQNVLYENQKLIANQFNSAIGKIQDSLSSTASALGKLQDVVNQNAQALNTLVKQLSSNFGAISSVLNDILSRLDPPEAEVQIDRLITGRLQSLQTYVTQQLIRAAEIRASANLAATKMSECVLGQSKRVDFCGKGYHLMSFPQSAPHGVVFLHVTYVPAQEKNFTTAPAICHDGKAFFPREGVFVSNGTHWFVTQRNFYEPQIITTDNTFVSGNCDVVIGIVNNTVYDPLQPELDSFKEELDKYFKNHTSPDVDLGDISGINASVVNIQKEIDRLNEVAKNLNESLIDLQELGKYEQYIKGSGRENLYFQGGGGSGYIPEAPRDGQAYVRKDGEWVLLSTFLGHHHHHHHH

SEQ ID NO: 1836 - protein, 1281 aa, Artificial Sequence
  Description of Artificial Sequence: Synthetic polypeptide
MGILPSPGMPALLSLVSLLSVLLMGCVAETGTQCVNLTTRTQLPPAYTNSFTRGVYYPDKVFRSSVLHSTQDLFLPFFSNVTWFHAIHVSGTNGTKRFDNPVLPFNDGVYFASTEKSNIIRGWIFGTTLDSKTQSLLIVNNATNVVIKVCEFQFCNDPFLGVYYHKNNKSWMESEFRVYSSANNCTFEYVSQPFLMDLEGKQGNFKNLREFVFKNIDGYFKIYSKHTPINLVRDLPQGFSALEPLVDLPIGINITRFQTLLALHRSYLTPGDSSSGWTAGAAAYYVGYLQPRTFLLKYNENGTITDAVDCALDPLSETKCTLKSFTVEKGIYQTSNFRVQPTESIVRFPNITNLCPFGEVFNATRFASVYAWNRKRISNCVADYSVLYNSASFSTFKCYGVSPTKLNDLCFTNVYADSFVIRGDEVRQIAPGQTGKIADYNYKLPDDFTGCVIAWNSNNLDSKVGGNYNYLYRLFRKSNLKPFERDISTEIYQAGSTPCNGVEGFNCYFPLQSYGFQPTNGVGYQPYRVVVLSFELLHAPATVCGPKKSTNLVKNKCVNFNFNGLTGTGVLTESNKKFLPFQQFGRDIADTTDAVRDPQTLEILDITPCSFGGVSVITPGTNTSNQVAVLYQDVNCTEVPVDIHADQLTPTWRVYSTGSNVFQTRAGCLIGAEHVNNSYECDIPIGAGICASYQTQTNSPSGAGSVASQSIIAYTMSLGAENSVAYSNNSIAIPTNFTISVTTEILPVSMTKTSVDCTMYICGDSTECSNLLLQYGSFCTQLNRALTGIAVEQDKNTQEVFAQVKQIYKTPPIKDFGGFNFSQILPDPSKPSKRSFIEDLLFNKVTLADAGFIKQYGDCLGDIAARDLICAQKFNGLTVLPPLLTDEMIAQYTSALLAGTITSGWTFGAGAALQIPFAMQMAYRFNGIGVTQNVLYENQKLIANQFNSAIGKIQDSLSSTASALGKLQDVVNQNAQALNTLVKQLSSNFGAISSVLNDILSRLDPPEAEVQIDRLITGRLQSLQTYVTQQLIRAAEIRASANLAATKMSECVLGQSKRVDFCGKGYHLMSFPQSAPHGVVFLHVTYVPAQEKNFTTAPAICHDGKAHFPREGVFVSNGTHWFVTQRNFYEPQIITTDNTFVSGNCDVVIGIVNNTVYDPLQPELDSFKEELDKYFKNHTSPDVDLGDISGINASVVNIQKEIDRLNEVAKNLNESLIDLQELGKYEQYIKGSGRENLYFQGGGGSGYIPEAPRDGQAYVRKDGEWVLLSTFLGHHHHHHHH

SEQ ID NO: 1837 - protein, 1281 aa, Artificial Sequence
  Description of Artificial Sequence: Synthetic polypeptide
MGILPSPGMPALLSLVSLLSVLLMGCVAETGTQCVNLTTRTQLPPAYTNSFTRGVYYPDKVFRSSVLHSTQDLFLPFFSNVTWFHAIHVSGTNGTKRFDNPVLPFNDGVYFASTEKSNIIRGWIFGTTLDSKTQSLLIVNNATNVVIKVCEFQFCNDPFLGVYYHKNNKSWMESEFRVYSSANNCTFEYVSQPFLMDLEGKQGNFKNLREFVFKNIDGYFKIYSKHTPINLVRDLPQGFSALEPLVDLPIGINITRFQTLLALHRSYLTPGDSSSGWTAGAAAYYVGYLQPRTFLLKYNENGTITDAVDCALDPLSETKCTLKSFTVEKGIYQTSNFRVQPTESIVRFPNITNLCPFGEVFNATRFASVYAWNRKRISNCVADYSVLYNSASFSTFKCYGVSPTKLNDLCFTNVYADSFVIRGDEVRQIAPGQTGKIADYNYKLPDDFTGCVIAWNSNNLDSKVGGNYNYLYRLFRKSNLKPFERDISTEIYQAGSTPCNGVEGFNCYFPLQSYGFQPTNGVGYQPYRVVVLSFELLHAPATVCGPKKSTNLVKNKCVNFNFNGLTGTGVLTESNKKFLPFQQFGRDIADTTDAVRDPQTLEILDITPCSFGGVSVITPGTNTSNQVAVLYQDVNCTEVPVAIHADQLTPTWRVYSTGSNVFQTRAGCLIGAEHVNNSYECDIPIGAGICASYQTQTNSPSGAGSVASQSIIAYTMSLGAENSVAYSNNSIAIPTNFTISVTTEILPVSMTKTSVDCTMYICGDSTECSNLLLQYGSFCTQLNRALTGIAVEQDKNTQEVFAQVKQIYKTPPIKDFGGFNFSQILPDPSKPSKRSFIEDLLFNKVTLADAGFIKQYGDCLGDIAARDLICAQKFNGLTVLPPLLTDEMIAQYTSALLAGTITSGWTFGAGAALQIPFAMQMAYRFNGIGVTQNVLYENQKLIANQFNSAIGKIQDSLSSTASALGKLQDVVNQNAQALNTLVKQLSSNFGAISSVLNDILSRLDPPEAEVQIDRLITGRLQSLQTYVTQQLIRAAEIRASANLAATKMSECVLGQSKRVDFCGKGYHLMSFPQSAPHGVVFLHVTYVPAQEKNFTTAPAICHDGKAYFPREGVFVSNGTHWFVTQRNFYEPQIITTDNTFVSGNCDVVIGIVNNTVYDPLQPELDSFKEELDKYFKNHTSPDVDLGDISGINASVVNIQKEIDRLNEVAKNLNESLIDLQELGKYEQYIKGSGRENLYFQGGGGSGYIPEAPRDGQAYVRKDGEWVLLSTFLGHHHHHHHH

SEQ ID NO: 1838 - protein, 1281 aa, Artificial Sequence
  Description of Artificial Sequence: Synthetic polypeptide
MGILPSPGMPALLSLVSLLSVLLMGCVAETGTQCVNLTTRTQLPPAYTNSFTRGVYYPDKVFRSSVLHSTQDLFLPFFSNVTWFHAIHVSGTNGTKRFDNPVLPFNDGVYFASTEKSNIIRGWIFGTTLDSKTQSLLIVNNATNVVIKVCEFQFCNDPFLGVYYHKNNKSWMESEFRVYSSANNCTFEYVSQPFLMDLEGKQGNFKNLREFVFKNIDGYFKIYSKHTPINLVRDLPQGFSALEPLVDLPIGINITRFQTLLALHRSYLTPGDSSSGWTAGAAAYYVGYLQPRTFLLKYNENGTITDAVDCALDPLSETKCTLKSFTVEKGIYQTSNFRVQPTESIVRFPNITNLCPFGEVFNATRFASVYAWNRKRISNCVADYSVLYNSASFSTFKCYGVSPTKLNDLCFTNVYADSFVIRGDEVRQIAPGQTGKIADYNYKLPDDFTGCVIAWNSNNLDSKVGGNYNYLYRLFRKSNLKPFERDISTEIYQAGSTPCNGVEGFNCYFPLQSYGFQPTNGVGYQPYRVVVLSFELLHAPATVCGPKKSTNLVKNKCVNFNFNGLTGTGVLTESNKKFLPFQQFGRDIADTTDAVRDPQTLEILDITPCSFGGVSVITPGTNTSNQVAVLYQDVNCTEVPVAIHADQLTPTWRVYSTGSNVFQTRAGCLIGAEHVNNSYECDIPIGAGICASYQTQTNSPSGAGSVASQSIIAYTMSLGAENSVAYSNNSIAIPTNFTISVTTEILPVSMTKTSVDCTMYICGDSTECSNLLLQYGSFCTQLNRALTGIAVEQDKNTQEVFAQVKQIYKTPPIKDFGGFNFSQILPDPSKPSKRSFIEDLLFNKVTLADAGFIKQYGDCLGDQAARDLICAQKFNGLTVLPPLLTDEMIAQYTSALLAGTITSGWTFGAGAALQIPFAMQMAYRFNGIGVTQNVLYENQKLIANQFNSAIGKIQDSLSSTASALGKLQDVVNQNAQALNTLVKQLSSNFGAISSVLNDILSRLDPPEAEVQIDRLITGRLQSLQTYVTQQLIRAAEIRASANLAATKMSECVLGQSKRVDFCGKGYHLMSFPQSAPHGVVFLHVTYVPAQEKNFTTAPAICHDGKAHFPREGVFVSNGTHWFVTQRNFYEPQIITTDNTFVSGNCDVVIGIVNNTVYDPLQPELDSFKEELDKYFKNHTSPDVDLGDISGINASVVNIQKEIDRLNEVAKNLNESLIDLQELGKYEQYIKGSGRENLYFQGGGGSGYIPEAPRDGQAYVRKDGEWVLLSTFLGHHHHHHHH

SEQ ID NO: 1839 - protein, 1281 aa, Artificial Sequence
  Description of Artificial Sequence: Synthetic polypeptide
MGILPSPGMPALLSLVSLLSVLLMGCVAETGTQCVNLTTRTQLPPAYTNSFTRGVYYPDKVFRSSVLHSTQDLFLPFFSNVTWFHAIHVSGTNGTKRFDNPVLPFNDGVYFASTEKSNIIRGWIFGTTLDSKTQSLLIVNNATNVVIKVCEFQFCNDPFLGVYYHKNNKSWMESEFRVYSSANNCTFEYVSQPFLMDLEGKQGNFKNLREFVFKNIDGYFKIYSKHTPINLVRDLPQGFSALEPLVDLPIGINITRFQTLLALHRSYLTPGDSSSGWTAGAAAYYVGYLQPRTFLLKYNENGTITDAVDCALDPLSETKCTLKSFTVEKGIYQTSNFRVQPTESIVRFPNITNLCPFGEVFNATRFASVYAWNRKRISNCVADYSVLYNSASFSTFKCYGVSPTKLNDLCFTNVYADSFVIRGDEVRQIAPGQTGKIADYNYKLPDDFTGCVIAWNSNNLDSKVGGNYNYLYRLFRKSNLKPFERDISTEIYQAGSTPCNGVEGFNCYFPLQSYGFQPTNGVGYQPYRVVVLSFELLHAPATVCGPKKSTNLVKNKCVNFNFNGLTGTGVLTESNKKFLPFQQFGRDIADTTDAVRDPQTLEILDITPCSFGGVSVITPGTNTSNQVAVLYQDVNCTDVPVAIHADQLTPTWRVYSTGSNVFQTRAGCLIGAEHVNNSYECDIPIGAGICASYQTQTNSPSGAGSVASQSIIAYTMSLGAENSVAYSNNSIAIPTNFTISVTTEILPVSMTKTSVDCTMYICGDSTECSNLLLQYGSFCTQLNRALTGIAVEQDKNTQEVFAQVKQIYKTPPIKDFGGFNFSQILPDPSKPSKRSFIEDLLFNKVTLADAGFIKQYGDCLGDIAARDLICAQKFNGLTVLPPLLTDEMIAQYTSALLAGTITSGWTFGAGAALQIPFAMQMAYRFNGIGVTQNVLYENQKLIANQFNSAIGKIQDSLSSTASALGKLQDVVNQNAQALNTLVKQLSSNFGAISSVLNDILSRLDPPEAEVQIDRLITGRLQSLQTYVTQQLIRAAEIRASANLAATKMSECVLGQSKRVDFCGKGYHLMSFPQSAPHGVVFLHVTYVPAQEKNFTTAPAICHDGKAHFPREGVFVSNGTHWFVTQRNFYEPQIITTDNTFVSGNCDVVIGIVNNTVYDPLQPELDSFKEELDKYFKNHTSPDVDLGDISGINASVVNIQKEIDRLNEVAKNLNESLIDLQELGKYEQYIKGSGRENLYFQGGGGSGYIPEAPRDGQAYVRKDGEWVLLSTFLGHHHHHHHH

SEQ ID NO: 1840 - protein, 1281 aa, Artificial Sequence
  Description of Artificial Sequence: Synthetic polypeptide
MGILPSPGMPALLSLVSLLSVLLMGCVAETGTQCVNLTTRTQLPPAYTNSFTRGVYYPDKVFRSSVLHSTQDLFLPFFSNVTWFHAIHVSGTNGTKRFDNPVLPFNDGVYFASTEKSNIIRGWIFGTTLDSKTQSLLIVNNATNVVIKVCEFQFCNDPFLGVYYHKNNKSWMESEFRVYSSANNCTFEYVSQPFLMDLEGKQGNFKNLREFVFKNIDGYFKIYSKHTPINLVRDLPQGFSALEPLVDLPIGINITRFQTLLALHRSYLTPGDSSSGWTAGAAAYYVGYLQPRTFLLKYNENGTITDAVDCALDPLSETKCTLKSFTVEKGIYQTSNFRVQPTESIVRFPNITNLCPFGEVFNATRFASVYAWNRKRISNCVADYSVLYNSASFSTFKCYGVSPTKLNDLCFTNVYADSFVIRGDEVRQIAPGQTGKIADYNYKLPDDFTGCVIAWNSNNLDSKVGGNYNYLYRLFRKSNLKPFERDISTEIYQAGSTPCNGVEGFNCYFPLQSYGFQPTNGVGYQPYRVVVLSFELLHAPATVCGPKKSTNLVKNKCVNFNFNGLTGTGVLTESNKKFLPFQQFGRDIADTTDAVRDPQTLEILDITPCSFGGVSVITPGTNTSNQVAVLYQDVNCTEVPVAIHADQLTPTWRVYSTGSNVFQTRAGCLIGAEHVNNSYECDIPIGAGICASYQTQTNSPSGAGSVASQSIIAYTMSLGAENSVAYSNNSIAIPTNFTISVTTEILPVSMTKTSVDCTMYICGDSTECSNLLLQYGSFCTQLNRALTGIAVEQDKNTQEVFAQVKQIYKTPPIKDFGGFNFSQILPDPSKPSKRSFIEDLLFNKVTLADLGFIKQYGDCLGDIAARDLICAQKFNGLTVLPPLLTDEMIAQYTSALLAGTITSGWTFGAGAALQIPFAMQMAYRFNGIGVTQNVLYENQKLIANQFNSAIGKIQDSLSSTASALGKLQDVVNQNAQALNTLVKQLSSNFGAISSVLNDILSRLDPPEAEVQIDRLITGRLQSLQTYVTQQLIRAAEIRASANLAATKMSECVLGQSKRVDFCGKGYHLMSFPQSAPHGVVFLHVTYVPAQEKNFTTAPAICHDGKAHFPREGVFVSNGTHWFVTQRNFYEPQIITTDNTFVSGNCDVVIGIVNNTVYDPLQPELDSFKEELDKYFKNHTSPDVDLGDISGINASVVNIQKEIDRLNEVAKNLNESLIDLQELGKYEQYIKGSGRENLYFQGGGGSGYIPEAPRDGQAYVRKDGEWVLLSTFLGHHHHHHHH

SEQ ID NO: 1841 - protein, 1281 aa, Artificial Sequence
  Description of Artificial Sequence: Synthetic polypeptide
MGILPSPGMPALLSLVSLLSVLLMGCVAETGTQCVNLTTRTQLPPAYTNSFTRGVYYPDKVFRSSVLHSTQDLFLPFFSNVTWFHAIHVSGTNGTKRFDNPVLPFNDGVYFASTEKSNIIRGWIFGTTLDSKTQSLLIVNNATNVVIRVCEFQFCENPFLGVYYHKNNKSWREEEFRWYSSANNCTFEYVSQPFLMDLEGKQGNFKNLREFVFKNIDGYFKIYSKHTPINLVRDLPQGFSALEPLMDLPIGINITHFQTLLALHRSYLTPGDSSSGWTAGAAAYYVGYLQPRTFLLKYNENGTITDAVDCALDPLSETKCTLKSFTVEKGIYQTSNFRVQPTESIVRFPNITNLCPFGEVFNATRFASVYAWNRKRISNCVADYSVLYNSASFSTFKCYGVSPTKLNDLCFTNVYADSFVIRGDEVRQIAPGQTGKIADYNYKLPDDFTGCVIAWNSNNLDSKVGGNYNYLYRLFRKSNLKPFERDISTEIYQAGSTPCNGVEGFNCYFPLQSYGFQPTNGVGYQPYRVVVLSFELLHAPATVCGPKKSTNLVKNKCVNFNFNGLTGTGVLTESNKKFLPFQQFGRDIADTTDAVRDPQTLEILDITPCSFGGVSVITPGTNTSNQVAVLYQDVNCTEVPVAIHADQLTPTWRVYSTGSNVFQTRAGCLIGAEHVNNSYECDIPIGAGICASYQTQTNSPSGAGSVASQSIIAYTMSLGAENSVAYSNNSIAIPTNFTISVTTEILPVSMTKTSVDCTMYICGDSTECSNLLLQYGSFCTQLNRALTGIAVEQDKNTQEVFAQVKQIYKTPPIKDFGGFNFSQILPDPSKPSKRSFIEDLLFNKVTLADAGFIKQYGDCLGDIAARDLICAQKFNGLTVLPPLLTDEMIAQYTSALLAGTITSGWTFGAGAALQIPFAMQMAYRFNGIGVTQNVLYENQKLIANQFNSAIGKIQDSLSSTASALGKLQDVVNQNAQALNTLVKQLSSNFGAISSVLNDILSRLDPPEAEVQIDRLITGRLQSLQTYVTQQLIRAAEIRASANLAATKMSECVLGQSKRVDFCGKGYHLMSFPQSAPHGVVFLHVTYVPAQEKNFTTAPAICHDGKAHFPREGVFVSNGTHWFVTQRNFYEPQIITTDNTFVSGNCDVVIGIVNNTVYDPLQPELDSFKEELDKYFKNHTSPDVDLGDISGINASVVNIQKEIDRLNEVAKNLNESLIDLQELGKYEQYIKGSGRENLYFQGGGGSGYIPEAPRDGQAYVRKDGEWVLLSTFLGHHHHHHHH

SEQ ID NO: 1842 - protein, 1281 aa, Artificial Sequence
  Description of Artificial Sequence: Synthetic polypeptide
MGILPSPGMPALLSLVSLLSVLLMGCVAETGTQCVNLTTRTQLPPAYTNSFTRGVYYPDKVFRSSVLHSTQDLFLPFFSNVTWFHAIHVSGTNGTKRFDNPVLPFNDGVYFAAIEKSNIIRGWIFGTTLDSKTQSLLIVNNATNVVIKVCEFQFCNDPFLGVYYHKNNKSWMESEFRVYSSANNCTFEYVSQPFLMDLEGKQGNFKNLREFVFKNIDGYFKIYSKHTPINLVRDLPQGFSALEPLVDLPIGINITRFQTLLALHRSYLTPGDSSSGWTAGAAAYYVGYLQPRTFLLKYNENGTITDAVDCALDPLSETKCTLKSFTVEKGIYQTSNFRVQPTESIVRFPNITNLCPFGEVFNATRFASVYAWNRKRISNCVADYSVLYNSASFSTFKCYGVSPTKLNDLCFTNVYADSFVIRGDEVRQIAPGQTGKIADYNYKLPDDFTGCVIAWNSNNLDSKVGGNYNYLYRLFRKSNLKPFERDISTEIYQAGSTPCNGVEGFNCYFPLQSYGFQPTNGVGYQPYRVVVLSFELLHAPATVCGPKKSTNLVKNKCVNFNFNGLTGTGVLTESNKKFLPFQQFGRDISDTTDAVRDPQTLEILDITPCSFGGVSVVTPGTNTSNQVAVLYQDVNCTEVPVAIHADQLTPTWRVYSTGSNVFQTRAGCLIGAEHVNNSYECDIPIGAGICASYQTQTNSPSGAGSVASQSIIAYTMSLGAENSVAYSNNSIAIPTNFTISVTTEILPVSMTKTSVDCTMYICGDSTECSNLLLQYGSFCTQLNRALTGIAVEEDKNTQEVFAQVKQIYKTPPIKDFGGFNFSQILPDPSKPSKRSFIEDLLFNKVTLADAGFIKQYGDCLGDIAARDLICAQKFNGLTVLPPLLTDEMIAQYTSSLLAGTITAGWTFGAGAALQIPFAMQMAYRFNGIGVTQNVLYENQKLIANQFNSAIGKIQDSLSSTASALGKLQDVVNQNAQALNTLVKQLSSNFGAISSVLNDILSRLDPPEAEVQIDRLITGRLQSLQTYVTQQLIRAAEIRASANLAATKMSECVKGQSKRVDFCGKGYHLMSFPQSAPHGVVFLHVTYVPAQEKNFTTAPAICHDGKAHFPREGVFVSNGTHWFVTQRNFYEPQIITTDNTFVSGNCDVVIGIVNNTVYDPLQPELDSFKEELDKYFKNHTSPDVDLGDISGINASVVNIQKEIDRLNEVAKNLNESLIDLQELGKYEQYIKGSGRENLYFQGGGGSGYIPEAPRDGQAYVRKDGEWVLLSTFLGHHHHHHHH

SEQ ID NO: 1843 - protein, 1281 aa, Artificial Sequence
  Description of Artificial Sequence: Synthetic polypeptide
MGILPSPGMPALLSLVSLLSVLLMGCVAETGTQCVNLTTRTQLPPAYTNSFTRGVYYPDKVFRSSVLHSTQDLFLPFFSNVTWFHAIHVSGTNGTKRFDNPVLPFNDGVYFASTEKSNIIRGWIFGTTLDSKTQSLLIVNNATNVVIKVCEFQFCKDPFLGVYYHKNNKSWMESEFRVYSSANNCTFEYVSQPFLMDLEGKQGNFKNLREFVFKNIDGYFKIYSKHTPINLVRDLPQGFSALEPLVDLPIGINITRFQTLLALHRSYLTPGDSSSGWTAGAAAYYVGYLQPRTFLLKYNENGTITDAVDCALDPLSETKCTLKSFTVEKGIYQTSNFRVQPTESIVRFPNITNLCPFGEVFNATRFASVYAWNRKRISNCVADYSVLYNSASFSTFKCYGVSPTKLNDLCFTNVYADSFVIRGDEVRQIAPGQTGKIADYNYKLPDDFTGCVIAWNSNNLDSKVGGNYNYLYRLFRKSNLKPFERDISTEIYQAGSTPCNGVEGFNCYFPLQSYGFQPTNGVGYQPYRVVVLSFELLHAPATVCGPKKSTNLVKNKCVNFNFNGLTGTGVLTESNKKFLPFQQFGRDIADTTDAVRDPQTLEILDITPCSFGGVSVITPGTNTSNQVAVLYQDVNCTEVPVAIHADQLTPTWRVYSTGSNVFQTRAGCLIGAEHVNNSYECDIPIGAGICASYQTQTNSPSGAGSVASQSIIAYTMSLGAENSVAYSNNSIAIPTNFTISVTTEILPVSMTKTSVDCTMYICGDSTECSNLLLQYGSFCTQLNRALTGIAVEQDKNTQEVFAQVKQIYKTPPIKDFGGFNFSQILPDPSKPSKRSFIEDLLFNKVTLADAGFIKQYGDCLGDIAARDLICAQKFNGLTVLPPLLTDEMIAQYTSALLAGTITSGWTFGAGAALQIPFAMQMAYRFNGIGVTQNVLYENQKLIANQFNSAIGKIQDSLSSTASALGKLQDVVNQNAQALNTLVKQLSSNFGAISSVLNDILSRLDPPEAEVQIDRLITGRLQSLQTYVTQQLIRAAEIRASANLAATKMSECVLGQSKRVDFCGKGYHLMSFPQSAPHGVVFLHVTYVPAQEKNFTTAPAICHDGKAHFPREGVFVSNGTHWFVTQRNFYEPQIITTDNTFVSGNCDVVIGIVNNTVYDPLQPELDSFKEELDKYFKNHTSPDVDLGDISGINASVVNIQKEIDRLNEVAKNLNESLIDLQELGKYEQYIKGSGRENLYFQGGGGSGYIPEAPRDGQAYVRKDGEWVLLSTFLGHHHHHHHH

SEQ ID NO: 1844 - protein, 1281 aa, Artificial Sequence
  Description of Artificial Sequence: Synthetic polypeptide
MGILPSPGMPALLSLVSLLSVLLMGCVAETGTQCVNLTTRTQLPPAYTNSFTRGVYYPDKVFRSSVLHSTQDLFLPFFSNVTWFHAIHVSGTNGTKRFDNPVLPFNDGVYFASTEKSNIIRGWIFGTTLDSKTQSLLIVNNATNVVIKVCEFQFCNDPFLGVYYHKNNKSWMESEFRVYSSANNCTFEYVSQPFLMDLEGKQGNFKNLREFVFKNIDGYFKIYSKHTPINLVRDLPQGFSALEPLVDLPIGINITRFQTLLALHRSYLTPGDSSSGWTAGAAAYYVGYLQPRTFLLKYNENGTITDAVDCALDPLSETKCTLKSFTVEKGIYQTSNFRVQPTESIVRFPNITNLCPFGEVFNATRFASVYAWNRKRISNCVADYSVLYNSASFSTFKCYGVSPTKLNDLCFTNVYADSFVIRGDEVRQIAPGQTGKIADYNYKLPDDFTGCVIAWNSNNLDSKVGGNYNYLYRLFRKSNLKPFERDISTEIYQAGSTPCNGVEGFNCYFPLQSYGFQPTNGVGYQPYRVVVLSFELLHAPATVCGPKKSTNLVKNKCVNFNFNGLTGTGVLTESNKKFLPFQQFGRDIADTTDAVRDPQTLEILDITPCSFGGVSVITPGTNTSNQVAVLYQDVNCTEVPVAIHADQLTPTWRVYSTGSNVFQTRAGCLIGAEHVNNSYECDIPIGAGICASYQTQTNSPSGAGSVASQSIIAYTMSLGAENSVAYSNNSIAIPTNFTISVTTEILPVSMTKTSVDCTMYICGDSTECSNLLLQYGSFCTQLNRALTGIAVEQDKNTQEVFAQVKQIYKTPPIKDFGGFNFSQILPDPSKPSKRSFIEDLLFNKVTLADAGFIKQYGDCLGDIAARDLICAQKFNGLTVLPPLLTDEMIAQYTSALLAGTITSGWTFGAGAALQIPFAMQMAYRFNGIGVTQNVLYENQKLIANQFNSAIGKIQDSLSSTASALGKLQDVVNQNAQALNTLVKQLSSNFGAISSVLNDILSRLDPPEAEVQIDRLITGRLQSLQTYVTQQLIRAAEIRASANLAATKMSECVLGQSKRVDFCGNGYHLMSFPQSAPHGVVFLHVTYVPAQEKNFTTAPAICHDGKAHFPREGVFVSNGTHWFVTQRNFYEPQIITTDNTFVSGNCDVVIGIVNNTVYDPLQPELDSFKEELDKYFKNHTSPDVDLGDISGINASVVNIQKEIDRLNEVAKNLNESLIDLQELGKYEQYIKGSGRENLYFQGGGGSGYIPEAPRDGQAYVRKDGEWVLLSTFLGHHHHHHHH

SEQ ID NO: 1845 - protein, 1281 aa, Artificial Sequence
  Description of Artificial Sequence: Synthetic polypeptide
MGILPSPGMPALLSLVSLLSVLLMGCVAETGTQCVNLTTRTQLPPAYTNSFTRGVYYPDKVFRSSVLHSTQDLFLPFFSNVTWFHAIHVSGTNGTKRFDNPVLPFNDGVYFASTEKSNIIRGWIFGTTLDSKTQSLLIVNNATNVVIKVCEFQFCNDPFLGVYYHKNNKSWMESEFRVYSSANNCTFEYVSQPFLMDLEGKQGNFKNLREFVFKNIDGYFKIYSKHTPINLVRDLPQGFSALEPLVDLPIGINITRFQTLLALHRSYLTPGDSSSGWTAGAAAYYVGYLQPRTFLLKYNENGTITDAVDCALDPLSETKCTLKSFTVEKGIYQTSNFRVQPTESIVRFPNITNLCPFGEVFNATRFASVYAWNRKRISNCVADYSVLYNSASFSTFKCYGVSPTKLNDLCFTNVYADSFVIRGDEVRQIAPGQTGKIADYNYKLPDDFTGCVIAWNSNNLDSKVGGNYNYLYRLFRKSNLKPFERDISTEIYQAGSTPCNGVEGFNCYFPLQSYGFQPTNGVGYQPYRVVVLSFELLHAPATVCGPKKSTNLVKNKCVNFNFNGLTGTGVLTESNKKFLPFQQFGRDIADTTDAVRDPQTLEILDITPCSFGGVSVITPGTNTSNQVAVLYQDVNCTEVPVAIHADQLTPTWRVYSTGSNVFQTRAGCLIGAEHVNNSYECDIPIGAGICASYQTQTNSPSGAGSVASQSIIAYTMSLGAENSVAYSNNSIAIPTNFTISVTTEILPVSMTKTSVDCTMYICGDSTECSNLLLQYGSFCTQLNRALTGIAVEQDKNTQEVFAQVKQIYKTPPIKDFGGFNFSQILPDPSKPSKRSFIEDLLFNKVTLADAGFIKQYGDCLGDIAARDLICAQKFNGLTVLPPLLTDEMIAQYTSALLAGTITSGWTFGAGAALQIPFAMQMAYRFNGIGVTQNVLYENQKLIANQFNSAIGKIQDSLSSTASALGKLQDVVNQNAQALNTLVKQLSSNFGAISSVLNDILSRLDPPEAEVQIDRLITGRLQSLQTYVTQQLIRAAEIRASANLAATKMSECVLGQSNRVDFCGKGYHLMSFPQSAPHGVVFLHVTYVPAQEKNFTTAPAICHDGKAHFPREGVFVSNGTHWFVTQRNFYEPQIITTDNTFVSGNCDVVIGIVNNTVYDPLQPELDSFKEELDKYFKNHTSPDVDLGDISGINASVVNIQKEIDRLNEVAKNLNESLIDLQELGKYEQYIKGSGRENLYFQGGGGSGYIPEAPRDGQAYVRKDGEWVLLSTFLGHHHHHHHH

SEQ ID NO: 1846 - protein, 1281 aa, Artificial Sequence
  Description of Artificial Sequence: Synthetic polypeptide
MGILPSPGMPALLSLVSLLSVLLMGCVAETGTQCVNLTTRTQLPPAYTNSFTRGVYYPDKVFRSSVLHSTQDLFLPFFSNVTWFHAIHVSGTNGTKRFDNPVLPFNDGVYFASTEKSNIIRGWIFGTTLDSKTQSLLIVNNATNVVIKVCEFQFCNDPFLGVYYHKNNKSWMESEFRVYSSANNCTFEYVSQPFLMDLEGKQGNFKNLREFVFKNIDGYFKIYSKHTPINLVRDLPQGFSALEPLVDLPIGINITRFQTLLALHRSYLTPGDSSSGWTAGAAAYYVGYLQPRTFLLKYNENGTITDAVDCALDPLSETKCTLKSFTVEKGIYQTSNFRVQPTESIVRFPNITNLCPFGEVFNATRFASVYAWNRKRISNCVADYSVLYNSASFSTFKCYGVSPTKLNDLCFTNVYADSFVIRGDEVRQIAPGQTGKIADYNYKLPDDFTGCVIAWNSNNLDSKVGGNYNYLYRLFRKSNLKPFERDISTEIYQAGSTPCNGVEGFNCYFPLQSYGFQPTNGVGYQPYRVVVLSFELLHAPATVCGPKKSTNLVKNKCVNFNFNGLTGTGVLTESNKKFLPFQQFGRDIADTTDAVRDPQTLEILDITPCSFGGVSVITPGTNTSNQVAVLYQDVNCTEVPVAIHADQLTPTWRVYSTGSNVFQTRAGCLIGAEHVNNSYECDIPIGAGICASYQTQTNSPSGAGSVASQSIIAYTMSLGAENSVAYSNNSIAIPTNFTISVTTEILPVSMTKTSVDCTMYICGDSTECSNLLLQYGSFCTQLNRALTGIAVEQDKNTQEVFAQVKQIYKTPPIKDFGGFNFSQILPDPSKPSKRSFIEDLLFNKVTLADAGFIKQYGDCLGDIAARDLICAQKFNGLTVLPPLLTDEMIAQYTSALLAGTITSGWTFGAGAALQIPFAMQMAYRFNGIGVTQNVLYENQKLIANQFNSAIGKIQDSLSSTASALGKLQDVVNQNAQALNTLVKQLSSNFGAISSVLNDILSRLDPPEAEVQIDRLITGRLQSLQTYVTQQLIRAAEIRASANLAATKMSECVLGQSKRVDFCGKGYHLMSFPQSAPHGVVFLHVTYVPAQEKNFTTAPAICHDGKAHFPREGVFVSNGTHWFVTQRNFYEPQIITTDNTFVSGNCDVVFGIVNNTVYDPLQPELDSFKEELDKYFKNHTSPDVDLGDISGINASVVNIQKEIDRLNEVAKNLNESLIDLQELGKYEQYIKGSGRENLYFQGGGGSGYIPEAPRDGQAYVRKDGEWVLLSTFLGHHHHHHHH

SEQ ID NO: 1847 - protein, 1281 aa, Artificial Sequence
  Description of Artificial Sequence: Synthetic polypeptide
MGILPSPGMPALLSLVSLLSVLLMGCVAETGTQCVNLTTRTQLPPAYTNSFTRGVYYPDKVFRSSVLHSTQDLFLPFFSNVTWFHAIHVSGTNGTKRFDNPVLPFNDGVYFASTEKSNIIRGWIFGTTLDSKTQSLLIVNNATNVVIKVCEFQFCNDPFLGVYYHKNNKSWMESEFRVYSSANNCTFEYVSQPFLMDLEGKQGNFKNLREFVFKNIDGYFKIYSKHTPINLVRDLPQGFSALEPLVDLPIGINITRFQTLLALHRSYLTPGDSSSGWTAGAAAYYVGYLQPRTFLLKYNENGTITDAVDCALDPLSETKCTLKSFTVEKGIYQTSNFRVQPTESIVRFPNITNLCPFGEVFNATRFASVYAWNRKRISNCVADYSVLYNSASFSTFKCYGVSPTKLNDLCFTNVYADSFVIRGDEVRQIAPGQTGKIADYNYKLPDDFTGCVIAWNSNNLDSKVGGNYNYLYRLFRKSNLKPFERDISTEIYQAGSTPCNGVEGFNCYFPLQSYGFQPTNGVGYQPYRVVVLSFELLHAPATVCGPKKSTNLVKNKCVNFNFNGLTGTGVLTESNKKFLPFQQFGRDIADTTDAVRDPQTLEILDITPCSFGGVSVITPGTNTSNQVAVLYQDVNCTEVPVAIHADQLTPTWRVYSTGSNVFQTRAGCLIGAEHVNNSYECDIPIGAGICASYQTQTNSPSGAGSVASQSIIAYTMSLGAENSVAYSNNSIAIPTNFTISVTTEILPVSMAKTSVDCTMYICGDSTECSNLLLQYGSFCTQLNRALTGIAVEQDKNTQEVFAQVKQIYKTPPIKDFGGFNFSQILPDPSKPSKRSFIEDLLFNKVTLADAGFIKQYGDCLGDIAARDLICAQKFNGLTVLPPLLTDEMIAQYTSALLAGTITSGWTFGAGAALQIPFAMQMAYRFNGIGVTQNVLYENQKLIANQFNSAIGKIQDSLSSTASALGKLQDVVNQNAQALNTLVKQLSSNFGAISSVLNDILSRLDPPEAEVQIDRLITGRLQSLQTYVTQQLIRAAEIRASANLAATKMSECVLGQSKRVDFCGKGYHLMSFPQSAPHGVVFLHVTYVPAQEKNFTTAPAICHDGKAHFPREGVFVSNGTHWFVTQRNFYEPQIITTDNTFVSGNCDVVIGIVNNTVYDPLQPELDSFKEELDKYFKNHTSPDVDLGDISGINASVVNIQKEIDRLNEVAKNLNESLIDLQELGKYEQYIKGSGRENLYFQGGGGSGYIPEAPRDGQAYVRKDGEWVLLSTFLGHHHHHHHH

SEQ ID NO: 1848 - protein, 1281 aa, Artificial Sequence
  Description of Artificial Sequence: Synthetic polypeptide
MGILPSPGMPALLSLVSLLSVLLMGCVAETGTQCVNLTTRTQLPPAYTNSFTRGVYYPDKVFRSSVLHSTQDLFLPFFSNVTWFHAIHVSGTNGTKRFDNPVLPFNDGVYFASTEKSNIIRGWIFGTTLDSKTQSLLIVNNATNVVIKVCEFQFCNDPFLGVYYHKNNKSWMESEFRVYSSANNCTFEYVSQPFLMDLEGKQGNFKNLREFVFKNIDGYFKIYSKHTPINLVRDLPQGFSALEPLVDLPIGINITRFQTLLALHRSYLTPGDSSSGWTAGAAAYYVGYLQPRTFLLKYNENGTITDAVDCALDPLSETKCTLKSFTVEKGIYQTSNFRVQPTESIVRFPNITNLCPFGEVFNATRFASVYAWNRKRISNCVADYSVLYNSASFSTFKCYGVSPTKLNDLCFTNVYADSFVIRGDEVRQIAPGQTGKIADYNYKLPDDFTGCVIAWNSNNLDSKVGGNYNYLYRLFRKSNLKPFERDISTEIYQAGSTPCNGVEGFNCYFPLQSYGFQPTNGVGYQPYRVVVLSFELLHAPATVCGPKKSTNLVKNKCVNFNFNGLTGTGVLTESNKKFLPFQQFGRDIADTTDAVRDPQTLEILCITPCSFGGVSVITPGTNTSNQVAVLYQDVNCTEVPVAIHADQLTPTWRVYSTGSNVFQTRAGCLIGAEHVNNSYECDIPIGAGICASYQTQTNSPSGAGSVASQSIIAYTMSLGAENSVAYSNNSIAIPTNFTISVTTEILPVSMTKTSVDCTMYICGDSTECSNLLLQYGSFCTQLNRALTGIAVEQDKNTQEVFAQVKQIYKTPPIKDFGGFNFSQILPDPSKPSKRSFIEDLLFNKVTLADAGFIKQYGDCLGDIAARDLICAQKFNGLTVLPPLLTDEMIAQYTSALLAGTITSGWTFGAGAALQIPFAMQMAYRFNGIGVTQNVLYENQKLIANQFNSAIGKIQDSLSSTASALGKLQDVVNQNAQALNTLVKQLSSNFGAISSVLNDILSRLDPPEAEVQIDRLITGRLQSLQTYVTQQLIRAAEIRASANLAATKMSECVLGQSKRVDFCGKGYHLMSFPQSAPHGVVFLHVTYVPAQEKNFTTAPAICHDGKAHFPREGVFVSNGTHWFVTQRNFYEPQIITTDNTFVSGNCDVVIGIVNNTVYDPLQPELDSFKEELDKYFKNHTSPDVDLGDISGINASVVNIQKEIDRLNEVAKNLNESLIDLQELGKYEQYIKGSGRENLYFQGGGGSGYIPEAPRDGQAYVRKDGEWVLLSTFLGHHHHHHHH

SEQ ID NO: 1849 - protein, 1281 aa, Artificial Sequence
  Description of Artificial Sequence: Synthetic polypeptide
MGILPSPGMPALLSLVSLLSVLLMGCVAETGTQCVNLTTRTQLPPAYTNSFTRGVYYPDKVFRSSVLHSTQDLFLPFFSNVTWFHAIHVSGTNGTKRFDNPVLPFNDGVYFASTEKSNIIRGWIFGTTLDSKTQSLLIVNNATNVVIKVCEFQFCNDPFLGVYYHKNNKSWMESEFRVYSSANNCTFEYVSQPFLMDLEGKQGNFKNLREFVFKNIDGYFKIYSKHTPINLVRDLPQGFSALEPLVDLPIGINITRFQTLLALHRSYLTPGDSSSGWTAGAAAYYVGYLQPRTFLLKYNENGTITDAVDCALDPLSETKCTLKSFTVEKGIYQTSNFRVQPTESIVRFPNITNLCPFGEVFNATRFASVYAWNRKRISNCVADYSVLYNSASFSTFKCYGVSPTKLNDLCFTNVYADSFVIRGDEVRQIAPGQTGKIADYNYKLPDDFTGCVIAWNSNNLDSKVGGNYNYLYRLFRKSNLKPFERDISTEIYQAGSTPCNGVEGFNCYFPLQSYGFQPTNGVGYQPYRVVVLSFELLHAPATVCGPKKSTNLVKNKCVNFNFNGLTGTGVLTESNKKFLPFQQFGRDIADTTDAVRDPQTLEILDITPCSFGGVSVITPGTNTSNQVAVLYQDVNCTEVPVAIHADQLTPTWRVYSTGSNVFQTRAGCLIGAEHVNNSYECDIPIGAGICASYQTQTNSPSGAGSVASQSIIAYTMSLGAENSVAYSNNSIAIPTNFTISVTTEILPVSMTKTSVDCTMYICGDSTECSNLLLQYGSFCTQLNRALTGIAVEQDKNTQEVFAQVKQIYKTPPIKDFGGFNFSQILPDPSKPSKRSFIEDLLFNKVTLADAGFIKQYGDCLGDIAARDLICAQKFNGLTVLPPLLTDEMIAQYTSALLAGTITSGWTFGAGAALQIPFAMQMAYRFNGIGVTQNVLYENQKLIANQFNSAIGKIQDSLSSTASALGKLQDVVNQNAQALNTLVKQLSSNFGAISSVLNDILSRLDPPEAEVQIDRLITGRLQSLQTYVTQQLIRAAEIRASANLAATKMSECVKGQSKRVDFCGKGYHLMSFPQSAPHGVVFLHVTYVPAQEKNFTTAPAICHDGKAHFPREGVFVSNGTHWFVTQRNFYEPQIITTDNTFVSGNCDVVIGIVNNTVYDPLQPELDSFKEELDKYFKNHTSPDVDLGDISGINASVVNIQKEIDRLNEVAKNLNESLIDLQELGKYEQYIKGSGRENLYFQGGGGSGYIPEAPRDGQAYVRKDGEWVLLSTFLGHHHHHHHH

SEQ ID NO: 1850 - protein, 1281 aa, Artificial Sequence
  Description of Artificial Sequence: Synthetic polypeptide
MGILPSPGMPALLSLVSLLSVLLMGCVAETGTQCVNLTTRTQLPPAYTNSFTRGVYYPDKVFRSSVLHSTQDLFLPFFSNVTWFHAIHVSGTNGTKRFDNPVLPFNDGVYFASTEKSNIIRGWIFGTTLDSKTQSLLIVNNATNVVIKVCEFQFCNNPFLGVYYHKNNKSWMESEFRVYSSANNCTFEYVSQPFLMDLEGKQGNFKNLREFVFKNIDGYFKIYSKHTPINLVRDLPQGFSALEPLVDLPIGINITRFQTLLALHRSYLTPGDSSSGWTAGAAAYYVGYLQPRTFLLKYNENGTITDAVDCALDPLSETKCTLKSFTVEKGIYQTSNFRVQPTESIVRFPNITNLCPFGEVFNATRFASVYAWNRKRISNCVADYSVLYNSASFSTFKCYGVSPTKLNDLCFTNVYADSFVIRGDEVRQIAPGQTGKIADYNYKLPDDFTGCVIAWNSNNLDSKVGGNYNYLYRLFRKSNLKPFERDISTEIYQAGSTPCNGVEGFNCYFPLQSYGFQPTNGVGYQPYRVVVLSFELLHAPATVCGPKKSTNLVKNKCVNFNFNGLTGTGVLTESNKKFLPFQQFGRDIADTTDAVRDPQTLEILDITPCSFGGVSVITPGTNTSNQVAVLYQDVNCTEVPVAIHADQLTPTWRVYSTGSNVFQTRAGCLIGAEHVNNSYECDIPIGAGICASYQTQTNSPSGAGSVASQSIIAYTMSLGAENSVAYSNNSIAIPTNFTISVTTEILPVSMTKTSVDCTMYICGDSTECSNLLLQYGSFCTQLNRALTGIAVEQDKNTQEVFAQVKQIYKTPPIKDFGGFNFSQILPDPSKPSKRSFIEDLLFNKVTLADAGFIKQYGDCLGDIAARDLICAQKFNGLTVLPPLLTDEMIAQYTSALLAGTITSGWTFGAGAALQIPFAMQMAYRFNGIGVTQNVLYENQKLIANQFNSAIGKIQDSLSSTASALGKLQDVVNQNAQALNTLVKQLSSNFGAISSVLNDILSRLDPPEAEVQIDRLITGRLQSLQTYVTQQLIRAAEIRASANLAATKMSECVLGQSKRVDFCGKGYHLMSFPQSAPHGVVFLHVTYVPAQEKNFTTAPAICHDGKAHFPREGVFVSNGTHWFVTQRNFYEPQIITTDNTFVSGNCDVVIGIVNNTVYDPLQPELDSFKEELDKYFKNHTSPDVDLGDISGINASVVNIQKEIDRLNEVAKNLNESLIDLQELGKYEQYIKGSGRENLYFQGGGGSGYIPEAPRDGQAYVRKDGEWVLLSTFLGHHHHHHHH

SEQ ID NO: 1851 - protein, 1281 aa, Artificial Sequence
  Description of Artificial Sequence: Synthetic polypeptide
MGILPSPGMPALLSLVSLLSVLLMGCVAETGTQCVNLTTRTQLPPAYTNSFTRGVYYPDKVFRSSVLHSTQDLFLPFFSNVTWFHAIHVSGTNGTKRFDNPVLPFNDGVYFASTEKSNIIRGWIFGTTLDSKTQSLLIVNNATNVVIKVCEFQFCNDPFLGVYYHKNNKSWMESEFRVYSSANNCTFEYVSQPFLMDLEGKQGNFKNLREFVFKNIDGYFKIYSKHTPINLVRDLPQGFSALEPLVDLPIGINITRFQTLLALHRSYLTPGDSSSGWTAGAAAYYVGYLQPRTFLLKYNENGTITDAVDCALDPLSETKCTLKSFTVEKGIYQTSNFRVQPTESIVRFPNITNLCPFGEVFNATRFASVYAWNRKRISNCVADYSVLYNSASFSTFKCYGVSPTKLNDLCFTNVYADSFVIRGDEVRQIAPGQTGKIADYNYKLPDDFTGCVIAWNSNNLDSKVGGNYNYLYRLFRKSNLKPFERDISTEIYQAGSTPCNGVEGFNCYFPLQSYGFQPTNGVGYQPYRVVVLSFELLHAPATVCGPKKSTNLVKNKCVNFNFNGLTGTGVLTESNKKFLPFQQFGRDIADTTDAVRDPQTLEILDITPCSFGGVSVITPGTNTSNQVAVLYQDVNCTEVPVAIHADQLTPTWRVYSTGSNVFQTRAGCLIGAEHVNNSYECDIPIGAGICASYQTQTNSPSGAGSVASQSIIAYTMSLGAENSVAYSNNSIAIPTNFTISVTTEILPVSMTKTSVDCTMYICGDSTECSNLLLQYGSFCTQLNRALTGIAVEQDKNTQEVFAQVKQIYKTPPIKDFGGFNFSQILPDPSKPSKRSFIEDLLFNKVTLADAGFIKQYGDCLGDVAARDLICAQKFNGLTVLPPLLTDEMIAQYTSALLAGTITSGWTFGAGAALQIPFAMQMAYRFNGIGVTQNVLYENQKLIANQFNSAIGKIQDSLSSTASALGKLQDVVNQNAQALNTLVKQLSSNFGAISSVLNDILSRLDPPEAEVQIDRLITGRLQSLQTYVTQQLIRAAEIRASANLAATKMSECVLGQSKRVDFCGKGYHLMSFPQSAPHGVVFLHVTYVPAQEKNFTTAPAICHDGKAHFPREGVFVSNGTHWFVTQRNFYEPQIITTDNTFVSGNCDVVIGIVNNTVYDPLQPELDSFKEELDKYFKNHTSPDVDLGDISGINASVVNIQKEIDRLNEVAKNLNESLIDLQELGKYEQYIKGSGRENLYFQGGGGSGYIPEAPRDGQAYVRKDGEWVLLSTFLGHHHHHHHH

SEQ ID NO: 1852 - protein, 1281 aa, Artificial Sequence
  Description of Artificial Sequence: Synthetic polypeptide
MGILPSPGMPALLSLVSLLSVLLMGCVAETGTQCVNLTTRTQLPPAYTNSFTRGVYYPDKVFRSSVLHSTQDLFLPFFSNVTWFHAIHVSGTNGTKRFDNPVLPFNDGVYFASTEKSNIIRGWIFGTTLDSKTQSLLIVNNATNVVIKVCEFQFCNDPFLGVYYHKNNKSWMESEFRVYSSANNCTFEYVSQPFLMDLEGKQGNFKNLREFVFKNIDGYFKIYSKHTPINLVRDLPQGFSALEPLVDLPIGINITRFQTLLALHRSYLTPGDSSSGWTAGAAAYYVGYLQPRTFLLKYNENGTITDAVDCALDPLSETKCTLKSFTVEKGIYQTSNFRVQPTESIVRFPNITNLCPFGEVFNATRFASVYAWNRKRISNCVADYSVLYNSASFSTFKCYGVSPTKLNDLCFTNVYADSFVIRGDEVRQIAPGQTGKIADYNYKLPDDFTGCVIAWNSNNLDSKVGGNYNYLYRLFRKSNLKPFERDISTEIYQAGSTPCNGVEGFNCYFPLQSYGFQPTNGVGYQPYRVVVLSFELLHAPATVCGPKKSTNLVKNKCVNFNFNGLTGTGVLTESNKKFLPFQQFGRDIADTTDAVRDPQTLEILDITPCSFGGVSVITPGTNTSNQVAVLYQDVNCTEVPVAIHADQLTPTWRVYSTGSNVFQTRAGCLIGAEHVNNSYECDIPIGAGICASYQTQTNSPSGAGSVASQSIIAYTMSLGAENSVAYSNNSIAIPTNFTISVTTEILPVSMTKTSVDCTMYICGDSTECSNLLLQYGSFCTQLNRALTGIAVEEDKNTQEVFAQVKQIYKTPPIKDFGGFNFSQILPDPSKPSKRSFIEDLLFNKVTLADAGFIKQYGDCLGDIAARDLICAQKFNGLTVLPPLLTDEMIAQYTSALLAGTITSGWTFGAGAALQIPFAMQMAYRFNGIGVTQNVLYENQKLIANQFNSAIGKIQDSLSSTASALGKLQDVVNQNAQALNTLVKQLSSNFGAISSVLNDILSRLDPPEAEVQIDRLITGRLQSLQTYVTQQLIRAAEIRASANLAATKMSECVLGQSKRVDFCGKGYHLMSFPQSAPHGVVFLHVTYVPAQEKNFTTAPAICHDGKAHFPREGVFVSNGTHWFVTQRNFYEPQIITTDNTFVSGNCDVVIGIVNNTVYDPLQPELDSFKEELDKYFKNHTSPDVDLGDISGINASVVNIQKEIDRLNEVAKNLNESLIDLQELGKYEQYIKGSGRENLYFQGGGGSGYIPEAPRDGQAYVRKDGEWVLLSTFLGHHHHHHHH

SEQ ID NO: 1853 - protein, 1281 aa, Artificial Sequence
  Description of Artificial Sequence: Synthetic polypeptide
MGILPSPGMPALLSLVSLLSVLLMGCVAETGTQCVNLTTRTQLPPAYTNSFTRGVYYPDKVFRSSVLHSTQDLFLPFFSNVTWFHAIHVSGTNGTKRFDNPVLPFNDGVYFASTEKSNIIRGWIFGTTLDSKTQSLLIVNNATNVVIKVCEFQFCNDPFLGVYYHKNNKSWMESEFRVYSSANNCTFEYVSQPFLMDLEGKQGNFKNLREFVFKNIDGYFKIYSKHTPINLVRDLPQGFSALEPLVDLPIGINITRFQTLLALHRSYLTPGDSSSGWTAGAAAYYVGYLQPRTFLLKYNENGTITDAVDCALDPLSETKCTLKSFTVEKGIYQTSNFRVQPTESIVRFPNITNLCPFGEVFNATRFASVYAWNRKRISNCVADYSVLYNSASFSTFKCYGVSPTKLNDLCFTNVYADSFVIRGDEVRQIAPGQTGKIADYNYKLPDDFTGCVIAWNSNNLDSKVGGNYNYLYRLFRKSNLKPFERDISTEIYQAGSTPCNGVEGFNCYFPLQSYGFQPTNGVGYQPYRVVVLSFELLHAPATVCGPKKSTNLVKNKCVNFNFNGLTGTGVLTESNKKFLPFQQFGRDIADTTDAVRDPQTLEILDITPCSFGGVSVITPGTNTSNQVAVLYQDVNCTEVPVAIHADQLTPTWRVYSTGSNVFQTRAGCLIGAEHVNNSYECDIPIGAGICASYQTQTNSPSGAGSVASQSIIAYTMSLGAENSVAYSNNSIAIPTNFTISVTTEILPVSMTKTSVDCTMYICGDSTECSNLLLQYGSFCTQLNRALTGIAVEQDKNTQEVFAQVKQIYKTPPIKDFGGFNFSQILPDPSKPSKRSFIEDLLFNKVTLADAGFIKQYGDCLGDIAARDLICAQKFNGLTVLPPLLTDEMIAQYTSALLAGTITSGWTFGAGAALQIPFAMQMAYRFNGIGVTQNVLYENQKLIANQFNSAIGKIQDSLSSTASALGKLQDVVNQNAQALNTLVKQLSSNFGAISSVLNDILSRLDPPEAEVQIDRLITGRLQSLQTYVTQQLIRAAEIRASANLAATKMSECVLGQSKRVDFCGKGYHLMSFPQSAPHGVVFLHVTYVPAQEKNFTTAPAICHDGKAHFPREGVFVSNGTHWFVTQRNFYEPQSITTDNTFVSGNCDVVIGIVNNTVYDPLQPELDSFKEELDKYFKNHTSPDVDLGDISGINASVVNIQKEIDRLNEVAKNLNESLIDLQELGKYEQYIKGSGRENLYFQGGGGSGYIPEAPRDGQAYVRKDGEWVLLSTFLGHHHHHHHH

SEQ ID NO: 1854 - protein, 1281 aa, Artificial Sequence
  Description of Artificial Sequence: Synthetic polypeptide
MGILPSPGMPALLSLVSLLSVLLMGCVAETGTQCVNLTTRTQLPPAYTNSFTRGVYYPDKVFRSSVLHSTQDLFLPFFSNVTWFHAIHVSGTNGTKRFDNPVLPFNDGVYFASTEKSNIIRGWIFGTTLDSKTQSLLIVNNATNVVIKVCEFQFCNDPFLGVYYHKNNKSWMESEFRVYSSANNCTFEYVSQPFLMDLEGKQGNFKNLREFVFKNIDGYFKIYSKHTPINLVRDLPQGFSALEPLVDLPIGINITRFQTLLALHRSYLTPGDSSSGWTAGAAAYYVGYLQPRTFLLKYNENGTITDAVDCALDPLSETKCTLKSFTVEKGIYQTSNFRVQPTESIVRFPNITNLCPFGEVFNATRFASVYAWNRKRISNCVADYSVLYNSASFSTFKCYGVSPTKLNDLCFTNVYADSFVIRGDEVRQIAPGQTGKIADYNYKLPDDFTGCVIAWNSNNLDSKVGGNYNYLYRLFRKSNLKPFERDISTEIYQAGSTPCNGVEGFNCYFPLQSYGFQPTNGVGYQPYRVVVLSFELLHAPATVCGPKKSTNLVKNKCVNFNFNGLTGTGVLTESNKKFLPFQQFGRDIADTTDAVRDPQTLEILDITPCSFGGVSVITPGTNTSNQVAVLYQDVNCTEVPVAIHADQLTPTWRVYSTGSNVFQTRAGCLIGAEHVNNSYECDIPIGAGICASYQTQTNSPSGAGSVASQSIIAYTMSLGAENSVAYSNNSIAIPTNFTISVTTEILPVSMTKTSVDCTMYICGDSTECSNLLLQYGSFCTQLNRALTGIAVEQDKNTQEVFAQVKQIYKTPPIKDFGGFNFSQILPDPSKPSKRSFIEDLLFNKVTLADAGFIKQYGDCLGDIAARDLICAQKFNGLTVLPPLLTDEMIAQYTSALLAGTITSGWTFGAGAALQIPFAMQMAYRFNGIGVTQNVLYENQKLIANQFNSAIGKIQDSLSSTASALGKLQDVVNQNAQALSTLVKQLSSNFGAISSVLNDILSRLDPPEAEVQIDRLITGRLQSLQTYVTQQLIRAAEIRASANLAATKMSECVLGQSKRVDFCGKGYHLMSFPQSAPHGVVFLHVTYVPAQEKNFTTAPAICHDGKAHFPREGVFVSNGTHWFVTQRNFYEPQIITTDNTFVSGNCDVVIGIVNNTVYDPLQPELDSFKEELDKYFKNHTSPDVDLGDISGINASVVNIQKEIDRLNEVAKNLNESLIDLQELGKYEQYIKGSGRENLYFQGGGGSGYIPEAPRDGQAYVRKDGEWVLLSTFLGHHHHHHHH

SEQ ID NO: 1855 - protein, 1281 aa, Artificial Sequence
  Description of Artificial Sequence: Synthetic polypeptide
MGILPSPGMPALLSLVSLLSVLLMGCVAETGTQCVNLTTRTQLPPAYTNSFTRGVYYPDKVFRSSVLHSTQDLFLPFFSNVTWFHAIHVSGTNGTKRFDNPVLPFNDGVYFASTEKSNIIRGWIFGTTLDSKTQSLLIVNNATNVVIKVCEFQFCNDPFLGVYYHKNNKSWMESEFRVYSSANNCTFEYVSQPFLMDLEGKQGNFKNLREFVFKNIDGYFKIYSKHTPINLVRDLPQGFSALEPLVDLPIGINITRFQTLLALHRSYLTPGDSSSGWTAGAAAYYVGYLQPRTFLLKYNENGTITDAVDCALDPLSETKCTLKSFTVEKGIYQTSNFRVQPTESIVRFPNITNLCPFGEVFNATRFASVYAWNRKRISNCVADYSVLYNSASFSTFKCYGVSPTKLNDLCFTNVYADSFVIRGDEVRQIAPGQTGKIADYNYKLPDDFTGCVIAWNSNNLDSKVGGNYNYLYRLFRKSNLKPFERDISTEIYQAGSTPCNGVEGFNCYFPLQSYGFQPTNGVGYQPYRVVVLSFELLHAPATVCGPKKSTNLVKNKCVNFNFNGLTGTGVLTESNKKFLPFQQFGRDIADTTDAVRDPQTLEILDITPCSFGGVSVITPGTNTSNQVAVLYQDVNCTEVPVAIHADQLTPTWRVYSTGSNVFQTRAGCLIGAEHVNNSYECDIPIGAGICASYQTQTNSPSGAGSVASQSIIAYTMSLGAENSVAYSNNSIAIPTNFTISVTTEILPVSMTKTSVDCTMYICGDSTECSNLLLQYGSFCTQLNRALTGIAVEQDKNTQEVFAQVKQIYKTPPIKDFGGFNFSQILPDPSKPSKRSFIEDLLFNKVTLADAGFIKQYGDCLGDIAARDLICAQKFNGLTVLPPLLTDEMIAQYTSALLAGTITSGWTFGAGAALQIPFAMQMAYRFNGIGVTQNVLYENQKLIANQFNSAIGKIQDSLSSTASALGKLQDVVNQNAQALNTLVKQLSSNFGAISSVLNDILSRLDPPEAEVQIDRLITGRLQSLQTYVTQQLIRAAEIRASANLAATKMSECVLGQSKRVGFCGKGYHLMSFPQSAPHGVVFLHVTYVPAQEKNFTTAPAICHDGKAHFPREGVFVSNGTHWFVTQRNFYEPQIITTDNTFVSGNCDVVIGIVNNTVYDPLQPELDSFKEELDKYFKNHTSPDVDLGDISGINASVVNIQKEIDRLNEVAKNLNESLIDLQELGKYEQYIKGSGRENLYFQGGGGSGYIPEAPRDGQAYVRKDGEWVLLSTFLGHHHHHHHH

SEQ ID NO: 1856 - protein, 1281 aa, Artificial Sequence
  Description of Artificial Sequence: Synthetic polypeptide
MGILPSPGMPALLSLVSLLSVLLMGCVAETGTQCVNLTTRTQLPPAYTNSFTRGVYYPDKVFRSSVLHSTQDLFLPFFSNVTWFHAIHVSGTNGTKRFDNPVLPFNDGVYFASTEKSNIIRGWIFGTTLDSKTQSLLIVNNATNVVIKVCEFQFCNDPFLGVYYHKNNKSWMESEFRVYSSANNCTFEYVSQPFLMDLEGKQGNFKNLREFVFKNIDGYFKIYSKHTPINLVRDLPQGFSALEPLVDLPIGINITRFQTLLALHRSYLTPGDSSSGWNAGAAAYYVGYLQPRTFLLKYNENGTITDAVDCALDPLSETKCTLKSFTVEKGIYQTSNFRVQPTESIVRFPNITNLCPFGEVFNATRFASVYAWNRKRISNCVADYSVLYNSASFSTFKCYGVSPTKLNDLCFTNVYADSFVIRGDEVRQIAPGQTGKIADYNYKLPDDFTGCVIAWNSNNLDSKVGGNYNYLYRLFRKSNLKPFERDISTEIYQAGSTPCNGVEGFNCYFPLQSYGFQPTNGVGYQPYRVVVLSFELLHAPATVCGPKKSTNLVKNKCVNFNFNGLTGTGVLTESNKKFLPFQQFGRDIADTTDAVRDPQTLEILDITPCSFGGVSVITPGTNTSNQVAVLYQDVNCTEVPVAIHADQLTPTWRVYSTGSNVFQTRAGCLIGAEHVNNSYECDIPIGAGICASYQTQTNSPSGAGSVASQSIIAYTMSLGAENSVAYSNNSIAIPTNFTISVTTEILPVSMTKTSVDCTMYICGDSTECSNLLLQYGSFCTQLNRALTGIAVEQDKNTQEVFAQVKQIYKTPPIKDFGGFNFSQILPDPSKPSKRSFIEDLLFNKVTLADAGFIKQYGDCLGDIAARDLICAQKFNGLTVLPPLLTDEMIAQYTSALLAGTITSGWTFGAGAALQIPFAMQMAYRFNGIGVTQNVLYENQKLIANQFNSAIGKIQDSLSSTASALGKLQDVVNQNAQALNTLVKQLSSNFGAISSVLNDILSRLDPPEAEVQIDRLITGRLQSLQTYVTQQLIRAAEIRASANLAATKMSECVLGQSKRVDFCGKGYHLMSFPQSAPHGVVFLHVTYVPAQEKNFTTAPAICHDGKAHFPREGVFVSNGTHWFVTQRNFYEPQIITTDNTFVSGNCDVVIGIVNNTVYDPLQPELDSFKEELDKYFKNHTSPDVDLGDISGINASVVNIQKEIDRLNEVAKNLNESLIDLQELGKYEQYIKGSGRENLYFQGGGGSGYIPEAPRDGQAYVRKDGEWVLLSTFLGHHHHHHHH

SEQ ID NO: 1857 - protein, 1281 aa, Artificial Sequence
  Description of Artificial Sequence: Synthetic polypeptide
MGILPSPGMPALLSLVSLLSVLLMGCVAETGTQCVNLTTRTQLPPAYTNSFTRGVYYPDKVFRSSVLHSTQDLFLPFFSNVTWFHAIHVSGTNGTKRFDNPVLPFNDGVYFASTEKSNIIRGWIFGTTLDSKTQSLLIVNNATNVVIKVCEFQFCNDPFLGVYYHKNNKSWMESEFRVYSSANNCTFEYVSQPFLMDLEGKQGNFKNLREFVFKNIDGYFKIYSKHTPINLVRDLPQGFSALEPLVDLPIGINITRFQTLLALHRSYLTPGDSSSGWTAGAAAYYVGYLQPRTFLLKYNENGTITDAVDCALDPLSETKCTLKSFTVEKGIYQTSNFRVQPTESIVRFPNITNLCPFGEVFNATRFASVYAWNRKRISNCVADYSVLYNSASFSTFKCYGVSPTKLNDLCFTNVYADSFVIRGDEVRQIAPGQTGKIADYNYKLPDDFTGCVIAWNSNNLDSKVGGNYNYLYRLFRKSNLKPFERDISTEIYQAGSTPCNGVEGFNCYFPLQSYGFQPTNGVGYQPYRVVVLSFELLHAPATVCGPKKSTNLVKNKCVNFNFNGLTGTGVLTESNKKFLPFQQFGRDIADTTDAVRDPQTLEILDISPCSFGGVSVITPGTNTSNQVAVLYQDVNCTEVPVAIHADQLTPTWRVYSTGSNVFQTRAGCLIGAEHVNNSYECDIPIGAGICASYQTQTNSPSGAGSVASQSIIAYTMSLGAENSVAYSNNSIAIPTNFTISVTTEILPVSMTKTSVDCTMYICGDSTECSNLLLQYGSFCTQLNRALTGIAVEQDKNTQEVFAQVKQIYKTPPIKDFGGFNFSQILPDPSKPSKRSFIEDLLFNKVTLADAGFIKQYGDCLGDIAARDLICAQKFNGLTVLPPLLTDEMIAQYTSALLAGTITSGWTFGAGAALQIPFAMQMAYRFNGIGVTQNVLYENQKLIANQFNSAIGKIQDSLSSTASALGKLQDVVNQNAQALNTLVKQLSSNFGAISSVLNDILSRLDPPEAEVQIDRLITGRLQSLQTYVTQQLIRAAEIRASANLAATKMSECVLGQSKRVDFCGKGYHLMSFPQSAPHGVVFLHVTYVPAQEKNFTTAPAICHDGKAHFPREGVFVSNGTHWFVTQRNFYEPQIITTDNTFVSGNCDVVIGIVNNTVYDPLQPELDSFKEELDKYFKNHTSPDVDLGDISGINASVVNIQKEIDRLNEVAKNLNESLIDLQELGKYEQYIKGSGRENLYFQGGGGSGYIPEAPRDGQAYVRKDGEWVLLSTFLGHHHHHHHH

SEQ ID NO: 1858 - protein, 1281 aa, Artificial Sequence
  Description of Artificial Sequence: Synthetic polypeptide
MGILPSPGMPALLSLVSLLSVLLMGCVAETGTQCVNLTTRTQLPPAYTNSFTRGVYYPDKVFRSSVLHSTQDLFLPFFSNVTWFHAIHVSGTNGTKEFDNPVLPFNDGVYFASTEKSNIIRGWIFGTTLDSKTQSLLIVNNATNVVIKVCEFQFCNDPFLGVYYHKNNKSWMESEFRVYSSANNCTFEYVSQPFLMDLEGKQGNFKNLREFVFKNIDGYFKIYSKHTPINLVRDLPQGFSALEPLVDLPIGINITRFQTLLALHRSYLTPGDSSSGWTAGAAAYYVGYLQPRTFLLKYNENGTITDAVDCALDPLSETKCTLKSFTVEKGIYQTSNFRVQPTESIVRFPNITNLCPFGEVFNATRFASVYAWNRKRISNCVADYSVLYNSASFSTFKCYGVSPTKLNDLCFTNVYADSFVIRGDEVRQIAPGQTGKIADYNYKLPDDFTGCVIAWNSNNLDSKVGGNYNYLYRLFRKSNLKPFERDISTEIYQAGSTPCNGVEGFNCYFPLQSYGFQPTNGVGYQPYRVVVLSFELLHAPATVCGPKKSTNLVKNKCVNFNFNGLTGTGVLTESNKKFLPFQQFGRDIADTTDAVRDPQTLEILDITPCSFGGVSVITPGTNTSNQVAVLYQDVNCTEVPVAIHADQLTPTWRVYSTGSNVFQTRAGCLIGAEHVNNSYECDIPIGAGICASYQTQTNSPSGAGSVASQSIIAYTMSLGAENSVAYSNNSIAIPTNFTISVTTEILPVSMTKTSVDCTMYICGDSTECSNLLLQYGSFCTQLNRALTGIAVEQDKNTQEVFAQVKQIYKTPPIKDFGGFNFSQILPDPSKPSKRSFIEDLLFNKVTLADAGFIKQYGDCLGDIAARDLICAQKFNGLTVLPPLLTDEMIAQYTSALLAGTITSGWTFGAGAALQIPFAMQMAYRFNGIGVTQNVLYENQKLIANQFNSAIGKIQDSLSSTASALGKLQDVVNQNAQALNTLVKQLSSNFGAISSVLNDILSRLDPPEAEVQIDRLITGRLQSLQTYVTQQLIRAAEIRASANLAATKMSECVLGQSKRVDFCGKGYHLMSFPQSAPHGVVFLHVTYVPAQEKNFTTAPAICHDGKAHFPREGVFVSNGTHWFVTQRNFYEPQIITTDNTFVSGNCDVVIGIVNNTVYDPLQPELDSFKEELDKYFKNHTSPDVDLGDISGINASVVNIQKEIDRLNEVAKNLNESLIDLQELGKYEQYIKGSGRENLYFQGGGGSGYIPEAPRDGQAYVRKDGEWVLLSTFLGHHHHHHHH

SEQ ID NO: 1859 - protein, 1281 aa, Artificial Sequence
  Description of Artificial Sequence: Synthetic polypeptide
MGILPSPGMPALLSLVSLLSVLLMGCVAETGTQCVNLTTRTQLPPAYTNSFTRGVYYPDKVFRSSVLHSTQDLFLPFFSNVTWFHAIHVSGTNGTKRFDNPVLPFNDGVYFASTEKSNIIRGWIFGTTLDSKTQSLLIVNNATNVVIKVCEFQFCNDPFLGVYYHKNNKSWMESEFRVYSSANNCTFEYVSQPFLMDLEGKQGNFKNLREFVFKNIDGYFKIYSKHTPINLVRDLPQGFSALEPLVDLPIGINITRFQTLLALHRSYLTPGDSSSGWTAGAAAYYVGYLQPRTFLLKYNENGTITDAVDCALDPLSETKCTLKSFTVEKGIYQTSNFRVQPTESIVRFPNITNLCPFGEVFNATRFASVYAWNRKRISNCVADYSVLYNSASFSTFKCYGVSPTKLNDLCFTNVYADSFVIRGDEVRQIAPGQTGKIADYNYKLPDDFTGCVIAWNSNNLDSKVGGNYNYLYRLFRKSNLKPFERDISTEIYQAGSTPCNGVEGFNCYFPLQSYGFQPTNGVGYQPYRVVVLSFELLHAPATVCGPKKSTNLVKNKCVNFNFNGLTGTGVLTESNKKFLPFQQFGRDIADTTDAVRDPQTLEILDITPCSFGGVSVITPGTNTSNQVAVLYQDVNCTEVPVAIHADQLTPTWRVYSTGSNVFQTRAGCLIGAEHVNNSYECDIPIGAGICASYQTQTNSPSGAGSVASQSIIAYTMSLGAENSVAYSNNSIAIPTNFTISVTTEILPVSMTKTSVDCTMYICGDSTECSNLLLQYGSFCTQLNRALTGIAVEQDKNTQEVFAQVKQIYKTPPIKDFGGFNFSQILPDPSKPSKRSFIEDLLFNKVTLADAGFIKQYGDCLGDIAARDLICAQKFNGLTVLPPLLTDEMIAQYTSALLAGTITSGWTFGAGAALQIPFAMQMAYRFNGIGVTQNVLYENQKLIANQFNSAIGKIQDSLSSTASALGKLQDVVNQNAQALNTLVKQLSSNFGAISSVLNDILSRLDPPEAEVQIDRLITGRLQSLQTYVTQQLIRAAEIRASANLAATKMSECVLGQSKRVDFCGKGYHLMSFPQSAPHGVVFLHVTYVPAQEKNFTTAPAICHDGKAHFPREGVFVSNGTSWFVTQRNFYEPQIITTDNTFVSGNCDVVIGIVNNTVYDPLQPELDSFKEELDKYFKNHTSPDVDLGDISGINASVVNIQKEIDRLNEVAKNLNESLIDLQELGKYEQYIKGSGRENLYFQGGGGSGYIPEAPRDGQAYVRKDGEWVLLSTFLGHHHHHHHH

SEQ ID NO: 1860 - protein, 1281 aa, Artificial Sequence
  Description of Artificial Sequence: Synthetic polypeptide
MGILPSPGMPALLSLVSLLSVLLMGCVAETGTQCVNLTTRTQLPPAYTNSFTRGVYYPDKVFRSSVLHSTQDLFLPFFSNVTWFHAIHVSGTNGTKRFDNPVLPFNDGVYFASTEKSNIIRGWIFGTTLDSKTQSLLIVNNATNVVIKVCEFQFCNDPFLGVYYHKNNKSWMESEFRVYSSANNCTFEYVSQPFLMDLEGKQGNFKNLREFVFKNIDGYFKIYSKHQPINLVRDLPQGFSALEPLVDLPIGINITRFQTLLALHRSYLTPGDSSSGWTAGAAAYYVGYLQPRTFLLKYNENGTITDAVDCALDPLSETKCTLKSFTVEKGIYQTSNFRVQPTESIVRFPNITNLCPFGEVFNATRFASVYAWNRKRISNCVADYSVLYNSASFSTFKCYGVSPTKLNDLCFTNVYADSFVIRGDEVRQIAPGQTGKIADYNYKLPDDFTGCVIAWNSNNLDSKVGGNYNYLYRLFRKSNLKPFERDISTEIYQAGSTPCNGVEGFNCYFPLQSYGFQPTNGVGYQPYRVVVLSFELLHAPATVCGPKKSTNLVKNKCVNFNFNGLTGTGVLTESNKKFLPFQQFGRDIADTTDAVRDPQTLEILDITPCSFGGVSVITPGTNTSNQVAVLYQDVNCTEVPVAIHADQLTPTWRVYSTGSNVFQTRAGCLIGAEHVNNSYECDIPIGAGICASYQTQTNSPSGAGSVASQSIIAYTMSLGAENSVAYSNNSIAIPTNFTISVTTEILPVSMTKTSVDCTMYICGDSTECSNLLLQYGSFCTQLNRALTGIAVEQDKNTQEVFAQVKQIYKTPPIKDFGGFNFSQILPDPSKPSKRSFIEDLLFNKVTLADAGFIKQYGDCLGDIAARDLICAQKFNGLTVLPPLLTDEMIAQYTSALLAGTITSGWTFGAGAALQIPFAMQMAYRFNGIGVTQNVLYENQKLIANQFNSAIGKIQDSLSSTASALGKLQDVVNQNAQALNTLVKQLSSNFGAISSVLNDILSRLDPPEAEVQIDRLITGRLQSLQTYVTQQLIRAAEIRASANLAATKMSECVLGQSKRVDFCGKGYHLMSFPQSAPHGVVFLHVTYVPAQEKNFTTAPAICHDGKAHFPREGVFVSNGTHWFVTQRNFYEPQIITTDNTFVSGNCDVVIGIVNNTVYDPLQPELDSFKEELDKYFKNHTSPDVDLGDISGINASVVNIQKEIDRLNEVAKNLNESLIDLQELGKYEQYIKGSGRENLYFQGGGGSGYIPEAPRDGQAYVRKDGEWVLLSTFLGHHHHHHHH

SEQ ID NO: 1861 - protein, 1281 aa, Artificial Sequence
  Description of Artificial Sequence: Synthetic polypeptide
MGILPSPGMPALLSLVSLLSVLLMGCVAETGTQCVNLTTRTQLPPAYTNSFTRGVYYPDKVFRSSVLHSTQDLFLPFFSNVTWFHAIHVSGTNGTKRFDNPVLPFNDGVYFASTEKSNIIRGWIFGTTLDSKTQSLLIVNNATNVVIKVCEFQFCNDPFLGVYYHKNNKSWMESEFRVYSSANNCTFEYVSQPFLMDLEGKQGNFKNLREFVFKNIDGYFKIYSKHTPINLVRDLPQGFSALEPLVDLPIGINITRFQTLLALHRSYLTPGDSSSGWTAGAAAYYVGYLQPRTFLLKYNENGTITDAVDCALDPLSETKCTLKSFTVEKGIYQTSNFRVQPTESIVRFPNITNLCPFGEVFNATRFASVYAWNRKRISNCVADYSVLYNSASFSTFKCYGVSPTKLNDLCFTNVYADSFVIRGDEVRQIAPGQTGKIADYNYKLPDDFTGCVIAWNSNNLDSKVGGNYNYLYRLFRKSNLKPFERDISTEIYQAGSTPCNGVEGFNCYFPLQSYGFQPTNGVGYQPYRVVVLSFELLHAPATVCGPKKSTNLVKNKCVNFNFNGLTGTGVLTESNKKFLPFQQFGRDIADTTDAVRDPQTLEILDITPCSFGGVSVITPGTNTSNQVAVLYQDVNCTEVPVAIHADQLTPTWRVYSTGSNVFQTRAGCLIGAEHVNNSYECDIPIGAGICASYQTQTNSPSGAGSVASKSIIAYTMSLGAENSVAYSNNSIAIPTNFTISVTTEILPVSMTKTSVDCTMYICGDSTECSNLLLQYGSFCTQLNRALTGIAVEQDKNTQEVFAQVKQIYKTPPIKDFGGFNFSQILPDPSKPSKRSFIEDLLFNKVTLADAGFIKQYGDCLGDIAARDLICAQKFNGLTVLPPLLTDEMIAQYTSALLAGTITSGWTFGAGAALQIPFAMQMAYRFNGIGVTQNVLYENQKLIANQFNSAIGKIQDSLSSTASALGKLQDVVNQNAQALNTLVKQLSSNFGAISSVLNDILSRLDPPEAEVQIDRLITGRLQSLQTYVTQQLIRAAEIRASANLAATKMSECVLGQSKRVDFCGKGYHLMSFPQSAPHGVVFLHVTYVPAQEKNFTTAPAICHDGKAHFPREGVFVSNGTHWFVTQRNFYEPQIITTDNTFVSGNCDVVIGIVNNTVYDPLQPELDSFKEELDKYFKNHTSPDVDLGDISGINASVVNIQKEIDRLNEVAKNLNESLIDLQELGKYEQYIKGSGRENLYFQGGGGSGYIPEAPRDGQAYVRKDGEWVLLSTFLGHHHHHHHH

SEQ ID NO: 1862 - protein, 1281 aa, Artificial Sequence
  Description of Artificial Sequence: Synthetic polypeptide
MGILPSPGMPALLSLVSLLSVLLMGCVAETGTQCVNLTTRTQLPPAYTNSFTRGVYYPDKVFRSSVLHSTQDLFLPFFSNVTWFHAIHVSGTNGTKRFDNPVLPFNDGVYFASTEKSNIIRGWIFGTTLDSKTQSLLIVNNATNVVIKVCEFQFCNDPFLGVYYHKNNKSWMESEFRVYSSANNCTFEYVSQPFLMDLEGKQGNFKNLREFVFKNIDGYFKIYSKHTPINLVRDLPQGFSALEPLVDLPIGINITRFQTLLALHRSYLTPGDSSSGWTAGAAAYYVGYLQPRTFLLKYNENGTITDAVDCALDPLSETKCTLKSFTVEKGIYQTSNFRVQPTESIVRFPNITNLCPFGEVFNATRFASVYAWNRKRISNCVADYSVLYNSASFSTFKCYGVSPTKLNDLCFTNVYADSFVIRGDEVRQIAPGQTGKIADYNYKLPDDFTGCVIAWNSNNLDSKVGGNYNYLYRLFRKSNLKPFERDISTEIYQAGSTPCNGVEGFNCYFPLQSYGFQPTNGVGYQPYRVVVLSFELLHAPATVCGPKKSTNLVKNKCVNFNFNGLTGTGVLTESNKKFLPFQQFGRDIADTTDAVRDPQTLEILDITPCSFGGVSVITPGTNTSNQVAVLYQDVNCTEVPVAIHADQLTPTWRVYSTGSNVFQTRAGCLIGAEHVNNSYECDIPIGAGICASYQTQTNSPSGAGSVASQSIIAYTMSLGAENSVAYSNNSIAIPTNFTISVTTEILPVSMTKTSVDCTMYICGDSTECSNLLLQYGSFCTQLNRALTGIAVEQDKNTQEVFAQVKQIYKTPPIKDFGGFNFSQILPDPSKPSKRSFIEDLLFNKVTLADAGFIKQYGDCLGDIAARDLICAQKFNGLTVLPPLLTDEMIAQYTSALLAGTITSGWTFGAGAALQIPFAMQMAYRFNGIGVTQNVLYENQKLIANQFNKAIGKIQDSLSSTASALGKLQDVVNQNAQALNTLVKQLSSNFGAISSVLNDILSRLDPPEAEVQIDRLITGRLQSLQTYVTQQLIRAAEIRASANLAATKMSECVLGQSKRVDFCGKGYHLMSFPQSAPHGVVFLHVTYVPAQEKNFTTAPAICHDGKAHFPREGVFVSNGTHWFVTQRNFYEPQIITTDNTFVSGNCDVVIGIVNNTVYDPLQPELDSFKEELDKYFKNHTSPDVDLGDISGINASVVNIQKEIDRLNEVAKNLNESLIDLQELGKYEQYIKGSGRENLYFQGGGGSGYIPEAPRDGQAYVRKDGEWVLLSTFLGHHHHHHHH

SEQ ID NO: 1863 - protein, 1281 aa, Artificial Sequence
  Description of Artificial Sequence: Synthetic polypeptide
MGILPSPGMPALLSLVSLLSVLLMGCVAETGTQCVNLTTRTQLPPAYTNSFTRGVYYPDKVFRSDVLHSTQDLFLPFFSNVTWFHAIHVSGTNGTKDFDNPVLPFNDGVYFASTEKSNIIRGWIFGTTLDSKTQSLLIVNNATNVVIKVCEFQFCENPFLGVYYHKNNKSWMEKEFRVYSSANNCTFEYVSQPFLMDLGGKQGNFKWLREFVFKNIDGYFKIYSKHTPINLVRDLPQGFSALEPLMDLPIGINITRFQTLLALHRSYLTPGDSSSGWTAGAAAYYVGYLQPRTFLLKYNENGTITDAVDCALDPLSETKCTLKSFTVEKGIYQTSNFRVQPTESIVRFPNITNLCPFGEVFNATRFASVYAWNRKRISNCVADYSVLYNSASFSTFKCYGVSPTKLNDLCFTNVYADSFVIRGDEVRQIAPGQTGKIADYNYKLPDDFTGCVIAWNSNNLDSKVGGNYNYLYRLFRKSNLKPFERDISTEIYQAGSTPCNGVEGFNCYFPLQSYGFQPTNGVGYQPYRVVVLSFELLHAPATVCGPKKSTNLVKNKCVNFNFNGLTGTGVLTESNKKFLPFQQFGRDIADNTDAVRDPQTLEILDITPCSFGGVSVITPGTNTSNQVAVLYQDVNCTEVPNAIHADQLTPTWRVYSTGSNVFQTRAGCLIGAEHVNNSYECDIPIGAGICASYQTQTNSPSGAGSVASQSIIAYTMSLGAENSVAYSNNSIAIPTNFTISVTTEILPVSMTKTSVDCTMYICGDSTECSNLLLQYGSFCTQLNRALQGIAREQDKNTQEVFAQVKQIYKTPPIKDFGGFNFSQILPDPSKPSKRSFIEDLLFNKVTLADAGFIKQYGDCLGDIAARDLICAQKFNGLTVLPPLLTDEMIAQYTSALLAGTITSGWTFGAGAALQIPFAMQMAYRFNGIGVTQNVLYENQKLIANQFNKAIGKIQDSLSSTASALGKLQDVVNQNAQALNTLVKQLSSNFGAISSVLNDILSRLDPPEAEVQIDRLITGRLQSLQTYVTQQLIRAAEIRASANLAATKMSECVLGQSKRVDFCGKGYHLMSFPQSAPHGVVFLHVTYVPAQEKNFTTAPAICHDGKAFFPREGVFVSNGTQWFVTQRNFYEPQIITTDNTFVSGNCDVVIGIVNNTVYDPLQPELDSFKEELDKYFKNHTSPDVDLGDISGINASVVNIQKEIDRLNEVAKNLNESLIDLQELGKYEQYIKGSGRENLYFQGGGGSGYIPEAPRDGQAYVRKDGEWVLLSTFLGHHHHHHHH

SEQ ID NO: 1864 - protein, 1281 aa, Artificial Sequence
  Description of Artificial Sequence: Synthetic polypeptide
MGILPSPGMPALLSLVSLLSVLLMGCVAETGTQCVNLTTRTQLPPAYTNSFTRGVYYPDKVFRSSVLHSTQDLFLPFFSNVTWFHAIHVSGTNGTKRFDNPVLPFNDGVYFASTEKSNIIRGWIFGTTLDSKTQSLLIVNNATNVVIKVCEFQFCNDPFLGVYYHKNNKSWMESEFRVYSSANNCTFEYVSQPFLMDLEGKQGNFKNLREFVFKNIDGYFKIYSKHTPINLVRDLPQGFSALEPLVDLPIGINITRFQTLLALHRSYLTPGDSSSGWTAGAAAYYVGYLQPRTFLLKYNENGTITDAVDCALDPLSETKCTLKSFTVEKGIYQTSNFRVQPTESIVRFPNITNLCPFGEVFNATRFASVYAWNRKRISNCVADYSVLYNSASFSTFKCYGVSPTKLNDLCFTNVYADSFVIRGDEVRQIAPGQTGKIADYNYKLPDDFTGCVIAWNSNNLDSKVGGNYNYLYRLFRKSNLKPFERDISTEIYQAGSTPCNGVEGFNCYFPLQSYGFQPTNGVGYQPYRVVVLSFELLHAPATVCGPKKSTNLVKNKCVNFNFNGLTGTGVLTESNKKFLPFQQFGRDIADTTDAVRDPQTLEILDITPCSFGGVSVITPGTNTSNQVAVLYQDVNCTEVPVAIHADQLTPTWRVYSTGSNVFQTRAGCLIGAEHVNNSYECDIPIGAGICASYQTQTNSPSGAGSVASQSIIAYTMSLGAENSVAYSNNSIAIPTNFTISVTTEILPVSMTKTSVDCTMYICGDSTECSNLLLQYGSFCTQLNRALTGIAVEQDKNTQEVFAQVKQIYKTPPIKDFGGFNFSQILPDPSKPSKRSFIEDLLFNKVTLADAGFIKQYGDCLGDIAARDLICAQKFNGLTVLPPLLTDEMIAQYTSALLAGTITSGWTFGAGAALQIPFAMQMAYRFNGIGVTQNVLYENQKLIANQFNSAIGKIQDSLSSTASALGKLQDVVNQNAQALNTLVKQLSSNFGAISSVLNDILSRLDPPEAEVQIDRLITGRLQSLQTYVTQQLIRAAEIRASANLAATKMSECVLGQSKRVDFCGKGYHLMSFPQSAPHGVVFLHVTYVPAQEKNFTTAPAICHDGKAHFPREGVFVSNGTHWFVTQRNFYEPQVITTDNTFVSGNCDVVIGIVNNTVYDPLQPELDSFKEELDKYFKNHTSPDVDLGDISGINASVVNIQKEIDRLNEVAKNLNESLIDLQELGKYEQYIKGSGRENLYFQGGGGSGYIPEAPRDGQAYVRKDGEWVLLSTFLGHHHHHHHH

SEQ ID NO: 1865 - protein, 1281 aa, Artificial Sequence
  Description of Artificial Sequence: Synthetic polypeptide
MGILPSPGMPALLSLVSLLSVLLMGCVAETGTQCVNLTTRTQLPPAYTNSFTRGVYYPDKVFRSSVLHSTQDLFLPFFSNVTWFHAIHVSGTNGTKRFDNPVLPFNDGVYFASTEKSNIIRGWIFGTTLDSKTQSLLIVNNATNVVIKVCEFQFCNDPFLGVYYHKNNKSWMESEFRVYSSANNCTFEYVSQPFLMDLEGKQGNFKNLREFVFKNIDGYFKIYSKHTPINLVRDLPQGFSALEPLVDLPIGINITRFQTLLALHRSYLTPGDSSSGWTAGAAAYYVGYLQPRTFLLKYNENGTITDAVDCALDPLSETKCTLKSFTVEKGIYQTSNFRVQPTESIVRFPNITNLCPFGEVFNATRFASVYAWNRKRISNCVADYSVLYNSASFSTFKCYGVSPTKLNDLCFTNVYADSFVIRGDEVRQIAPGQTGKIADYNYKLPDDFTGCVIAWNSNNLDSKVGGNYNYLYRLFRKSNLKPFERDISTEIYQAGSTPCNGVEGFNCYFPLQSYGFQPTNGVGYQPYRVVVLSFELLHAPATVCGPKKSTNLVKNKCVNFNFNGLTGTGVLTESNKKFLPFQQFGRDIADTTDAVRDPQTLEILDITPCSFGGVSVITPGTNTSNQVAVLYQDVNCTEVPVAIHADQLTPTWRVYSTGSNVFQTRAGCLIGAEHVNNSYECDIPIGAGICASYQTQTNSPSGAGSVASQSIIAYTMSLGAENSVAYSNNSIAIPTNFNISVTTEILPVSMTKTSVDCTMYICGDSTECSNLLLQYGSFCTQLNRALTGIAVEQDKNTQEVFAQVKQIYKTPPIKDFGGFNFSQILPDPSKPSKRSFIEDLLFNKVTLADAGFIKQYGDCLGDIAARDLICAQKFNGLTVLPPLLTDEMIAQYTSALLAGTITSGWTFGAGAALQIPFAMQMAYRFNGIGVTQNVLYENQKLIANQFNSAIGKIQDSLSSTASALGKLQDVVNQNAQALNTLVKQLSSNFGAISSVLNDILSRLDPPEAEVQIDRLITGRLQSLQTYVTQQLIRAAEIRASANLAATKMSECVLGQSKRVDFCGKGYHLMSFPQSAPHGVVFLHVTYVPAQEKNFTTAPAICHDGKAHFPREGVFVSNGTHWFVTQRNFYEPQIITTDNTFVSGNCDVVIGIVNNTVYDPLQPELDSFKEELDKYFKNHTSPDVDLGDISGINASVVNIQKEIDRLNEVAKNLNESLIDLQELGKYEQYIKGSGRENLYFQGGGGSGYIPEAPRDGQAYVRKDGEWVLLSTFLGHHHHHHHH

SEQ ID NO: 1866 - protein, 1281 aa, Artificial Sequence
  Description of Artificial Sequence: Synthetic polypeptide
MGILPSPGMPALLSLVSLLSVLLMGCVAETGTQCVNLTTRTQLPPAYTNSFTRGVYYPDKVFRSSVLHSTQDLFLPFFSNVTWFHAIHVSGTNGTKRFDNPVLPFNDGVYFASTEKSNIIRGWIFGTTLDSKTQSLLIVNNATNVVIKVCEFQFCNDPFLGVYYHKNNKSWMESEFRVYSSANNCTFEYVSQPFLYDLEGKQGNFKNLREFVFKNIDGYFKIYSKHTPINLVRDLPQGFSALEPLVDLPIGINITRFQTLLALHRSYLTPGDSSSGWTAGAAAYYVGYLQPRTFLLKYNENGTITDAVDCALDPLSETKCTLKSFTVEKGIYQTSNFRVQPTESIVRFPNITNLCPFGEVFNATRFASVYAWNRKRISNCVADYSVLYNSASFSTFKCYGVSPTKLNDLCFTNVYADSFVIRGDEVRQIAPGQTGKIADYNYKLPDDFTGCVIAWNSNNLDSKVGGNYNYLYRLFRKSNLKPFERDISTEIYQAGSTPCNGVEGFNCYFPLQSYGFQPTNGVGYQPYRVVVLSFELLHAPATVCGPKKSTNLVKNKCVNFNFNGLTGTGVLTESNKKFLPFQQFGRDIADTTDAVRDPQTLEILDITPCSFGGVSVITPGTNTSNQVAVLYQDVNCTEVPVAIHADQLTPTWRVYSTGSNVFQTRAGCLIGAEHVNNSYECDIPIGAGICASYQTQTNSPSGAGSVASQSIIAYTMSLGAENSVAYSNNSIAIPTNFTISVTTEILPVSMTKTSVDCTMYICGDSTECSNLLLQYGSFCTQLNRALTGIAVEQDKNTQEVFAQVKQIYKTPPIKDFGGFNFSQILPDPSKPSKRSFIEDLLFNKVTLADAGFIKQYGDCLGDIAARDLICAQKFNGLTVLPPLLTDEMIAQYTSALLAGTITSGWTFGAGAALQIPFAMQMAYRFNGIGVTQNVLYENQKLIANQFNSAIGKIQDSLSSTASALGKLQDVVNQNAQALNTLVKQLSSNFGAISSVLNDILSRLDPPEAEVQIDRLITGRLQSLQTYVTQQLIRAAEIRASANLAATKMSECVLGQSKRVDFCGKGYHLMSFPQSAPHGVVFLHVTYVPAQEKNFTTAPAICHDGKAHFPREGVFVSNGTHWFVTQRNFYEPQIITTDNTFVSGNCDVVIGIVNNTVYDPLQPELDSFKEELDKYFKNHTSPDVDLGDISGINASVVNIQKEIDRLNEVAKNLNESLIDLQELGKYEQYIKGSGRENLYFQGGGGSGYIPEAPRDGQAYVRKDGEWVLLSTFLGHHHHHHHH

SEQ ID NO: 1867 - protein, 1281 aa, Artificial Sequence
  Description of Artificial Sequence: Synthetic polypeptide
MGILPSPGMPALLSLVSLLSVLLMGCVAETGTQCVNLTTRTQLPPAYTNSFTRGVYYPDKVFRSSVLHSTQDLFLPFFSNVTWFHAIHVSGTNGTKRFDNPVLPFNDGVYFASTEKSNIIRGWIFGTTLDSKTQSLLIVNNATNVVIKVCEFQFCNDPFLGVYYHKNNKSWMESEFRVYSSANNCTFEYVSQPFLPDLEGKQGNFKNLREFVFKNIDGYFKIYSKHTPINLVRDLPQGFSALEPLVDLPIGINITRFQTLLALHRSYLTPGDSSSGWTAGAAAYYVGYLQPRTFLLKYNENGTITDAVDCALDPLSETKCTLKSFTVEKGIYQTSNFRVQPTESIVRFPNITNLCPFGEVFNATRFASVYAWNRKRISNCVADYSVLYNSASFSTFKCYGVSPTKLNDLCFTNVYADSFVIRGDEVRQIAPGQTGKIADYNYKLPDDFTGCVIAWNSNNLDSKVGGNYNYLYRLFRKSNLKPFERDISTEIYQAGSTPCNGVEGFNCYFPLQSYGFQPTNGVGYQPYRVVVLSFELLHAPATVCGPKKSTNLVKNKCVNFNFNGLTGTGVLTESNKKFLPFQQFGRDIADTTDAVRDPQTLEILDITPCSFGGVSVITPGTNTSNQVAVLYQDVNCTEVPVAIHADQLTPTWRVYSTGSNVFQTRAGCLIGAEHVNNSYECDIPIGAGICASYQTQTNSPSGAGSVASQSIIAYTMSLGAENSVAYSNNSIAIPTNFTISVTTEILPVSMTKTSVDCTMYICGDSTECSNLLLQYGSFCTQLNRALTGIAVEQDKNTQEVFAQVKQIYKTPPIKDFGGFNFSQILPDPSKPSKRSFIEDLLFNKVTLADAGFIKQYGDCLGDIAARDLICAQKFNGLTVLPPLLTDEMIAQYTSALLAGTITSGWTFGAGAALQIPFAMQMAYRFNGIGVTQNVLYENQKLIANQFNSAIGKIQDSLSSTASALGKLQDVVNQNAQALNTLVKQLSSNFGAISSVLNDILSRLDPPEAEVQIDRLITGRLQSLQTYVTQQLIRAAEIRASANLAATKMSECVLGQSKRVDFCGKGYHLMSFPQSAPHGVVFLHVTYVPAQEKNFTTAPAICHDGKAHFPREGVFVSNGTHWFVTQRNFYEPQIITTDNTFVSGNCDVVIGIVNNTVYDPLQPELDSFKEELDKYFKNHTSPDVDLGDISGINASVVNIQKEIDRLNEVAKNLNESLIDLQELGKYEQYIKGSGRENLYFQGGGGSGYIPEAPRDGQAYVRKDGEWVLLSTFLGHHHHHHHH

SEQ ID NO: 1868 - protein, 1281 aa, Artificial Sequence
  Description of Artificial Sequence: Synthetic polypeptide
MGILPSPGMPALLSLVSLLSVLLMGCVAETGTQCVNLTTRTQLPPAYTNSFTRGVYYPDKVFRSSVLHSTQDLFLPFFSNVTWFHAIHVSGTNGTKRFDNPVLPFNDGVYFASTEKSNIIRGWIFGTTLDSKTQSLLIVNNATNVVIKVCEFQFCNDPFLGVYYHKNNKSWMETEFRVYSSANNCTFEYVSQPFLMDLEGKQGNFKNLREFVFKNIDGYFKIYSKHTPINLVRDLPQGFSALEPLVDLPIGINITRFQTLLALHRSYLTPGDSSSGWTAGAAAYYVGYLQPRTFLLKYNENGTITDAVDCALDPLSETKCTLKSFTVEKGIYQTSNFRVQPTESIVRFPNITNLCPFGEVFNATRFASVYAWNRKRISNCVADYSVLYNSASFSTFKCYGVSPTKLNDLCFTNVYADSFVIRGDEVRQIAPGQTGKIADYNYKLPDDFTGCVIAWNSNNLDSKVGGNYNYLYRLFRKSNLKPFERDISTEIYQAGSTPCNGVEGFNCYFPLQSYGFQPTNGVGYQPYRVVVLSFELLHAPATVCGPKKSTNLVKNKCVNFNFNGLTGTGVLTESNKKFLPFQQFGRDIADTTDAVRDPQTLEILDITPCSFGGVSVITPGTNTSNQVAVLYQDVNCTEVPVAIHADQLTPTWRVYSTGSNVFQTRAGCLIGAEHVNNSYECDIPIGAGICASYQTQTNSPSGAGSVASQSIIAYTMSLGAENSVAYSNNSIAIPTNFTISVTTEILPVSMTKTSVDCTMYICGDSTECSNLLLQYGSFCTQLNRALTGIAVEQDKNTQEVFAQVKQIYKTPPIKDFGGFNFSQILPDPSKPSKRSFIEDLLFNKVTLADAGFIKQYGDCLGDIAARDLICAQKFNGLTVLPPLLTDEMIAQYTSALLAGTITSGWTFGAGAALQIPFAMQMAYRFNGIGVTQNVLYENQKLIANQFNSAIGKIQDSLSSTASALGKLQDVVNQNAQALNTLVKQLSSNFGAISSVLNDILSRLDPPEAEVQIDRLITGRLQSLQTYVTQQLIRAAEIRASANLAATKMSECVLGQSKRVDFCGKGYHLMSFPQSAPHGVVFLHVTYVPAQEKNFTTAPAICHDGKAHFPREGVFVSNGTHWFVTQRNFYEPQIITTDNTFVSGNCDVVIGIVNNTVYDPLQPELDSFKEELDKYFKNHTSPDVDLGDISGINASVVNIQKEIDRLNEVAKNLNESLIDLQELGKYEQYIKGSGRENLYFQGGGGSGYIPEAPRDGQAYVRKDGEWVLLSTFLGHHHHHHHH

SEQ ID NO: 1869 - protein, 1281 aa, Artificial Sequence
  Description of Artificial Sequence: Synthetic polypeptide
MGILPSPGMPALLSLVSLLSVLLMGCVAETGTQCVNLTTRTQLPPAYTNSFTRGVYYPDKVFRSDVLHSTQDLFLPFFSNVTWFHAIHVSGTNGTKRFDNPVLPFNDGVYFASTEKSNIIRGWIFGTTLDSKTQSLLIVNNATNVVIKVCEFQFCDNPFLGVYYHKNNKSWMEKEFRVYSSANNCTFEYVSQPFLMDLGGKQGNFKWLREFVFKNIDGYFKIYSKHTPINLVRDLPQGFSALEPLMDLPIGINITRFQTLLALHRSYLTPGDSSSGWTAGAAAYYVGYLQPRTFLLKYNENGTITDAVDCALDPLSETKCTLKSFTVEKGIYQTSNFRVQPTESIVRFPNITNLCPFGEVFNATRFASVYAWNRKRISNCVADYSVLYNSASFSTFKCYGVSPTKLNDLCFTNVYADSFVIRGDEVRQIAPGQTGKIADYNYKLPDDFTGCVIAWNSNNLDSKVGGNYNYLYRLFRKSNLKPFERDISTEIYQAGSTPCNGVEGFNCYFPLQSYGFQPTNGVGYQPYRVVVLSFELLHAPATVCGPKKSTNLVKNKCVNFNFNGLTGTGVLTESNKKFLPFQQFGRDIADNTDAVRDPQTLEILDITPCSFGGVSVITPGTNTSNQVAVLYQDVNCTEVPNAIHADQLTPTWRVYSTGSNVFQTRAGCLIGAEHVNNSYECDIPIGAGICASYQTQTNSPSGAGSVASQSIIAYTMSLGAENSVAYSNNSIAIPTNFTISVTTEILPVSMTKTSVDCTMYICGDSTECSNLLLQYGSFCTQLNRALQGIAREQDKNTQEVFAQVKQIYKTPPIKDFGGFNFSQILPDPSKPSKRSFIEDLLFNKVTLADAGFIKQYGDCLGDIAARDLICAQKFNGLTVLPPLLTDEMIAQYTSALLAGTITSGWTFGAGAALQIPFAMQMAYRFNGIGVTQNVLYENQKLIANQFNKAIGKIQDSLSSTASALGKLQDVVNQNAQALNTLVKQLSSNFGAISSVLNDILSRLDPPEAEVQIDRLITGRLQSLQTYVTQQLIRAAEIRASANLAATKMSECVLGQSKRVDFCGKGYHLMSFPQSAPHGVVFLHVTYVPAQEKNFTTAPAICHDGKAFFPREGVFVSNGTQWFVTQRNFYEPQIITTDNTFVSGNCDVVIGIVNNTVYDPLQPELDSFKEELDKYFKNHTSPDVDLGDISGINASVVNIQKEIDRLNEVAKNLNESLIDLQELGKYEQYIKGSGRENLYFQGGGGSGYIPEAPRDGQAYVRKDGEWVLLSTFLGHHHHHHHH

SEQ ID NO: 1870 - protein, 1281 aa, Artificial Sequence
  Description of Artificial Sequence: Synthetic polypeptide
MGILPSPGMPALLSLVSLLSVLLMGCVAETGTQCVNLTTRTQLPPAYTNSFTRGVYYPDKVFRSSVLHSTQDLFLPFFSNVTWFHAIHVSGTNGTKRFDNPVLPFNDGVYFASTEKSNIIRGWIFGTTLDSKTQSLLIVNNATNVVIKVCEFQFCNDPFLGVYYHKNNKSWMESEFRVYSSANNCTFEYVSQPFLMDLEGKQGNFKNLREFVFKNIDGYFKIYSKHTPINLVRDLPQGFSALEPLVDLPIGINITRFQTLLALHRSYLTPGDSSSGWTAGAAAYYVGYLQPRTFLLKYNENGTITDAVDCALDPLSETKCTLKSFTVEKGIYQTSNFRVQPTESIVRFPNITNLCPFGEVFNATRFASVYAWNRKRISNCVADYSVLYNSASFSTFKCYGVSPTKLNDLCFTNVYADSFVIRGDEVRQIAPGQTGKIADYNYKLPDDFTGCVIAWNSNNLDSKVGGNYNYLYRLFRKSNLKPFERDISTEIYQAGSTPCNGVEGFNCYFPLQSYGFQPTNGVGYQPYRVVVLSFELLHAPATVCGPKKSTNLVKNKCVNFNFNGLTGTGVLTESNKKFLPFQQFGRDIADTTDAVRDPQTLEILDITPCSFGGVSVITPGTNTSNQVAVLYQDVNCTEVPVAIHADQLTPTWRVYSTGSNVFQTRAGCLIGAEHVNNSYECDIPIGAGICASYQTQTNSPSGAGSVASQSIIAYTMSLGAENSVAYSNNSIAIPTNFLISVTTEILPVSMTKTSVDCTMYICGDSTECSNLLLQYGSFCTQLNRALTGIAVEQDKNTQEVFAQVKQIYKTPPIKDFGGFNFSQILPDPSKPSKRSFIEDLLFNKVTLADAGFIKQYGDCLGDIAARDLICAQKFNGLTVLPPLLTDEMIAQYTSALLAGTITSGWTFGAGAALQIPFAMQMAYRFNGIGVTQNVLYENQKLIANQFNSAIGKIQDSLSSTASALGKLQDVVNQNAQALNTLVKQLSSNFGAISSVLNDILSRLDPPEAEVQIDRLITGRLQSLQTYVTQQLIRAAEIRASANLAATKMSECVLGQSKRVDFCGKGYHLMSFPQSAPHGVVFLHVTYVPAQEKNFTTAPAICHDGKAHFPREGVFVSNGTHWFVTQRNFYEPQIITTDNTFVSGNCDVVIGIVNNTVYDPLQPELDSFKEELDKYFKNHTSPDVDLGDISGINASVVNIQKEIDRLNEVAKNLNESLIDLQELGKYEQYIKGSGRENLYFQGGGGSGYIPEAPRDGQAYVRKDGEWVLLSTFLGHHHHHHHH

SEQ ID NO: 1871 - protein, 1281 aa, Artificial Sequence
  Description of Artificial Sequence: Synthetic polypeptide
MGILPSPGMPALLSLVSLLSVLLMGCVAETGTQCVNLTTRTQLPPAYTNSFTRGVYYPDKVFRSSVLHSTQDLFLPFFSNVTWFHAIHVSGTNGTKRFDNPVLPFNDGVYFASTEKSNIIRGWIFGTTLDSKTQSLLIVNNATNVVIKVCEFQFCNDPFLGVYYHKNNKSWMESEFRVYSSANNCTFEYVSQPFLMDLEGKQGNFKNLREFVFKNIDGYFKIYSKHTPINLVRDLPQGFSALEPLVDLPIGINITRFQTLLSLHRSYLTPGDSSSGWTAGAAAYYVGYLQPRTFLLKYNENGTITDAVDCALDPLSETKCTLKSFTVEKGIYQTSNFRVQPTESIVRFPNITNLCPFGEVFNATRFASVYAWNRKRISNCVADYSVLYNSASFSTFKCYGVSPTKLNDLCFTNVYADSFVIRGDEVRQIAPGQTGKIADYNYKLPDDFTGCVIAWNSNNLDSKVGGNYNYLYRLFRKSNLKPFERDISTEIYQAGSTPCNGVEGFNCYFPLQSYGFQPTNGVGYQPYRVVVLSFELLHAPATVCGPKKSTNLVKNKCVNFNFNGLTGTGVLTESNKKFLPFQQFGRDIADTTDAVRDPQTLEILDITPCSFGGVSVITPGTNTSNQVAVLYQDVNCTEVPVAIHADQLTPTWRVYSTGSNVFQTRAGCLIGAEHVNNSYECDIPIGAGICASYQTQTNSPSGAGSVASQSIIAYTMSLGAENSVAYSNNSIAIPTNFTISVTTEILPVSMTKTSVDCTMYICGDSTECSNLLLQYGSFCTQLNRALTGIAVEQDKNTQEVFAQVKQIYKTPPIKDFGGFNFSQILPDPSKPSKRSFIEDLLFNKVTLADAGFIKQYGDCLGDIAARDLICAQKFNGLTVLPPLLTDEMIAQYTSALLAGTITSGWTFGAGAALQIPFAMQMAYRFNGIGVTQNVLYENQKLIANQFNSAIGKIQDSLSSTASALGKLQDVVNQNAQALNTLVKQLSSNFGAISSVLNDILSRLDPPEAEVQIDRLITGRLQSLQTYVTQQLIRAAEIRASANLAATKMSECVLGQSKRVDFCGKGYHLMSFPQSAPHGVVFLHVTYVPAQEKNFTTAPAICHDGKAHFPREGVFVSNGTHWFVTQRNFYEPQIITTDNTFVSGNCDVVIGIVNNTVYDPLQPELDSFKEELDKYFKNHTSPDVDLGDISGINASVVNIQKEIDRLNEVAKNLNESLIDLQELGKYEQYIKGSGRENLYFQGGGGSGYIPEAPRDGQAYVRKDGEWVLLSTFLGHHHHHHHH

SEQ ID NO: 1872 - protein, 1281 aa, Artificial Sequence
  Description of Artificial Sequence: Synthetic polypeptide
MGILPSPGMPALLSLVSLLSVLLMGCVAETGTQCVNLTTRTQLPPAYTNSFTRGVYYPDKVFRSDVLHSTQDLFLPFFSNVTWFHAIHVSGTNGTKRFDNPVLPFNDGVYFASTEKSNIIRGWIFGTTLDSKTQSLLIVNNATNVVIKVCEFQFCDNPFLGVYYHKNNKSWMEKEFRVYSSANNCTFEYVSQPFLMDLGGKQGNFKWLREFVFKNIDGYFKIYSKHTPINLVRDLPQGFSALEPLMDLPIGINITRFQTLLALHRSYLTPGDSSSGWTAGAAAYYVGYLQPRTFLLKYNENGTITDAVDCALDPLSETKCTLKSFTVEKGIYQTSNFRVQPTESIVRFPNITNLCPFGEVFNATRFASVYAWNRKRISNCVADYSVLYNSASFSTFKCYGVSPTKLNDLCFTNVYADSFVIRGDEVRQIAPGQTGKIADYNYKLPDDFTGCVIAWNSNNLDSKVGGNYNYLYRLFRKSNLKPFERDISTEIYQAGSTPCNGVEGFNCYFPLQSYGFQPTNGVGYQPYRVVVLSFELLHAPATVCGPKKSTNLVKNKCVNFNFNGLTGTGVLTESNKKFLPFQQFGRDIADNTDAVRDPQTLEILDITPCSFGGVSVITPGTNTSNQVAVLYQDVNCTEVPNAIHADQLTPTWRVYSTGSNVFQTRAGCLIGAEHVNNSYECDIPIGAGICASYQTQTNSPSGAGSVASQSIIAYTMSLGAENSVAYSNNSIAIPTNFTISVTTEILPVSMTKTSVDCTMYICGDSTECSNLLLQYGSFCTQLNRALQGIAREQDKNTQEVFAQVKQIYKTPPIKDFGGFNFSQILPDPSKPSKRSFIEDLLFNKVTLADAGFIKQYGDCLGDIAARDLICAQKFNGLTVLPPLLTDEMIAQYTSALLAGTITSGWTFGAGAALQIPFAMQMAYRFNGIGVTQNVLYENQKLIANQFNQAIGKIQDSLSSTASALGKLQDVVNQNAQALNTLVKQLSSNFGAISSVLNDILSRLDPPEAEVQIDRLITGRLQSLQTYVTQQLIRAAEIRASANLAATKMSECVLGQSKRVDFCGKGYHLMSFPQSAPHGVVFLHVTYVPAQEKNFTTAPAICHDGKAFFPREGVFVSNGTQWFVTQRNFYEPQIITTDNTFVSGNCDVVIGIVNNTVYDPLQPELDSFKEELDKYFKNHTSPDVDLGDISGINASVVNIQKEIDRLNEVAKNLNESLIDLQELGKYEQYIKGSGRENLYFQGGGGSGYIPEAPRDGQAYVRKDGEWVLLSTFLGHHHHHHHH

SEQ ID NO: 1873 - protein, 1281 aa, Artificial Sequence
  Description of Artificial Sequence: Synthetic polypeptide
MGILPSPGMPALLSLVSLLSVLLMGCVAETGTQCVNLTTRTQLPPAYTNSFTRGVYYPDKVFRSSVLHSTQDLFLPFFSNVTWFHAIHVSGTNGTKRFDNPVLPFNDGVYFASTEKSNIIRGWIFGTTLDSKTQSLLIVNNATNVVIKVCEFQFCNDPFLGVYYHKNNKSWMESEFRVYSSANNCTFEYVSQPFLMDLEGKQGNFKNLREFVFKNIDGYFKIYSKHTPINLVRDLPQGFSALEPLVDLPIGINITRFQTLLALHRSYLTPGDSSSGWTAGAAAYYVGYLQPRTFLLKYNENGTITDAVDCALDPLSETKCTLKSFTVEKGIYQTSNFRVQPTESIVRFPNITNLCPFGEVFNATRFASVYAWNRKRISNCVADYSVLYNSASFSTFKCYGVSPTKLNDLCFTNVYADSFVIRGDEVRQIAPGQTGKIADYNYKLPDDFTGCVIAWNSNNLDSKVGGNYNYLYRLFRKSNLKPFERDISTEIYQAGSTPCNGVEGFNCYFPLQSYGFQPTNGVGYQPYRVVVLSFELLHAPATVCGPKKSTNLVKNKCVNFNFNGLTGTGVLTESNKKFLPFQQFGRDIADTTDAVRDPQTLEILDITPCSFGGVSVITPGTNTSNQVAVLYQDVNCTEVPVAIHADQLTPTWRVYSTGSNVFQTRAGCLIGAEHVNNSYECDIPIGAGICASYQTQTNSPSGAGSVASQSIIAYTMSLGAENSVAYSNNSIAIPTNFTISVTTEILPVSMTKTSVDCTMYICGDSTECSNLLLQYGSFCTQLNRALTGIAVEQDKNTQEVFAQVKQIYKTPPIKDFGGFNFSQILPDPSKPSKRSFIEDLLFNKDTLADAGFIKQYGDCLGDIAARDLICAQKFNGLTVLPPLLTDEMIAQYTSALLAGTITSGWTFGAGAALQIPFAMQMAYRFNGIGVTQNVLYENQKLIANQFNSAIGKIQDSLSSTASALGKLQDVVNQNAQALNTLVKQLSSNFGAISSVLNDILSRLDPPEAEVQIDRLITGRLQSLQTYVTQQLIRAAEIRASANLAATKMSECVLGQSKRVDFCGKGYHLMSFPQSAPHGVVFLHVTYVPAQEKNFTTAPAICHDGKAHFPREGVFVSNGTHWFVTQRNFYEPQIITTDNTFVSGNCDVVIGIVNNTVYDPLQPELDSFKEELDKYFKNHTSPDVDLGDISGINASVVNIQKEIDRLNEVAKNLNESLIDLQELGKYEQYIKGSGRENLYFQGGGGSGYIPEAPRDGQAYVRKDGEWVLLSTFLGHHHHHHHH

SEQ ID NO: 1874 - protein, 1281 aa, Artificial Sequence
  Description of Artificial Sequence: Synthetic polypeptide
MGILPSPGMPALLSLVSLLSVLLMGCVAETGTQCVNLTTRTQLPPAYTNSFTRGVYYPDKVFRSSVLHSTQDLFLPFFSNVTWFHAIHVSGTNGTKRFDNPVLPFNDGVYFASTEKSNIIRGWIFGTTLDSKTQSLLIVNNATNVVIKVCEFQFCNDPFLGVYYHKNNKSWMESEFRVYSSANNCTFEYVSQPFLMDLEGKQGNFKNLREFVFKNIDGYFKIYSKHTPINLVRDLPQGFSALEPLVDLPIGINITRFQTLLALHRSYLTPGDSSSGWTAGAAAYYVGYLQPRTFLLKYNENGTITDAVDCALDPLSETKCTLKSFTVEKGIYQTSNFRVQPTESIVRFPNITNLCPFGEVFNATRFASVYAWNRKRISNCVADYSVLYNSASFSTFKCYGVSPTKLNDLCFTNVYADSFVIRGDEVRQIAPGQTGKIADYNYKLPDDFTGCVIAWNSNNLDSKVGGNYNYLYRLFRKSNLKPFERDISTEIYQAGSTPCNGVEGFNCYFPLQSYGFQPTNGVGYQPYRVVVLSFELLHAPATVCGPKKSTNLVKNKCVNFNFNGLTGTGVLTESNKKFLPFQQFGRDIADTTDAVRDPQTLEILDITPCSFGGVSVITPGTNTSNQVAVLYQDVNCTEVPVAIHADQLTPTWRVYSTGSNVFQTRAGCLIGAEHVNNSYECDIPIGAGICASYQTQTNSPSGAGSVASQSIIAYTMSLGAENSVAYSNNSIAIPTNFTISVTTEILPVSMTKTSVDCTMYICGDSTECSNLLLQYGSFCTQLNRALTGIANEQDKNTQEVFAQVKQIYKTPPIKDFGGFNFSQILPDPSKPSKRSFIEDLLFNKVTLADAGFIKQYGDCLGDIAARDLICAQKFNGLTVLPPLLTDEMIAQYTSALLAGTITSGWTFGAGAALQIPFAMQMAYRFNGIGVTQNVLYENQKLIANQFNSAIGKIQDSLSSTASALGKLQDVVNQNAQALNTLVKQLSSNFGAISSVLNDILSRLDPPEAEVQIDRLITGRLQSLQTYVTQQLIRAAEIRASANLAATKMSECVLGQSKRVDFCGKGYHLMSFPQSAPHGVVFLHVTYVPAQEKNFTTAPAICHDGKAHFPREGVFVSNGTHWFVTQRNFYEPQIITTDNTFVSGNCDVVIGIVNNTVYDPLQPELDSFKEELDKYFKNHTSPDVDLGDISGINASVVNIQKEIDRLNEVAKNLNESLIDLQELGKYEQYIKGSGRENLYFQGGGGSGYIPEAPRDGQAYVRKDGEWVLLSTFLGHHHHHHHH

SEQ ID NO: 1875 - protein, 1281 aa, Artificial Sequence
  Description of Artificial Sequence: Synthetic polypeptide
MGILPSPGMPALLSLVSLLSVLLMGCVAETGTQCVNLTTRTQLPPAYTNSFTRGVYYPDKVFRSSVLHSTQDLFLPFFSNVTWFHAIHVSGTNGTKRFDNPVLPFNDGVYFASTEKSNIIRGWIFGTTLDSKTQSLLIVNNATNVVIKVCEFQFCNDPFLGVYYHKNNKSWMESEFRVYSSANNCTFEYVSQPFLIDLEGKQGNFKNLREFVFKNIDGYFKIYSKHTPINLVRDLPQGFSALEPLVDLPIGINITRFQTLLALHRSYLTPGDSSSGWTAGAAAYYVGYLQPRTFLLKYNENGTITDAVDCALDPLSETKCTLKSFTVEKGIYQTSNFRVQPTESIVRFPNITNLCPFGEVFNATRFASVYAWNRKRISNCVADYSVLYNSASFSTFKCYGVSPTKLNDLCFTNVYADSFVIRGDEVRQIAPGQTGKIADYNYKLPDDFTGCVIAWNSNNLDSKVGGNYNYLYRLFRKSNLKPFERDISTEIYQAGSTPCNGVEGFNCYFPLQSYGFQPTNGVGYQPYRVVVLSFELLHAPATVCGPKKSTNLVKNKCVNFNFNGLTGTGVLTESNKKFLPFQQFGRDIADTTDAVRDPQTLEILDITPCSFGGVSVITPGTNTSNQVAVLYQDVNCTEVPVAIHADQLTPTWRVYSTGSNVFQTRAGCLIGAEHVNNSYECDIPIGAGICASYQTQTNSPSGAGSVASQSIIAYTMSLGAENSVAYSNNSIAIPTNFTISVTTEILPVSMTKTSVDCTMYICGDSTECSNLLLQYGSFCTQLNRALTGIAVEQDKNTQEVFAQVKQIYKTPPIKDFGGFNFSQILPDPSKPSKRSFIEDLLFNKVTLADAGFIKQYGDCLGDIAARDLICAQKFNGLTVLPPLLTDEMIAQYTSALLAGTITSGWTFGAGAALQIPFAMQMAYRFNGIGVTQNVLYENQKLIANQFNSAIGKIQDSLSSTASALGKLQDVVNQNAQALNTLVKQLSSNFGAISSVLNDILSRLDPPEAEVQIDRLITGRLQSLQTYVTQQLIRAAEIRASANLAATKMSECVLGQSKRVDFCGKGYHLMSFPQSAPHGVVFLHVTYVPAQEKNFTTAPAICHDGKAHFPREGVFVSNGTHWFVTQRNFYEPQIITTDNTFVSGNCDVVIGIVNNTVYDPLQPELDSFKEELDKYFKNHTSPDVDLGDISGINASVVNIQKEIDRLNEVAKNLNESLIDLQELGKYEQYIKGSGRENLYFQGGGGSGYIPEAPRDGQAYVRKDGEWVLLSTFLGHHHHHHHH

SEQ ID NO: 1876 - protein, 1281 aa, Artificial Sequence
  Description of Artificial Sequence: Synthetic polypeptide
MGILPSPGMPALLSLVSLLSVLLMGCVAETGTQCVNLTTRTQLPPAYTNSFTRGVYYPDKVFRSDVLHSTQDLFLPFFSNVTWFHAIHVSGTNGTKDFDNPVLPFNDGVYFASTEKSNIIRGWIFGTTLDSKTQSLLIVNNATNVVIKVCEFQFCDDPFLGVYYHKNNKSWMEKEFRVYSSANNCTFEYVSQPFLMDLGGKQGNFKWLREFVFKNIDGYFKIYSKHTPINLVRDLPQGFSALEPLMDLPIGINITRFQTLLALHRSYLTPGDSSSGWTAGAAAYYVGYLQPRTFLLKYNENGTITDAVDCALDPLSETKCTLKSFTVEKGIYQTSNFRVQPTESIVRFPNITNLCPFGEVFNATRFASVYAWNRKRISNCVADYSVLYNSASFSTFKCYGVSPTKLNDLCFTNVYADSFVIRGDEVRQIAPGQTGKIADYNYKLPDDFTGCVIAWNSNNLDSKVGGNYNYLYRLFRKSNLKPFERDISTEIYQAGSTPCNGVEGFNCYFPLQSYGFQPTNGVGYQPYRVVVLSFELLHAPATVCGPKKSTNLVKNKCVNFNFNGLTGTGVLTESNKKFLPFQQFGRDIADNTDAVRDPQTLEILDITPCSFGGVSVITPGTNTSNQVAVLYQDVNCTEVPNAIHADQLTPTWRVYSTGSNVFQTRAGCLIGAEHVNNSYECDIPIGAGICASYQTQTNSPSGAGSVASQSIIAYTMSLGAENSVAYSNNSIAIPTNFTISVTTEILPVSMTKTSVDCTMYICGDSTECSNLLLQYGSFCTQLNRALQGIAQEQDKNTQEVFAQVKQIYKTPPIKDFGGFNFSQILPDPSKPSKRSFIEDLLFNKVTLADAGFIKQYGDCLGDIAARDLICAQKFNGLTVLPPLLTDEMIAQYTSALLAGTITSGWTFGAGAALQIPFAMQMAYRFNGIGVTQNVLYENQKLIANQFNKAIGKIQDSLSSTASALGKLQDVVNQNAQALNTLVKQLSSNFGAISSVLNDILSRLDPPEAEVQIDRLITGRLQSLQTYVTQQLIRAAEIRASANLAATKMSECVLGQSKRVDFCGKGYHLMSFPQSAPHGVVFLHVTYVPAQEKNFTTAPAICHDGKAFFPREGVFVSNGTQWFVTQRNFYEPQIITTDNTFVSGNCDVVIGIVNNTVYDPLQPELDSFKEELDKYFKNHTSPDVDLGDISGINASVVNIQKEIDRLNEVAKNLNESLIDLQELGKYEQYIKGSGRENLYFQGGGGSGYIPEAPRDGQAYVRKDGEWVLLSTFLGHHHHHHHH

SEQ ID NO: 1877 - protein, 1281 aa, Artificial Sequence
  Description of Artificial Sequence: Synthetic polypeptide
MGILPSPGMPALLSLVSLLSVLLMGCVAETGTQCVNLTTRTQLPPAYTNSFTRGVYYPDKVFRSSVLHSTQDLFLPFFSNVTWFHAIHVSGTNGTKRFDNPVLPFNDGVYFASTEKSNIIRGWIFGTTLDSKTQSLLIVNNATNVVIKVCEFQFCNDPFLGVYYHKNNKSWMESEFRVYSSANNCTFEYVSQPFLMDLEGKQGNFKNLREFVFKNIDGYFKIYSKHTPINLVRDLPQGFSALEPLVDLPIGINITRFQTLLALHRSYLTPGDSSSGWTAGAAAYYVGYLQPRTFLLKYNENGTITDAVDCSLDPLSETKCTLKSFTVEKGIYQTSNFRVQPTESIVRFPNITNLCPFGEVFNATRFASVYAWNRKRISNCVADYSVLYNSASFSTFKCYGVSPTKLNDLCFTNVYADSFVIRGDEVRQIAPGQTGKIADYNYKLPDDFTGCVIAWNSNNLDSKVGGNYNYLYRLFRKSNLKPFERDISTEIYQAGSTPCNGVEGFNCYFPLQSYGFQPTNGVGYQPYRVVVLSFELLHAPATVCGPKKSTNLVKNKCVNFNFNGLTGTGVLTESNKKFLPFQQFGRDIADTTDAVRDPQTLEILDITPCSFGGVSVITPGTNTSNQVAVLYQDVNCTEVPVAIHADQLTPTWRVYSTGSNVFQTRAGCLIGAEHVNNSYECDIPIGAGICASYQTQTNSPSGAGSVASQSIIAYTMSLGAENSVAYSNNSIAIPTNFTISVTTEILPVSMTKTSVDCTMYICGDSTECSNLLLQYGSFCTQLNRALTGIAVEQDKNTQEVFAQVKQIYKTPPIKDFGGFNFSQILPDPSKPSKRSFIEDLLFNKVTLADAGFIKQYGDCLGDIAARDLICAQKFNGLTVLPPLLTDEMIAQYTSALLAGTITSGWTFGAGAALQIPFAMQMAYRFNGIGVTQNVLYENQKLIANQFNSAIGKIQDSLSSTASALGKLQDVVNQNAQALNTLVKQLSSNFGAISSVLNDILSRLDPPEAEVQIDRLITGRLQSLQTYVTQQLIRAAEIRASANLAATKMSECVLGQSKRVDFCGKGYHLMSFPQSAPHGVVFLHVTYVPAQEKNFTTAPAICHDGKAHFPREGVFVSNGTHWFVTQRNFYEPQIITTDNTFVSGNCDVVIGIVNNTVYDPLQPELDSFKEELDKYFKNHTSPDVDLGDISGINASVVNIQKEIDRLNEVAKNLNESLIDLQELGKYEQYIKGSGRENLYFQGGGGSGYIPEAPRDGQAYVRKDGEWVLLSTFLGHHHHHHHH

SEQ ID NO: 1878 - protein, 1281 aa, Artificial Sequence
  Description of Artificial Sequence: Synthetic polypeptide
MGILPSPGMPALLSLVSLLSVLLMGCVAETGTQCVNLTTRTQLPPAYTNSFTRGVYYPDKVFRSSVLHSTQDLFLPFFSNVTWFHAIHVSGTNGTKRFDNPVLPFNDGVYFASTEKSNIIRGWIFGTTLDSKTQSLLIVNNATNVVIKVCEFQFCNDPFLGVYYHKNNKSWMESEFRVYSSANNCTFEYVSQPFLMDLEGKQGNFKNLREFVFKNIDGYFKIYSKHTPINLVRDLPQGFSALEPLVDLPIGINITRFQTLLALHRSYLTPGDSSSGWTAGAAAYYVGYLQPRTFLLKYNENGTITDAVDCALDPLSETKCTLKSFTVEKGIYQTSNFRVQPTESIVRFPNITNLCPFGEVFNATRFASVYAWNRKRISNCVADYSVLYNSASFSTFKCYGVSPTKLNDLCFTNVYADSFVIRGDEVRQIAPGQTGKIADYNYKLPDDFTGCVIAWNSNNLDSKVGGNYNYLYRLFRKSNLKPFERDISTEIYQAGSTPCNGVEGFNCYFPLQSYGFQPTNGVGYQPYRVVVLSFELLHAPATVCGPKKSTNLVKNKCVNFNFNGLTGTGVLTESNKKFLPFQQFGRDIADTTDAVRDPQTLEILDITPCSFGGVSVITPGTNTSNQVAVLYQDVNCTEVPVAIHADQLTPTWRVYSTGSNVFQTRAGCLIGAEHVNNSYECDIPIGAGICASYQTQTNSPSGAGSVASQSIIAYTMSLGAENSVAYSNNSIAIPTNFTISVTTEILPVSMTKTSVDCTMYICGDSTECSNLLLQYGSFCTQLNRALTGIAVEQDKNTQEVFAQVKQIYKTPPIKDFGGFNFSQILPDPSKPSKRSFIEDLLFNKVTLADLGFVKQYKDCLGDIAARDLICAQKFNGLTVLPPLLTDEMIAQYTSALLAGTITSGWTFGAGAALQIPFAMQMAYRFNGIGVTQNVLYENQKLIANQFNSAIGKIQDGLSTTASALSKLQDVVNQNAQALNTLVKQLSSNFGAISSVLNDILSRLDPPEAEVQIDRLITGRLQSLQTYVTQQLIRAAEIRASANLAATKMSECVLGQSKRVDFCGKGYHLMSFPQSAPHGVVFLHVTYVPAQEKNFTTAPAICHDGKAHFPREGVFVSNGTHWFVTQRNFYEPQIITTDNTFVSGNCDVVIGIVNNTVYDPLQPELDSFKEELDKYFKNHTSPDVDLGDISGINASVVNIQKEIDRLNEVAKNLNESLIDLQELGKYEQYIKGSGRENLYFQGGGGSGYIPEAPRDGQAYVRKDGEWVLLSTFLGHHHHHHHH

SEQ ID NO: 1879 - protein, 1281 aa, Artificial Sequence
  Description of Artificial Sequence: Synthetic polypeptide
MGILPSPGMPALLSLVSLLSVLLMGCVAETGTQCVNLTTRTQLPPAYTNSFTRGVYYPDKVFRSDVLHSTQDLFLPFFSNVTWFHAIHVSGTNGTKRFDNPVLPFNDGVYFASTEKSNIIRGWIFGTTLDSKTQSLLIVNNATNVVIKVCEFQFCDDPFLGVYYHKNNKSWMEKEFRVYSSANNCTFEYVSQPFLMDLGGKQGNFKWLREFVFKNIDGYFKIYSKHTPINLVRDLPQGFSALEPLMDLPIGINITRFQTLLALHRSYLTPGDSSSGWTAGAAAYYVGYLQPRTFLLKYNENGTITDAVDCALDPLSETKCTLKSFTVEKGIYQTSNFRVQPTESIVRFPNITNLCPFGEVFNATRFASVYAWNRKRISNCVADYSVLYNSASFSTFKCYGVSPTKLNDLCFTNVYADSFVIRGDEVRQIAPGQTGKIADYNYKLPDDFTGCVIAWNSNNLDSKVGGNYNYLYRLFRKSNLKPFERDISTEIYQAGSTPCNGVEGFNCYFPLQSYGFQPTNGVGYQPYRVVVLSFELLHAPATVCGPKKSTNLVKNKCVNFNFNGLTGTGVLTESNKKFLPFQQFGRDIADNTDAVRDPQTLEILDITPCSFGGVSVITPGTNTSNQVAVLYQDVNCTEVPNAIHADQLTPTWRVYSTGSNVFQTRAGCLIGAEHVNNSYECDIPIGAGICASYQTQTNSPSGAGSVASQSIIAYTMSLGAENSVAYSNNSIAIPTNFTISVTTEILPVSMTKTSVDCTMYICGDSTECSNLLLQYGSFCTQLNRALQGIAQEQDKNTQEVFAQVKQIYKTPPIKDFGGFNFSQILPDPSKPSKRSFIEDLLFNKVTLADAGFIKQYGDCLGDIAARDLICAQKFNGLTVLPPLLTDEMIAQYTSALLAGTITSGWTFGAGAALQIPFAMQMAYRFNGIGVTQNVLYENQKLIANQFNKAIGKIQDSLSSTASALGKLQDVVNQNAQALNTLVKQLSSNFGAISSVLNDILSRLDPPEAEVQIDRLITGRLQSLQTYVTQQLIRAAEIRASANLAATKMSECVLGQSKRVDFCGKGYHLMSFPQSAPHGVVFLHVTYVPAQEKNFTTAPAICHDGKAFFPREGVFVSNGTQWFVTQRNFYEPQIITTDNTFVSGNCDVVIGIVNNTVYDPLQPELDSFKEELDKYFKNHTSPDVDLGDISGINASVVNIQKEIDRLNEVAKNLNESLIDLQELGKYEQYIKGSGRENLYFQGGGGSGYIPEAPRDGQAYVRKDGEWVLLSTFLGHHHHHHHH

SEQ ID NO: 1880 - protein, 1281 aa, Artificial Sequence
  Description of Artificial Sequence: Synthetic polypeptide
MGILPSPGMPALLSLVSLLSVLLMGCVAETGTQCVNLTTRTQLPPAYTNSFTRGVYYPDKVFRSSTLHSTQDLFLPFFSNVTWFHAIHVSGTNGTKRFDNPVLPFNDGVYFASTEKSNIIRGWIFGTTLDSKTQSLLIVNNATNVVIKVCEFQFCNDPFLGVYYHKNNKSWMESEFRVYSSANNCTFEYVSQPFLMDLEGKQGNFKNLREFVFKNIDGYFKIYSKHTPINLVRDLPQGFSALEPLVDLPIGINITRFQTLLALHRSYLTPGDSSSGWTAGAAAYYVGYLQPRTFLLKYNENGTITDAVDCALDPLSETKCTLKSFTVEKGIYQTSNFRVQPTESIVRFPNITNLCPFGEVFNATRFASVYAWNRKRISNCVADYSVLYNSASFSTFKCYGVSPTKLNDLCFTNVYADSFVIRGDEVRQIAPGQTGKIADYNYKLPDDFTGCVIAWNSNNLDSKVGGNYNYLYRLFRKSNLKPFERDISTEIYQAGSTPCNGVEGFNCYFPLQSYGFQPTNGVGYQPYRVVVLSFELLHAPATVCGPKKSTNLVKNKCVNFNFNGLTGTGVLTESNKKFLPFQQFGRDIADTTDAVRDPQTLEILDITPCSFGGVSVITPGTNTSNQVAVLYQDVNCTEVPVAIHADQLTPTWRVYSTGSNVFQTRAGCLIGAEHVNNSYECDIPIGAGICASYQTQTNSPSGAGSVASQSIIAYTMSLGAENSVAYSNNSIAIPTNFTISVTTEILPVSMTKTSVDCTMYICGDSTECSNLLLQYGSFCTQLNRALTGIAVEQDKNTQEVFAQVKQIYKTPPIKDFGGFNFSQILPDPSKPSKRSFIEDLLFNKVTLADAGFIKQYGDCLGDIAARDLICAQKFNGLTVLPPLLTDEMIAQYTSALLAGTITSGWTFGAGAALQIPFAMQMAYRFNGIGVTQNVLYENQKLIANQFNSAIGKIQDSLSSTASALGKLQDVVNQNAQALNTLVKQLSSNFGAISSVLNDILSRLDPPEAEVQIDRLITGRLQSLQTYVTQQLIRAAEIRASANLAATKMSECVLGQSKRVDFCGKGYHLMSFPQSAPHGVVFLHVTYVPAQEKNFTTAPAICHDGKAHFPREGVFVSNGTHWFVTQRNFYEPQIITTDNTFVSGNCDVVIGIVNNTVYDPLQPELDSFKEELDKYFKNHTSPDVDLGDISGINASVVNIQKEIDRLNEVAKNLNESLIDLQELGKYEQYIKGSGRENLYFQGGGGSGYIPEAPRDGQAYVRKDGEWVLLSTFLGHHHHHHHH

SEQ ID NO: 1881 - protein, 1281 aa, Artificial Sequence
  Description of Artificial Sequence: Synthetic polypeptide
MGILPSPGMPALLSLVSLLSVLLMGCVAETGTQCVNLTTRTQLPPAYTNSFTRGVYYPDKIFRSNVLHSTQDLFLPFFSNVTWFHALHVKGTNGTKRFDNPVLPFNDGVYFAAIEKSNIIRGWIFGTTLDSKTQSLLIVNNATNVVIRVCEFQFCDNPFLGVYYHKNNKSWREEEFRWYSSANNCTFEYVSQPFLYDLNGKQGNFHHLREFVFKNIDGYFKIYSKWEPINLVRDLPQGFSALEPLMDLPIGINITHFQTILSLSRSYRTPGDSSSGWTAGAAAYYVGYLQPRTFLLKYDENGYITDAVDCSLDPLSETKCKLKSFTVEKGIYQTSNFRVQPTYEIVRFPNITNECPFDEVFNATRFASVYNWRRYRISNCVADYSVLYNSASFSTFQCYGVSPTKLNDLCFTNVYADVFVIRGSEVRQIAPGQTGEIADYNYKLPDDFTGCVIAWNSNNLDSTVGGNYNYLYRLFRKSNMKPFERDISTEAYQAGCTPCNGVEGFNCYFPLQSYGFQPTNGVGYQPYRVVVLKFELLHAPATVCGPKDSTNLVKNKCVDYNFNGRTGTGVLTESNKKFLPFQQFGRDISDTTDAVRDPTTGEILCITPCSFGGVSVITPGTNTSNQVAVLYQDVNCTEVPEAIHSNQLRPTWRVYSTGSNVFQTRAGCLIGAEHVNNSYECDIPIGNGICASYQTQTNSPSGSGSVSSQSIIAYTMSLGAENTVAYSNNEIAIPTNFTISVQTEILPVSMTKVSVDCTMYICGDSTRCLNLLSQYGSFCSQLERALNGIAREQDKNLLNVFAQVKQIYKTPPIKDFGGFNFSQILPDPSKPSKRSFIEDLLFNKVTLADLGFVKQYKDCLGDQAARDLICAQKYNGIMVLPPLLTDEMIAQYTASLLAGTITAGWTFGAGAALQIPFAMQMAYRFNGIGVQQNVLYENQKIIANQFNNAIGNIQDGLSTTASALSKLQDVVNQQAQALNELVKQLSSNFGAISSVINDIYNRLDPPEAEAQIDRLITGRLQSLQTYVTQQLIRATEIRASAQLAAEKMSECVKGQSNRYGFCGNGYHLMSFPQSAPHGVVFLHVTYVPTQFKNFTTAPGICHDGKAYFPREGVFVSNGTEWYITQRNFYEPRIITTDNTFVSGNCDVVIGIVNNTVYDPLQPELDSFKEELDKYFKNHTSPDVDLGDISGINASVVNIQKEIDRLNEVAKNLNESLIDLQELGKYEQYIKGSGRENLYFQGGGGSGYIPEAPRDGQAYVRKDGEWVLLSTFLGHHHHHHHH

SEQ ID NO: 1882 - protein, 1281 aa, Artificial Sequence
  Description of Artificial Sequence: Synthetic polypeptide
MGILPSPGMPALLSLVSLLSVLLMGCVAETGTQCVNLTTRTQLPPAYTNSFTRGVYYPDKVFRSSVLHSTQDLFLPFFSNVTWFHAIHVSGTNGTKRFDNPVLPFNDGVYFASTEKSNIIRGWIFGTTLDSKTQSLLIVNNATNVVIKVCEFQFCNDPFLGVYYHKNNKSWMESEFRVYSSANNCTFEYVSQPFLMDLEGKQGNFKNLREFVFKNIDGYFKIYSKHTPINLVRDLPQGFSALEPLVDLPIGINITRFQTLLALHRSYLTPGDSSSGWTAGAAAYYVGYLQPRTFLLKYNENGTITDAVDCALDPLSETKCTLKSFTVEKGIYQTSNFRVQPTESIVRFPNITNLCPFGEVFNATRFASVYAWNRKRISNCVADYSVLYNSASFSTFKCYGVSPTKLNDLCFTNVYADSFVIRGDEVRQIAPGQTGKIADYNYKLPDDFTGCVIAWNSNNLDSKVGGNYNYLYRLFRKSNLKPFERDISTEIYQAGSTPCNGVEGFNCYFPLQSYGFQPTNGVGYQPYRVVVLSFELLHAPATVCGPKKSTNLVKNKCVNFNFNGLTGTGVLTESNKKFLPFQQFGRDIADTTDAVRDPQTLEILDITPCSFGGVSVITPGTNTSNQVAVLYQDVNCTEVPVAIHADQLTPTWRVYSTGSNVFQTRAGCLIGAEHVNNSYECDIPIGAGICASYQTQTNSPSGAGSVASQSIIAYTMSLGAENSVAYSNNSIAIPTNFTISVTTEILPVSMTKTSVDCTMYICGDSTECSNLLLQYGSFCTQLNRALTGIAVEQDKNTQEVFAQVKQIYKTPPIKDFGGFNFSQILPDPSKPSKRSFIEDLLFNKVTLADAGFIKQYGDCLGDIAARDLICAQKFNGLTVLPPLLTDEMIAQYTSALLAGTITSGWTFGAGAALQIPFAMQMAYRFNGIGVTQNVLYENQKKIANQFNSAIGKIQDSLSSTASALGKLQDVVNQNAQALNTLVKQLSSNFGAISSVLNDILSRLDPPEAEVQIDRLITGRLQSLQTYVTQQLIRAAEIRASANLAATKMSECVLGQSKRVDFCGKGYHLMSFPQSAPHGVVFLHVTYVPAQEKNFTTAPAICHDGKAHFPREGVFVSNGTHWFVTQRNFYEPQIITTDNTFVSGNCDVVIGIVNNTVYDPLQPELDSFKEELDKYFKNHTSPDVDLGDISGINASVVNIQKEIDRLNEVAKNLNESLIDLQELGKYEQYIKGSGRENLYFQGGGGSGYIPEAPRDGQAYVRKDGEWVLLSTFLGHHHHHHHH

SEQ ID NO: 1883 - protein, 1281 aa, Artificial Sequence
  Description of Artificial Sequence: Synthetic polypeptide
MGILPSPGMPALLSLVSLLSVLLMGCVAETGTQCVNLTTRTQLPPAYTNSFTRGVYYPDKIFRSNVLHSTQDLFLPFFSNVTWFHALHVKGTNGTKRFDNPVLPFNDGVYFAAIEKSNIIRGWIFGTTLDSKTQSLLIVNNATNVVIRVCEFQFCENPFLGVYYHKNNKSWREEEFRWYSSANNCTFEYVSQPFLYDLNGKQGNFHHLREFVFKNIDGYFKIYSKWEPINLVRDLPQGFSALEPLMDLPIGINITHFQTILSLSRSYRTPGDSSSGWTAGAAAYYVGYLQPRTFLLKYDENGYITDAVDCSLDPLSETKCKLKSFTVEKGIYQTSNFRVQPTYEIVRFPNITNACPFDEVFNATRFASVYNWERQRISNCVADYSVLYNSASFSTFQCYGVSPTKLNDLCFTNVYADIFVIRGSEVRQIAPGQTGEIADYNYKLPDDFTGCVIAWNSNNLDSTVGGNYNYLYRLFRKSNMKPFERDISTEQYQAGCTPCNGVEGFNCYFPLQSYGFQPTNGVGYQPYRVVVLKFELLHAPATVCGPKDSTNLVKNKCVDYNFNGRTGTGVLTESNKKFLPFQQFGRDISDTTDAVRDPTTGEILCITPCSFGGVSVITPGTNTSNQVAVLYQDVNCTEVPEAIHSNQLRPTWRVYSTGSNVFQTRAGCLIGAEHVNNSYECDIPIGNGICASYQTQTNSPSGSGSVSSQSIIAYTMSLGAENTVAYSNNEIAIPTNFTISVQTEILPVSMTKVSVDCTMYICGDSTRCLNLLSQYGSFCSQLERALNGIAREQDKNLLNVFAQVKQIYKTPPIKDFGGFNFSQILPDPSKPSKRSFIEDLLFNKVTLADLGFVKQYKDCLGDQAARDLICAQKYNGIMVLPPLLTDEMIAQYTASLLAGTITAGWTFGAGAALQIPFAMQMAYRFNGIGVQQNVLYENQKIIANQFNNAIGNIQDGLSTTASALSKLQDVVNQQAQALNELVKQLSSNFGAISSVINDIYNRLDPPEAEAQIDRLITGRLQSLQTYVTQQLIRATEIRASAQLAAEKMSECVKGQSNRYGFCGNGYHLMSFPQSAPHGVVFLHVTYVPTQFKNFTTAPGICHDGKAYFPREGVFVSNGTEWYITQRNFYEPRIITTDNTFVSGNCDVVIGIVNNTVYDPLQPELDSFKEELDKYFKNHTSPDVDLGDISGINASVVNIQKEIDRLNEVAKNLNESLIDLQELGKYEQYIKGSGRENLYFQGGGGSGYIPEAPRDGQAYVRKDGEWVLLSTFLGHHHHHHHH

SEQ ID NO: 1884 - protein, 1281 aa, Artificial Sequence
  Description of Artificial Sequence: Synthetic polypeptide
MGILPSPGMPALLSLVSLLSVLLMGCVAETGTQCVNLTTRTQLPPAYTNSFTRGVYYPDKVFRSSVLHSTQDLFLPFFSNVTWFHAIHVSGTNGTKRFDNPVLPFNDGVYFASTEKSNIIRGWIFGTTLDSKTQSLLIVNNATNVVIKVCEFQFCNDPFLGVYYHKNNKSWMESEFRVYSSANNCTFEYVSQPFLMDLEGKQGNFKNLREFVFKNIDGYFKIYSKHTPINLVRDLPQGFSALEPLVDLPIGINITRFQTLLALHRSYLTPGDSSSGWTAGAAAYYVGYLQPRTFLLKYNENGTITDAVDCALDPLSETKCTLKSFTVEKGIYQTSNFRVQPTESIVRFPNITNLCPFGEVFNATRFASVYAWNRKRISNCVADYSVLYNSASFSTFKCYGVSPTKLNDLCFTNVYADSFVIRGDEVRQIAPGQTGKIADYNYKLPDDFTGCVIAWNSNNLDSKVGGNYNYLYRLFRKSNLKPFERDISTEIYQAGSTPCNGVEGFNCYFPLQSYGFQPTNGVGYQPYRVVVLSFELLHAPATVCGPKKSTNLVKNKCVNFNFNGLTGTGVLTESNKKFLPFQQFGRDIADTTDAVRDPQTLEILDITPCSFGGVSVITPGTNTSNQVAVLYQDVNCTEVPVAIHADQLTPTWRVYSTGSNVFQTRAGCLIGAEYVNNSYECDIPIGAGICASYQTQTNSPSGAGSVASQSIIAYTMSLGAENSVAYSNNSIAIPTNFTISVTTEILPVSMTKTSVDCTMYICGDSTECSNLLLQYGSFCTQLNRALTGIAVEQDKNTQEVFAQVKQIYKTPPIKDFGGFNFSQILPDPSKPSKRSFIEDLLFNKVTLADAGFIKQYGDCLGDIAARDLICAQKFNGLTVLPPLLTDEMIAQYTSALLAGTITSGWTFGAGAALQIPFAMQMAYRFNGIGVTQNVLYENQKLIANQFNSAIGKIQDSLSSTASALGKLQDVVNQNAQALNTLVKQLSSNFGAISSVLNDILSRLDPPEAEVQIDRLITGRLQSLQTYVTQQLIRAAEIRASANLAATKMSECVLGQSKRVDFCGKGYHLMSFPQSAPHGVVFLHVTYVPAQEKNFTTAPAICHDGKAHFPREGVFVSNGTHWFVTQRNFYEPQIITTDNTFVSGNCDVVIGIVNNTVYDPLQPELDSFKEELDKYFKNHTSPDVDLGDISGINASVVNIQKEIDRLNEVAKNLNESLIDLQELGKYEQYIKGSGRENLYFQGGGGSGYIPEAPRDGQAYVRKDGEWVLLSTFLGHHHHHHHH

SEQ ID NO: 1885 - protein, 1281 aa, Artificial Sequence
  Description of Artificial Sequence: Synthetic polypeptide
MGILPSPGMPALLSLVSLLSVLLMGCVAETGTQCVNLTTRTQLPPAYTNSFTRGVYYPDKVFRSSVLHSTQDLFLPFFSNVTWFHAIHVSGTNGTKRFDNPVLPFNDGVYFASTEKSNIIRGWIFGTTLDSKTQSLLIVNNATNVVIKVCEFQFCNDPFLGVYYHKNNKSWMESEFRVYSSANNCTFEYVSQPFLMDLEGKQGNFKNLREFVFKNIDGYFYIYSKHTPINLVRDLPQGFSALEPLVDLPIGINITRFQTLLALHRSYLTPGDSSSGWTAGAAAYYVGYLQPRTFLLKYNENGTITDAVDCALDPLSETKCTLKSFTVEKGIYQTSNFRVQPTESIVRFPNITNLCPFGEVFNATRFASVYAWNRKRISNCVADYSVLYNSASFSTFKCYGVSPTKLNDLCFTNVYADSFVIRGDEVRQIAPGQTGKIADYNYKLPDDFTGCVIAWNSNNLDSKVGGNYNYLYRLFRKSNLKPFERDISTEIYQAGSTPCNGVEGFNCYFPLQSYGFQPTNGVGYQPYRVVVLSFELLHAPATVCGPKKSTNLVKNKCVNFNFNGLTGTGVLTESNKKFLPFQQFGRDIADTTDAVRDPQTLEILDITPCSFGGVSVITPGTNTSNQVAVLYQDVNCTEVPVAIHADQLTPTWRVYSTGSNVFQTRAGCLIGAEHVNNSYECDIPIGAGICASYQTQTNSPSGAGSVASQSIIAYTMSLGAENSVAYSNNSIAIPTNFTISVTTEILPVSMTKTSVDCTMYICGDSTECSNLLLQYGSFCTQLNRALTGIAVEQDKNTQEVFAQVKQIYKTPPIKDFGGFNFSQILPDPSKPSKRSFIEDLLFNKVTLADAGFIKQYGDCLGDIAARDLICAQKFNGLTVLPPLLTDEMIAQYTSALLAGTITSGWTFGAGAALQIPFAMQMAYRFNGIGVTQNVLYENQKLIANQFNSAIGKIQDSLSSTASALGKLQDVVNQNAQALNTLVKQLSSNFGAISSVLNDILSRLDPPEAEVQIDRLITGRLQSLQTYVTQQLIRAAEIRASANLAATKMSECVLGQSKRVDFCGKGYHLMSFPQSAPHGVVFLHVTYVPAQEKNFTTAPAICHDGKAHFPREGVFVSNGTHWFVTQRNFYEPQIITTDNTFVSGNCDVVIGIVNNTVYDPLQPELDSFKEELDKYFKNHTSPDVDLGDISGINASVVNIQKEIDRLNEVAKNLNESLIDLQELGKYEQYIKGSGRENLYFQGGGGSGYIPEAPRDGQAYVRKDGEWVLLSTFLGHHHHHHHH

SEQ ID NO: 1886 - protein, 1281 aa, Artificial Sequence
  Description of Artificial Sequence: Synthetic polypeptide
MGILPSPGMPALLSLVSLLSVLLMGCVAETGTQCVNLTTRTQLPPAYTNSFTRGVYYPDKVFRSSVLHSTQDLFLPFFSNVTWFHAIHVSGTNGTKRFDNPVLPFNDGVYFASTEKSNIIRGWIFGTTLDSKTQSLLIVNNATNVVIKVCEFQFCNDPFLGVYYHKNNKSWMESEFRVYSSANNCTFEYVSQPFLMDLEGKQGNFKWLREFVFKNIDGYFKIYSKHTPINLVRDLPQGFSALEPLVDLPIGINITRFQTLLALHRSYLTPGDSSSGWTAGAAAYYVGYLQPRTFLLKYNENGTITDAVDCALDPLSETKCTLKSFTVEKGIYQTSNFRVQPTESIVRFPNITNLCPFGEVFNATRFASVYAWNRKRISNCVADYSVLYNSASFSTFKCYGVSPTKLNDLCFTNVYADSFVIRGDEVRQIAPGQTGKIADYNYKLPDDFTGCVIAWNSNNLDSKVGGNYNYLYRLFRKSNLKPFERDISTEIYQAGSTPCNGVEGFNCYFPLQSYGFQPTNGVGYQPYRVVVLSFELLHAPATVCGPKKSTNLVKNKCVNFNFNGLTGTGVLTESNKKFLPFQQFGRDIADTTDAVRDPQTLEILDITPCSFGGVSVITPGTNTSNQVAVLYQDVNCTEVPVAIHADQLTPTWRVYSTGSNVFQTRAGCLIGAEHVNNSYECDIPIGAGICASYQTQTNSPSGAGSVASQSIIAYTMSLGAENSVAYSNNSIAIPTNFTISVTTEILPVSMTKTSVDCTMYICGDSTECSNLLLQYGSFCTQLNRALTGIAVEQDKNTQEVFAQVKQIYKTPPIKDFGGFNFSQILPDPSKPSKRSFIEDLLFNKVTLADAGFIKQYGDCLGDIAARDLICAQKFNGLTVLPPLLTDEMIAQYTSALLAGTITSGWTFGAGAALQIPFAMQMAYRFNGIGVTQNVLYENQKLIANQFNSAIGKIQDSLSSTASALGKLQDVVNQNAQALNTLVKQLSSNFGAISSVLNDILSRLDPPEAEVQIDRLITGRLQSLQTYVTQQLIRAAEIRASANLAATKMSECVLGQSKRVDFCGKGYHLMSFPQSAPHGVVFLHVTYVPAQEKNFTTAPAICHDGKAHFPREGVFVSNGTHWFVTQRNFYEPQIITTDNTFVSGNCDVVIGIVNNTVYDPLQPELDSFKEELDKYFKNHTSPDVDLGDISGINASVVNIQKEIDRLNEVAKNLNESLIDLQELGKYEQYIKGSGRENLYFQGGGGSGYIPEAPRDGQAYVRKDGEWVLLSTFLGHHHHHHHH

SEQ ID NO: 1887 - protein, 1281 aa, Artificial Sequence
  Description of Artificial Sequence: Synthetic polypeptide
MGILPSPGMPALLSLVSLLSVLLMGCVAETGTQCVNLTTRTQLPPAYTNSFTRGVYYPDKVFRSDVLHSTQDLFLPFFSNVTWFHAIHVSGTNGTKRFDNPVLPFNDGVYFASTEKSNIIRGWIFGTTLDSKTQSLLIVNNATNVVIKVCEFQFCDDPFLGVYYHKNNKSWMEKEFRVYSSANNCTFEYVSQPFLMDLGGKQGNFKWLREFVFKNIDGYFKIYSKHTPINLVRDLPQGFSALEPLMDLPIGINITRFQTLLALHRSYLTPGDSSSGWTAGAAAYYVGYLQPRTFLLKYNENGTITDAVDCAYDPLSETKCTLKSFTVEKGIYQTSNFRVQPTESIVRFPNITNLCPFGEVFNATRFASVYAWNRKRISNCVADYSVLYNSASFSTFKCYGVSPTKLNDLCFTNVYADSFVIRGDEVRQIAPGQTGKIADYNYKLPDDFTGCVIAWNSNNLDSKVGGNYNYLYRLFRKSNLKPFERDISTEIYQAGSTPCNGVEGFNCYFPLQSYGFQPTNGVGYQPYRVVVLSFELLHAPATVCGPKKSTNLVKNKCVNFNFNGLTGTGVLTESNKKFLPFQQFGRDIADNTDAVRDPQTLEILDITPCSFGGVSVITPGTNTSNQVAVLYQDVNCTEVPNAIHADQLTPTWRVYSTGSNVFQTRAGCLIGAEHVNNSYECDIPIGAGICASYQTQTNSPSGAGSVASQSIIAYTMSLGAENSVAYSNNSIAIPTNFTISVTTEILPVSMTKTSVDCTMYICGDSTECSNLLLQYGSFCTQLNRALHGIAREQDKNTQEVFAQVKQIYKTPPIKDFGGFNFSQILPDPSKPSKRSFIEDLLFNKVTLADAGFIKQYGDCLGDIAARDLICAQKFNGLTVLPPLLTDEMIAQYTSALLAGTITSGWTFGAGAALQIPFAMQMAYRFNGIGVTQNVLYENQKLIANQFNKAIGKIQDSLSSTASALGKLQDVVNQNAQALNTLVKQLSSNFGAISSVLNDILSRLDPPEAEVQIDRLITGRLQSLQTYVTQQLIRAAEIRASANLAATKMSECVLGQSKRVDFCGKGYHLMSFPQSAPHGVVFLHVTYVPAQEKNFTTAPAICHDGKAFFPREGVFVSNGTQWFVTQRNFYEPQIITTDNTFVSGNCDVVIGIVNNTVYDPLQPELDSFKEELDKYFKNHTSPDVDLGDISGINASVVNIQKEIDRLNEVAKNLNESLIDLQELGKYEQYIKGSGRENLYFQGGGGSGYIPEAPRDGQAYVRKDGEWVLLSTFLGHHHHHHHH

SEQ ID NO: 1888 - protein, 1281 aa, Artificial Sequence
  Description of Artificial Sequence: Synthetic polypeptide
MGILPSPGMPALLSLVSLLSVLLMGCVAETGTQCVNLTTRTQLPPAYTNSFTRGVYYPDKVFRSSVLHSTQDLFLPFFSNVTWFHAIHVSGTNGTKRFDNPVLPFNDGVYFASTEKSNIIRGWIFGTTLDSKTQSLLIVNNATNVVIKVCEFQFCNDPFLGVYYHKNNKSWMESEFRVYSSANNCTFEYVSQPFLMDLEGKQGNFKNLREFVFKNIDGYFKIYSKHTPINLVRDLPQGFSALEPLVDLPIGINITRFQTLLALHRSYLTPGDSSSGWTAGAAAYYVGYLQPRTFLLKYNENGTITDAVDCALDPLSETKCTLKSFTVEKGIYQTSNFRVQPTESIVRFPNITNLCPFGEVFNATRFASVYAWNRKRISNCVADYSVLYNSASFSTFKCYGVSPTKLNDLCFTNVYADSFVIRGDEVRQIAPGQTGKIADYNYKLPDDFTGCVIAWNSNNLDSKVGGNYNYLYRLFRKSNLKPFERDISTEIYQAGSTPCNGVEGFNCYFPLQSYGFQPTNGVGYQPYRVVVLSFELLHAPATVCGPKKSTNLVKNKCVNFNFNGLTGTGVLTESNKKFLPFQQFGRDIADTTDAVRDPQTLEILDITPCSFGGVSVITPGTNTSNQVAVLYQDVNCTEVPVAIHADQLTPTWRVYSTGSNVFQTRAGCLIGAEHVNNSYECDIPIGAGICASYQTQTNSPSGAGSVASQSIIAYTMSLGAENSVAYSNNSIAIPTNFTISVTTEILPVSMTKTSVDCTMYICGDSTECSNLLLQYGSFCTQLNRALTGIAVEQDKNTQEVFAQVKQIYKTPPIKDFGGFNFSQILPDPSKPSKRSFIEDLLFNKVTLADAGFIKQYGDCLGDIAARDLICAQKFNGLTVLPPLLTDEMIAQYTSALLAGTITSGWTFGAGAALQIPFAMQMAYRFNGIGVTQNVLYENQQLIANQFNSAIGKIQDSLSSTASALGKLQDVVNQNAQALNTLVKQLSSNFGAISSVLNDILSRLDPPEAEVQIDRLITGRLQSLQTYVTQQLIRAAEIRASANLAATKMSECVLGQSKRVDFCGKGYHLMSFPQSAPHGVVFLHVTYVPAQEKNFTTAPAICHDGKAHFPREGVFVSNGTHWFVTQRNFYEPQIITTDNTFVSGNCDVVIGIVNNTVYDPLQPELDSFKEELDKYFKNHTSPDVDLGDISGINASVVNIQKEIDRLNEVAKNLNESLIDLQELGKYEQYIKGSGRENLYFQGGGGSGYIPEAPRDGQAYVRKDGEWVLLSTFLGHHHHHHHH

SEQ ID NO: 1889 - protein, 1281 aa, Artificial Sequence
  Description of Artificial Sequence: Synthetic polypeptide
MGILPSPGMPALLSLVSLLSVLLMGCVAETGTQCVNLTTRTQLPPAYTNSFTRGVYYPDKVFRSSVLHSTQDLFLPFFSNVTWFHAIHVSGTNGTKRFDNPVLPFNDGVYFASTEKSNIIRGWIFGTTLDSKTQSLLIVNNATNVVIKVCEFQFCNDPFLGVYYHKNNKSWMESEFRVYSSANNCTFEYVSQPFQMDLEGKQGNFKNLREFVFKNIDGYFKIYSKHTPINLVRDLPQGFSALEPLVDLPIGINITRFQTLLALHRSYLTPGDSSSGWTAGAAAYYVGYLQPRTFLLKYNENGTITDAVDCALDPLSETKCTLKSFTVEKGIYQTSNFRVQPTESIVRFPNITNLCPFGEVFNATRFASVYAWNRKRISNCVADYSVLYNSASFSTFKCYGVSPTKLNDLCFTNVYADSFVIRGDEVRQIAPGQTGKIADYNYKLPDDFTGCVIAWNSNNLDSKVGGNYNYLYRLFRKSNLKPFERDISTEIYQAGSTPCNGVEGFNCYFPLQSYGFQPTNGVGYQPYRVVVLSFELLHAPATVCGPKKSTNLVKNKCVNFNFNGLTGTGVLTESNKKFLPFQQFGRDIADTTDAVRDPQTLEILDITPCSFGGVSVITPGTNTSNQVAVLYQDVNCTEVPVAIHADQLTPTWRVYSTGSNVFQTRAGCLIGAEHVNNSYECDIPIGAGICASYQTQTNSPSGAGSVASQSIIAYTMSLGAENSVAYSNNSIAIPTNFTISVTTEILPVSMTKTSVDCTMYICGDSTECSNLLLQYGSFCTQLNRALTGIAVEQDKNTQEVFAQVKQIYKTPPIKDFGGFNFSQILPDPSKPSKRSFIEDLLFNKVTLADAGFIKQYGDCLGDIAARDLICAQKFNGLTVLPPLLTDEMIAQYTSALLAGTITSGWTFGAGAALQIPFAMQMAYRFNGIGVTQNVLYENQKLIANQFNSAIGKIQDSLSSTASALGKLQDVVNQNAQALNTLVKQLSSNFGAISSVLNDILSRLDPPEAEVQIDRLITGRLQSLQTYVTQQLIRAAEIRASANLAATKMSECVLGQSKRVDFCGKGYHLMSFPQSAPHGVVFLHVTYVPAQEKNFTTAPAICHDGKAHFPREGVFVSNGTHWFVTQRNFYEPQIITTDNTFVSGNCDVVIGIVNNTVYDPLQPELDSFKEELDKYFKNHTSPDVDLGDISGINASVVNIQKEIDRLNEVAKNLNESLIDLQELGKYEQYIKGSGRENLYFQGGGGSGYIPEAPRDGQAYVRKDGEWVLLSTFLGHHHHHHHH

SEQ ID NO: 1890 - protein, 1281 aa, Artificial Sequence
  Description of Artificial Sequence: Synthetic polypeptide
MGILPSPGMPALLSLVSLLSVLLMGCVAETGTQCVNLTTRTQLPPAYTNSFTRGVYYPDKVFRSSVLHSTQDLFLPFFSNVTWFHAIHVSGTNGTKRFDNPVLPFNDGVYFASTEKSNIIRGWIFGTTLDSKTQSLLIVNNATNVVIKVCEFQFCNDPFLGVYYHKNNKSWMESEFRVYSSANNCTFEYVSQPFLMDLEGKQGNFKNLREFVFKNIDGYFKIYSKHTPINLVRDLPQGFSALEPLVDLPIGINITRFQTLLALHRSYLTPGDSSSGWTAGAAAYYVGYLQPRTFLLKYNENGTITDAVDCALDPLSETKCTLKSFTVEKGIYQTSNFRVQPTESIVRFPNITNLCPFGEVFNATRFASVYAWNRKRISNCVADYSVLYNSASFSTFKCYGVSPTKLNDLCFTNVYADSFVIRGDEVRQIAPGQTGKIADYNYKLPDDFTGCVIAWNSNNLDSKVGGNYNYLYRLFRKSNLKPFERDISTEIYQAGSTPCNGVEGFNCYFPLQSYGFQPTNGVGYQPYRVVVLSFELLHAPATVCGPKKSTNLVKNKCVNFNFNGLTGTGVLTESNKKFLPFQQFGRDIADTTDAVRDPQTLEILDITPCSFGGVSVITPGTNTSNQVAVLYQDVNCTEVPVTIHADQLTPTWRVYSTGSNVFQTRAGCLIGAEHVNNSYECDIPIGAGICASYQTQTNSPSGAGSVASQSIIAYTMSLGAENSVAYSNNSIAIPTNFTISVTTEILPVSMTKTSVDCTMYICGDSTECSNLLLQYGSFCTQLNRALTGIAVEQDKNTQEVFAQVKQIYKTPPIKDFGGFNFSQILPDPSKPSKRSFIEDLLFNKVTLADAGFIKQYGDCLGDIAARDLICAQKFNGLTVLPPLLTDEMIAQYTSALLAGTITSGWTFGAGAALQIPFAMQMAYRFNGIGVTQNVLYENQKLIANQFNSAIGKIQDSLSSTASALGKLQDVVNQNAQALNTLVKQLSSNFGAISSVLNDILSRLDPPEAEVQIDRLITGRLQSLQTYVTQQLIRAAEIRASANLAATKMSECVLGQSKRVDFCGKGYHLMSFPQSAPHGVVFLHVTYVPAQEKNFTTAPAICHDGKAHFPREGVFVSNGTHWFVTQRNFYEPQIITTDNTFVSGNCDVVIGIVNNTVYDPLQPELDSFKEELDKYFKNHTSPDVDLGDISGINASVVNIQKEIDRLNEVAKNLNESLIDLQELGKYEQYIKGSGRENLYFQGGGGSGYIPEAPRDGQAYVRKDGEWVLLSTFLGHHHHHHHH

SEQ ID NO: 1891 - protein, 1281 aa, Artificial Sequence
  Description of Artificial Sequence: Synthetic polypeptide
MGILPSPGMPALLSLVSLLSVLLMGCVAETGTQCVNLTTRTQLPPAYTNSFTRGVYYPDKIFRSNVLHSTQDLFLPFFSNVTWFHALHVKGTNGTKDFDNPVLPFNDGVYFAAIEKSNIIRGWIFGTTLDSKTQSLLIVNNATNVVIRVCEFQFCENPFLGVYYHKNNKSWREEEWRVYSSANNCTFEYVSQPFLYDLNGKQGNFHHLREFVFKNIDGYFKIYSKWEPINLVRDLPQGFSPLEPLMDLPIGINITHFQTILSLSRSYRTPGDSSSGWTAGAAAYYVGYLQPRTFLLKYDENGYITDAVDCSLDPLSETKCKLKSFTVEKGIYQTSNFRVQPTYEIVRFPNITNECPFDEVFNATRFASVYNWNRQRISNCVADYSVLYNSASFSTFQCYGVSPTKLNDLCFTNVYADIFVIRGSEVRQIAPGQTGPIADYNYKLPDDFTGCVIAWNSNNLDSTVGGNYNYLYRLFRKSNMKPFERDISTEAYQAGCTPCNGVEGFNCYFPLQSYGFQPTNGVGYQPYRVVVLKFELLHAPATVCGPKDPTNLVKNKCVDYNFNGRTGTGVLTESNKKFLPFQQFGRDISDNLDAVRDPTTGEILCITPCSFGGVSVITPGTNTSNQVAVLYQDVNCTEVPEAIHSNQLRPTWRVYSTGSNVFQTRAGCLIGAEHVNNSYECDIPIGNGICASYQTQTNSPSGSGSVSSQSIIAYTMSLGAENPVPYSNNNIAIPTNFTISVQTEILPVSMPKVSVDCTMYICGDSTECLNLLKQYGSFCSQLERALNGIAREQDKNLLNVFAQVKQIYKTPPIKDFGGFNFSQILPDPSKPSKRSFIEDLLFNKVTLADLGFVKQYKDCLGDQAARDLICAQKFNGIMVLPPLLTDEMIAQYTASLLAGTITAGWTFGAGAALVIPFAMQMAYRFNGIGVQQNVLYENQKIIANQFNNAIGNIQDGLSTTASALSKLQDVVNQQAQALNELVKQLSSNFGAISSVINDIYNRLDKPEAQAQIDRLITGRLQSLQTYVTQQLIRATEIRASAQLAAEKMSECVKGQSNRYGFCGNGYHLMSFPQSAPHGVVFLHVTYVPTQFKNFTTAPGICHDGKAYFPREGVFVSNGTEWYITQRNFYEPRPITTDNTFVSGNCDVVIGIVNNTVYDPLQPELDSFKEELDKYFKNHTSPDVDLGDISGINASVVNIQKEIDRLNEVAKNLNESLIDLQELGKYEQYIKGSGRENLYFQGGGGSGYIPEAPRDGQAYVRKDGEWVLLSTFLGHHHHHHHH

SEQ ID NO: 1892 - protein, 1281 aa, Artificial Sequence
  Description of Artificial Sequence: Synthetic polypeptide
MGILPSPGMPALLSLVSLLSVLLMGCVAETGTQCVNLTTRTQLPPAYTNSFTRGVYYPDKVFRSSVLHSTQDLFLPFFSNVTWFHAIHVSGTNGTKRFDNPVLPFNDGVYFASTEKSNIIRGWIFGTTLDSKTQSLLIVNNATNVVIKVCEFQFCNDPFLGVYYHKNNKSWMESEFRVYSSANNCTFEYVSQAFLMDLEGKQGNFKNLREFVFKNIDGYFKIYSKHTPINLVRDLPQGFSALEPLVDLPIGINITRFQTLLALHRSYLTPGDSSSGWTAGAAAYYVGYLQPRTFLLKYNENGTITDAVDCALDPLSETKCTLKSFTVEKGIYQTSNFRVQPTESIVRFPNITNLCPFGEVFNATRFASVYAWNRKRISNCVADYSVLYNSASFSTFKCYGVSPTKLNDLCFTNVYADSFVIRGDEVRQIAPGQTGKIADYNYKLPDDFTGCVIAWNSNNLDSKVGGNYNYLYRLFRKSNLKPFERDISTEIYQAGSTPCNGVEGFNCYFPLQSYGFQPTNGVGYQPYRVVVLSFELLHAPATVCGPKKSTNLVKNKCVNFNFNGLTGTGVLTESNKKFLPFQQFGRDIADTTDAVRDPQTLEILDITPCSFGGVSVITPGTNTSNQVAVLYQDVNCTEVPVAIHADQLTPTWRVYSTGSNVFQTRAGCLIGAEHVNNSYECDIPIGAGICASYQTQTNSPSGAGSVASQSIIAYTMSLGAENSVAYSNNSIAIPTNFTISVTTEILPVSMTKTSVDCTMYICGDSTECSNLLLQYGSFCTQLNRALTGIAVEQDKNTQEVFAQVKQIYKTPPIKDFGGFNFSQILPDPSKPSKRSFIEDLLFNKVTLADAGFIKQYGDCLGDIAARDLICAQKFNGLTVLPPLLTDEMIAQYTSALLAGTITSGWTFGAGAALQIPFAMQMAYRFNGIGVTQNVLYENQKLIANQFNSAIGKIQDSLSSTASALGKLQDVVNQNAQALNTLVKQLSSNFGAISSVLNDILSRLDPPEAEVQIDRLITGRLQSLQTYVTQQLIRAAEIRASANLAATKMSECVLGQSKRVDFCGKGYHLMSFPQSAPHGVVFLHVTYVPAQEKNFTTAPAICHDGKAHFPREGVFVSNGTHWFVTQRNFYEPQIITTDNTFVSGNCDVVIGIVNNTVYDPLQPELDSFKEELDKYFKNHTSPDVDLGDISGINASVVNIQKEIDRLNEVAKNLNESLIDLQELGKYEQYIKGSGRENLYFQGGGGSGYIPEAPRDGQAYVRKDGEWVLLSTFLGHHHHHHHH

SEQ ID NO: 1893 - protein, 1281 aa, Artificial Sequence
  Description of Artificial Sequence: Synthetic polypeptide
MGILPSPGMPALLSLVSLLSVLLMGCVAETGTQCVNLTTRTQLPPAYTNSFTRGVYYPDKVFRSSVLHSTQDLFLPFFSNVTWFHAIHVSGTNGTKRFDNPVLPFNDGVYFASTEKSNIIRGWIFGTTLDSKTQSLLIVNNATNVVIKVCEFQFCNDPFLGVYYHKNNKSWMESEFRVYSSANNCTFEYVSQPFLMDLEGKQGNFKNLREFVFKNIDGYFKIYSKHTPINLVRDLPQGFSALEPTVDLPIGINITRFQTLLALHRSYLTPGDSSSGWTAGAAAYYVGYLQPRTFLLKYNENGTITDAVDCALDPLSETKCTLKSFTVEKGIYQTSNFRVQPTESIVRFPNITNLCPFGEVFNATRFASVYAWNRKRISNCVADYSVLYNSASFSTFKCYGVSPTKLNDLCFTNVYADSFVIRGDEVRQIAPGQTGKIADYNYKLPDDFTGCVIAWNSNNLDSKVGGNYNYLYRLFRKSNLKPFERDISTEIYQAGSTPCNGVEGFNCYFPLQSYGFQPTNGVGYQPYRVVVLSFELLHAPATVCGPKKSTNLVKNKCVNFNFNGLTGTGVLTESNKKFLPFQQFGRDIADTTDAVRDPQTLEILDITPCSFGGVSVITPGTNTSNQVAVLYQDVNCTEVPVAIHADQLTPTWRVYSTGSNVFQTRAGCLIGAEHVNNSYECDIPIGAGICASYQTQTNSPSGAGSVASQSIIAYTMSLGAENSVAYSNNSIAIPTNFTISVTTEILPVSMTKTSVDCTMYICGDSTECSNLLLQYGSFCTQLNRALTGIAVEQDKNTQEVFAQVKQIYKTPPIKDFGGFNFSQILPDPSKPSKRSFIEDLLFNKVTLADAGFIKQYGDCLGDIAARDLICAQKFNGLTVLPPLLTDEMIAQYTSALLAGTITSGWTFGAGAALQIPFAMQMAYRFNGIGVTQNVLYENQKLIANQFNSAIGKIQDSLSSTASALGKLQDVVNQNAQALNTLVKQLSSNFGAISSVLNDILSRLDPPEAEVQIDRLITGRLQSLQTYVTQQLIRAAEIRASANLAATKMSECVLGQSKRVDFCGKGYHLMSFPQSAPHGVVFLHVTYVPAQEKNFTTAPAICHDGKAHFPREGVFVSNGTHWFVTQRNFYEPQIITTDNTFVSGNCDVVIGIVNNTVYDPLQPELDSFKEELDKYFKNHTSPDVDLGDISGINASVVNIQKEIDRLNEVAKNLNESLIDLQELGKYEQYIKGSGRENLYFQGGGGSGYIPEAPRDGQAYVRKDGEWVLLSTFLGHHHHHHHH

SEQ ID NO: 1894 - protein, 1281 aa, Artificial Sequence
  Description of Artificial Sequence: Synthetic polypeptide
MGILPSPGMPALLSLVSLLSVLLMGCVAETGTQCVNLTTRTQLPPAYTNSFTRGVYYPDKVFRSSVLHSTQDLFLPFFSNVTWFHAIHVSGTNGTKRFDNPVLPFNDGVYFASTEKSNIIRGWIFGTTLDSKTQSLLIVNNATNVVIKVCEFQFCNDPFLGVYYHKNNKSWMESEFRVYSSANNCTFEYVSQPFLMDLEGKQGNFKNLREFVFKNIDGYFKIYSKHTPINLVRDLPQGFSALEPLVDLPIGINITRFQTLLALHRSYLTPGDSSSGWTAGAAAYYVGYLQPRTFLLKYNENGTITDAVDCALDPLSETKCTLKSFTVEKGIYQTSNFRVQPTESIVRFPNITNLCPFGEVFNATRFASVYAWNRKRISNCVADYSVLYNSASFSTFKCYGVSPTKLNDLCFTNVYADSFVIRGDEVRQIAPGQTGKIADYNYKLPDDFTGCVIAWNSNNLDSKVGGNYNYLYRLFRKSNLKPFERDISTEIYQAGSTPCNGVEGFNCYFPLQSYGFQPTNGVGYQPYRVVVLSFELLHAPATVCGPKKSTNLVKNKCVNFNFNGLTGTGVLTESNKKFLPFQQFGRDIADTTDAVRDPQTLEILDITPCSFGGVSVITPGTNTSNQVAVLYQDVNCTEVPVAIHADQLTPTWRVYSTGSNVFQTRAGCLIGAEHVNNSYECDIPIGAGICASYQTQTNSPSGAGSVASQSIIAYTMSLGAENSVAYSNNSIAIPTNFTISVTTEILPVSMTKTSVDCTMYICGDSTECSNLLLQYGSFCTQLNRALTGIAVEQDKNTQEVFAQVKQIYKTPPIKDFGGFNFSQILPDPSKPSKRSFIEDLLFNKVTLADAGFIKQYGDCLGDIAARDLICAQKFNGLTVLPPLLTDEMIAQYTSALLAGTITSGWTFGAGAALQIPFAMQMAYRFNGIGVTQNVLYENQKLIANQFNSAIGKIQDSLSSTASALGKLQDVVNQNAQALITLVKQLSSNFGAISSVLNDILSRLDPPEAEVQIDRLITGRLQSLQTYVTQQLIRAAEIRASANLAATKMSECVLGQSKRVDFCGKGYHLMSFPQSAPHGVVFLHVTYVPAQEKNFTTAPAICHDGKAHFPREGVFVSNGTHWFVTQRNFYEPQIITTDNTFVSGNCDVVIGIVNNTVYDPLQPELDSFKEELDKYFKNHTSPDVDLGDISGINASVVNIQKEIDRLNEVAKNLNESLIDLQELGKYEQYIKGSGRENLYFQGGGGSGYIPEAPRDGQAYVRKDGEWVLLSTFLGHHHHHHHH

SEQ ID NO: 1895 - protein, 1281 aa, Artificial Sequence
  Description of Artificial Sequence: Synthetic polypeptide
MGILPSPGMPALLSLVSLLSVLLMGCVAETGTQCVNLTTRTQLPPAYTNSFTRGVYYPDKVFRSSVLHSTQDLFLPFFSNVTWFHAIHVSGTNGTKRFDNPVLPFNDGVYFASTEKSNIIRGWIFGTTLDSKTQSLLIVNNATNVVIKVCEFQFCNDPFLGVYYHKNNKSWMESEFRVYSSANNCTFEYVSQPFLMDLEGKQGNFKNLREFVFKNIDGYFKIYSKHTPINLVRDLPQGFSALEPLVDLPIGINITRFQTLLALHRSYLTPGDSSSGWTAGAAAYYVGYLQPRTFLLKYNENGTITDAVDCALDPLSETKCTLKSFTVEKGIYQTSNFRVQPTESIVRFPNITNLCPFGEVFNATRFASVYAWNRKRISNCVADYSVLYNSASFSTFKCYGVSPTKLNDLCFTNVYADSFVIRGDEVRQIAPGQTGKIADYNYKLPDDFTGCVIAWNSNNLDSKVGGNYNYLYRLFRKSNLKPFERDISTEIYQAGSTPCNGVEGFNCYFPLQSYGFQPTNGVGYQPYRVVVLSFELLHAPATVCGPKKSTNLVKNKCVNFNFNGLTGTGVLTESNKKFLPFQQFGRDIADTTDAVRDPQTLEILDITPCSFGGVSVITPGTNTSNQVAVLYQDVNCTEVPVAIHADQLTPTWRVYSTGSNVFQTRAGCLIGAEHVNNSYECDIPIGAGICASYQTQTNSPSGAGSVASQSIIAYTMSLGAENSVAYSNNSIAIPTNFTISVTTEILPVSMTKTSVDCTMYICGDSTECSNLLLQYGSFCTQLNRALTGIAVEQDKNTQEVFAQVKQIYKTPPIKDFGGFNFSQILPDPSKPSKRSFIEDLLFNKVTLADAGFIKQYGDCLGDIAARDLICAQKFNGLTVLPPLLTDEMIAQYTSALLAGTITSGWTFGAGAALQIPFAMQMAYRFNGIGVTQNVLYENQKLIANQFNSAIGKIQDSLSSTASALSKLQDVVNQNAQALNTLVKQLSSNFGAISSVLNDILSRLDPPEAEVQIDRLITGRLQSLQTYVTQQLIRAAEIRASANLAATKMSECVLGQSKRVDFCGKGYHLMSFPQSAPHGVVFLHVTYVPAQEKNFTTAPAICHDGKAHFPREGVFVSNGTHWFVTQRNFYEPQIITTDNTFVSGNCDVVIGIVNNTVYDPLQPELDSFKEELDKYFKNHTSPDVDLGDISGINASVVNIQKEIDRLNEVAKNLNESLIDLQELGKYEQYIKGSGRENLYFQGGGGSGYIPEAPRDGQAYVRKDGEWVLLSTFLGHHHHHHHH

SEQ ID NO: 1896 - protein, 1281 aa, Artificial Sequence
  Description of Artificial Sequence: Synthetic polypeptide
MGILPSPGMPALLSLVSLLSVLLMGCVAETGTQCVNLTTRTQLPPAYTNSFTRGVYYPDKVFRSSVLHSTQDLFLPFFSNVTWFHAIHVSGTNGTKRFDNPVLPFNDGVYFASTEKSNIIRGWIFGTTLDSKTQSLLIVNNATNVVIKVCEFQFCNDPFLGVYYHKNNKSWMEFEFRVYSSANNCTFEYVSQPFLMDLEGKQGNFKNLREFVFKNIDGYFKIYSKHTPINLVRDLPQGFSALEPLVDLPIGINITRFQTLLALHRSYLTPGDSSSGWTAGAAAYYVGYLQPRTFLLKYNENGTITDAVDCALDPLSETKCTLKSFTVEKGIYQTSNFRVQPTESIVRFPNITNLCPFGEVFNATRFASVYAWNRKRISNCVADYSVLYNSASFSTFKCYGVSPTKLNDLCFTNVYADSFVIRGDEVRQIAPGQTGKIADYNYKLPDDFTGCVIAWNSNNLDSKVGGNYNYLYRLFRKSNLKPFERDISTEIYQAGSTPCNGVEGFNCYFPLQSYGFQPTNGVGYQPYRVVVLSFELLHAPATVCGPKKSTNLVKNKCVNFNFNGLTGTGVLTESNKKFLPFQQFGRDIADTTDAVRDPQTLEILDITPCSFGGVSVITPGTNTSNQVAVLYQDVNCTEVPVAIHADQLTPTWRVYSTGSNVFQTRAGCLIGAEHVNNSYECDIPIGAGICASYQTQTNSPSGAGSVASQSIIAYTMSLGAENSVAYSNNSIAIPTNFTISVTTEILPVSMTKTSVDCTMYICGDSTECSNLLLQYGSFCTQLNRALTGIAVEQDKNTQEVFAQVKQIYKTPPIKDFGGFNFSQILPDPSKPSKRSFIEDLLFNKVTLADAGFIKQYGDCLGDIAARDLICAQKFNGLTVLPPLLTDEMIAQYTSALLAGTITSGWTFGAGAALQIPFAMQMAYRFNGIGVTQNVLYENQKLIANQFNSAIGKIQDSLSSTASALGKLQDVVNQNAQALNTLVKQLSSNFGAISSVLNDILSRLDPPEAEVQIDRLITGRLQSLQTYVTQQLIRAAEIRASANLAATKMSECVLGQSKRVDFCGKGYHLMSFPQSAPHGVVFLHVTYVPAQEKNFTTAPAICHDGKAHFPREGVFVSNGTHWFVTQRNFYEPQIITTDNTFVSGNCDVVIGIVNNTVYDPLQPELDSFKEELDKYFKNHTSPDVDLGDISGINASVVNIQKEIDRLNEVAKNLNESLIDLQELGKYEQYIKGSGRENLYFQGGGGSGYIPEAPRDGQAYVRKDGEWVLLSTFLGHHHHHHHH

SEQ ID NO: 1897 - protein, 1281 aa, Artificial Sequence
  Description of Artificial Sequence: Synthetic polypeptide
MGILPSPGMPALLSLVSLLSVLLMGCVAETGTQCVNLTTRTQLPPAYTNSFTRGVYYPDKVFRSSVLHSTQDLFLPFFSNVTWFHAIHVSGTNGTKRFDNPVLPFNDGVYFASTEKSNIIRGWIFGTTLDSKTQSLLIVNNATNVVIKVCEFQFCNDPFLGVYYHKNNKSWMESEFRVYSSANNCTFEYVSQPFLMDLEGKQGNFKNLREFVFKNIDGYFKIYSKHTPINLVRDLPQGFSALEPLVDLPIGINITRFQTLLALHRSYLTPGDSSSGWTAGAAAYYVGYLQPRTFLLKYNENGTITDAVDCSYDPLSETKCTLKSFTVEKGIYQTSNFRVQPTESIVRFPNITNLCPFGEVFNATRFASVYAWNRKRISNCVADYSVLYNSASFSTFKCYGVSPTKLNDLCFTNVYADSFVIRGDEVRQIAPGQTGKIADYNYKLPDDFTGCVIAWNSNNLDSKVGGNYNYLYRLFRKSNLKPFERDISTEIYQAGSTPCNGVEGFNCYFPLQSYGFQPTNGVGYQPYRVVVLSFELLHAPATVCGPKKSTNLVKNKCVNFNFNGLTGTGVLTESNKKFLPFQQFGRDIADTTDAVRDPQTLEILDITPCSFGGVSVITPGTNTSNQVAVLYQDVNCTEVPEAIHADQLTPTWRVYSTGSNVFQTRAGCLIGAEHVNNSYECDIPIGAGICASYQTQTNSPSGAGSVASQSIIAYTMSLGAENSVAYSNNSIAIPTNFTISVTTEILPVSMTKTSVDCTMYICGDSTECSNLLLQYGSFCTQLNRALTGIAVEQDKNTQEVFAQVKQIYKTPPIKDFGGFNFSQILPDPSKPSKRSFIEDLLFNKVTLADAGFIKQYGDCLGDIAARDLICAQKFNGLTVLPPLLTDEMIAQYTSALLAGTITSGWTFGAGAALQIPFAMQMAYRFNGIGVTQNVLYENQKLIANQFNSAIGKIQDSLSSTASALGKLQDVVNQNAQALNTLVKQLSSNFGAISSVLNDILSRLDPPEAEVQIDRLITGRLQSLQTYVTQQLIRAAEIRASANLAATKMSECVLGQSKRVDFCGKGYHLMSFPQSAPHGVVFLHVTYVPAQEKNFTTAPAICHDGKAHFPREGVFVSNGTHWFVTQRNFYEPQIITTDNTFVSGNCDVVIGIVNNTVYDPLQPELDSFKEELDKYFKNHTSPDVDLGDISGINASVVNIQKEIDRLNEVAKNLNESLIDLQELGKYEQYIKGSGRENLYFQGGGGSGYIPEAPRDGQAYVRKDGEWVLLSTFLGHHHHHHHH

SEQ ID NO: 1898 - protein, 1281 aa, Artificial Sequence
  Description of Artificial Sequence: Synthetic polypeptide
MGILPSPGMPALLSLVSLLSVLLMGCVAETGTQCVNLTTRTQLPPAYTNSFTRGVYYPDKVFRSSVLHSTQDLFLPFFSNVTWFHAIHVSGTNGTKRFDNPVLPFNDGVYFASTEKSNIIRGWIFGTTLDSKTQSLLIVNNATNVVIKVCEFQFCNDPFLGVYYHKNNKSWMESEFRVYSSANNCTFEYVSQPFLMDLEGKQGNFKNLREFVFKNIDGYFKIYSKHTPINLVRDLPQGFSALEPLVDLPIGINITRFQTLLALHRSYLTPGDSSSGWTAGAAAYYVGYLQPRTFLLKYNENGTITDAVDCALDPLSETKCTLKSFTVEKGIYQTSNFRVQPTESIVRFPNITNLCPFGEVFNATRFASVYAWNRKRISNCVADYSVLYNSASFSTFKCYGVSPTKLNDLCFTNVYADSFVIRGDEVRQIAPGQTGKIADYNYKLPDDFTGCVIAWNSNNLDSKVGGNYNYLYRLFRKSNLKPFERDISTEIYQAGSTPCNGVEGFNCYFPLQSYGFQPTNGVGYQPYRVVVLSFELLHAPATVCGPKKSTNLVKNKCVNFNFNGLTGTGVLTESNKKFLPFQQFGRDIADTTDAVRDPQTLEILDITPCSFGGVSVITPGTNTSNQVAVLYQDVNCTEVPVGIHADQLTPTWRVYSTGSNVFQTRAGCLIGAEHVNNSYECDIPIGAGICASYQTQTNSPSGAGSVASQSIIAYTMSLGAENSVAYSNNSIAIPTNFTISVTTEILPVSMTKTSVDCTMYICGDSTECSNLLLQYGSFCTQLNRALTGIAVEQDKNTQEVFAQVKQIYKTPPIKDFGGFNFSQILPDPSKPSKRSFIEDLLFNKVTLADAGFIKQYGDCLGDIAARDLICAQKFNGLTVLPPLLTDEMIAQYTSALLAGTITSGWTFGAGAALQIPFAMQMAYRFNGIGVTQNVLYENQKLIANQFNSAIGKIQDSLSSTASALGKLQDVVNQNAQALNTLVKQLSSNFGAISSVLNDILSRLDPPEAEVQIDRLITGRLQSLQTYVTQQLIRAAEIRASANLAATKMSECVLGQSKRVDFCGKGYHLMSFPQSAPHGVVFLHVTYVPAQEKNFTTAPAICHDGKAHFPREGVFVSNGTHWFVTQRNFYEPQIITTDNTFVSGNCDVVIGIVNNTVYDPLQPELDSFKEELDKYFKNHTSPDVDLGDISGINASVVNIQKEIDRLNEVAKNLNESLIDLQELGKYEQYIKGSGRENLYFQGGGGSGYIPEAPRDGQAYVRKDGEWVLLSTFLGHHHHHHHH

SEQ ID NO: 1899 - protein, 1281 aa, Artificial Sequence
  Description of Artificial Sequence: Synthetic polypeptide
MGILPSPGMPALLSLVSLLSVLLMGCVAETGTQCVNLTTRTQLPPAYTNSFRRGVYYPDKIFRSNVLHSTQDLFLPFFSNVTWFHAIHVSGTNGTKRFDNPVLPFNDGVYFASTEKSNIIRGWIFGTTLDSKTQSLLIVNNATNVVIKVCEFQFCNDPFLGVYYHKNNKSWMESEFRVYSSANNCTFEYVSQPFLMDLEGKQGNFKNLREFVFKNIDGYFKIYSKHTPINLVRDLPQGFSALEPLMKLPIGINITRFQTLLALHRSYLTPGDSSSGWTAGAAAYYVGYLQPRTFLLKYNENGTITDAVDCSLDPLSETKCTLKSFTVEKGIYQTSNFRVQPTESIVRFPNITNLCPFGEVFNATRFASVYAWNRKRISNCVADYSVLYNSASFSTFKCYGVSPTKLNDLCFTNVYADSFVIRGDEVRQIAPGQTGKIADYNYKLPDDFTGCVIAWNSNNLDSKVGGNYNYLYRLFRKSNLKPFERDISTEIYQAGSTPCNGVEGFNCYFPLQSYGFQPTNGVGYQPYRVVVLSFELLHAPATVCGPKKSTNLVKNKCVNFNFNGLTGTGVLTESNKKFLPFQQFGRDIADTTDAVRDPQTLEILDITPCSFGGVSVITPGTNTSNQVAVLYQDVNCTEVPVAIHADQLTPTWRVYSTGSNVFQTRAGCLIGAEHVNNSYECDIPIGAGICASYQTQTNSPSGAGSVASQSIIAYTMSLGAENSVAYSNNSIAIPTNFTISVTTEILPVSMTKTSVDCTMYICGDSTECSNLLLQYGSFCTQLNRALTGIAVEQDKNTQEVFAQVKQIYKTPPIKDFGGFNFSQILPDPSKPSKRSFIEDLLFNKVTLADAGFIKQYGDCLGDIAARDLICAQKFNGLTVLPPLLTDEMIAQYTSALLAGTITSGWTFGAGAALQIPFAMQMAYRFNGIGVTQNVLYENQKLIANQFNSAIGKIQDSLSSTASALGKLQDVVNQNAQALNTLVKQLSSNFGAISSVLNDILSRLDPPEAEVQIDRLITGRLQSLQTYVTQQLIRAAEIRASANLAATKMSECVLGQSKRVDFCGKGYHLMSFPQSAPHGVVFLHVTYVPAQEKNFTTAPAICHDGKAHFPREGVFVSNGTHWFVTQRNFYEPQIITTDNTFVSGNCDVVIGIVNNTVYDPLQPELDSFKEELDKYFKNHTSPDVDLGDISGINASVVNIQKEIDRLNEVAKNLNESLIDLQELGKYEQYIKGSGRENLYFQGGGGSGYIPEAPRDGQAYVRKDGEWVLLSTFLGHHHHHHHH

SEQ ID NO: 1900 - protein, 1281 aa, Artificial Sequence
  Description of Artificial Sequence: Synthetic polypeptide
MGILPSPGMPALLSLVSLLSVLLMGCVAETGTQCVNLTTRTQLPPAYTNSFTRGVYYPDKVFRSSVLHSTQDLFLPFFSNVTWFHAIHVSGTNGTKRFDNPVLPFNDGVYFASTEKSNIIRGWIFGTTLDSKTQSLLIVNNATNVVIKVCEFQFCNDPFLGVYYHKNNKSWMESEFRVYSSANNCTFEYVSQPFAMDLEGKQGNFKNLREFVFKNIDGYFKIYSKHTPINLVRDLPQGFSALEPLVDLPIGINITRFQTLLALHRSYLTPGDSSSGWTAGAAAYYVGYLQPRTFLLKYNENGTITDAVDCALDPLSETKCTLKSFTVEKGIYQTSNFRVQPTESIVRFPNITNLCPFGEVFNATRFASVYAWNRKRISNCVADYSVLYNSASFSTFKCYGVSPTKLNDLCFTNVYADSFVIRGDEVRQIAPGQTGKIADYNYKLPDDFTGCVIAWNSNNLDSKVGGNYNYLYRLFRKSNLKPFERDISTEIYQAGSTPCNGVEGFNCYFPLQSYGFQPTNGVGYQPYRVVVLSFELLHAPATVCGPKKSTNLVKNKCVNFNFNGLTGTGVLTESNKKFLPFQQFGRDIADTTDAVRDPQTLEILDITPCSFGGVSVITPGTNTSNQVAVLYQDVNCTEVPVAIHADQLTPTWRVYSTGSNVFQTRAGCLIGAEHVNNSYECDIPIGAGICASYQTQTNSPSGAGSVASQSIIAYTMSLGAENSVAYSNNSIAIPTNFTISVTTEILPVSMTKTSVDCTMYICGDSTECSNLLLQYGSFCTQLNRALTGIAVEQDKNTQEVFAQVKQIYKTPPIKDFGGFNFSQILPDPSKPSKRSFIEDLLFNKVTLADAGFIKQYGDCLGDIAARDLICAQKFNGLTVLPPLLTDEMIAQYTSALLAGTITSGWTFGAGAALQIPFAMQMAYRFNGIGVTQNVLYENQKLIANQFNSAIGKIQDSLSSTASALGKLQDVVNQNAQALNTLVKQLSSNFGAISSVLNDILSRLDPPEAEVQIDRLITGRLQSLQTYVTQQLIRAAEIRASANLAATKMSECVLGQSKRVDFCGKGYHLMSFPQSAPHGVVFLHVTYVPAQEKNFTTAPAICHDGKAHFPREGVFVSNGTHWFVTQRNFYEPQIITTDNTFVSGNCDVVIGIVNNTVYDPLQPELDSFKEELDKYFKNHTSPDVDLGDISGINASVVNIQKEIDRLNEVAKNLNESLIDLQELGKYEQYIKGSGRENLYFQGGGGSGYIPEAPRDGQAYVRKDGEWVLLSTFLGHHHHHHHH

SEQ ID NO: 1901 - protein, 1281 aa, Artificial Sequence
  Description of Artificial Sequence: Synthetic polypeptide
MGILPSPGMPALLSLVSLLSVLLMGCVAETGTQCVNLTTRTQLPPAYTNSFTRGVYYPDKVFRSSVLHSTQDLFLPFFSNVTWFHAIHVSGTNGTKRFDNPVLPFNDGVYFASTEKSNIIRGWIFGTTLDSKTQSLLIVNNATNVVIKVCEFQFCNDPFLGVYYHKNNKSWMESEFRVYSSANNCTFEYVSQPFLMDLEGKQGNFKNLREFVFKNIDGYFKIYSKHTPINLVRDLPQGFSALEPLVDLPIGINITRFQTLLALHRSYLTPGDSSSGWTAGAAAYYVGYLQPRTFLLKYNENGTITDAVDCALDPLSETKCTLKSFTVEKGIYQTSNFRVQPTESIVRFPNITNLCPFGEVFNATRFASVYAWNRKRISNCVADYSVLYNSASFSTFKCYGVSPTKLNDLCFTNVYADSFVIRGDEVRQIAPGQTGKIADYNYKLPDDFTGCVIAWNSNNLDSKVGGNYNYLYRLFRKSNLKPFERDISTEIYQAGSTPCNGVEGFNCYFPLQSYGFQPTNGVGYQPYRVVVLSFELLHAPATVCGPKKSTNLVKNKCVNFNFNGLTGTGVLTESNKKFLPFQQFGRDIADTTDAVRDPQTLEILDITPCSFGGVSVITPGTNTSNQVAVLYQDVNCTEVPVAIHADQLTPTWRVYSTGSNVFQTRAGCLIGAEHVNNSYECDIPIGAGICASYQTQTNSPSGAGSVASQSIIAYTMSLGAENSVAYSNNSIAIPTNFTISVQTEILPVSMTKTSVDCTMYICGDSTECSNLLLQYGSFCTQLNRALTGIAVEQDKNTQEVFAQVKQIYKTPPIKDFGGFNFSQILPDPSKPSKRSFIEDLLFNKVTLADAGFIKQYGDCLGDIAARDLICAQKFNGLTVLPPLLTDEMIAQYTSALLAGTITSGWTFGAGAALQIPFAMQMAYRFNGIGVTQNVLYENQKLIANQFNSAIGKIQDSLSSTASALGKLQDVVNQNAQALNTLVKQLSSNFGAISSVLNDILSRLDPPEAEVQIDRLITGRLQSLQTYVTQQLIRAAEIRASANLAATKMSECVLGQSKRVDFCGKGYHLMSFPQSAPHGVVFLHVTYVPAQEKNFTTAPAICHDGKAHFPREGVFVSNGTHWFVTQRNFYEPQIITTDNTFVSGNCDVVIGIVNNTVYDPLQPELDSFKEELDKYFKNHTSPDVDLGDISGINASVVNIQKEIDRLNEVAKNLNESLIDLQELGKYEQYIKGSGRENLYFQGGGGSGYIPEAPRDGQAYVRKDGEWVLLSTFLGHHHHHHHH

SEQ ID NO: 1902 - protein, 1281 aa, Artificial Sequence
  Description of Artificial Sequence: Synthetic polypeptide
MGILPSPGMPALLSLVSLLSVLLMGCVAETGTQCVNLTTRTQLPPAYTNSFTRGVYYPDKVFRSSVLHSTQDLFLPFFSNVTWFHAIHVSGTNGTKRFDNPVLPFNDGVYFASTEKSNIIRGWIFGTTLDSKTQSLLIVNNATNVVIKVCEFQFCNDPFLGVYYHKNNKSWMESEFRVYSSANNCTFEYVSQPFLMDLEGKQGNFKNLREFVFKNIDGYFKIYSKHTPINLVRDLPQGFSALEPLVDLPIGINITRFQTLLALHRSYLTPGDSSSGWTAGAAAYYVGYLQPRTFLLKYDENGTITDAVDCALDPLSETKCTLKSFTVEKGIYQTSNFRVQPTESIVRFPNITNLCPFGEVFNATRFASVYAWNRKRISNCVADYSVLYNSASFSTFKCYGVSPTKLNDLCFTNVYADSFVIRGDEVRQIAPGQTGKIADYNYKLPDDFTGCVIAWNSNNLDSKVGGNYNYLYRLFRKSNLKPFERDISTEIYQAGSTPCNGVEGFNCYFPLQSYGFQPTNGVGYQPYRVVVLSFELLHAPATVCGPKKSTNLVKNKCVNFNFNGLTGTGVLTESNKKFLPFQQFGRDIADTTDAVRDPQTLEILDITPCSFGGVSVITPGTNTSNQVAVLYQDVNCTEVPVAIHADQLTPTWRVYSTGSNVFQTRAGCLIGAEHVNNSYECDIPIGAGICASYQTQTNSPSGAGSVASQSIIAYTMSLGAENSVAYSNNSIAIPTNFTISVTTEILPVSMTKTSVDCTMYICGDSTECSNLLLQYGSFCTQLNRALTGIAVEQDKNTQEVFAQVKQIYKTPPIKDFGGFNFSQILPDPSKPSKRSFIEDLLFNKVTLADAGFIKQYGDCLGDIAARDLICAQKFNGLTVLPPLLTDEMIAQYTSALLAGTITSGWTFGAGAALQIPFAMQMAYRFNGIGVTQNVLYENQKLIANQFNSAIGKIQDSLSSTASALGKLQDVVNQNAQALNTLVKQLSSNFGAISSVLNDILSRLDPPEAEVQIDRLITGRLQSLQTYVTQQLIRAAEIRASANLAATKMSECVLGQSKRVDFCGKGYHLMSFPQSAPHGVVFLHVTYVPAQEKNFTTAPAICHDGKAHFPREGVFVSNGTHWFVTQRNFYEPQIITTDNTFVSGNCDVVIGIVNNTVYDPLQPELDSFKEELDKYFKNHTSPDVDLGDISGINASVVNIQKEIDRLNEVAKNLNESLIDLQELGKYEQYIKGSGRENLYFQGGGGSGYIPEAPRDGQAYVRKDGEWVLLSTFLGHHHHHHHH

SEQ ID NO: 1903 - protein, 1281 aa, Artificial Sequence
  Description of Artificial Sequence: Synthetic polypeptide
MGILPSPGMPALLSLVSLLSVLLMGCVAETGTQCVNLTTRTQLPPAYTNSFTRGVYYPDKVFRSSVLHSTQDLFLPFFSNVTWFHAIHVSGTNGTKRFDNPVLPFNDGVYFASTEKSNIIRGWIFGTTLDSKTQSLLIVNNATNVVIKVCEFQFCNDPFLGVYYHKNNKSWMESEFRVYSSANNCTFEYVSQPFLMDLEGKQGNFKNLREFVFKNIDGYFKIYSKHTPINLVRDLPQGFSALEPLVDLPIGINITRFQTLLALHRSYLTPGDSSSGWTAGAAAYYVGYLQPRTFLLKYNENGTITDAVDCALDPLSETKCSLKSFTVEKGIYQTSNFRVQPTESIVRFPNITNLCPFGEVFNATRFASVYAWNRKRISNCVADYSVLYNSASFSTFKCYGVSPTKLNDLCFTNVYADSFVIRGDEVRQIAPGQTGKIADYNYKLPDDFTGCVIAWNSNNLDSKVGGNYNYLYRLFRKSNLKPFERDISTEIYQAGSTPCNGVEGFNCYFPLQSYGFQPTNGVGYQPYRVVVLSFELLHAPATVCGPKKSTNLVKNKCVNFNFNGLTGTGVLTESNKKFLPFQQFGRDIADTTDAVRDPQTLEILDITPCSFGGVSVITPGTNTSNQVAVLYQDVNCTEVPVAIHADQLTPTWRVYSTGSNVFQTRAGCLIGAEHVNNSYECDIPIGAGICASYQTQTNSPSGAGSVASQSIIAYTMSLGAENSVAYSNNSIAIPTNFTISVTTEILPVSMTKTSVDCTMYICGDSTECSNLLLQYGSFCTQLNRALTGIAVEQDKNTQEVFAQVKQIYKTPPIKDFGGFNFSQILPDPSKPSKRSFIEDLLFNKVTLADAGFIKQYGDCLGDIAARDLICAQKFNGLTVLPPLLTDEMIAQYTSALLAGTITSGWTFGAGAALQIPFAMQMAYRFNGIGVTQNVLYENQKLIANQFNSAIGKIQDSLSSTASALGKLQDVVNQNAQALNTLVKQLSSNFGAISSVLNDILSRLDPPEAEVQIDRLITGRLQSLQTYVTQQLIRAAEIRASANLAATKMSECVLGQSKRVDFCGKGYHLMSFPQSAPHGVVFLHVTYVPAQEKNFTTAPAICHDGKAHFPREGVFVSNGTHWFVTQRNFYEPQIITTDNTFVSGNCDVVIGIVNNTVYDPLQPELDSFKEELDKYFKNHTSPDVDLGDISGINASVVNIQKEIDRLNEVAKNLNESLIDLQELGKYEQYIKGSGRENLYFQGGGGSGYIPEAPRDGQAYVRKDGEWVLLSTFLGHHHHHHHH

SEQ ID NO: 1904 - protein, 1281 aa, Artificial Sequence
  Description of Artificial Sequence: Synthetic polypeptide
MGILPSPGMPALLSLVSLLSVLLMGCVAETGTQCVNLTTRTQLPPAYTNSFTRGVYYPDKVFRSSVLHSTQDLFLPFFSNVTWFHAIHVSGTNGTKRFDNPVLPFNDGVYFASTEKSNIIRGWIFGTTLDSKTQSLLIVNNATNVVIKVCEFQFCNDPFLGVYYHKNNKSWMESEFRVYSSANNCTFEYVSQPFLMDLEGKQGNFKNLREFVFKNIDGYFKIYSKHTPINLVRDLPQGFSALEPLVDLPIGINITRFQTLLALHRSYLTPGDSSSGWTAGAAAYYVGYLQPRTFLLKYNENGTITDAVDCALDPLSETKCTLKSFTVEKGIYQTSNFRVQPTESIVRFPNITNLCPFGEVFNATRFASVYAWNRKRISNCVADYSVLYNSASFSTFKCYGVSPTKLNDLCFTNVYADSFVIRGDEVRQIAPGQTGKIADYNYKLPDDFTGCVIAWNSNNLDSKVGGNYNYLYRLFRKSNLKPFERDISTEIYQAGSTPCNGVEGFNCYFPLQSYGFQPTNGVGYQPYRVVVLSFELLHAPATVCGPKKSTNLVKNKCVNFNFNGLTGTGVLTESNKKFLPFQQFGRDIADTTDAVRDPQTLEILDITPCSFGGVSVITPGTNTSNQVAVLYQDVNCTEVPVAIHADQLTPTWRVYSTGSNVFQTRAGCLIGAEHVNNSYECDIPIGAGICASYQTQTNSPSGAGSVASQSIIAYTMSLGAENSVAYSNNSIAIPTNFTISVTTEILPVSMTKTSVDCTMYICGDSTECSNLLLQYGSFCTQLNRALTGIAVEQDKNTQEVFAQVKQMYKTPPIKDFGGFNFSQILPDPSKPSKRSFIEDLLFNKVTLADAGFIKQYGDCLGDIAARDLICAQKFNGLTVLPPLLTDEMIAQYTSALLAGTITSGWTFGAGAALQIPFAMQMAYRFNGIGVTQNVLYENQKLIANQFNSAIGKIQDSLSSTASALGKLQDVVNQNAQALNTLVKQLSSNFGAISSVLNDILSRLDPPEAEVQIDRLITGRLQSLQTYVTQQLIRAAEIRASANLAATKMSECVLGQSKRVDFCGKGYHLMSFPQSAPHGVVFLHVTYVPAQEKNFTTAPAICHDGKAHFPREGVFVSNGTHWFVTQRNFYEPQIITTDNTFVSGNCDVVIGIVNNTVYDPLQPELDSFKEELDKYFKNHTSPDVDLGDISGINASVVNIQKEIDRLNEVAKNLNESLIDLQELGKYEQYIKGSGRENLYFQGGGGSGYIPEAPRDGQAYVRKDGEWVLLSTFLGHHHHHHHH

SEQ ID NO: 1905 - protein, 1281 aa, Artificial Sequence
  Description of Artificial Sequence: Synthetic polypeptide
MGILPSPGMPALLSLVSLLSVLLMGCVAETGTQCVNLTTRTQLPPAYTNSFTRGVYYPDKVFRSSVLHSTQDLFLPFFSNVTWFHAIHVSGTNGTKRFDNPVLPFNDGVYFASTEKSNIIRGWIFGTTLDSKTQSLLIVNNATNVVIKVCEFQFCNDPFLGVYYHKNNKSWMESEFRVYSSANNCTFEYVSQPFLMDLEGKQGNFKNLREFVFKNIDGYFKIYSKHTPINLVRDLPQGFSALEPLVDLPIGINITRFQTLLALHRSYLTPGDSSSGWTAGAAAYYVGYLQPRTFLLKYNENGTITDAVDCALDPLSETKCTLKSFTVEKGIYQTSNFRVQPTESIVRFPNITNLCPFGEVFNATRFASVYAWNRKRISNCVADYSVLYNSASFSTFKCYGVSPTKLNDLCFTNVYADSFVIRGDEVRQIAPGQTGKIADYNYKLPDDFTGCVIAWNSNNLDSKVGGNYNYLYRLFRKSNLKPFERDISTEIYQAGSTPCNGVEGFNCYFPLQSYGFQPTNGVGYQPYRVVVLSFELLHAPATVCGPKKSTNLVKNKCVNFNFNGLTGTGVLTESNKKFLPFQQFGRDIADTTDAVRDPQTLEILDITPCSFGGVSVITPGTNTSNQVAVLYQDVNCTEVPVAIHADQLTPTWRVYSTGSNVFQTRAGCLIGAEHVNNSYECDIPIGAGICASYQTQTNSPSGAGSVASQSIIAYTMSLGAENSVAYSNNSIAIPTNFTISVTTEILPVSMTKTSVDCTMYICGDSTECSNLLLQYGSFCTQLNRALTGIAVEQDKNTQEVFAQVKQIYKTPPIKDFGGFNFSQILPDPSKPSKRSFIEDLLFNKVTLADAGFIKQYGDCLGDIAARDLICAQKFNGLTVLPPLLTDEMIAQYTSALLAGTITSGWTFGAGAALQIPFAMQMAYRFNGIGVTQNVLYENQKLIANQFNSAIGKIQDSLSSTASALGKLQDVVNQNAQALNTLVKQLSSNFGAISSVLNDILSRLDPPEAEVQIDRLITGRLQSLQTYVTQQLIRAAEIRASANLAATKMSECVLGQSKRVDFCGKGYHLMSFPQSAPHGVVFLHVTYVPAQEKNFTTAPAICHDGKAHFPREGVFVSNGTHWFVTQRNFYEPQIITTDNTFVSGNCDVVYGIVNNTVYDPLQPELDSFKEELDKYFKNHTSPDVDLGDISGINASVVNIQKEIDRLNEVAKNLNESLIDLQELGKYEQYIKGSGRENLYFQGGGGSGYIPEAPRDGQAYVRKDGEWVLLSTFLGHHHHHHHH

SEQ ID NO: 1906 - protein, 1281 aa, Artificial Sequence
  Description of Artificial Sequence: Synthetic polypeptide
MGILPSPGMPALLSLVSLLSVLLMGCVAETGTQCVNLTTRTQLPPAYTNSFTRGVYYPDKVFRSSVLHSTQDLFLPFFSNVTWFHAIHVSGTNGTKRFDNPVLPFNDGVYFASTEKSNIIRGWIFGTTLDSKTQSLLIVNNATNVVIKVCEFQFCNDPFLGVYYHKNNKSWMESEFRVYSSANNCTFEYVSQPFLMDLEGKQGNFKNLREFVFKNIDGYFKIYSKHTPINLVRDLPQGFSALEPLVDLPIGINITRFQTLLALHRSYLTPGDSSSGWTAGAAAYYVGYLQPRTFLLKYNENGTITDAVDCSLDPLSETKCTLKSFTVEKGIYQTSNFRVQPTESIVRFPNITNLCPFGEVFNATRFASVYAWNRKRISNCVADYSVLYNSASFSTFKCYGVSPTKLNDLCFTNVYADSFVIRGDEVRQIAPGQTGKIADYNYKLPDDFTGCVIAWNSNNLDSKVGGNYNYLYRLFRKSNLKPFERDISTEIYQAGSTPCNGVEGFNCYFPLQSYGFQPTNGVGYQPYRVVVLSFELLHAPATVCGPKKSTNLVKNKCVNFNFNGLTGTGVLTESNKKFLPFQQFGRDIADTTDAVRDPQTLEILDITPCSFGGVSVITPGTNTSNQVAVLYQDVNCTEVPEAIHSNQLRPTWRVYSTGSNVFQTRAGCLIGAEHVNNSYECDIPIGNGICASYQTQTNSPSGSGSVSSQSIIAYTMSLGAENSVAYSNNSIAIPTNFTISVTTEILPVSMTKTSVDCTMYICGDSTECSNLLLQYGSFCTQLNRALTGIAVEQDKNTQEVFAQVKQIYKTPPIKDFGGFNFSQILPDPSKPSKRSFIEDLLFNKVTLADAGFIKQYGDCLGDIAARDLICAQKFNGLTVLPPLLTDEMIAQYTSALLAGTITSGWTFGAGAALQIPFAMQMAYRFNGIGVTQNVLYENQKLIANQFNSAIGKIQDSLSSTASALGKLQDVVNQNAQALNTLVKQLSSNFGAISSVLNDILSRLDPPEAEVQIDRLITGRLQSLQTYVTQQLIRAAEIRASANLAATKMSECVLGQSKRVDFCGKGYHLMSFPQSAPHGVVFLHVTYVPAQEKNFTTAPAICHDGKAHFPREGVFVSNGTHWFVTQRNFYEPQIITTDNTFVSGNCDVVIGIVNNTVYDPLQPELDSFKEELDKYFKNHTSPDVDLGDISGINASVVNIQKEIDRLNEVAKNLNESLIDLQELGKYEQYIKGSGRENLYFQGGGGSGYIPEAPRDGQAYVRKDGEWVLLSTFLGHHHHHHHH

SEQ ID NO: 1907 - protein, 1281 aa, Artificial Sequence
  Description of Artificial Sequence: Synthetic polypeptide
MGILPSPGMPALLSLVSLLSVLLMGCVAETGTQCVNLTTRTQLPPAYTNSFTRGVYYPDKVFRSSVLHSTQDLFLPFFSNVTWFHAIHVSGTNGTKRFDNPVLPFNDGVYFASTEKSNIIRGWIFGTTLDSKTQSLLIVNNATNVVIKVCEFQFCNDPFLGVYYHKNNKSWMESEFRVYSSANNCTFEYVSQPFLMDLEGKQGNFKNLREFVFKNIDGYFKIYSKHTPINLVRDLPQGFSALEPLVDLPIGINITRFQTLLALHRSYLTPGDSSSGWTAGAAAYYVGYLQPRTFLLKYNENGTITDAVDCAFDPLSETKCTLKSFTVEKGIYQTSNFRVQPTESIVRFPNITNLCPFGEVFNATRFASVYAWNRKRISNCVADYSVLYNSASFSTFKCYGVSPTKLNDLCFTNVYADSFVIRGDEVRQIAPGQTGKIADYNYKLPDDFTGCVIAWNSNNLDSKVGGNYNYLYRLFRKSNLKPFERDISTEIYQAGSTPCNGVEGFNCYFPLQSYGFQPTNGVGYQPYRVVVLSFELLHAPATVCGPKKSTNLVKNKCVNFNFNGLTGTGVLTESNKKFLPFQQFGRDIADTTDAVRDPQTLEILDITPCSFGGVSVITPGTNTSNQVAVLYQDVNCTEVPVAIHADQLTPTWRVYSTGSNVFQTRAGCLIGAEHVNNSYECDIPIGAGICASYQTQTNSPSGAGSVASQSIIAYTMSLGAENSVAYSNNSIAIPTNFTISVTTEILPVSMTKTSVDCTMYICGDSTECSNLLLQYGSFCTQLNRALTGIAVEQDKNTQEVFAQVKQIYKTPPIKDFGGFNFSQILPDPSKPSKRSFIEDLLFNKVTLADAGFIKQYGDCLGDIAARDLICAQKFNGLTVLPPLLTDEMIAQYTSALLAGTITSGWTFGAGAALQIPFAMQMAYRFNGIGVTQNVLYENQKLIANQFNSAIGKIQDSLSSTASALGKLQDVVNQNAQALNTLVKQLSSNFGAISSVLNDILSRLDPPEAEVQIDRLITGRLQSLQTYVTQQLIRAAEIRASANLAATKMSECVLGQSKRVDFCGKGYHLMSFPQSAPHGVVFLHVTYVPAQEKNFTTAPAICHDGKAHFPREGVFVSNGTHWFVTQRNFYEPQIITTDNTFVSGNCDVVIGIVNNTVYDPLQPELDSFKEELDKYFKNHTSPDVDLGDISGINASVVNIQKEIDRLNEVAKNLNESLIDLQELGKYEQYIKGSGRENLYFQGGGGSGYIPEAPRDGQAYVRKDGEWVLLSTFLGHHHHHHHH

SEQ ID NO: 1908 - protein, 1281 aa, Artificial Sequence
  Description of Artificial Sequence: Synthetic polypeptide
MGILPSPGMPALLSLVSLLSVLLMGCVAETGTQCVNLTTRTQLPPAYTNSFTRGVYYPDKVFRSDVLHSTQDLFLPFFSNVTWFHAIHVSGTNGTKRFDNPVLPFNDGVYFASTEKSNIIRGWIFGTTLDSKTQSLLIVNNATNVVIKVCEFQFCENPFLGVYYHKNNKSWMEKEFRVYSSANNCTFEYVSQPFLMDLGGKQGNFKNLREFVFKNIDGYFKIYSKHTPINLVRDLPQGFSALEPLMDLPIGINITRFQTLLALHRSYLTPGDSSSGWTAGAAAYYVGYLQPRTFLLKYNENGTITDAVDCALDPLSETKCTLKSFTVEKGIYQTSNFRVQPTESIVRFPNITNLCPFGEVFNATRFASVYAWNRKRISNCVADYSVLYNSASFSTFKCYGVSPTKLNDLCFTNVYADSFVIRGDEVRQIAPGQTGKIADYNYKLPDDFTGCVIAWNSNNLDSKVGGNYNYLYRLFRKSNLKPFERDISTEIYQAGSTPCNGVEGFNCYFPLQSYGFQPTNGVGYQPYRVVVLSFELLHAPATVCGPKKSTNLVKNKCVNFNFNGLTGTGVLTESNKKFLPFQQFGRDIADNTDAVRDPQTLEILDITPCSFGGVSVITPGTNTSNQVAVLYQDVNCTEVPNAIHADQLTPTWRVYSTGSNVFQTRAGCLIGAEHVNNSYECDIPIGAGICASYQTQTNSPSGAGSVASQSIIAYTMSLGAENSVAYSNNSIAIPTNFTISVTTEILPVSMTKTSVDCTMYICGDSTECSNLLLQYGSFCTQLNRALQGIAQEQDKNTQEVFAQVKQIYKTPPIKDFGGFNFSQILPDPSKPSKRSFIEDLLFNKVTLADAGFIKQYGDCLGDIAARDLICAQKFNGLTVLPPLLTDEMIAQYTSALLAGTITSGWTFGAGAALQIPFAMQMAYRFNGIGVTQNVLYENQKLIANQFNKAIGKIQDSLSSTASALGKLQDVVNQNAQALNTLVKQLSSNFGAISSVLNDILSRLDPPEAEVQIDRLITGRLQSLQTYVTQQLIRAAEIRASANLAATKMSECVLGQSKRVDFCGKGYHLMSFPQSAPHGVVFLHVTYVPAQEKNFTTAPAICHDGKAFFPREGVFVSNGTQWFVTQRNFYEPQIITTDNTFVSGNCDVVIGIVNNTVYDPLQPELDSFKEELDKYFKNHTSPDVDLGDISGINASVVNIQKEIDRLNEVAKNLNESLIDLQELGKYEQYIKGSGRENLYFQGGGGSGYIPEAPRDGQAYVRKDGEWVLLSTFLGHHHHHHHH

SEQ ID NO: 1909 - protein, 1281 aa, Artificial Sequence
  Description of Artificial Sequence: Synthetic polypeptide
MGILPSPGMPALLSLVSLLSVLLMGCVAETGTQCVNLTTRTQLPPAYTNSFTRGVYYPDKVFRSSVLHSTQDLFLPFFSNVTWFHALHVKGTNGTKRFDNPVLPFNDGVYFAAIEKSNIIRGWIFGTTLDSKTQSLLIVNNATNVVIKVCEFQFCNDPFLGVYYHKNNKSWMESEFRVYSSANNCTFEYVSQPFLYDLNGKQGNFHHLREFVFKNIDGYFKIYSKWEPINLVRDLPQGFSALEPLVDLPIGINITRFQTFLSLSRSYRTPGDSSSGWTAGAAAYYVGYLQPRTFLLKYNENGTITDAVDCALDPLSETKCTLKSFTVEKGIYQTSNFRVQPTESIVRFPNITNLCPFGEVFNATRFASVYAWNRKRISNCVADYSVLYNSASFSTFKCYGVSPTKLNDLCFTNVYADSFVIRGDEVRQIAPGQTGKIADYNYKLPDDFTGCVIAWNSNNLDSKVGGNYNYLYRLFRKSNLKPFERDISTEIYQAGSTPCNGVEGFNCYFPLQSYGFQPTNGVGYQPYRVVVLSFELLHAPATVCGPKKSTNLVKNKCVNFNFNGLTGTGVLTESNKKFLPFQQFGRDIADTTDAVRDPQTLEILDITPCSFGGVSVITPGTNTSNQVAVLYQDVNCTEVPVAIHADQLTPTWRVYSTGSNVFQTRAGCLIGAEHVNNSYECDIPIGAGICASYQTQTNSPSGAGSVASQSIIAYTMSLGAENSVAYSNNSIAIPTNFTISVTTEILPVSMTKTSVDCTMYICGDSTECSNLLLQYGSFCTQLNRALTGIAVEQDKNTQEVFAQVKQIYKTPPIKDFGGFNFSQILPDPSKPSKRSFIEDLLFNKVTLADAGFIKQYGDCLGDIAARDLICAQKFNGLTVLPPLLTDEMIAQYTSALLAGTITSGWTFGAGAALQIPFAMQMAYRFNGIGVTQNVLYENQKLIANQFNSAIGKIQDSLSSTASALGKLQDVVNQNAQALNTLVKQLSSNFGAISSVLNDILSRLDPPEAEVQIDRLITGRLQSLQTYVTQQLIRAAEIRASANLAATKMSECVLGQSKRVDFCGKGYHLMSFPQSAPHGVVFLHVTYVPAQEKNFTTAPAICHDGKAHFPREGVFVSNGTHWFVTQRNFYEPQIITTDNTFVSGNCDVVIGIVNNTVYDPLQPELDSFKEELDKYFKNHTSPDVDLGDISGINASVVNIQKEIDRLNEVAKNLNESLIDLQELGKYEQYIKGSGRENLYFQGGGGSGYIPEAPRDGQAYVRKDGEWVLLSTFLGHHHHHHHH

SEQ ID NO: 1910 - protein, 1281 aa, Artificial Sequence
  Description of Artificial Sequence: Synthetic polypeptide
MGILPSPGMPALLSLVSLLSVLLMGCVAETGTQCVNLTTRTQLPPAYTNSFTRGVYYPDKVFRSSVLHSTQDLFLPFFSNVTWFHAIHVSGTNGTKRFDNPVLPFNDGVYFASTEKSNIIRGWIFGTTLDSKTQSLLIVNNATNVVIKVCEFQFCNDPFLGVYYHKNNKSWMESEFRVYSSANNCTFEYVSQPFLMDLEGKQGNFKNLREFVFKNIDGYFKIYSKHTPINLVRDLPQGFSALEPLVDLPIGINITRFQTLLALHRSYLTPGDSSSGWTAGAAAYYVGYLQPRTFLLKYNENGTITDAVDCALDPLSETKCTLKSFTVEKGIYQTSNFRVQPTESIVRFPNITNLCPFGEVFNATRFASVYAWNRKRISNCVADYSVLYNSASFSTFKCYGVSPTKLNDLCFTNVYADSFVIRGDEVRQIAPGQTGKIADYNYKLPDDFTGCVIAWNSNNLDSKVGGNYNYLYRLFRKSNLKPFERDISTEIYQAGSTPCNGVEGFNCYFPLQSYGFQPTNGVGYQPYRVVVLSFELLHAPATVCGPKKSTNLVKNKCVNFNFNGLTGTGVLTESNKKFLPFQQFGRDIADTTDAVRDPQTLEILDITPCSFGGVSVITPGTNTSNQVAVLYQDVNCTEVPVAIHADQLTPTWRVYSTGSNVFQTRAGCLIGAEHVNNSYECDIPIGAGICASYQTQTNSPSGAGSVASQSIIAYTMSLGAENSVAYSNNSIAIPTNFTISVTTEILPVSMTKTSVDCTMYICGDSTECSNLLLQYGSFCTQLNRALTGIAVEQDKNTQEVFAQVKQIYKTPPIKDFGGFNFSQILPDPSKPSKRSFIEDLLFNKVTLADAGFVKQYGDCLGDIAARDLICAQKFNGLTVLPPLLTDEMIAQYTSALLAGTITSGWTFGAGAALQIPFAMQMAYRFNGIGVTQNVLYENQKLIANQFNSAIGKIQDSLSSTASALGKLQDVVNQNAQALNTLVKQLSSNFGAISSVLNDILSRLDPPEAEVQIDRLITGRLQSLQTYVTQQLIRAAEIRASANLAATKMSECVLGQSKRVDFCGKGYHLMSFPQSAPHGVVFLHVTYVPAQEKNFTTAPAICHDGKAHFPREGVFVSNGTHWFVTQRNFYEPQIITTDNTFVSGNCDVVIGIVNNTVYDPLQPELDSFKEELDKYFKNHTSPDVDLGDISGINASVVNIQKEIDRLNEVAKNLNESLIDLQELGKYEQYIKGSGRENLYFQGGGGSGYIPEAPRDGQAYVRKDGEWVLLSTFLGHHHHHHHH

SEQ ID NO: 1911 - protein, 1281 aa, Artificial Sequence
  Description of Artificial Sequence: Synthetic polypeptide
MGILPSPGMPALLSLVSLLSVLLMGCVAETGTQCVNLTTRTQLPPAYTNSFTRGVYYPDKVFRSSVLHSTQDLFLPFFSNVTWFHAIHVSGTNGTKRFDNPVLPFNDGVYFASTEKSNIIRGWIFGTTLDSKTQSLLIVNNATNVVIKVCEFQFCNDPFLGVYYHKNNKSWMESEFRVYSSANNCTFEYVSQPFLMDLEGKQGNFKNLREFVFKNIDGYFKIYSKHTPINLVRDLPQGFSALEPLVDLPIGINITRFQTLLALHRSYLTPGDSSSGWTAGAAAYYVGYLQPRTFLLKYNENGTITDAVDCALDPLSETKCTLKSFTVEKGIYQTSNFRVQPTESIVRFPNITNLCPFGEVFNATRFASVYAWNRKRISNCVADYSVLYNSASFSTFKCYGVSPTKLNDLCFTNVYADSFVIRGDEVRQIAPGQTGKIADYNYKLPDDFTGCVIAWNSNNLDSKVGGNYNYLYRLFRKSNLKPFERDISTEIYQAGSTPCNGVEGFNCYFPLQSYGFQPTNGVGYQPYRVVVLSFELLHAPATVCGPKKSTNLVKNKCVNFNFNGLTGTGVLTESNKKFLPFQQFGRDIADTTDAVRDPQTLEILDITPCSFGGVSVITPGTNTSNQVAVLYQDVNCTEVPVAIHADQLTPTWRVYSTGSNVFQTRAGCLIGAEHVNNSYECDIPIGAGICASYQTQTNSPSGAGSVASQSIIAYTMSLGAENSVAYSNNSIAIPTNFVISVTTEILPVSMTKTSVDCTMYICGDSTECSNLLLQYGSFCTQLNRALTGIAVEQDKNTQEVFAQVKQIYKTPPIKDFGGFNFSQILPDPSKPSKRSFIEDLLFNKVTLADAGFIKQYGDCLGDIAARDLICAQKFNGLTVLPPLLTDEMIAQYTSALLAGTITSGWTFGAGAALQIPFAMQMAYRFNGIGVTQNVLYENQKLIANQFNSAIGKIQDSLSSTASALGKLQDVVNQNAQALNTLVKQLSSNFGAISSVLNDILSRLDPPEAEVQIDRLITGRLQSLQTYVTQQLIRAAEIRASANLAATKMSECVLGQSKRVDFCGKGYHLMSFPQSAPHGVVFLHVTYVPAQEKNFTTAPAICHDGKAHFPREGVFVSNGTHWFVTQRNFYEPQIITTDNTFVSGNCDVVIGIVNNTVYDPLQPELDSFKEELDKYFKNHTSPDVDLGDISGINASVVNIQKEIDRLNEVAKNLNESLIDLQELGKYEQYIKGSGRENLYFQGGGGSGYIPEAPRDGQAYVRKDGEWVLLSTFLGHHHHHHHH

SEQ ID NO: 1912 - protein, 1281 aa, Artificial Sequence
  Description of Artificial Sequence: Synthetic polypeptide
MGILPSPGMPALLSLVSLLSVLLMGCVAETGTQCVNLTTRTQLPPAYTNSFTRGVYYPDKVFRSSVLHSTQDLFLPFFSNVTWFHAIHVSGTNGTKRFDNPVLPFNDGVYFASTEKSNIIRGWIFGTTLDSKTQSLLIVNNATNVVIKVCEFQFCNDPFLGVYYHKNNKSWMESEFRVYSSANNCTFEYVSQPFLMDLEGKQGNFKNLREFVFKNIDGYFKIYSKHTPINLVRDLPQGFSALEPLVDLPIGINITRFQTLLALHRSYLTPGDSSSGWTAGAAAYYVGYLQPRTFLLKYNENGTITDAVDCALDPLSETKCTLKSFTVEKGIYQTSNFRVQPTESIVRFPNITNLCPFGEVFNATRFASVYAWNRKRISNCVADYSVLYNSASFSTFKCYGVSPTKLNDLCFTNVYADSFVIRGDEVRQIAPGQTGKIADYNYKLPDDFTGCVIAWNSNNLDSKVGGNYNYLYRLFRKSNLKPFERDISTEIYQAGSTPCNGVEGFNCYFPLQSYGFQPTNGVGYQPYRVVVLSFELLHAPATVCGPKKSTNLVKNKCVNFNFNGLTGTGVLTESNKKFLPFQQFGRDIADTTDAVRDPQTLEILDITPCSFGGVSVITPGTNTSNQVAVLYQDVNCTEVPVAIHADQLTPTWRVYSTGSNVFQTRAGCLIGAEHVNNSYECDIPIGAGICASYQTQTNSPSGAGSVASQSIIAYTMSLGAENSVAYSNNSIAIPTNFTISVTTEILPVSMTKTSVDCTMYICGDSTECSNLLLQYGSFCTQLNRALTGIAVEQDKNTQEVFAQVKQIYKTPPIKDFGGFNFSQILPDPSKPSKRSFIEDLLFNKVTLADAGFIKQYGDCLGDIAARDLICAQKFNGLTVLPPLLTDEMIAAYTSALLAGTITSGWTFGAGAALQIPFAMQMAYRFNGIGVTQNVLYENQKLIANQFNSAIGKIQDSLSSTASALGKLQDVVNQNAQALNTLVKQLSSNFGAISSVLNDILSRLDPPEAEVQIDRLITGRLQSLQTYVTQQLIRAAEIRASANLAATKMSECVLGQSKRVDFCGKGYHLMSFPQSAPHGVVFLHVTYVPAQEKNFTTAPAICHDGKAHFPREGVFVSNGTHWFVTQRNFYEPQIITTDNTFVSGNCDVVIGIVNNTVYDPLQPELDSFKEELDKYFKNHTSPDVDLGDISGINASVVNIQKEIDRLNEVAKNLNESLIDLQELGKYEQYIKGSGRENLYFQGGGGSGYIPEAPRDGQAYVRKDGEWVLLSTFLGHHHHHHHH

SEQ ID NO: 1913 - protein, 1281 aa, Artificial Sequence
  Description of Artificial Sequence: Synthetic polypeptide
MGILPSPGMPALLSLVSLLSVLLMGCVAETGTQCVNLTTRTQLPPAYTNSFTRGVYYPDKVFRSSVLHSTQDLFLPFFSNVTWFHAIHVSGTNGTKRFDNPVLPFNDGVYFASTEKSNIIRGWIFGTTLDSKTQSLLIVNNATNVVIKVCEFQFCNDPFLGVYYHKNNKSWMESEFRVYSSANNCTFEYVSQPFLMDLEGKQGNFKNLREFVFKNIDGYFKIYSKHTPINLVRDLPQGFSALEPLVDLPIGINITRFQTLLALHRSYLTPGDSSSGWTAGAAAYYVGYLQPRTFLLKYNENGTITDAVDCALDPLSETKCTLKSFTVEKGIYQTSNFRVQPTESIVRFPNITNLCPFGEVFNATRFASVYAWNRKRISNCVADYSVLYNSASFSTFKCYGVSPTKLNDLCFTNVYADSFVIRGDEVRQIAPGQTGKIADYNYKLPDDFTGCVIAWNSNNLDSKVGGNYNYLYRLFRKSNLKPFERDISTEIYQAGSTPCNGVEGFNCYFPLQSYGFQPTNGVGYQPYRVVVLSFELLHAPATVCGPKKSTNLVKNKCVNFNFNGLTGTGVLTESNKKFLPFQQFGRDIADTTDAVRDPQTLEILDITPCSFGGVSVITPGTNTSNQVAVLYQDVNCTEVPVAIHADQLTPTWRVYSTGSNVFQTRAGCLIGAEHVNNSYECDIPIGAGICASYQTQTNSPSGAGSVASQSIIAYTMSLGAENSVAYSNNSIAIPTNFTISVTTEILPVSMTKTSVDCTMYICGDSTECSNLLLQYGSFCTQLNRALTGIAVEQDKNTQEVFAQVKQIYKTPPIKDFGGFNFSQILPDPSKPSKRSFIEDLLFNKVTLADAGFIKQYGDCLGDIAARDLICAQKFNGLTVLPPLLTDEMIAQYTSALLAGTITSGWTFGAGAALQIPFAMQMAYRFNGIGVTQNVLYENQKLIANQFNSAIGKIQDSLSSTASALGKLQDVVNQNAQALNTLVKQLSSNFGAISSVLNDILSRLDQPEAEVQIDRLITGRLQSLQTYVTQQLIRAAEIRASANLAATKMSECVLGQSKRVDFCGKGYHLMSFPQSAPHGVVFLHVTYVPAQEKNFTTAPAICHDGKAHFPREGVFVSNGTHWFVTQRNFYEPQIITTDNTFVSGNCDVVIGIVNNTVYDPLQPELDSFKEELDKYFKNHTSPDVDLGDISGINASVVNIQKEIDRLNEVAKNLNESLIDLQELGKYEQYIKGSGRENLYFQGGGGSGYIPEAPRDGQAYVRKDGEWVLLSTFLGHHHHHHHH

SEQ ID NO: 1914 - protein, 1281 aa, Artificial Sequence
  Description of Artificial Sequence: Synthetic polypeptide
MGILPSPGMPALLSLVSLLSVLLMGCVAETGTQCVNLTTRTQLPPAYTNSFTRGVYYPDKVFRSSVLHSTQDLFLPFFSNVTWFHAIHVSGTNGTKRFDNPVLPFNDGVYFASTEKSNIIRGWIFGTTLDSKTQSLLIVNNATNVVIKVCEFQFCNDPFLGVYYHKNNKSWMESEFRVYSSANNCTFEYVSQPFLMDLEGKQGNFKNLREFVFKNIDGYFKIYSKHTPINLVRDLPQGFSALEPLVDLPIGINITRFQTLLALHRSYLTPGDSSSGWTAGAAAYYVGYLQPRTFLLKYNENGTITDAVDCALDPLSETKCTLKSFTVEKGIYQTSNFRVQPTESIVRFPNITNLCPFGEVFNATRFASVYAWNRKRISNCVADYSVLYNSASFSTFKCYGVSPTKLNDLCFTNVYADSFVIRGDEVRQIAPGQTGKIADYNYKLPDDFTGCVIAWNSNNLDSKVGGNYNYLYRLFRKSNLKPFERDISTEIYQAGSTPCNGVEGFNCYFPLQSYGFQPTNGVGYQPYRVVVLSFELLHAPATVCGPKKSTNLVKNKCVNFNFNGLTGTGVLTESNKKFLPFQQFGRDIADTTDAVRDPQTLEILDITPCSFGGVSVITPGTNTSNQVAVLYQDVNCTEVPVAIHADQLTPTWRVYSTGSNVFQTRAGCLIGAEHVNNSYECDIPIGAGICASYQTQTNSPSGAGSVASQSIIAYTMSLGAENSVAYSNNSIAIPTNFTISVTTEILPVSMTKTSVDCTMYICGDSTECSNLLLQYGSFCTQLNRALAGIAVEQDKNTQEVFAQVKQIYKTPPIKDFGGFNFSQILPDPSKPSKRSFIEDLLFNKVTLADAGFIKQYGDCLGDIAARDLICAQKFNGLTVLPPLLTDEMIAQYTSALLAGTITSGWTFGAGAALQIPFAMQMAYRFNGIGVTQNVLYENQKLIANQFNSAIGKIQDSLSSTASALGKLQDVVNQNAQALNTLVKQLSSNFGAISSVLNDILSRLDPPEAEVQIDRLITGRLQSLQTYVTQQLIRAAEIRASANLAATKMSECVLGQSKRVDFCGKGYHLMSFPQSAPHGVVFLHVTYVPAQEKNFTTAPAICHDGKAHFPREGVFVSNGTHWFVTQRNFYEPQIITTDNTFVSGNCDVVIGIVNNTVYDPLQPELDSFKEELDKYFKNHTSPDVDLGDISGINASVVNIQKEIDRLNEVAKNLNESLIDLQELGKYEQYIKGSGRENLYFQGGGGSGYIPEAPRDGQAYVRKDGEWVLLSTFLGHHHHHHHH

SEQ ID NO: 1915 - protein, 1281 aa, Artificial Sequence
  Description of Artificial Sequence: Synthetic polypeptide
MGILPSPGMPALLSLVSLLSVLLMGCVAETGTQCVNLTTRTQLPPAYTNSFTRGVYYPDKVFRSSVLHSTQDLFLPFFSNVTWFHAIHVSGTNGTKRFDNPVLPFGDGVYFASTEKSNIIRGWIFGTTLDSKTQSLLIVNNATNVVIKVCEFQFCNDPFLGVYYHKNNKSWMESEFRVYSSANNCTFEYVSQPFLMDLEGKQGNFKNLREFVFKNIDGYFKIYSKHTPINLVRDLPQGFSALEPLVDLPIGINITRFQTLLALHRSYLTPGDSSSGWTAGAAAYYVGYLQPRTFLLKYNENGTITDAVDCALDPLSETKCTLKSFTVEKGIYQTSNFRVQPTESIVRFPNITNLCPFGEVFNATRFASVYAWNRKRISNCVADYSVLYNSASFSTFKCYGVSPTKLNDLCFTNVYADSFVIRGDEVRQIAPGQTGKIADYNYKLPDDFTGCVIAWNSNNLDSKVGGNYNYLYRLFRKSNLKPFERDISTEIYQAGSTPCNGVEGFNCYFPLQSYGFQPTNGVGYQPYRVVVLSFELLHAPATVCGPKKSTNLVKNKCVNFNFNGLTGTGVLTESNKKFLPFQQFGRDIADTTDAVRDPQTLEILDITPCSFGGVSVITPGTNTSNQVAVLYQDVNCTEVPVAIHADQLTPTWRVYSTGSNVFQTRAGCLIGAEHVNNSYECDIPIGAGICASYQTQTNSPSGAGSVASQSIIAYTMSLGAENSVAYSNNSIAIPTNFTISVTTEILPVSMTKTSVDCTMYICGDSTECSNLLLQYGSFCTQLNRALTGIAVEQDKNTQEVFAQVKQIYKTPPIKDFGGFNFSQILPDPSKPSKRSFIEDLLFNKVTLADAGFIKQYGDCLGDIAARDLICAQKFNGLTVLPPLLTDEMIAQYTSALLAGTITSGWTFGAGAALQIPFAMQMAYRFNGIGVTQNVLYENQKLIANQFNSAIGKIQDSLSSTASALGKLQDVVNQNAQALNTLVKQLSSNFGAISSVLNDILSRLDPPEAEVQIDRLITGRLQSLQTYVTQQLIRAAEIRASANLAATKMSECVLGQSKRVDFCGKGYHLMSFPQSAPHGVVFLHVTYVPAQEKNFTTAPAICHDGKAHFPREGVFVSNGTHWFVTQRNFYEPQIITTDNTFVSGNCDVVIGIVNNTVYDPLQPELDSFKEELDKYFKNHTSPDVDLGDISGINASVVNIQKEIDRLNEVAKNLNESLIDLQELGKYEQYIKGSGRENLYFQGGGGSGYIPEAPRDGQAYVRKDGEWVLLSTFLGHHHHHHHH

SEQ ID NO: 1916 - protein, 1281 aa, Artificial Sequence
  Description of Artificial Sequence: Synthetic polypeptide
MGILPSPGMPALLSLVSLLSVLLMGCVAETGTQCVNLTTRTQLPPAYTNSFTRGVYYPDKVFRSSVLHSTQDLFLPFFSNVTWFHAIHVSGTNGTKRFDNPVLPFNDGVYFASTEKSNIIRGWIFGTTLDSKTQSLLIVNNATNVVIKVCEFQFCNDPFLGVYYHKNNKSWMESEFRVYSSANNCTFEYVSQPFLMDLEGKQGNFKNLREFVFKNIDGYFKIYSKHTPINLVRDLPQGFSALEPLVDLPIGINITRFQTLLALHRSYLTPGDSSSGWTAGAAAYYVGYLQPRTFLLKYNENGTITDAVDCALDPLSETKCTLKSFTVEKGIYQTSNFRVQPTESIVRFPNITNLCPFGEVFNATRFASVYAWNRKRISNCVADYSVLYNSASFSTFKCYGVSPTKLNDLCFTNVYADSFVIRGDEVRQIAPGQTGKIADYNYKLPDDFTGCVIAWNSNNLDSKVGGNYNYLYRLFRKSNLKPFERDISTEIYQAGSTPCNGVEGFNCYFPLQSYGFQPTNGVGYQPYRVVVLSFELLHAPATVCGPKKSTNLVKNKCVNFNFNGLTGTGVLTDSNKKFLPFQQFGRDISDTTDAVRDPQTLEILDITPCSFGGVSVITPGTNTSNQVAVLYQDVNCTDVPTAIHADQLTPTWRVYSTGSNVFQTQAGCLIGAEHVNNSYECDIPIGAGICASYQTQTNSPSGAGSVASQSIIAYTMSLGAENSVAYSNNSIAIPTNFTISVTTEILPVSMTKTSVDCTMYICGDSTECSNLLLQYGSFCTQLNRALTGIAVEQDKNTQEVFAQVKQIYKTPPIKDFGGFNFSQILPDPSKPSKRSFIEDLLFNKVTLADAGFIKQYGDCLGDIAARDLICAQKFNGLTVLPPLLTDEMIAQYTSALLAGTITSGWTFGAGAALQIPFAMQMAYRFNGIGVTQNVLYENQKLIANQFNSAIGKIQDSLSSTASALGKLQDVVNQNAQALNTLVKQLSSNFGAISSVLNDILSRLDPPEAEVQIDRLITGRLQSLQTYVTQQLIRAAEIRASANLAATKMSECVLGQSKRVDFCGKGYHLMSFPQSAPHGVVFLHVTYVPAQEKNFTTAPAICHDGKAHFPREGVFVSNGTHWFVTQRNFYEPQIITTDNTFVSGNCDVVIGIVNNTVYDPLQPELDSFKEELDKYFKNHTSPDVDLGDISGINASVVNIQKEIDRLNEVAKNLNESLIDLQELGKYEQYIKGSGRENLYFQGGGGSGYIPEAPRDGQAYVRKDGEWVLLSTFLGHHHHHHHH

SEQ ID NO: 1917 - protein, 1281 aa, Artificial Sequence
  Description of Artificial Sequence: Synthetic polypeptide
MGILPSPGMPALLSLVSLLSVLLMGCVAETGTQCVNLTTRTQLPPAYTNSFTRGVYYPDKVFRSSVLHSTQDLFLPFFSNVTWFHAIHVSGTNGTKRFDNPVLPFNDGVYFASTEKSNIIRGWIFGTTLDSKTQSLLIVNNATNVVIKVCEFQFCNDPFLGVYYHKNNKSWMESEFRVYSSANNCTFEYVSQPFLMDLEGKQGNFKNLREFVFKNIDGYFKIYSKHTPINLVRDLPQGFSALEPLVDLPIGINITRFQTLLALHRSYLTPGDSSSGWTAGAAAYYVGYLQPRTFLLKYNENGTITDAVDCALDPLSETKCTLKSFTVEKGIYQTSNFRVQPTESIVRFPNITNLCPFGEVFNATRFASVYAWNRKRISNCVADYSVLYNSASFSTFKCYGVSPTKLNDLCFTNVYADSFVIRGDEVRQIAPGQTGKIADYNYKLPDDFTGCVIAWNSNNLDSKVGGNYNYLYRLFRKSNLKPFERDISTEIYQAGSTPCNGVEGFNCYFPLQSYGFQPTNGVGYQPYRVVVLSFELLHAPATVCGPKKSTNLVKNKCVNFNFNGLTGTGVLTESNKKFLPFQQFGRDIADTTDAVRDPQTLEILDITPCSFGGVSVITPGTNTSNQVAVLYQDVNCTEVPVAIHADQLTPTWRVYSTGSNVFQTRAGCLIGAEHVNNSYECDIPIGAGICASYQTQTNSPSGAGSVASQSIIAYTMSLGAENSVAYSNNSIAIPTNFTISVTTEILPVSMTKTSVDCTMYICGDSTECSNLLLQYGSFCTQLNRALTGIAVEQDKNTQEVFAQVKQIYKTPPIKDFGGFNFSQILPDPSKPSKRSFIEDLLFNKVTLADAGFIKQYGDCLGDIAARDLICAQKFNGLTVLPPLLTDEMIAQYTSALLSGTITSGWTFGAGAALQIPFAMQMAYRFNGIGVTQNVLYENQKLIANQFNSAIGKIQDSLSSTASALGKLQDVVNQNAQALNTLVKQLSSNFGAISSVLNDILSRLDPPEAEVQIDRLITGRLQSLQTYVTQQLIRAAEIRASANLAATKMSECVLGQSKRVDFCGKGYHLMSFPQSAPHGVVFLHVTYVPAQEKNFTTAPAICHDGKAHFPREGVFVSNGTHWFVTQRNFYEPQIITTDNTFVSGNCDVVIGIVNNTVYDPLQPELDSFKEELDKYFKNHTSPDVDLGDISGINASVVNIQKEIDRLNEVAKNLNESLIDLQELGKYEQYIKGSGRENLYFQGGGGSGYIPEAPRDGQAYVRKDGEWVLLSTFLGHHHHHHHH

SEQ ID NO: 1918 - protein, 1281 aa, Artificial Sequence
  Description of Artificial Sequence: Synthetic polypeptide
MGILPSPGMPALLSLVSLLSVLLMGCVAETGTQCVNLTTRTQLPPAYTNSFTRGVYYPDKVFRSSVLHSTQDLFLPFFSNVTWFHAIHVSGTNGTKRFDNPVLPFNDGVYFASTEKSNIIRGWIFGTTLDSKTQSLLIVNNATNVVIKVCEFQFCNDPFLGVYYHKNNKSWMESEFRVYSSANNCTFEYVSQPFLMDLEGKQGNFKNLREFVFKNIDGYFKIYSKHTPINLVRDLPQGFSALEPLVDLPIGINITRFQTLLALHRSYLTPGDSSSGWTAGAAAYYVGYLQPRTFLLKYNENGTITDAVDCALDPLSETKCTLKSFTVEKGIYQTSNFRVQPTESIVRFPNITNLCPFGEVFNATRFASVYAWNRKRISNCVADYSVLYNSASFSTFKCYGVSPTKLNDLCFTNVYADSFVIRGDEVRQIAPGQTGKIADYNYKLPDDFTGCVIAWNSNNLDSKVGGNYNYLYRLFRKSNLKPFERDISTEIYQAGSTPCNGVEGFNCYFPLQSYGFQPTNGVGYQPYRVVVLSFELLHAPATVCGPKKSTNLVKNKCVNFNFNGLTGTGVLTESNKKFLPFQQFGRDIADTTDAVRDPQTLEILDITPCSFGGVSVITPGTNTSNQVAVLYQDVNCTEVPVAIHADQLTPTWRVYSTGSNVFQTRAGCLIGAEHVNNSYECDIPIGAGICASYQTQTNSPSGAGSVASQSIIAYTMSLGAENSVAYSNNSIAIPTNFTISVTTEILPVSMPKTSVDCTMYICGDSTECSNLLLQYGSFCTQLNRALTGIAVEQDKNTQEVFAQVKQIYKTPPIKDFGGFNFSQILPDPSKPSKRSFIEDLLFNKVTLADAGFIKQYGDCLGDIAARDLICAQKFNGLTVLPPLLTDEMIAQYTSALLAGTITSGWTFGAGAALQIPFAMQMAYRFNGIGVTQNVLYENQKLIANQFNSAIGKIQDSLSSTASALGKLQDVVNQNAQALNTLVKQLSSNFGAISSVLNDILSRLDPPEAEVQIDRLITGRLQSLQTYVTQQLIRAAEIRASANLAATKMSECVLGQSKRVDFCGKGYHLMSFPQSAPHGVVFLHVTYVPAQEKNFTTAPAICHDGKAHFPREGVFVSNGTHWFVTQRNFYEPQIITTDNTFVSGNCDVVIGIVNNTVYDPLQPELDSFKEELDKYFKNHTSPDVDLGDISGINASVVNIQKEIDRLNEVAKNLNESLIDLQELGKYEQYIKGSGRENLYFQGGGGSGYIPEAPRDGQAYVRKDGEWVLLSTFLGHHHHHHHH

SEQ ID NO: 1919 - protein, 1281 aa, Artificial Sequence
  Description of Artificial Sequence: Synthetic polypeptide
MGILPSPGMPALLSLVSLLSVLLMGCVAETGTQCVNLTTRTQLPPAYTNSFTRGVYYPDKVFRSSVLHSTQDLFLPFFSNVTWFHAIHVSGTNGTKRFDNPVLPFNDGVYFASTEKSNIIRGWIFGTTLDSKTQSLLIVNNATNVVIKVCEFQFCNDPFLGVYYHKNNKSWMESEFRVYSSANNCTFEYVSQPFLMDLEGKQGNFKNLREFVFKNIDGYFKIYSKHTPINLVRDLPQGFSALEPLVDLPIGINITRFQTLLALHRSYLTPGDSSSGWDAGAAAYYVGYLQPRTFLLKYNENGTITDAVDCALDPLSETKCTLKSFTVEKGIYQTSNFRVQPTESIVRFPNITNLCPFGEVFNATRFASVYAWNRKRISNCVADYSVLYNSASFSTFKCYGVSPTKLNDLCFTNVYADSFVIRGDEVRQIAPGQTGKIADYNYKLPDDFTGCVIAWNSNNLDSKVGGNYNYLYRLFRKSNLKPFERDISTEIYQAGSTPCNGVEGFNCYFPLQSYGFQPTNGVGYQPYRVVVLSFELLHAPATVCGPKKSTNLVKNKCVNFNFNGLTGTGVLTESNKKFLPFQQFGRDIADTTDAVRDPQTLEILDITPCSFGGVSVITPGTNTSNQVAVLYQDVNCTEVPVAIHADQLTPTWRVYSTGSNVFQTRAGCLIGAEHVNNSYECDIPIGAGICASYQTQTNSPSGAGSVASQSIIAYTMSLGAENSVAYSNNSIAIPTNFTISVTTEILPVSMTKTSVDCTMYICGDSTECSNLLLQYGSFCTQLNRALTGIAVEQDKNTQEVFAQVKQIYKTPPIKDFGGFNFSQILPDPSKPSKRSFIEDLLFNKVTLADAGFIKQYGDCLGDIAARDLICAQKFNGLTVLPPLLTDEMIAQYTSALLAGTITSGWTFGAGAALQIPFAMQMAYRFNGIGVTQNVLYENQKLIANQFNSAIGKIQDSLSSTASALGKLQDVVNQNAQALNTLVKQLSSNFGAISSVLNDILSRLDPPEAEVQIDRLITGRLQSLQTYVTQQLIRAAEIRASANLAATKMSECVLGQSKRVDFCGKGYHLMSFPQSAPHGVVFLHVTYVPAQEKNFTTAPAICHDGKAHFPREGVFVSNGTHWFVTQRNFYEPQIITTDNTFVSGNCDVVIGIVNNTVYDPLQPELDSFKEELDKYFKNHTSPDVDLGDISGINASVVNIQKEIDRLNEVAKNLNESLIDLQELGKYEQYIKGSGRENLYFQGGGGSGYIPEAPRDGQAYVRKDGEWVLLSTFLGHHHHHHHH

SEQ ID NO: 1920 - protein, 1281 aa, Artificial Sequence
  Description of Artificial Sequence: Synthetic polypeptide
MGILPSPGMPALLSLVSLLSVLLMGCVAETGTQCVNLTTRTQLPPAYTNSFTRGVYYPDKVFRSSVLHSTQDLFLPFFSNVTWFHAIHVSGTNGTKRFDNPVLPFNDGVYFASTEKSNIIRGWIFGTTLDSKTQSLLIVNNATNVVIKVCYFQFCNDPFLGVYYHKNNKSWMESEFRVYSSANNCTFEYVSQPFLMDLEGKQGNFKNLREFVFKNIDGYFKIYSKHTPINLVRDLPQGFSALEPLVDLPIGINITRFQTLLALHRSYLTPGDSSSGWTAGAAAYYVGYLQPRTFLLKYNENGTITDAVDCALDPLSETKCTLKSFTVEKGIYQTSNFRVQPTESIVRFPNITNLCPFGEVFNATRFASVYAWNRKRISNCVADYSVLYNSASFSTFKCYGVSPTKLNDLCFTNVYADSFVIRGDEVRQIAPGQTGKIADYNYKLPDDFTGCVIAWNSNNLDSKVGGNYNYLYRLFRKSNLKPFERDISTEIYQAGSTPCNGVEGFNCYFPLQSYGFQPTNGVGYQPYRVVVLSFELLHAPATVCGPKKSTNLVKNKCVNFNFNGLTGTGVLTESNKKFLPFQQFGRDIADTTDAVRDPQTLEILDITPCSFGGVSVITPGTNTSNQVAVLYQDVNCTEVPVAIHADQLTPTWRVYSTGSNVFQTRAGCLIGAEHVNNSYECDIPIGAGICASYQTQTNSPSGAGSVASQSIIAYTMSLGAENSVAYSNNSIAIPTNFTISVTTEILPVSMTKTSVDCTMYICGDSTECSNLLLQYGSFCTQLNRALTGIAVEQDKNTQEVFAQVKQIYKTPPIKDFGGFNFSQILPDPSKPSKRSFIEDLLFNKVTLADAGFIKQYGDCLGDIAARDLICAQKFNGLTVLPPLLTDEMIAQYTSALLAGTITSGWTFGAGAALQIPFAMQMAYRFNGIGVTQNVLYENQKLIANQFNSAIGKIQDSLSSTASALGKLQDVVNQNAQALNTLVKQLSSNFGAISSVLNDILSRLDPPEAEVQIDRLITGRLQSLQTYVTQQLIRAAEIRASANLAATKMSECVLGQSKRVDFCGKGYHLMSFPQSAPHGVVFLHVTYVPAQEKNFTTAPAICHDGKAHFPREGVFVSNGTHWFVTQRNFYEPQIITTDNTFVSGNCDVVIGIVNNTVYDPLQPELDSFKEELDKYFKNHTSPDVDLGDISGINASVVNIQKEIDRLNEVAKNLNESLIDLQELGKYEQYIKGSGRENLYFQGGGGSGYIPEAPRDGQAYVRKDGEWVLLSTFLGHHHHHHHH

SEQ ID NO: 1921 - protein, 1281 aa, Artificial Sequence
  Description of Artificial Sequence: Synthetic polypeptide
MGILPSPGMPALLSLVSLLSVLLMGCVAETGTQCVNLTTRTQLPPAYTNSFTRGVYYPDKVFRSSVLHSTQDLFLPFFSNVTWFHAIHVSGTNGTKRFDNPVLPFNDGVYFASTEKSNIIRGWIFGTTLDSKTQSLLIVNNATNVVIKVCEFQFCNDPFLGVYYHKNNKSWMESEFRVYSSANNCTFEYVSQPFLMDLEGKQGNFKNLREFVFKNIDGYFKIYSKHTPINLVRDLPQGFSALEPLVKLPIGINITRFQTLLALHRSYLTPGDSSSGWTAGAAAYYVGYLQPRTFLLKYNENGTITDAVDCALDPLSETKCTLKSFTVEKGIYQTSNFRVQPTESIVRFPNITNLCPFGEVFNATRFASVYAWNRKRISNCVADYSVLYNSASFSTFKCYGVSPTKLNDLCFTNVYADSFVIRGDEVRQIAPGQTGKIADYNYKLPDDFTGCVIAWNSNNLDSKVGGNYNYLYRLFRKSNLKPFERDISTEIYQAGSTPCNGVEGFNCYFPLQSYGFQPTNGVGYQPYRVVVLSFELLHAPATVCGPKKSTNLVKNKCVNFNFNGLTGTGVLTESNKKFLPFQQFGRDIADTTDAVRDPQTLEILDITPCSFGGVSVITPGTNTSNQVAVLYQDVNCTEVPVAIHADQLTPTWRVYSTGSNVFQTRAGCLIGAEHVNNSYECDIPIGAGICASYQTQTNSPSGAGSVASQSIIAYTMSLGAENSVAYSNNSIAIPTNFTISVTTEILPVSMTKTSVDCTMYICGDSTECSNLLLQYGSFCTQLNRALTGIAVEQDKNTQEVFAQVKQIYKTPPIKDFGGFNFSQILPDPSKPSKRSFIEDLLFNKVTLADAGFIKQYGDCLGDIAARDLICAQKFNGLTVLPPLLTDEMIAQYTSALLAGTITSGWTFGAGAALQIPFAMQMAYRFNGIGVTQNVLYENQKLIANQFNSAIGKIQDSLSSTASALGKLQDVVNQNAQALNTLVKQLSSNFGAISSVLNDILSRLDPPEAEVQIDRLITGRLQSLQTYVTQQLIRAAEIRASANLAATKMSECVLGQSKRVDFCGKGYHLMSFPQSAPHGVVFLHVTYVPAQEKNFTTAPAICHDGKAHFPREGVFVSNGTHWFVTQRNFYEPQIITTDNTFVSGNCDVVIGIVNNTVYDPLQPELDSFKEELDKYFKNHTSPDVDLGDISGINASVVNIQKEIDRLNEVAKNLNESLIDLQELGKYEQYIKGSGRENLYFQGGGGSGYIPEAPRDGQAYVRKDGEWVLLSTFLGHHHHHHHH

SEQ ID NO: 1922 - protein, 1281 aa, Artificial Sequence
  Description of Artificial Sequence: Synthetic polypeptide
MGILPSPGMPALLSLVSLLSVLLMGCVAETGTQCVNLTTRTQLPPAYTNSFTRGVYYPDKVFRSSVLHSTQDLFLPFFSNVTWFHAIHVSGTNGTKRFDNPVLPFNDGVYFASTEKSNIIRGWIFGTTLDSKTQSLLIVNNATNVVIKVCEFQFCNDPFLGVYYHKNNKSWMESEFRVYSSANNCTFEYVSQPFLMDLEGKQGNFKNLREFVFKNIDGYFKIYSKHTPINLVRDLPQGFSALEPLVDLPIGINITRFQTLLALHRSYLTPGDSSSGWTAGAAAYYVGYLQPRTFLLKYNENGTITDAVDCALDPLSETKCTLKSFTVEKGIYQTSNFRVQPTESIVRFPNITNLCPFGEVFNATRFASVYAWNRKRISNCVADYSVLYNSASFSTFKCYGVSPTKLNDLCFTNVYADSFVIRGDEVRQIAPGQTGKIADYNYKLPDDFTGCVIAWNSNNLDSKVGGNYNYLYRLFRKSNLKPFERDISTEIYQAGSTPCNGVEGFNCYFPLQSYGFQPTNGVGYQPYRVVVLSFELLHAPATVCGPKKSTNLVKNKCVNFNFNGLTGTGVLTESNKKFLPFQQFGRDIADTTDSVRDPQTLEILDITPCSFGGVSVITPGTNTSNQVAVLYQDVNCTEVPVAIHADQLTPTWRVYSTGSNVFQTRAGCLIGAEHVNNSYECDIPIGAGICASYQTQTNSPSGAGSVASQSIIAYTMSLGAENSVAYSNNSIAIPTNFTISVTTEILPVSMTKTSVDCTMYICGDSTECSNLLLQYGSFCTQLNRALTGIAVEQDKNTQEVFAQVKQIYKTPPIKDFGGFNFSQILPDPSKPSKRSFIEDLLFNKVTLADAGFIKQYGDCLGDIAARDLICAQKFNGLTVLPPLLTDEMIAQYTSALLAGTITSGWTFGAGAALQIPFAMQMAYRFNGIGVTQNVLYENQKLIANQFNSAIGKIQDSLSSTASALGKLQDVVNQNAQALNTLVKQLSSNFGAISSVLNDILSRLDPPEAEVQIDRLITGRLQSLQTYVTQQLIRAAEIRASANLAATKMSECVLGQSKRVDFCGKGYHLMSFPQSAPHGVVFLHVTYVPAQEKNFTTAPAICHDGKAHFPREGVFVSNGTHWFVTQRNFYEPQIITTDNTFVSGNCDVVIGIVNNTVYDPLQPELDSFKEELDKYFKNHTSPDVDLGDISGINASVVNIQKEIDRLNEVAKNLNESLIDLQELGKYEQYIKGSGRENLYFQGGGGSGYIPEAPRDGQAYVRKDGEWVLLSTFLGHHHHHHHH

SEQ ID NO: 1923 - protein, 1281 aa, Artificial Sequence
  Description of Artificial Sequence: Synthetic polypeptide
MGILPSPGMPALLSLVSLLSVLLMGCVAETGTQCVNLTTRTQLPPAYTNSFTRGVYYPDKVFRSSVLHSTQDLFLPFFSNVTWFHAIHVSGTNGTKRFDNPVLPFNDGVYFASTEKSNIIRGWIFGTTLDSKTQSLLIVNNATNVVIKVCEFQFCNDPFLGVYYHKNNKSWMESEFRVYSSANNCTFEYVSQPFLMDLEGKQGNFKNLREFVFKNIDGYFKIYSKHTPINLVRDLPQGFSALEPLVDLPIGINITRFQTLLALHRSYLTPGDSSSGWTAGAAAYYVGYLQPRTFLLKYNENGTITDAVDCALDPLSETKCTLKSFTVEKGIYQTSNFRVQPTESIVRFPNITNLCPFGEVFNATRFASVYAWNRKRISNCVADYSVLYNSASFSTFKCYGVSPTKLNDLCFTNVYADSFVIRGDEVRQIAPGQTGKIADYNYKLPDDFTGCVIAWNSNNLDSKVGGNYNYLYRLFRKSNLKPFERDISTEIYQAGSTPCNGVEGFNCYFPLQSYGFQPTNGVGYQPYRVVVLSFELLHAPATVCGPKKSTNLVKNKCVNFNFNGLTGTGVLTESNKKFLPFQQFGRDIADTTDAVRDPQTLEILDITPCSFGGVSVITPGTNTSNQVAVLYQDVNCTEVPVAIHADQLTPTWRVYSTGSNVFQTRAGCLIGAEHVNNSYECDIPIGAGICASYQTQTNSPSGAGSVASQSIIAYTMSLGAENSVAYSNNSIAIPTNFTISVTTEILPVSMTKTSVDCTMYICGDSTECSNLLLQYGSFCTQLNRALTGIAVEQDKNTQEVFAQVKQIYKTPPIKDFGGFNFSQILPDPSKPSKRSFIEDLLFNKVTLADAGFIKQYGDCLGDIAARDLICAQKFNGLTVLPPLLTDEMIAQYTSALLAGTITSGWTFGAGAALQIPFAMQMAYRFNGIGVTQNVLYENQKLIANQFNSAIGKIQDSLSSTASALGKLQDVVNQNAQALATLVKQLSSNFGAISSVLNDILSRLDPPEAEVQIDRLITGRLQSLQTYVTQQLIRAAEIRASANLAATKMSECVLGQSKRVDFCGKGYHLMSFPQSAPHGVVFLHVTYVPAQEKNFTTAPAICHDGKAHFPREGVFVSNGTHWFVTQRNFYEPQIITTDNTFVSGNCDVVIGIVNNTVYDPLQPELDSFKEELDKYFKNHTSPDVDLGDISGINASVVNIQKEIDRLNEVAKNLNESLIDLQELGKYEQYIKGSGRENLYFQGGGGSGYIPEAPRDGQAYVRKDGEWVLLSTFLGHHHHHHHH

SEQ ID NO: 1924 - protein, 1281 aa, Artificial Sequence
  Description of Artificial Sequence: Synthetic polypeptide
MGILPSPGMPALLSLVSLLSVLLMGCVAETGTQCVNLTTRTQLPPAYTNSFTRGVYYPDKVFRSSVLHSTQDLFLPFFSNVTWFHAIHVSGTNGTKRFDNPVLPFNDGVYFASTEKSNIIRGWIFGSTLDSKTQSLLIVNNATNVVIKVCEFQFCNDPFLGVYYHKNNKSWMESEFRVYSSANNCTFEYVSQPFLMDLEGKQGNFKNLREFVFKNIDGYFKIYSKHTPINLVRDLPQGFSALEPLVDLPIGINITRFQTLLALHRSYLTPGDSSSGWTAGAAAYYVGYLQPRTFLLKYNENGTITDAVDCALDPLSETKCTLKSFTVEKGIYQTSNFRVQPTESIVRFPNITNLCPFGEVFNATRFASVYAWNRKRISNCVADYSVLYNSASFSTFKCYGVSPTKLNDLCFTNVYADSFVIRGDEVRQIAPGQTGKIADYNYKLPDDFTGCVIAWNSNNLDSKVGGNYNYLYRLFRKSNLKPFERDISTEIYQAGSTPCNGVEGFNCYFPLQSYGFQPTNGVGYQPYRVVVLSFELLHAPATVCGPKKSTNLVKNKCVNFNFNGLTGTGVLTESNKKFLPFQQFGRDIADTTDAVRDPQTLEILDITPCSFGGVSVITPGTNTSNQVAVLYQDVNCTEVPVAIHADQLTPTWRVYSTGSNVFQTRAGCLIGAEHVNNSYECDIPIGAGICASYQTQTNSPSGAGSVASQSIIAYTMSLGAENSVAYSNNSIAIPTNFTISVTTEILPVSMTKTSVDCTMYICGDSTECSNLLLQYGSFCTQLNRALTGIAVEQDKNTQEVFAQVKQIYKTPPIKDFGGFNFSQILPDPSKPSKRSFIEDLLFNKVTLADAGFIKQYGDCLGDIAARDLICAQKFNGLTVLPPLLTDEMIAQYTSALLAGTITSGWTFGAGAALQIPFAMQMAYRFNGIGVTQNVLYENQKLIANQFNSAIGKIQDSLSSTASALGKLQDVVNQNAQALNTLVKQLSSNFGAISSVLNDILSRLDPPEAEVQIDRLITGRLQSLQTYVTQQLIRAAEIRASANLAATKMSECVLGQSKRVDFCGKGYHLMSFPQSAPHGVVFLHVTYVPAQEKNFTTAPAICHDGKAHFPREGVFVSNGTHWFVTQRNFYEPQIITTDNTFVSGNCDVVIGIVNNTVYDPLQPELDSFKEELDKYFKNHTSPDVDLGDISGINASVVNIQKEIDRLNEVAKNLNESLIDLQELGKYEQYIKGSGRENLYFQGGGGSGYIPEAPRDGQAYVRKDGEWVLLSTFLGHHHHHHHH

SEQ ID NO: 1925 - protein, 1281 aa, Artificial Sequence
  Description of Artificial Sequence: Synthetic polypeptide
MGILPSPGMPALLSLVSLLSVLLMGCVAETGTQCVNLTTRTQLPPAYTNSFTRGVYYPDKVFRSSVLHSTQDLFLPFFSNVTWFHAIHVSGTNGTKRFDNPVLPFNDGVYFASTEKSNIIRGWIFGTTLDSKTQSLLIVNNATNVVIKVCEFQFCNDPFLGVYYHKNNKSWMESEFRVYSSANNCTFEYVSQPFLMDLEGKQGNFKNLREFVFKNIDGYFKIYSKHTPINLVRDLPQGFSALEPLVDLPIGINITRFQTLLALHRSYLTPGDSSSGWTAGAAAYYVGYLQPRTFLLKYNENGTITDAVDCALDPLSETKCTLKSFTVEKGIYQTSNFRVQPTESIVRFPNITNLCPFGEVFNATRFASVYAWNRKRISNCVADYSVLYNSASFSTFKCYGVSPTKLNDLCFTNVYADSFVIRGDEVRQIAPGQTGKIADYNYKLPDDFTGCVIAWNSNNLDSKVGGNYNYLYRLFRKSNLKPFERDISTEIYQAGSTPCNGVEGFNCYFPLQSYGFQPTNGVGYQPYRVVVLSFELLHAPATVCGPKKSTNLVKNKCVDFNFNGLTGTGVLTESNKKFLPFQQFGRDIADTTDAVRDPQTLEILDITPCSFGGVSVITPGTNTSNQVAVLYQDVNCTEVPVAIHADQLTPTWRVYSTGSNVFQTRAGCLIGAEHVNNSYECDIPIGAGICASYQTQTNSPSGAGSVASQSIIAYTMSLGAENSVAYSNNSIAIPTNFTISVTTEILPVSMTKTSVDCTMYICGDSTECSNLLLQYGSFCTQLNRALTGIAVEQDKNTQEVFAQVKQIYKTPPIKDFGGFNFSQILPDPSKPSKRSFIEDLLFNKVTLADAGFIKQYGDCLGDIAARDLICAQKFNGLTVLPPLLTDEMIAQYTSALLAGTITSGWTFGAGAALQIPFAMQMAYRFNGIGVTQNVLYENQKLIANQFNSAIGKIQDSLSSTASALGKLQDVVNQNAQALNTLVKQLSSNFGAISSVLNDILSRLDPPEAEVQIDRLITGRLQSLQTYVTQQLIRAAEIRASANLAATKMSECVLGQSKRVDFCGKGYHLMSFPQSAPHGVVFLHVTYVPAQEKNFTTAPAICHDGKAHFPREGVFVSNGTHWFVTQRNFYEPQIITTDNTFVSGNCDVVIGIVNNTVYDPLQPELDSFKEELDKYFKNHTSPDVDLGDISGINASVVNIQKEIDRLNEVAKNLNESLIDLQELGKYEQYIKGSGRENLYFQGGGGSGYIPEAPRDGQAYVRKDGEWVLLSTFLGHHHHHHHH

SEQ ID NO: 1926 - protein, 1281 aa, Artificial Sequence
  Description of Artificial Sequence: Synthetic polypeptide
MGILPSPGMPALLSLVSLLSVLLMGCVAETGTQCVNLTTRTQLPPAYTNSFTRGVYYPDKVFRSSVLHSTQDLFLPFFSNVTWFHAIHVSGTNGTKRFDNPVLPFNDGVYFASTEKSNIIRGWIFGTTLDSKTQSLLIVNNATNVVIKVCEFQFCNDPFLGVYYHKNNKSWMESEFRVYSSANNCTFEYVSQPFLMDLEGKQGNFKNLREFVFKNIDGYFKIYSKHTPINLVRDLPQGFSALEPKVDLPIGINITRFQTLLALHRSYLTPGDSSSGWTAGAAAYYVGYLQPRTFLLKYNENGTITDAVDCALDPLSETKCTLKSFTVEKGIYQTSNFRVQPTESIVRFPNITNLCPFGEVFNATRFASVYAWNRKRISNCVADYSVLYNSASFSTFKCYGVSPTKLNDLCFTNVYADSFVIRGDEVRQIAPGQTGKIADYNYKLPDDFTGCVIAWNSNNLDSKVGGNYNYLYRLFRKSNLKPFERDISTEIYQAGSTPCNGVEGFNCYFPLQSYGFQPTNGVGYQPYRVVVLSFELLHAPATVCGPKKSTNLVKNKCVNFNFNGLTGTGVLTESNKKFLPFQQFGRDIADTTDAVRDPQTLEILDITPCSFGGVSVITPGTNTSNQVAVLYQDVNCTEVPVAIHADQLTPTWRVYSTGSNVFQTRAGCLIGAEHVNNSYECDIPIGAGICASYQTQTNSPSGAGSVASQSIIAYTMSLGAENSVAYSNNSIAIPTNFTISVTTEILPVSMTKTSVDCTMYICGDSTECSNLLLQYGSFCTQLNRALTGIAVEQDKNTQEVFAQVKQIYKTPPIKDFGGFNFSQILPDPSKPSKRSFIEDLLFNKVTLADAGFIKQYGDCLGDIAARDLICAQKFNGLTVLPPLLTDEMIAQYTSALLAGTITSGWTFGAGAALQIPFAMQMAYRFNGIGVTQNVLYENQKLIANQFNSAIGKIQDSLSSTASALGKLQDVVNQNAQALNTLVKQLSSNFGAISSVLNDILSRLDPPEAEVQIDRLITGRLQSLQTYVTQQLIRAAEIRASANLAATKMSECVLGQSKRVDFCGKGYHLMSFPQSAPHGVVFLHVTYVPAQEKNFTTAPAICHDGKAHFPREGVFVSNGTHWFVTQRNFYEPQIITTDNTFVSGNCDVVIGIVNNTVYDPLQPELDSFKEELDKYFKNHTSPDVDLGDISGINASVVNIQKEIDRLNEVAKNLNESLIDLQELGKYEQYIKGSGRENLYFQGGGGSGYIPEAPRDGQAYVRKDGEWVLLSTFLGHHHHHHHH

SEQ ID NO: 1927 - protein, 1281 aa, Artificial Sequence
  Description of Artificial Sequence: Synthetic polypeptide
MGILPSPGMPALLSLVSLLSVLLMGCVAETGTQCVNLTTRTQLPPAYTNSFTRGVYYPDKVFRSDVLHSTQDLFLPFFSNVTWFHAIHVSGTNGTKRFDNPVLPFNDGVYFASTEKSNIIRGWIFGTTLDSKTQSLLIVNNATNVVIKVCEFQFCDDPFLGVYYHKNNKSWMEKEFRVYSSANNCTFEYVSQPFLMDLGGKQGNFKWLREFVFKNIDGYFKIYSKHTPINLVRDLPQGFSALEPLMDLPIGINITRFQTLLALHRSYLTPGDSSSGWTAGAAAYYVGYLQPRTFLLKYNENGTITDAVDCALDPLSETKCTLKSFTVEKGIYQTSNFRVQPTESIVRFPNITNLCPFGEVFNATRFASVYAWNRKRISNCVADYSVLYNSASFSTFKCYGVSPTKLNDLCFTNVYADSFVIRGDEVRQIAPGQTGKIADYNYKLPDDFTGCVIAWNSNNLDSKVGGNYNYLYRLFRKSNLKPFERDISTEIYQAGSTPCNGVEGFNCYFPLQSYGFQPTNGVGYQPYRVVVLSFELLHAPATVCGPKKSTNLVKNKCVNFNFNGLTGTGVLTESNKKFLPFQQFGRDIADNTDAVRDPQTLEILDITPCSFGGVSVITPGTNTSNQVAVLYQDVNCTEVPNAIHADQLTPTWRVYSTGSNVFQTRAGCLIGAEHVNNSYECDIPIGAGICASYQTQTNSPSGAGSVASQSIIAYTMSLGAENSVAYSNNSIAIPTNFTISVTTEILPVSMTKTSVDCTMYICGDSTECSNLLLQYGSFCTQLNRALQGIAQEQDKNTQEVFAQVKQIYKTPPIKDFGGFNFSQILPDPSKPSKRSFIEDLLFNKVTLADAGFIKQYGDCLGDIAARDLICAQKFNGLTVLPPLLTDEMIAQYTSALLAGTITSGWTFGAGAALQIPFAMQMAYRFNGIGVTQNVLYENQKLIANQFNQAIGKIQDSLSSTASALGKLQDVVNQNAQALNTLVKQLSSNFGAISSVLNDILSRLDPPEAEVQIDRLITGRLQSLQTYVTQQLIRAAEIRASANLAATKMSECVLGQSKRVDFCGKGYHLMSFPQSAPHGVVFLHVTYVPAQEKNFTTAPAICHDGKAFFPREGVFVSNGTQWFVTQRNFYEPQIITTDNTFVSGNCDVVIGIVNNTVYDPLQPELDSFKEELDKYFKNHTSPDVDLGDISGINASVVNIQKEIDRLNEVAKNLNESLIDLQELGKYEQYIKGSGRENLYFQGGGGSGYIPEAPRDGQAYVRKDGEWVLLSTFLGHHHHHHHH

SEQ ID NO: 1928 - protein, 1281 aa, Artificial Sequence
  Description of Artificial Sequence: Synthetic polypeptide
MGILPSPGMPALLSLVSLLSVLLMGCVAETGTQCVNLTTRTQLPPAYTNSFTRGVYYPDKVFRSSVLHSTQDLFLPFFSNVTWFHAIHVSGTNGTKRFDNPVLPFNDGVYFASTEKSNIIRGWIFGTTLDSKTQSLLIVNNATNVVIKVCEFQFCNDPFLGVYYHKNNKSWMESEFRVYSSANNCTFEYVSQPFLMDLEGKQGNFKNLREFVFKNIDGYFKIYSKHTPINLVRDLPQGFSALEPLVDLPIGINITRFQTLLALHRSYLTPGDSSSGWTAGAAAYYVGYLQPRTFLLKYNENGTITDAVDCALDPLSETKCTLKSFTVEKGIYQTSNFRVQPTESIVRFPNITNLCPFGEVFNATRFASVYAWNRKRISNCVADYSVLYNSASFSTFKCYGVSPTKLNDLCFTNVYADSFVIRGDEVRQIAPGQTGKIADYNYKLPDDFTGCVIAWNSNNLDSKVGGNYNYLYRLFRKSNLKPFERDISTEIYQAGSTPCNGVEGFNCYFPLQSYGFQPTNGVGYQPYRVVVLSFELLHAPATVCGPKKSTNLVKNKCVNFNFNGLTGTGVLTESNKKFLPFQQFGRDIADTTDAVRDPQTLEILDITPCSFGGVSVITPGTNTSNQVAVLYQDVNCTEVPVAIHADQLTPTWRVYSTGSNVFQTRAGCLIGAEHVNNSYECDIPIGAGICASYQTQTNSPSGAGSVASQSIIAYTMSLGAENSVAYSNNSIAIPTNFTISVTTEILPVSMTKTSVDCTMYICGDSTECSNLLLQYGSFCTQLNRALTGIAVEQDKNTQEVFAQVKQIYKTPPIKDFGGFNFSQILPDPSKPSKRSFIEDLLFNKVTLADAGFIKQYGDCLGDIAARDLICAQKFNGLTVLPPLLTDEMIAQYTSALLAGTITSGWTFGAGAALQIPFAMQMAYRFNGIGVTQNVLYENQKLIANQFNSAIGKIQDSLSSTASALGKLQDVVNQNAQALQTLVKQLSSNFGAISSVLNDILSRLDPPEAEVQIDRLITGRLQSLQTYVTQQLIRAAEIRASANLAATKMSECVLGQSKRVDFCGKGYHLMSFPQSAPHGVVFLHVTYVPAQEKNFTTAPAICHDGKAHFPREGVFVSNGTHWFVTQRNFYEPQIITTDNTFVSGNCDVVIGIVNNTVYDPLQPELDSFKEELDKYFKNHTSPDVDLGDISGINASVVNIQKEIDRLNEVAKNLNESLIDLQELGKYEQYIKGSGRENLYFQGGGGSGYIPEAPRDGQAYVRKDGEWVLLSTFLGHHHHHHHH

SEQ ID NO: 1929 - protein, 1281 aa, Artificial Sequence
  Description of Artificial Sequence: Synthetic polypeptide
MGILPSPGMPALLSLVSLLSVLLMGCVAETGTQCVNLTTRTQLPPAYTNSFTRGVYYPDKVFRSSVLHSTQDLFLPFFSNVTWFHAIHVSGTNGTKRFDNPVLPFNDGVYFASTEKSNIIRGWIFGTTLDSKTQSLLIVNNATNVVIKVCEFQFCNDPFLGVYYHKNNKSWMESEFRVYSSANNCTFEYVSQPFLMDVEGKQGNFKNLREFVFKNIDGYFKIYSKHTPINLVRDLPQGFSALEPLVDLPIGINITRFQTLLALHRSYLTPGDSSSGWTAGAAAYYVGYLQPRTFLLKYNENGTITDAVDCALDPLSETKCTLKSFTVEKGIYQTSNFRVQPTESIVRFPNITNLCPFGEVFNATRFASVYAWNRKRISNCVADYSVLYNSASFSTFKCYGVSPTKLNDLCFTNVYADSFVIRGDEVRQIAPGQTGKIADYNYKLPDDFTGCVIAWNSNNLDSKVGGNYNYLYRLFRKSNLKPFERDISTEIYQAGSTPCNGVEGFNCYFPLQSYGFQPTNGVGYQPYRVVVLSFELLHAPATVCGPKKSTNLVKNKCVNFNFNGLTGTGVLTESNKKFLPFQQFGRDIADTTDAVRDPQTLEILDITPCSFGGVSVITPGTNTSNQVAVLYQDVNCTEVPVAIHADQLTPTWRVYSTGSNVFQTRAGCLIGAEHVNNSYECDIPIGAGICASYQTQTNSPSGAGSVASQSIIAYTMSLGAENSVAYSNNSIAIPTNFTISVTTEILPVSMTKTSVDCTMYICGDSTECSNLLLQYGSFCTQLNRALTGIAVEQDKNTQEVFAQVKQIYKTPPIKDFGGFNFSQILPDPSKPSKRSFIEDLLFNKVTLADAGFIKQYGDCLGDIAARDLICAQKFNGLTVLPPLLTDEMIAQYTSALLAGTITSGWTFGAGAALQIPFAMQMAYRFNGIGVTQNVLYENQKLIANQFNSAIGKIQDSLSSTASALGKLQDVVNQNAQALNTLVKQLSSNFGAISSVLNDILSRLDPPEAEVQIDRLITGRLQSLQTYVTQQLIRAAEIRASANLAATKMSECVLGQSKRVDFCGKGYHLMSFPQSAPHGVVFLHVTYVPAQEKNFTTAPAICHDGKAHFPREGVFVSNGTHWFVTQRNFYEPQIITTDNTFVSGNCDVVIGIVNNTVYDPLQPELDSFKEELDKYFKNHTSPDVDLGDISGINASVVNIQKEIDRLNEVAKNLNESLIDLQELGKYEQYIKGSGRENLYFQGGGGSGYIPEAPRDGQAYVRKDGEWVLLSTFLGHHHHHHHH

SEQ ID NO: 1930 - protein, 1281 aa, Artificial Sequence
  Description of Artificial Sequence: Synthetic polypeptide
MGILPSPGMPALLSLVSLLSVLLMGCVAETGTQCVNLTTRTQLPPAYTNSFTRGVYYPDKVFRSSVLHSTQDLFLPFFSNVTWFHAIHVSGTNGTKRFDNPVLPFNDGVYFASTEKSNIIRGWIFGTTLDSKTQSLLIVNNATNVVIKVCEFQFCNDPFLGVYYHKNNKSWMESEFRVYSSANNCTFEYVSQPFLMDLEGKQGNFKNLREFVFKNIDGYFKIYSKHTPINLVRDLPQGFSALEPLVDLPIGINITRFQTLLALHRSYLTPGDSSSGWTAGAAAYYVGYLQPRTFLLKYNENGTITDAVDCALDPLSETKCTLKSFTVEKGIYQTSNFRVQPTESIVRFPNITNLCPFGEVFNATRFASVYAWNRKRISNCVADYSVLYNSASFSTFKCYGVSPTKLNDLCFTNVYADSFVIRGDEVRQIAPGQTGKIADYNYKLPDDFTGCVIAWNSNNLDSKVGGNYNYLYRLFRKSNLKPFERDISTEIYQAGSTPCNGVEGFNCYFPLQSYGFQPTNGVGYQPYRVVVLSFELLHAPATVCGPKKSTNLVKNKCVNFNFNGLTGTGVLTESNKKFLPFQQFGRDIADTTDAVRDPQTLEILDITPCSFGGVSVITPGTNTSNQVAVLYQDVNCTEVPVAIHADQLTPTWRVYSTGSNVFQTRAGCLIGAEHVNNSYECDIPIGAGICASYQTQTNSPSGAGSVASQSIIAYTMSLGAENSVAYSNNSIAIPTNFTISVTTEILPVSMTKTSVDCTMYICGDSTECSNLLLQYGSFCTQLNRALTGIAVEQDKNTQEVFAQVKQIYKTPPIKDFGGFNFSQILPDPSKPSKRSFIEDLLFNKVTLADAGFIKQYGDCLGDIAARDLICAQKFNGLTVLPPLLTDEMIAQYTSALLAGTITSGWTFGAGAALQIPFAMQMAYRFNGIGVTQNVLYENQKLIANQFNSAIGKIQDSLSSTASALGKLQDVVNQNAQALDTLVKQLSSNFGAISSVLNDILSRLDPPEAEVQIDRLITGRLQSLQTYVTQQLIRAAEIRASANLAATKMSECVLGQSKRVDFCGKGYHLMSFPQSAPHGVVFLHVTYVPAQEKNFTTAPAICHDGKAHFPREGVFVSNGTHWFVTQRNFYEPQIITTDNTFVSGNCDVVIGIVNNTVYDPLQPELDSFKEELDKYFKNHTSPDVDLGDISGINASVVNIQKEIDRLNEVAKNLNESLIDLQELGKYEQYIKGSGRENLYFQGGGGSGYIPEAPRDGQAYVRKDGEWVLLSTFLGHHHHHHHH

SEQ ID NO: 1931 - protein, 1281 aa, Artificial Sequence
  Description of Artificial Sequence: Synthetic polypeptide
MGILPSPGMPALLSLVSLLSVLLMGCVAETGTQCVNLTTRTQLPPAYTNSFTRGVYYPDKVFRSDVLHSTQDLFLPFFSNVTWFHAIHVSGTNGTKRFDNPVLPFNDGVYFASTEKSNIIRGWIFGTTLDSKTQSLLIVNNATNVVIKVCEFQFCENPFLGVYYHKNNKSWMEKEFRVYSSANNCTFEYVSQPFLMDLGGKQGNFKNLREFVFKNIDGYFKIYSKHTPINLVRDLPQGFSALEPLMDLPIGINITRFQTLLALHRSYLTPGDSSSGWTAGAAAYYVGYLQPRTFLLKYNENGTITDAVDCALDPLSETKCTLKSFTVEKGIYQTSNFRVQPTESIVRFPNITNLCPFGEVFNATRFASVYAWNRKRISNCVADYSVLYNSASFSTFKCYGVSPTKLNDLCFTNVYADSFVIRGDEVRQIAPGQTGKIADYNYKLPDDFTGCVIAWNSNNLDSKVGGNYNYLYRLFRKSNLKPFERDISTEIYQAGSTPCNGVEGFNCYFPLQSYGFQPTNGVGYQPYRVVVLSFELLHAPATVCGPKKSTNLVKNKCVNFNFNGLTGTGVLTESNKKFLPFQQFGRDIADNTDAVRDPQTLEILDITPCSFGGVSVITPGTNTSNQVAVLYQDVNCTEVPNAIHADQLTPTWRVYSTGSNVFQTRAGCLIGAEHVNNSYECDIPIGAGICASYQTQTNSPSGAGSVASQSIIAYTMSLGAENSVAYSNNSIAIPTNFTISVTTEILPVSMTKTSVDCTMYICGDSTECSNLLLQYGSFCTQLNRALQGIAQEQDKNTQEVFAQVKQIYKTPPIKDFGGFNFSQILPDPSKPSKRSFIEDLLFNKVTLADAGFIKQYGDCLGDIAARDLICAQKFNGLTVLPPLLTDEMIAQYTSALLAGTITSGWTFGAGAALQIPFAMQMAYRFNGIGVTQNVLYENQKLIANQFNQAIGKIQDSLSSTASALGKLQDVVNQNAQALNTLVKQLSSNFGAISSVLNDILSRLDPPEAEVQIDRLITGRLQSLQTYVTQQLIRAAEIRASANLAATKMSECVLGQSKRVDFCGKGYHLMSFPQSAPHGVVFLHVTYVPAQEKNFTTAPAICHDGKAFFPREGVFVSNGTQWFVTQRNFYEPQIITTDNTFVSGNCDVVIGIVNNTVYDPLQPELDSFKEELDKYFKNHTSPDVDLGDISGINASVVNIQKEIDRLNEVAKNLNESLIDLQELGKYEQYIKGSGRENLYFQGGGGSGYIPEAPRDGQAYVRKDGEWVLLSTFLGHHHHHHHH

SEQ ID NO: 1932 - protein, 1281 aa, Artificial Sequence
  Description of Artificial Sequence: Synthetic polypeptide
MGILPSPGMPALLSLVSLLSVLLMGCVAETGTQCVNLTTRTQLPPAYTNSFTRGVYYPDKVFRSSVLHSTQDLFLPFFSNVTWFHAIHVSGTNGTKRFDNPVLPFNDGVYFASTEKSNIIRGWIFGTTLDSKTQSLLIVNNATNVVIKVCEFQFCNDPFLGVYYHKNNKSWMESEFRVYSSANNCTFEYVSQPFLMDLEGKQGNFKNLREFVFKNIDGYFKIYSKHTPINLVRDLPQGFSALEPLVDLPIGINITRFQTLLALHRSYLTPGDSSSGWTAGAAAYYVGYLQPRTFLLKYNENGTITDAVDCALDPLSETKCTLKSFTVEKGIYQTSNFRVQPTESIVRFPNITNLCPFGEVFNATRFASVYAWNRKRISNCVADYSVLYNSASFSTFKCYGVSPTKLNDLCFTNVYADSFVIRGDEVRQIAPGQTGKIADYNYKLPDDFTGCVIAWNSNNLDSKVGGNYNYLYRLFRKSNLKPFERDISTEIYQAGSTPCNGVEGFNCYFPLQSYGFQPTNGVGYQPYRVVVLSFELLHAPATVCGPKKSTNLVKNKCVNFNFNGLTGTGVLTESSKKFLPFQQFGRDIADTTDAVRDPQTLEILDITPCSFGGVSVITPGTNTSNQVAVLYQDVNCTEVPVAIHADQLTPTWRVYSTGSNVFQTRAGCLIGAEHVNNSYECDIPIGAGICASYQTQTNSPSGAGSVASQSIIAYTMSLGAENSVAYSNNSIAIPTNFTISVTTEILPVSMTKTSVDCTMYICGDSTECSNLLLQYGSFCTQLNRALTGIAVEQDKNTQEVFAQVKQIYKTPPIKDFGGFNFSQILPDPSKPSKRSFIEDLLFNKVTLADAGFIKQYGDCLGDIAARDLICAQKFNGLTVLPPLLTDEMIAQYTSALLAGTITSGWTFGAGAALQIPFAMQMAYRFNGIGVTQNVLYENQKLIANQFNSAIGKIQDSLSSTASALGKLQDVVNQNAQALNTLVKQLSSNFGAISSVLNDILSRLDPPEAEVQIDRLITGRLQSLQTYVTQQLIRAAEIRASANLAATKMSECVLGQSKRVDFCGKGYHLMSFPQSAPHGVVFLHVTYVPAQEKNFTTAPAICHDGKAHFPREGVFVSNGTHWFVTQRNFYEPQIITTDNTFVSGNCDVVIGIVNNTVYDPLQPELDSFKEELDKYFKNHTSPDVDLGDISGINASVVNIQKEIDRLNEVAKNLNESLIDLQELGKYEQYIKGSGRENLYFQGGGGSGYIPEAPRDGQAYVRKDGEWVLLSTFLGHHHHHHHH

SEQ ID NO: 1933 - protein, 1281 aa, Artificial Sequence
  Description of Artificial Sequence: Synthetic polypeptide
MGILPSPGMPALLSLVSLLSVLLMGCVAETGTQCVNLTTRTQLPPAYTNSFTRGVYYPDKVFRSSVLHSTQDLFLPFFSNVTWFHAIHVSGTNGTKRFDNPVLPFNDGVYFASTEKSNIIRGWIFGTTLDSKTQSLLIVNNATNVVIKVCEFQFCNDPFLGVYYHKNNKSWMESEFRVYSSANNCTFEYVSQPLLMDLEGKQGNFKNLREFVFKNIDGYFKIYSKHTPINLVRDLPQGFSALEPLVDLPIGINITRFQTLLALHRSYLTPGDSSSGWTAGAAAYYVGYLQPRTFLLKYNENGTITDAVDCALDPLSETKCTLKSFTVEKGIYQTSNFRVQPTESIVRFPNITNLCPFGEVFNATRFASVYAWNRKRISNCVADYSVLYNSASFSTFKCYGVSPTKLNDLCFTNVYADSFVIRGDEVRQIAPGQTGKIADYNYKLPDDFTGCVIAWNSNNLDSKVGGNYNYLYRLFRKSNLKPFERDISTEIYQAGSTPCNGVEGFNCYFPLQSYGFQPTNGVGYQPYRVVVLSFELLHAPATVCGPKKSTNLVKNKCVNFNFNGLTGTGVLTESNKKFLPFQQFGRDIADTTDAVRDPQTLEILDITPCSFGGVSVITPGTNTSNQVAVLYQDVNCTEVPVAIHADQLTPTWRVYSTGSNVFQTRAGCLIGAEHVNNSYECDIPIGAGICASYQTQTNSPSGAGSVASQSIIAYTMSLGAENSVAYSNNSIAIPTNFTISVTTEILPVSMTKTSVDCTMYICGDSTECSNLLLQYGSFCTQLNRALTGIAVEQDKNTQEVFAQVKQIYKTPPIKDFGGFNFSQILPDPSKPSKRSFIEDLLFNKVTLADAGFIKQYGDCLGDIAARDLICAQKFNGLTVLPPLLTDEMIAQYTSALLAGTITSGWTFGAGAALQIPFAMQMAYRFNGIGVTQNVLYENQKLIANQFNSAIGKIQDSLSSTASALGKLQDVVNQNAQALNTLVKQLSSNFGAISSVLNDILSRLDPPEAEVQIDRLITGRLQSLQTYVTQQLIRAAEIRASANLAATKMSECVLGQSKRVDFCGKGYHLMSFPQSAPHGVVFLHVTYVPAQEKNFTTAPAICHDGKAHFPREGVFVSNGTHWFVTQRNFYEPQIITTDNTFVSGNCDVVIGIVNNTVYDPLQPELDSFKEELDKYFKNHTSPDVDLGDISGINASVVNIQKEIDRLNEVAKNLNESLIDLQELGKYEQYIKGSGRENLYFQGGGGSGYIPEAPRDGQAYVRKDGEWVLLSTFLGHHHHHHHH

SEQ ID NO: 1934 - protein, 1281 aa, Artificial Sequence
  Description of Artificial Sequence: Synthetic polypeptide
MGILPSPGMPALLSLVSLLSVLLMGCVAETGTQCVNLTTRTQLPPAYTNSFTRGVYYPDKVFRSSVLHSTQDLFLPFFSNVTWFHAIHVSGTNGTKRFDNPVLPFNDGVYFASTEKSNIIRGWIFGTTLDSKTQSLLIVNNATNVVIKVCEFQFCNDPFLGVYYHKNNKSWMESEFRVYSSANNCTFEYVSQPFLMDLEGKQGNFKNLREFVFKNIDGYFKIYSKHTPINLVRDLPQGFSALEPLVDLPIGINITRFQTLLALHRSYLTPGDSSSGWTAGAAAYYVGYLQPRTFLLKYNENGTITDAVDCALDPLSETKCTLKSFTVEKGIYQTSNFRVQPTESIVRFPNITNLCPFGEVFNATRFASVYAWNRKRISNCVADYSVLYNSASFSTFKCYGVSPTKLNDLCFTNVYADSFVIRGDEVRQIAPGQTGKIADYNYKLPDDFTGCVIAWNSNNLDSKVGGNYNYLYRLFRKSNLKPFERDISTEIYQAGSTPCNGVEGFNCYFPLQSYGFQPTNGVGYQPYRVVVLSFELLHAPATVCGPKKSTNLVKNKCVNFNFNGLTGTGVLTESNKKFLPFQQFGRDISDTTDAVRDPQTLEILDITPCSFGGVSVITPGTNTSNQVAVLYQDVNCTEVPVAIHADQLTPTWRVYSTGSNVFQTRAGCLIGAEHVNNSYECDIPIGAGICASYQTQTNSPSGAGSVASQSIIAYTMSLGAENSVAYSNNSIAIPTNFTISVTTEILPVSMTKTSVDCTMYICGDSTECSNLLLQYGSFCTQLNRALTGIAVEQDKNTQEVFAQVKQIYKTPPIKDFGGFNFSQILPDPSKPSKRSFIEDLLFNKVTLADAGFIKQYGDCLGDIAARDLICAQKFNGLTVLPPLLTDEMIAQYTSALLAGTITSGWTFGAGAALQIPFAMQMAYRFNGIGVTQNVLYENQKLIANQFNSAIGKIQDSLSSTASALGKLQDVVNQNAQALNTLVKQLSSNFGAISSVLNDILSRLDPPEAEVQIDRLITGRLQSLQTYVTQQLIRAAEIRASANLAATKMSECVLGQSKRVDFCGKGYHLMSFPQSAPHGVVFLHVTYVPAQEKNFTTAPAICHDGKAHFPREGVFVSNGTHWFVTQRNFYEPQIITTDNTFVSGNCDVVIGIVNNTVYDPLQPELDSFKEELDKYFKNHTSPDVDLGDISGINASVVNIQKEIDRLNEVAKNLNESLIDLQELGKYEQYIKGSGRENLYFQGGGGSGYIPEAPRDGQAYVRKDGEWVLLSTFLGHHHHHHHH

SEQ ID NO: 1935 - protein, 1281 aa, Artificial Sequence
  Description of Artificial Sequence: Synthetic polypeptide
MGILPSPGMPALLSLVSLLSVLLMGCVAETGTQCVNLTTRTQLPPAYTNSFTRGVYYPDKVFRSSVLHSTQDLFLPFFSNVTWFHAIHVSGTNGTKRFDNPVLPFNDGVYFASTEKSNIIRGWIFGTTLDSKTQSLLIVNNATNVVIKVCEFQFCNDPFLGVYYHKNNKSWMESEFRVYSSANNCTFEYVSQPFLMDLEGKQGNFKNLREFVFKNIDGYFKIYSKHTPINLVRDLPQGFSALEPLVDLPIGINITRFQTLLALHRSYLTPGDSSSGWTAGAAAYYVGYLQPRTFLLKYNENGTITDAVDCALDPLSETKCTLKSFTVEKGIYQTSNFRVQPTESIVRFPNITNLCPFGEVFNATRFASVYAWNRKRISNCVADYSVLYNSASFSTFKCYGVSPTKLNDLCFTNVYADSFVIRGDEVRQIAPGQTGKIADYNYKLPDDFTGCVIAWNSNNLDSKVGGNYNYLYRLFRKSNLKPFERDISTEIYQAGSTPCNGVEGFNCYFPLQSYGFQPTNGVGYQPYRVVVLSFELLHAPATVCGPKKSTNLVKNKCVNFNFNGLTGTGVLTESNKKFLPFQQFGRDIADTTDAVRDPQTLEILDITPCSFGGVSVITPGTNTSNQVAVLYQDVNCTEVPVAIHADQLTPTWRVYSTGSNVFQTRAGCLIGAEHVNNSYECDIPIGAGICASYQTQTNSPSGAGSVASQSIIAYTMSLGAENSVAYSNNSIAIPTNFTISVTTEILPVSMTKTSVDCTMYICGDSTECSNLLLQYGSFCTQLNRALTGIAVEQDKNTQEVFAQVKQIYKTPPIKDFGGFNFSQILPDPSKPSKRSFIEDLLFNKVTLADAGFIKQYGDCLGDIAARDLICAQKFNGLTVLPPLLTDEMIAQYTSALLAGTITSGWTFGAGAALQIPFAMQMAYRFNGIGVTQNVLYENQKLIANQFNSAIGKIQDSLSSTASALGKLQDVVNQNAQALNTLVKQLSSNFGAISSVLNDILSRLDPPEAEVQIDRLITGRLQSLQTYVTQQLIRAAEIRASANLAATKMSECVLGQSKRVDFCGKGYHLMSFPQSAPHGVVFLHVTYVPAQFKNFTTAPAICHDGKAHFPREGVFVSNGTHWFVTQRNFYEPQIITTDNTFVSGNCDVVIGIVNNTVYDPLQPELDSFKEELDKYFKNHTSPDVDLGDISGINASVVNIQKEIDRLNEVAKNLNESLIDLQELGKYEQYIKGSGRENLYFQGGGGSGYIPEAPRDGQAYVRKDGEWVLLSTFLGHHHHHHHH

SEQ ID NO: 1936 - protein, 1281 aa, Artificial Sequence
  Description of Artificial Sequence: Synthetic polypeptide
MGILPSPGMPALLSLVSLLSVLLMGCVAETGTQCVNLTTRTQLPPAYTNSFTRGVYYPDKVFRSSVLHSTQDLFLPFFSNVTWFHAIHVSGTNGTKRFDNPVLPFNDGVYFASTEKSNIIRGWIFGTTLDSKTQSLLIVNNATNVVIKVCEFQFCNDPFLGVYYHKNNKSWMESEFRVYSSANNCTFEYVSQPFRMDLEGKQGNFKNLREFVFKNIDGYFKIYSKHTPINLVRDLPQGFSALEPLVDLPIGINITRFQTLLALHRSYLTPGDSSSGWTAGAAAYYVGYLQPRTFLLKYNENGTITDAVDCALDPLSETKCTLKSFTVEKGIYQTSNFRVQPTESIVRFPNITNLCPFGEVFNATRFASVYAWNRKRISNCVADYSVLYNSASFSTFKCYGVSPTKLNDLCFTNVYADSFVIRGDEVRQIAPGQTGKIADYNYKLPDDFTGCVIAWNSNNLDSKVGGNYNYLYRLFRKSNLKPFERDISTEIYQAGSTPCNGVEGFNCYFPLQSYGFQPTNGVGYQPYRVVVLSFELLHAPATVCGPKKSTNLVKNKCVNFNFNGLTGTGVLTESNKKFLPFQQFGRDIADTTDAVRDPQTLEILDITPCSFGGVSVITPGTNTSNQVAVLYQDVNCTEVPVAIHADQLTPTWRVYSTGSNVFQTRAGCLIGAEHVNNSYECDIPIGAGICASYQTQTNSPSGAGSVASQSIIAYTMSLGAENSVAYSNNSIAIPTNFTISVTTEILPVSMTKTSVDCTMYICGDSTECSNLLLQYGSFCTQLNRALTGIAVEQDKNTQEVFAQVKQIYKTPPIKDFGGFNFSQILPDPSKPSKRSFIEDLLFNKVTLADAGFIKQYGDCLGDIAARDLICAQKFNGLTVLPPLLTDEMIAQYTSALLAGTITSGWTFGAGAALQIPFAMQMAYRFNGIGVTQNVLYENQKLIANQFNSAIGKIQDSLSSTASALGKLQDVVNQNAQALNTLVKQLSSNFGAISSVLNDILSRLDPPEAEVQIDRLITGRLQSLQTYVTQQLIRAAEIRASANLAATKMSECVLGQSKRVDFCGKGYHLMSFPQSAPHGVVFLHVTYVPAQEKNFTTAPAICHDGKAHFPREGVFVSNGTHWFVTQRNFYEPQIITTDNTFVSGNCDVVIGIVNNTVYDPLQPELDSFKEELDKYFKNHTSPDVDLGDISGINASVVNIQKEIDRLNEVAKNLNESLIDLQELGKYEQYIKGSGRENLYFQGGGGSGYIPEAPRDGQAYVRKDGEWVLLSTFLGHHHHHHHH

SEQ ID NO: 1937 - protein, 1281 aa, Artificial Sequence
  Description of Artificial Sequence: Synthetic polypeptide
MGILPSPGMPALLSLVSLLSVLLMGCVAETGTQCVNLTTRTQLPPAYTNSFTRGVYYPDKVFRSSVLHSTQDLFLPFFSNVTWFHAIHVSGTNGTKRFDNPVLPFNDGVYFAAIEKSNIIRGWIFGTTLDSKTQSLLIVNNATNVVIKVCEFQFCNDPFLGVYYHKNNKSWMESEFRVYSSANNCTFEYVSQPFLMDLEGKQGNFKNLREFVFKNIDGYFKIYSKHTPINLVRDLPQGFSALEPLVDLPIGINITRFQTLLALHRSYLTPGDSSSGWTAGAAAYYVGYLQPRTFLLKYNENGTITDAVDCALDPLSETKCTLKSFTVEKGIYQTSNFRVQPTESIVRFPNITNLCPFGEVFNATRFASVYAWNRKRISNCVADYSVLYNSASFSTFKCYGVSPTKLNDLCFTNVYADSFVIRGDEVRQIAPGQTGKIADYNYKLPDDFTGCVIAWNSNNLDSKVGGNYNYLYRLFRKSNLKPFERDISTEIYQAGSTPCNGVEGFNCYFPLQSYGFQPTNGVGYQPYRVVVLSFELLHAPATVCGPKKSTNLVKNKCVNFNFNGLTGTGVLTESNKKFLPFQQFGRDISDTTDAVRDPQTLEILDITPCSFGGVSVVTPGTNTSNQVAVLYQDVNCTEVPVAIHADQLTPTWRVYSTGSNVFQTRAGCLIGAEHVNNSYECDIPIGAGICASYQTQTNSPSGAGSVASQSIIAYTMSLGAENSVAYSNNSIAIPTNFTISVTTEILPVSMTKTSVDCTMYICGDSTECSNLLLQYGSFCTQLNRALTGIAVEEDKNTQEVFAQVKQIYKTPPIKDFGGFNFSQILPDPSKPSKRSFIEDLLFNKVTLADAGFIKQYGDCLGDIAARDLICAQKFNGLTVLPPLLTDEMIAQYTSSLLAGTITAGWTFGAGAALQIPFAMQMAYRFNGIGVTQNVLYENQKLIANQFNSAIGKIQDSLSSTASALGKLQDVVNQNAQALNTLVKQLSSNFGAISSVLNDILSRLDPPEAEVQIDRLITGRLQSLQTYVTQQLIRAAEIRASANLAATKMSECVKGQSKRVDFCGKGYHLMSFPQSAPHGIVFLHVTYVPAQEKNFTTAPAICHDGKAHFPREGVFVSNGTHWFVTQRNFYEPQIITTDNTFVSGNCDVVIGIVNNTVYDPLQPELDSFKEELDKYFKNHTSPDVDLGDISGINASVVNIQKEIDRLNEVAKNLNESLIDLQELGKYEQYIKGSGRENLYFQGGGGSGYIPEAPRDGQAYVRKDGEWVLLSTFLGHHHHHHHH

SEQ ID NO: 1938 - protein, 1281 aa, Artificial Sequence
  Description of Artificial Sequence: Synthetic polypeptide
MGILPSPGMPALLSLVSLLSVLLMGCVAETGTQCVNLTTRTQLPPAYTNSFRRGVYYPDKVFRSDVLHLTQDLFLPFFSNVTWFHAIHVSGTNGTKRFDNPVLPFNDGVYFASTEKSNIIRGWIFGTTLDSKTQSLLIVNNATNVVIKVCEFQFCNDPFLGVYYHKNNKSWMESEFRVYSSANNCTFEYVSQPFLMDLEGKQGNFKNLREFVFKNIDGYFKIYSKHTPINLVRDLPQGFSALEPLVDLPIGINITRFQTLLALHRSYLTPGDSSSGWTAGAAAYYVGYLQPRTFLLKYNENGTITDAVDCSQDPLSELKCTLKSFTVEKGIYQTSNFRVQPTESIVRFPNITNLCPFGEVFNATRFASVYAWNRKRISNCVADYSVLYNSASFSTFKCYGVSPTKLNDLCFTNVYADSFVIRGDEVRQIAPGQTGKIADYNYKLPDDFTGCVIAWNSNNLDSKVGGNYNYLYRLFRKSNLKPFERDISTEIYQAGSTPCNGVEGFNCYFPLQSYGFQPTNGVGYQPYRVVVLSFELLHAPATVCGPKKSTNLVKNKCVNFNFNGLTGTGVLTESNKKFLPFQQFGRDIADTTDAVRDPQTLEILDITPCSFGGVSVITPGTNTSNQVAVLYQDVNCTEVPVAIHADQLTPTWRVYSTGSNVFQTRAGCLIGAEHVNNSYECDIPIGAGICASYQTQTNSPSGAGSVASQSIIAYTMSLGAENSVAYSNNSIAIPTNFTISVTTEILPVSMTKTSVDCTMYICGDSTECSNLLLQYGSFCTQLNRALTGIAVEQDKNTQEVFAQVKQIYKTPPIKDFGGFNFSQILPDPSKPSKRSFIEDLLFNKVTLADAGFIKQYGDCLGDIAARDLICAQKFNGLTVLPPLLTDEMIAQYTSALLAGTITSGWTFGAGAALQIPFAMQMAYRFNGIGVTQNVLYENQKLIANQFNSAIGKIQDSLSSTASALGKLQDVVNQNAQALNTLVKQLSSNFGAISSVLNDILSRLDPPEAEVQIDRLITGRLQSLQTYVTQQLIRAAEIRASANLAATKMSECVLGQSKRVDFCGKGYHLMSFPQSAPHGVVFLHVTYVPAQEKNFTTAPAICHDGKAHFPREGVFVSNGTHWFVTQRNFYEPQIITTDNTFVSGNCDVVIGIVNNTVYDPLQPELDSFKEELDKYFKNHTSPDVDLGDISGINASVVNIQKEIDRLNEVAKNLNESLIDLQELGKYEQYIKGSGRENLYFQGGGGSGYIPEAPRDGQAYVRKDGEWVLLSTFLGHHHHHHHH

SEQ ID NO: 1939 - protein, 1281 aa, Artificial Sequence
  Description of Artificial Sequence: Synthetic polypeptide
MGILPSPGMPALLSLVSLLSVLLMGCVAETGTQCVNLTTRTQLPPAYTNSFTRGVYYPDKVFRSSVLHSTQDLFLPFFSNVTWFHAIHVSGTNGTKRFDNPVLPFNDGVYFASTEKSNIIRGWIFGTTLDSKTQSLLIVNNATNVVIKVCEFQFCNDPFLGVYYHKNNKSWMESEFRVYSSANNCTFEYVSQPFLMDLEGKQGNFKNLREFVFKNIDGYFKIYSKHTPINLVRDLPQGFSALEPLVDLPIGINITRFQTLLALHRSYLTPGDSSSGWTAGAAAYYVGYLQPRTFLLKYNENGTITDAVDCALDPLSETKCTLKSFTVEKGIYQTSNFRVQPTESIVRFPNITNLCPFGEVFNATRFASVYAWNRKRISNCVADYSVLYNSASFSTFKCYGVSPTKLNDLCFTNVYADSFVIRGDEVRQIAPGQTGKIADYNYKLPDDFTGCVIAWNSNNLDSKVGGNYNYLYRLFRKSNLKPFERDISTEIYQAGSTPCNGVEGFNCYFPLQSYGFQPTNGVGYQPYRVVVLSFELLHAPATVCGPKKSTNLVKNKCVNFNFNGLTGTGVLTESNKKFLPFQQFGRDIADTTDAVRDPQTLEILDITPCSFGGVSVITPGTNTSNQVAVLYQDVNCTEVPVAIHADQLTPTWRVYSTGSNVFQTRAGCLIGAEHVNNSYECDIPIGAGICASYQTQTNSPSGAGSVASQSIIAYTMSLGAENSVAYSNNSIAIPTNFTISVTTEILPVSMTKTSVDCTMYICGDSTECSNLLKQYGSFCTQLNRALTGIAVEQDKNTQEVFAQVKQIYKTPPIKDFGGFNFSQILPDPSKPSKRSFIEDLLFNKVTLADAGFIKQYGDCLGDIAARDLICAQKFNGLTVLPPLLTDEMIAQYTSALLAGTITSGWTFGAGAALQIPFAMQMAYRFNGIGVTQNVLYENQKLIANQFNSAIGKIQDSLSSTASALGKLQDVVNQNAQALNTLVKQLSSNFGAISSVLNDILSRLDPPEAEVQIDRLITGRLQSLQTYVTQQLIRAAEIRASANLAATKMSECVLGQSKRVDFCGKGYHLMSFPQSAPHGVVFLHVTYVPAQEKNFTTAPAICHDGKAHFPREGVFVSNGTHWFVTQRNFYEPQIITTDNTFVSGNCDVVIGIVNNTVYDPLQPELDSFKEELDKYFKNHTSPDVDLGDISGINASVVNIQKEIDRLNEVAKNLNESLIDLQELGKYEQYIKGSGRENLYFQGGGGSGYIPEAPRDGQAYVRKDGEWVLLSTFLGHHHHHHHH

SEQ ID NO: 1940 - protein, 1281 aa, Artificial Sequence
  Description of Artificial Sequence: Synthetic polypeptide
MGILPSPGMPALLSLVSLLSVLLMGCVAETGTQCVNLTTRTQLPPAYTNSFTRGVYYPDKVFRSSVLHSTQDLFLPFFSNVTWFHAIHVSGTNGTKRFDNPVLPFNDGVYFASTEKSNIIRGWIFGTTLDSKTQSLLIVNNATNVVIKVCEFQFCNDPFLGVYYHKNNKSWMESEFRVYSSANNCTFEYVSQPFLMDLEGKQGNFKNLREFVFKNIDGYFKIYSKHTPINLVRDLPQGFSALEPLVDLPIGINITRFQTLLALHRSYLTPGDSSSGWTAGAAAYYVGYLQPRTFLLKYNENGTITDAVDCALDPLSETKCTLKSFTVEKGIYQTSNFRVQPTESIVRFPNITNLCPFGEVFNATRFASVYAWNRKRISNCVADYSVLYNSASFSTFKCYGVSPTKLNDLCFTNVYADSFVIRGDEVRQIAPGQTGKIADYNYKLPDDFTGCVIAWNSNNLDSKVGGNYNYLYRLFRKSNLKPFERDISTEIYQAGSTPCNGVEGFNCYFPLQSYGFQPTNGVGYQPYRVVVLSFELLHAPATVCGPKKSTNLVKNKCVNFNFNGLTGTGVLTESNKKFLPFQQFGRDIADTTDAVRDPQTLEILDITPCSFGGVSVITPGTNTSNQVAVLYQDVNCTEVPVAIHADQLTPTWRVYSTGSNVFQTRAGCLIGAEHVNNSYECDIPIGAGICASYQTQTNSPSGAGSVASQSIIAYTMSLGAENSVAYSNNSIAIPTNFTISVTTEIIPVSMTKTSVDCTMYICGDSTECSNLLLQYGSFCTQLNRALNGIAREQDKNTQEVFAQVKQIYKTPPIKDFGGFNFSQILPDPSKPSKRSFIEDLLFNKVTLADAGFIKQYGDCLGDIAARDLICAQKFNGLTVLPPLLTDEMIAQYTSALLAGTITSGWTFGAGAALQIPFAMQMAYRFNGIGVTQNVLYENQKLIANQFNSAIGKIQDSLSSTASALGKLQDVVNQNAQALNTLVKQLSSNFGAISSVLNDILSRLDPPEAEVQIDRLITGRLQSLQTYVTQQLIRAAEIRASANLAATKMSECVLGQSKRVDFCGKGYHLMSFPQSAPHGVVFLHVTYVPAQEKNFTTAPAICHDGKAHFPREGVFVSNGTHWFVTQRNFYEPQIITTDNTFVSGNCDVVIGIVNNTVYDPLQPELDSFKEELDKYFKNHTSPDVDLGDISGINASVVNIQKEIDRLNEVAKNLNESLIDLQELGKYEQYIKGSGRENLYFQGGGGSGYIPEAPRDGQAYVRKDGEWVLLSTFLGHHHHHHHH

SEQ ID NO: 1941 - protein, 1281 aa, Artificial Sequence
  Description of Artificial Sequence: Synthetic polypeptide
MGILPSPGMPALLSLVSLLSVLLMGCVAETGTQCVNLTTRTQLPPAYTNSFTRGVYYPDKIFRSSVLHLTQDLFLPFFSNVTWFHAIHVSGTNGTKRFDNPVLPFNDGVYFAATEKSNIIRGWIFGTTLDSKTQSLLIVNNATNVVIKVCNFQFCNDPFLGVYYHKNNKSWMESEFRVYSSANNCTFEYVSQPFLMDLEGKQGNFKNLREFVFKNIDGYFKIYSKYTPINLVRDLPQGFSALEPLVKLPIGINITRFQTLLALHRSYLTPGDSSSGWTAGAAAYYVGYLQPRTFLLKYNENGTITDAVDCALDPLSETKCTLKSFTVEKGIYQTSNFRVQPTESIVRFPNITNLCPFGEVFNATRFASVYAWNRKRISNCVADYSVLYNSASFSTFKCYGVSPTKLNDLCFTNVYADSFVIRGDEVRQIAPGQTGKIADYNYKLPDDFTGCVIAWNSNNLDSKVGGNYNYLYRLFRKSNLKPFERDISTEIYQAGSTPCNGVEGFNCYFPLQSYGFQPTNGVGYQPYRVVVLSFELLHAPATVCGPKKSTNLVKNKCVNFNFNGLTGTGVLTESNKKFLPFQQFGRDISDTTDAVRDPQTLEILDITPCSFGGVSVITPGTNTSNQVAVLYQDVNCTDVPVAIHADQLTPTWRVYSTGSNVFQTQAGCLIGAEHVNNSYECDIPIGAGICASYQTQTNSPSGAGSVASQSIIAYTMSLGAENSVAYSNNSIAIPTNFTISVTTEILPVSMTKTSVDCTMYICGDSTECSNLLLQYGSFCTQLNRALTGIAVEQDKNTQEVFAQVKQIYKTPPIKDFGGFNFSQILPDPSKPSKRSFIEDLLFNKVTLADAGFIKQYGDCLGDIAARDLICAQKFNGLTVLPPLLTDEMIAAYTAALLAGTATAGWTFGAGAALQIPFAMQMAYRFNGIGVTQNVLYENQKLIANQFNSAIGKIQDSLSSTASALGKLQDVVNQNAQALNTLVKQLSSNFGAISSVLNDILSRLDPPEAEVQIDRLITGRLQSLQTYVTQQLIRAAEIRASANLAATKMSECVLGQSKRVDFCGKGYHLMSFPQSAPHGVVFLHVTYVPAQEKNFTTAPAICHDGKAHFPREGVFVSNGTHWFVTQRNFYEPQIITTDNTFVSGNCDVVIGIVNNTVYDPLQPELDSFKEELDKYFKNHTSPDVDLGDISGINASVVNIQKEIDRLNEVAKNLNESLIDLQELGKYEQYIKGSGRENLYFQGGGGSGYIPEAPRDGQAYVRKDGEWVLLSTFLGHHHHHHHH

SEQ ID NO: 1942 - protein, 1281 aa, Artificial Sequence
  Description of Artificial Sequence: Synthetic polypeptide
MGILPSPGMPALLSLVSLLSVLLMGCVAETGTQCVNLTTRTQLPPAYTNSFTRGVYYPDKVFRSDVLHSTQDLFLPFFSNVTWFHAIHVSGTNGTKRFDNPVLPFNDGVYFASTEKSNIIRGWIFGTTLDSKTQSLLIVNNATNVVIKVCEFQFCENPFLGVYYHKNNKSWMEKEFRVYSSANNCTFEYVSQPFLMDLGGKQGNFKNLREFVFKNIDGYFKIYSKHTPINLVRDLPQGFSALEPLMDLPIGINITRFQTLLALHRSYLTPGDSSSGWTAGAAAYYVGYLQPRTFLLKYNENGTITDAVDCALDPLSETKCTLKSFTVEKGIYQTSNFRVQPTESIVRFPNITNLCPFGEVFNATRFASVYAWNRKRISNCVADYSVLYNSASFSTFKCYGVSPTKLNDLCFTNVYADSFVIRGDEVRQIAPGQTGKIADYNYKLPDDFTGCVIAWNSNNLDSKVGGNYNYLYRLFRKSNLKPFERDISTEIYQAGSTPCNGVEGFNCYFPLQSYGFQPTNGVGYQPYRVVVLSFELLHAPATVCGPKKSTNLVKNKCVNFNFNGLTGTGVLTESNKKFLPFQQFGRDIADNTDAVRDPQTLEILDITPCSFGGVSVITPGTNTSNQVAVLYQDVNCTEVPNAIHADQLTPTWRVYSTGSNVFQTRAGCLIGAEHVNNSYECDIPIGAGICASYQTQTNSPSGAGSVASQSIIAYTMSLGAENSVAYSNNSIAIPTNFTISVTTEILPVSMTKTSVDCTMYICGDSTECSNLLLQYGSFCTQLNRALHGIAREQDKNTQEVFAQVKQIYKTPPIKDFGGFNFSQILPDPSKPSKRSFIEDLLFNKVTLADAGFIKQYGDCLGDIAARDLICAQKFNGLTVLPPLLTDEMIAQYTSALLAGTITSGWTFGAGAALQIPFAMQMAYRFNGIGVTQNVLYENQKLIANQFNKAIGKIQDSLSSTASALGKLQDVVNQNAQALNTLVKQLSSNFGAISSVLNDILSRLDPPEAEVQIDRLITGRLQSLQTYVTQQLIRAAEIRASANLAATKMSECVLGQSKRVDFCGKGYHLMSFPQSAPHGVVFLHVTYVPAQEKNFTTAPAICHDGKAFFPREGVFVSNGTQWFVTQRNFYEPQIITTDNTFVSGNCDVVIGIVNNTVYDPLQPELDSFKEELDKYFKNHTSPDVDLGDISGINASVVNIQKEIDRLNEVAKNLNESLIDLQELGKYEQYIKGSGRENLYFQGGGGSGYIPEAPRDGQAYVRKDGEWVLLSTFLGHHHHHHHH

SEQ ID NO: 1943 - protein, 1281 aa, Artificial Sequence
  Description of Artificial Sequence: Synthetic polypeptide
MGILPSPGMPALLSLVSLLSVLLMGCVAETGTQCVNLTTRTQLPPAYTNSFTRGVYYPDKVFRSSVLHSTQDLFLPFFSNVTWFHAIHVSGTNGTKRFDNPVLPFNDGVYFASTEKSNIIRGWIFGTTLDSKTQSLLIVNNATNVVIKVCEFQFCEDPFLGVYYHKNNKSWMESEFRVYSSANNCTFEYVSQPFLMDLEGKQGNFKNLREFVFKNIDGYFKIYSKHTPINLVRDLPQGFSALEPLVDLPIGINITRFQTLLALHRSYLTPGDSSSGWTAGAAAYYVGYLQPRTFLLKYNENGTITDAVDCALDPLSETKCTLKSFTVEKGIYQTSNFRVQPTESIVRFPNITNLCPFGEVFNATRFASVYAWNRKRISNCVADYSVLYNSASFSTFKCYGVSPTKLNDLCFTNVYADSFVIRGDEVRQIAPGQTGKIADYNYKLPDDFTGCVIAWNSNNLDSKVGGNYNYLYRLFRKSNLKPFERDISTEIYQAGSTPCNGVEGFNCYFPLQSYGFQPTNGVGYQPYRVVVLSFELLHAPATVCGPKKSTNLVKNKCVNFNFNGLTGTGVLTESNKKFLPFQQFGRDIADTTDAVRDPQTLEILDITPCSFGGVSVITPGTNTSNQVAVLYQDVNCTEVPVAIHADQLTPTWRVYSTGSNVFQTRAGCLIGAEHVNNSYECDIPIGAGICASYQTQTNSPSGAGSVASQSIIAYTMSLGAENSVAYSNNSIAIPTNFTISVTTEILPVSMTKTSVDCTMYICGDSTECSNLLLQYGSFCTQLNRALTGIAVEQDKNTQEVFAQVKQIYKTPPIKDFGGFNFSQILPDPSKPSKRSFIEDLLFNKVTLADAGFIKQYGDCLGDIAARDLICAQKFNGLTVLPPLLTDEMIAQYTSALLAGTITSGWTFGAGAALQIPFAMQMAYRFNGIGVTQNVLYENQKLIANQFNSAIGKIQDSLSSTASALGKLQDVVNQNAQALNTLVKQLSSNFGAISSVLNDILSRLDPPEAEVQIDRLITGRLQSLQTYVTQQLIRAAEIRASANLAATKMSECVLGQSKRVDFCGKGYHLMSFPQSAPHGVVFLHVTYVPAQEKNFTTAPAICHDGKAHFPREGVFVSNGTHWFVTQRNFYEPQIITTDNTFVSGNCDVVIGIVNNTVYDPLQPELDSFKEELDKYFKNHTSPDVDLGDISGINASVVNIQKEIDRLNEVAKNLNESLIDLQELGKYEQYIKGSGRENLYFQGGGGSGYIPEAPRDGQAYVRKDGEWVLLSTFLGHHHHHHHH

SEQ ID NO: 1944 - protein, 1281 aa, Artificial Sequence
  Description of Artificial Sequence: Synthetic polypeptide
MGILPSPGMPALLSLVSLLSVLLMGCVAETGTQCVNLTTRTQLPPAYTNSFTRGVYYPDKVFRSSVLHSTQDLFLPFFSNVTWFHAIHVSGTNGTKRFDNPVLPFNDGVYFASTEKSNIIRGWIFGTTLDSKTQSLLIVNNATNVVIKVCEFQFCNDPFLGVYYHKNNKSWMESEFRVYSSANNCTFEYVSQPFLMDLEGKQGNFKNLREFVFKNIDGYFKIYSKHTPINLVRDLPQGFSALEPLVDLPIGINITRFQTLLALHRSYLTPGDSSSGWSAGAAAYYVGYLQPRTFLLKYNENGTITDAVDCALDPLSETKCTLKSFTVEKGIYQTSNFRVQPTESIVRFPNITNLCPFGEVFNATRFASVYAWNRKRISNCVADYSVLYNSASFSTFKCYGVSPTKLNDLCFTNVYADSFVIRGDEVRQIAPGQTGKIADYNYKLPDDFTGCVIAWNSNNLDSKVGGNYNYLYRLFRKSNLKPFERDISTEIYQAGSTPCNGVEGFNCYFPLQSYGFQPTNGVGYQPYRVVVLSFELLHAPATVCGPKKSTNLVKNKCVNFNFNGLTGTGVLTESNKKFLPFQQFGRDIADTTDAVRDPQTLEILDITPCSFGGVSVITPGTNTSNQVAVLYQDVNCTEVPVAIHADQLTPTWRVYSTGSNVFQTRAGCLIGAEHVNNSYECDIPIGAGICASYQTQTNSPSGAGSVASQSIIAYTMSLGAENSVAYSNNSIAIPTNFTISVTTEILPVSMTKTSVDCTMYICGDSTECSNLLLQYGSFCTQLNRALTGIAVEQDKNTQEVFAQVKQIYKTPPIKDFGGFNFSQILPDPSKPSKRSFIEDLLFNKVTLADAGFIKQYGDCLGDIAARDLICAQKFNGLTVLPPLLTDEMIAQYTSALLAGTITSGWTFGAGAALQIPFAMQMAYRFNGIGVTQNVLYENQKLIANQFNSAIGKIQDSLSSTASALGKLQDVVNQNAQALNTLVKQLSSNFGAISSVLNDILSRLDPPEAEVQIDRLITGRLQSLQTYVTQQLIRAAEIRASANLAATKMSECVLGQSKRVDFCGKGYHLMSFPQSAPHGVVFLHVTYVPAQEKNFTTAPAICHDGKAHFPREGVFVSNGTHWFVTQRNFYEPQIITTDNTFVSGNCDVVIGIVNNTVYDPLQPELDSFKEELDKYFKNHTSPDVDLGDISGINASVVNIQKEIDRLNEVAKNLNESLIDLQELGKYEQYIKGSGRENLYFQGGGGSGYIPEAPRDGQAYVRKDGEWVLLSTFLGHHHHHHHH

SEQ ID NO: 1945 - protein, 1281 aa, Artificial Sequence
  Description of Artificial Sequence: Synthetic polypeptide
MGILPSPGMPALLSLVSLLSVLLMGCVAETGTQCVNLTTRTQLPPAYTNSFTRGVYYPDKVFRSSVLHSTQDLFLPFFSNVTWFHAIHVSGTNGTKRFDNPVLPFNDGVYFASTEKSNIIRGWIFGTTLDSKTQSLLIVNNATNVVIKVCEFQFCNDPFLGVYYHKNNKSWMESEFRVYSSANNCTFEYVSQPFLMDLEGKQGNFKNLREFVFKNIDGYFKIYSKHTPINLVRDLPQGFSALEPLVDLPIGINITHFQTLLALHRSYLTPGDSSSGWTAGAAAYYVGYLQPRTFLLKYNENGTITDAVDCALDPLSETKCTLKSFTVEKGIYQTSNFRVQPTESIVRFPNITNLCPFGEVFNATRFASVYAWNRKRISNCVADYSVLYNSASFSTFKCYGVSPTKLNDLCFTNVYADSFVIRGDEVRQIAPGQTGKIADYNYKLPDDFTGCVIAWNSNNLDSKVGGNYNYLYRLFRKSNLKPFERDISTEIYQAGSTPCNGVEGFNCYFPLQSYGFQPTNGVGYQPYRVVVLSFELLHAPATVCGPKKSTNLVKNKCVNFNFNGLTGTGVLTESNKKFLPFQQFGRDIADTTDAVRDPQTLEILDITPCSFGGVSVITPGTNTSNQVAVLYQDVNCTEVPVAIHADQLTPTWRVYSTGSNVFQTRAGCLIGAEHVNNSYECDIPIGAGICASYQTQTNSPSGAGSVASQSIIAYTMSLGAENSVAYSNNSIAIPTNFTISVTTEILPVSMTKTSVDCTMYICGDSTECSNLLLQYGSFCTQLNRALTGIAVEQDKNTQEVFAQVKQIYKTPPIKDFGGFNFSQILPDPSKPSKRSFIEDLLFNKVTLADAGFIKQYGDCLGDIAARDLICAQKFNGLTVLPPLLTDEMIAQYTSALLAGTITSGWTFGAGAALQIPFAMQMAYRFNGIGVTQNVLYENQKLIANQFNSAIGKIQDSLSSTASALGKLQDVVNQNAQALNTLVKQLSSNFGAISSVLNDILSRLDPPEAEVQIDRLITGRLQSLQTYVTQQLIRAAEIRASANLAATKMSECVLGQSKRVDFCGKGYHLMSFPQSAPHGVVFLHVTYVPAQEKNFTTAPAICHDGKAHFPREGVFVSNGTHWFVTQRNFYEPQIITTDNTFVSGNCDVVIGIVNNTVYDPLQPELDSFKEELDKYFKNHTSPDVDLGDISGINASVVNIQKEIDRLNEVAKNLNESLIDLQELGKYEQYIKGSGRENLYFQGGGGSGYIPEAPRDGQAYVRKDGEWVLLSTFLGHHHHHHHH

SEQ ID NO: 1946 - protein, 1281 aa, Artificial Sequence
  Description of Artificial Sequence: Synthetic polypeptide
MGILPSPGMPALLSLVSLLSVLLMGCVAETGTQCVNLTTRTQLPPAYTNSFTRGVYYPDKVFRSSVLHSTQDLFLPFFSNVTWFHAIHVSGTNGTKRFDNPVLPFNDGVYFASTEKSNIIRGWIFGTTLDSKTQSLLIVNNATNVVIKVCEFQFCNDPFLGVYYHKNNKSWMESEFRVYSSANNCTFEYVSQPFLMDLEGKQGNFKNLREFVFKNIDGYFKIYSKHTPINLVRDLPQGFSALEPLVDLPIGINITRFQTLLALHRSYLTPGDSSSGWTAGAAAYYVGYLQPRTFLLKYNENGTITDAVDCALDPLSETKCTLKSFTVEKGIYQTSNFRVQPTESIVRFPNITNLCPFGEVFNATRFASVYAWNRKRISNCVADYSVLYNSASFSTFKCYGVSPTKLNDLCFTNVYADSFVIRGDEVRQIAPGQTGKIADYNYKLPDDFTGCVIAWNSNNLDSKVGGNYNYLYRLFRKSNLKPFERDISTEIYQAGSTPCNGVEGFNCYFPLQSYGFQPTNGVGYQPYRVVVLSFELLHAPATVCGPKKSTNLVKNKCVNFNFNGLTGTGVLTESNKKFLPFQQFGRDIADTTDAVRDPQTLEILDITPCSFGGVSVITPGTNTSNQVAVLYQDVNCTEVPVAIHADQLTPTWRVYSTGSNVFQTRAGCLIGAEHVNNSYECDIPIGAGICASYQTQTNSPSGAGSVASQSIIAYTMSLGAENSVAYSNNSIAIPTNFTISVTTEILPVSMTKTSVDCTMYICGDSTECSNLLLQYGSFCTQLNRALTGIAVEQDKNTQEVFAQVKQIYKTPPIKDFGGFNFSQILPDPSKPSKRSFIEDLLFNKVTLADAGFIKQYGDCLGDIAARDLICAQKFNGLTVLPPLLTDEMIAQYTSALLAGTITSGWTFGAGAALQIPFAMQMAYRFNGIGVTQNVLYENQKLIANQFNSAIGKIQESLSSTASALGKLQDVVNQNAQALNTLVKQLSSNFGAISSVLNDILSRLDPPEAEVQIDRLITGRLQSLQTYVTQQLIRAAEIRASANLAATKMSECVLGQSKRVDFCGKGYHLMSFPQSAPHGVVFLHVTYVPAQEKNFTTAPAICHDGKAHFPREGVFVSNGTHWFVTQRNFYEPQIITTDNTFVSGNCDVVIGIVNNTVYDPLQPELDSFKEELDKYFKNHTSPDVDLGDISGINASVVNIQKEIDRLNEVAKNLNESLIDLQELGKYEQYIKGSGRENLYFQGGGGSGYIPEAPRDGQAYVRKDGEWVLLSTFLGHHHHHHHH

SEQ ID NO: 1947 - protein, 1281 aa, Artificial Sequence
  Description of Artificial Sequence: Synthetic polypeptide
MGILPSPGMPALLSLVSLLSVLLMGCVAETGTQCVNLTTRTQLPPAYTNSFTRGVYYPDKVFRSSVLHSTQDLFLPFFSNVTWFHAIHVSGTNGTKRFDNPVLPFNDGVYFASTEKSNIIRGWIFGTTLDSKTQSLLIVNNATNVVIKVCEFQFCNDPFLGVYYHKNNKSWMESEFRVYSSANNCTFEYVSQDFLMDLEGKQGNFKNLREFVFKNIDGYFKIYSKHTPINLVRDLPQGFSALEPLVDLPIGINITRFQTLLALHRSYLTPGDSSSGWTAGAAAYYVGYLQPRTFLLKYNENGTITDAVDCALDPLSETKCTLKSFTVEKGIYQTSNFRVQPTESIVRFPNITNLCPFGEVFNATRFASVYAWNRKRISNCVADYSVLYNSASFSTFKCYGVSPTKLNDLCFTNVYADSFVIRGDEVRQIAPGQTGKIADYNYKLPDDFTGCVIAWNSNNLDSKVGGNYNYLYRLFRKSNLKPFERDISTEIYQAGSTPCNGVEGFNCYFPLQSYGFQPTNGVGYQPYRVVVLSFELLHAPATVCGPKKSTNLVKNKCVNFNFNGLTGTGVLTESNKKFLPFQQFGRDIADTTDAVRDPQTLEILDITPCSFGGVSVITPGTNTSNQVAVLYQDVNCTEVPVAIHADQLTPTWRVYSTGSNVFQTRAGCLIGAEHVNNSYECDIPIGAGICASYQTQTNSPSGAGSVASQSIIAYTMSLGAENSVAYSNNSIAIPTNFTISVTTEILPVSMTKTSVDCTMYICGDSTECSNLLLQYGSFCTQLNRALTGIAVEQDKNTQEVFAQVKQIYKTPPIKDFGGFNFSQILPDPSKPSKRSFIEDLLFNKVTLADAGFIKQYGDCLGDIAARDLICAQKFNGLTVLPPLLTDEMIAQYTSALLAGTITSGWTFGAGAALQIPFAMQMAYRFNGIGVTQNVLYENQKLIANQFNSAIGKIQDSLSSTASALGKLQDVVNQNAQALNTLVKQLSSNFGAISSVLNDILSRLDPPEAEVQIDRLITGRLQSLQTYVTQQLIRAAEIRASANLAATKMSECVLGQSKRVDFCGKGYHLMSFPQSAPHGVVFLHVTYVPAQEKNFTTAPAICHDGKAHFPREGVFVSNGTHWFVTQRNFYEPQIITTDNTFVSGNCDVVIGIVNNTVYDPLQPELDSFKEELDKYFKNHTSPDVDLGDISGINASVVNIQKEIDRLNEVAKNLNESLIDLQELGKYEQYIKGSGRENLYFQGGGGSGYIPEAPRDGQAYVRKDGEWVLLSTFLGHHHHHHHH

SEQ ID NO: 1948 - protein, 1281 aa, Artificial Sequence
  Description of Artificial Sequence: Synthetic polypeptide
MGILPSPGMPALLSLVSLLSVLLMGCVAETGTQCVNLTTRTQLPPAYTNSFTRGVYYPDKVFRSSVLHSTQDLFLPFFSNVTWFHAIHVSGTNGTKRFDNPVLPFNDGVYFASTEKSNIIRGWIFGTTLDSKTQSLLIVNNATNVVIKVCEFQFCNDPFLGVYYHKNNKSWMESEFRVYSSANNCTFEYVSQPFLMDLEGKQGNFKNLREFVFKNIDGYFKIYSKHTPINLVRDLPQGFSVLEPLVDLPIGINITRFQTLLALHRSYLTPGDSSSGWTAGAAAYYVGYLQPRTFLLKYNENGTITDAVDCALDPLSETKCTLKSFTVEKGIYQTSNFRVQPTESIVRFPNITNLCPFGEVFNATRFASVYAWNRKRISNCVADYSVLYNSASFSTFKCYGVSPTKLNDLCFTNVYADSFVIRGDEVRQIAPGQTGKIADYNYKLPDDFTGCVIAWNSNNLDSKVGGNYNYLYRLFRKSNLKPFERDISTEIYQAGSTPCNGVEGFNCYFPLQSYGFQPTNGVGYQPYRVVVLSFELLHAPATVCGPKKSTNLVKNKCVNFNFNGLTGTGVLTESNKKFLPFQQFGRDIADTTDAVRDPQTLEILDITPCSFGGVSVITPGTNTSNQVAVLYQDVNCTEVPVAIHADQLTPTWRVYSTGSNVFQTRAGCLIGAEHVNNSYECDIPIGAGICASYQTQTNSPSGAGSVASQSIIAYTMSLGAENSVAYSNNSIAIPTNFTISVTTEILPVSMTKTSVDCTMYICGDSTECSNLLLQYGSFCTQLNRALTGIAVEQDKNTQEVFAQVKQIYKTPPIKDFGGFNFSQILPDPSKPSKRSFIEDLLFNKVTLADAGFIKQYGDCLGDIAARDLICAQKFNGLTVLPPLLTDEMIAQYTSALLAGTITSGWTFGAGAALQIPFAMQMAYRFNGIGVTQNVLYENQKLIANQFNSAIGKIQDSLSSTASALGKLQDVVNQNAQALNTLVKQLSSNFGAISSVLNDILSRLDPPEAEVQIDRLITGRLQSLQTYVTQQLIRAAEIRASANLAATKMSECVLGQSKRVDFCGKGYHLMSFPQSAPHGVVFLHVTYVPAQEKNFTTAPAICHDGKAHFPREGVFVSNGTHWFVTQRNFYEPQIITTDNTFVSGNCDVVIGIVNNTVYDPLQPELDSFKEELDKYFKNHTSPDVDLGDISGINASVVNIQKEIDRLNEVAKNLNESLIDLQELGKYEQYIKGSGRENLYFQGGGGSGYIPEAPRDGQAYVRKDGEWVLLSTFLGHHHHHHHH

SEQ ID NO: 1949 - protein, 1281 aa, Artificial Sequence
  Description of Artificial Sequence: Synthetic polypeptide
MGILPSPGMPALLSLVSLLSVLLMGCVAETGTQCVNLTTRTQLPPAYTNSFTRGVYYPDKVFRSSVLHSTQDLFLPFFSNVTWFHAIHVSGTNGTKRFDNPVLPFNDGVYFASTEKSNIIRGWIFGTTLDSKTQSLLIVNNATNVVIKVCEFQFCNDPFLGVYYHKNNKSWMESEFRVYSSANNCTFEYVSQPFLMDLEGKQGNFKNLREFVFKNIDGYFKIYSKHTPINLVRDLPQGFSALEPLVDLPIGINITRFQTLLALHRSYLTPGDSSSGWTAGAAAYYVGYLQPRTFLLKYNENGTITDAVDCALDPLSETKCTLKSFTVEKGIYQTSNFRVQPTESIVRFPNITNLCPFGEVFNATRFASVYAWNRKRISNCVADYSVLYNSASFSTFKCYGVSPTKLNDLCFTNVYADSFVIRGDEVRQIAPGQTGKIADYNYKLPDDFTGCVIAWNSNNLDSKVGGNYNYLYRLFRKSNLKPFERDISTEIYQAGSTPCNGVEGFNCYFPLQSYGFQPTNGVGYQPYRVVVLSFELLHAPATVCGPKKSTNLVKNKCVNFNFNGLTGTGVLTESNKKFLPFQQFGRDIADTTDAVRDPQTLEILDITPCSFGGVSVITPGTNTSNQVAVLYQDVNCTEVPVAIHADQLTPTWRVYSTGSNVFQTRAGCLIGAEHVNNSYECDIPIGAGICASYQTQTNSPSGAGSVASQSIIAYTMSLGAENSVAYSNNSIAIPTNFTISVTTEILPVSMTKTSVDCTMYICGDSTECSNLLLQYGSFCTQLNRALTGIAVEQDKNTQEVFAQVKQIYKTPPIKDFGGFNFSQILPDPSKPSKRSFIEDLLFNKVTLADAGFIKQYGDCLGDIAARDLICAQKFNGLTVLPPLLTDEMIAQYTSALLAGTITSGWTFGAGAALQIPFAMQMAYRFNGIGVTQNVLYENQKLIANQFNSAIGKIQDSLTSTASALGKLQDVVNQNAQALNTLVKQLSSNFGAISSVLNDILSRLDPPEAEVQIDRLITGRLQSLQTYVTQQLIRAAEIRASANLAATKMSECVLGQSKRVDFCGKGYHLMSFPQSAPHGVVFLHVTYVPAQEKNFTTAPAICHDGKAHFPREGVFVSNGTHWFVTQRNFYEPQIITTDNTFVSGNCDVVIGIVNNTVYDPLQPELDSFKEELDKYFKNHTSPDVDLGDISGINASVVNIQKEIDRLNEVAKNLNESLIDLQELGKYEQYIKGSGRENLYFQGGGGSGYIPEAPRDGQAYVRKDGEWVLLSTFLGHHHHHHHH

SEQ ID NO: 1950 - protein, 1281 aa, Artificial Sequence
  Description of Artificial Sequence: Synthetic polypeptide
MGILPSPGMPALLSLVSLLSVLLMGCVAETGTQCVNLTTRTQLPPAYTNSFTRGVYYPDKVFRSSVLHSTQDLFLPFFSNVTWFHAIHVSGTNGTKRFDNPVLPFNDGVYFASTEKSNIIRGWIFGTTLDSKTQSLLIVNNATNVVIKVCEFQFCQDPFLGVYYHKNNKSWMESEFRVYSSANNCTFEYVSQPFLMDLEGKQGNFKNLREFVFKNIDGYFKIYSKHTPINLVRDLPQGFSALEPLVDLPIGINITRFQTLLALHRSYLTPGDSSSGWTAGAAAYYVGYLQPRTFLLKYNENGTITDAVDCALDPLSETKCTLKSFTVEKGIYQTSNFRVQPTESIVRFPNITNLCPFGEVFNATRFASVYAWNRKRISNCVADYSVLYNSASFSTFKCYGVSPTKLNDLCFTNVYADSFVIRGDEVRQIAPGQTGKIADYNYKLPDDFTGCVIAWNSNNLDSKVGGNYNYLYRLFRKSNLKPFERDISTEIYQAGSTPCNGVEGFNCYFPLQSYGFQPTNGVGYQPYRVVVLSFELLHAPATVCGPKKSTNLVKNKCVNFNFNGLTGTGVLTESNKKFLPFQQFGRDIADTTDAVRDPQTLEILDITPCSFGGVSVITPGTNTSNQVAVLYQDVNCTEVPVAIHADQLTPTWRVYSTGSNVFQTRAGCLIGAEHVNNSYECDIPIGAGICASYQTQTNSPSGAGSVASQSIIAYTMSLGAENSVAYSNNSIAIPTNFTISVTTEILPVSMTKTSVDCTMYICGDSTECSNLLLQYGSFCTQLNRALTGIAVEQDKNTQEVFAQVKQIYKTPPIKDFGGFNFSQILPDPSKPSKRSFIEDLLFNKVTLADAGFIKQYGDCLGDIAARDLICAQKFNGLTVLPPLLTDEMIAQYTSALLAGTITSGWTFGAGAALQIPFAMQMAYRFNGIGVTQNVLYENQKLIANQFNSAIGKIQDSLSSTASALGKLQDVVNQNAQALNTLVKQLSSNFGAISSVLNDILSRLDPPEAEVQIDRLITGRLQSLQTYVTQQLIRAAEIRASANLAATKMSECVLGQSKRVDFCGKGYHLMSFPQSAPHGVVFLHVTYVPAQEKNFTTAPAICHDGKAHFPREGVFVSNGTHWFVTQRNFYEPQIITTDNTFVSGNCDVVIGIVNNTVYDPLQPELDSFKEELDKYFKNHTSPDVDLGDISGINASVVNIQKEIDRLNEVAKNLNESLIDLQELGKYEQYIKGSGRENLYFQGGGGSGYIPEAPRDGQAYVRKDGEWVLLSTFLGHHHHHHHH

SEQ ID NO: 1951 - protein, 1281 aa, Artificial Sequence
  Description of Artificial Sequence: Synthetic polypeptide
MGILPSPGMPALLSLVSLLSVLLMGCVAETGTQCVNLTTRTQLPPAYTNSFTRGVYYPDKVFRSSVLHSTQDLFLPFFSNVTWFHAIHVSGTNGTKRFDNPVLPFNDGVYFASTEKSNIIRGWIFGTTLDSKTQSLLIVNNATNVVIKVCEFQFCNDPFLGVYYHKNNKSWMESEFRVYSSANNCTFEYVSQPFLMDLEGKQGNFKNLREFVFKNIDGYFKIYSKHTPINLVRDLPQGFSALEPLVDLPIGINITRFQTLLALHRSYLTPGDSSSGWTAGAAAYYVGYLQPRTFLLKYNENGTITDAVDCALDPLSETKCTLKSFTVEKGIYQTSNFRVQPTESIVRFPNITNLCPFGEVFNATRFASVYAWNRKRISNCVADYSVLYNSASFSTFKCYGVSPTKLNDLCFTNVYADSFVIRGDEVRQIAPGQTGKIADYNYKLPDDFTGCVIAWNSNNLDSKVGGNYNYLYRLFRKSNLKPFERDISTEIYQAGSTPCNGVEGFNCYFPLQSYGFQPTNGVGYQPYRVVVLSFELLHAPATVCGPKKSTNLVKNKCVNFNFNGLTGTGVLTESNKKFLPFQQFGRDIADQTDAVRDPQTLEILDITPCSFGGVSVITPGTNTSNQVAVLYQDVNCTEVPVAIHADQLTPTWRVYSTGSNVFQTRAGCLIGAEHVNNSYECDIPIGAGICASYQTQTNSPSGAGSVASQSIIAYTMSLGAENSVAYSNNSIAIPTNFTISVTTEILPVSMTKTSVDCTMYICGDSTECSNLLLQYGSFCTQLNRALTGIAVEQDKNTQEVFAQVKQIYKTPPIKDFGGFNFSQILPDPSKPSKRSFIEDLLFNKVTLADAGFIKQYGDCLGDIAARDLICAQKFNGLTVLPPLLTDEMIAQYTSALLAGTITSGWTFGAGAALQIPFAMQMAYRFNGIGVTQNVLYENQKLIANQFNSAIGKIQDSLSSTASALGKLQDVVNQNAQALNTLVKQLSSNFGAISSVLNDILSRLDPPEAEVQIDRLITGRLQSLQTYVTQQLIRAAEIRASANLAATKMSECVLGQSKRVDFCGKGYHLMSFPQSAPHGVVFLHVTYVPAQEKNFTTAPAICHDGKAHFPREGVFVSNGTHWFVTQRNFYEPQIITTDNTFVSGNCDVVIGIVNNTVYDPLQPELDSFKEELDKYFKNHTSPDVDLGDISGINASVVNIQKEIDRLNEVAKNLNESLIDLQELGKYEQYIKGSGRENLYFQGGGGSGYIPEAPRDGQAYVRKDGEWVLLSTFLGHHHHHHHH

SEQ ID NO: 1952 - protein, 1281 aa, Artificial Sequence
  Description of Artificial Sequence: Synthetic polypeptide
MGILPSPGMPALLSLVSLLSVLLMGCVAETGTQCVNLTTRTQLPPAYTNSFTRGVYYPDKVFRSSVLHSTQDLFLPFFSNVTWFHAIHVSGTNGTKRFDNPVLPFNDGVYFASTEKSNIIRGWIFGTTLDSKTQSLLIVNNATNVVIKVCEFQFCNDPFLGVYYHKNNKSWMESEFRVYSSANNCTFEYVSQPFLMDLEGKQGNFKNLREFVFKNIDGYFKIYSKHTPINLVRDLPQGFSALEPLVDLPIGINITRFQTLLALHRSYLTPGDSSSGWTAGAAAYYVGYLQPRTFLLKYNENGTITDAVDCALDPLSETKCTLKSFTVEKGIYQTSNFRVQPTESIVRFPNITNLCPFGEVFNATRFASVYAWNRKRISNCVADYSVLYNSASFSTFKCYGVSPTKLNDLCFTNVYADSFVIRGDEVRQIAPGQTGKIADYNYKLPDDFTGCVIAWNSNNLDSKVGGNYNYLYRLFRKSNLKPFERDISTEIYQAGSTPCNGVEGFNCYFPLQSYGFQPTNGVGYQPYRVVVLSFELLHAPATVCGPKKSTNLVKNKCVNFNFNGLTGTGVLTESNKKFLPFQQFGRDIADTTDAVRDPQTLEILDITPCSFGGVSVITPGTNTSNQVAVLYQDVNCTEVPVAIHADQLTPTWRVYSTGSNVFQTRAGCLIGAEHVNNSYECDIPIGAGICASYQTQTNSPSGAGSVASQSIIAYTMSLGAENSVAYSNNSIAIPTNFTISVTTEILPVSMTKTSVDCTMYICGDSTECSNLLLQYGSFCTQLNRALTGIAVEQDKNTQEVFAQVKQIYKTPPIKDFGGFNFSQILPDPSKPSKRSFIEDLLFNKVTLADAGFIKQYGDCLGDIAARDLICAQKFNGLTVLPPLLTDEMIAQYTSALLAGTITSGWTFGAGAALQIPFAMQMAYRFNGIGVTQNVLYENQKMIANQFNSAIGKIQDSLSSTASALGKLQDVVNQNAQALNTLVKQLSSNFGAISSVLNDILSRLDPPEAEVQIDRLITGRLQSLQTYVTQQLIRAAEIRASANLAATKMSECVLGQSKRVDFCGKGYHLMSFPQSAPHGVVFLHVTYVPAQEKNFTTAPAICHDGKAHFPREGVFVSNGTHWFVTQRNFYEPQIITTDNTFVSGNCDVVIGIVNNTVYDPLQPELDSFKEELDKYFKNHTSPDVDLGDISGINASVVNIQKEIDRLNEVAKNLNESLIDLQELGKYEQYIKGSGRENLYFQGGGGSGYIPEAPRDGQAYVRKDGEWVLLSTFLGHHHHHHHH

SEQ ID NO: 1953 - protein, 1281 aa, Artificial Sequence
  Description of Artificial Sequence: Synthetic polypeptide
MGILPSPGMPALLSLVSLLSVLLMGCVAETGTQCVNLTTRTQLPPAYTNSFTRGVYYPDKVFRSDVLHSTQDLFLPFFSNVTWFHAIHVSGTNGTKRFDNPVLPFNDGVYFASTEKSNIIRGWIFGTTLDSKTQSLLIVNNATNVVIKVCEFQFCNDPFLGVYYHKNNKSWMESEFRVYSSANNCTFEYVSQPFLMDLEGKQGNFKNLREFVFKNIDGYFKIYSKHTPINLVRDLPQGFSALEPLVDLPIGINITRFQTLLALHRSYLTPGDSSSGWTAGAAAYYVGYLQPRTFLLKYNENGTITDAVDCALDPLSETKCTLKSFTVEKGIYQTSNFRVQPTESIVRFPNITNLCPFGEVFNATRFASVYAWNRKRISNCVADYSVLYNSASFSTFKCYGVSPTKLNDLCFTNVYADSFVIRGDEVRQIAPGQTGKIADYNYKLPDDFTGCVIAWNSNNLDSKVGGNYNYLYRLFRKSNLKPFERDISTEIYQAGSTPCNGVEGFNCYFPLQSYGFQPTNGVGYQPYRVVVLSFELLHAPATVCGPKKSTNLVKNKCVNFNFNGLTGTGVLTESNKKFLPFQQFGRDIADTTDAVRDPQTLEILDITPCSFGGVSVITPGTNTSNQVAVLYQDVNCTEVPVAIHADQLTPTWRVYSTGSNVFQTRAGCLIGAEHVNNSYECDIPIGAGICASYQTQTNSPSGAGSVASQSIIAYTMSLGAENSVAYSNNSIAIPTNFTISVTTEILPVSMTKTSVDCTMYICGDSTECSNLLLQYGSFCTQLNRALTGIAVEQDKNTQEVFAQVKQIYKTPPIKDFGGFNFSQILPDPSKPSKRSFIEDLLFNKVTLADAGFIKQYGDCLGDIAARDLICAQKFNGLTVLPPLLTDEMIAQYTSALLAGTITSGWTFGAGAALQIPFAMQMAYRFNGIGVTQNVLYENQKLIANQFNSAIGKIQDSLSSTASALGKLQDVVNQNAQALNTLVKQLSSNFGAISSVLNDILSRLDPPEAEVQIDRLITGRLQSLQTYVTQQLIRAAEIRASANLAATKMSECVLGQSKRVDFCGKGYHLMSFPQSAPHGVVFLHVTYVPAQEKNFTTAPAICHDGKAHFPREGVFVSNGTHWFVTQRNFYEPQIITTDNTFVSGNCDVVIGIVNNTVYDPLQPELDSFKEELDKYFKNHTSPDVDLGDISGINASVVNIQKEIDRLNEVAKNLNESLIDLQELGKYEQYIKGSGRENLYFQGGGGSGYIPEAPRDGQAYVRKDGEWVLLSTFLGHHHHHHHH

SEQ ID NO: 1954 - protein, 1281 aa, Artificial Sequence
  Description of Artificial Sequence: Synthetic polypeptide
MGILPSPGMPALLSLVSLLSVLLMGCVAETGTQCVNLTTRTQLPPAYTNSFTRGVYYPDKVFRSSVLHGTQDLFLPFFSNVTWFHAIHVSGTNGTKRFDNPVLPFNDGVYFASTEKSNIIRGWIFGTTLDSKTQSLLIVNNATNVVIKVCEFQFCNDPFLGVYYHKNNKSWMESEFRVYSSANNCTFEYVSQPFLMDLEGKQGNFKNLREFVFKNIDGYFKIYSKHTPINLVRDLPQGFSALEPLVDLPIGINITRFQTLLALHRSYLTPGDSSSGWTAGAAAYYVGYLQPRTFLLKYNENGTITDAVDCALDPLSETKCTLKSFTVEKGIYQTSNFRVQPTESIVRFPNITNLCPFGEVFNATRFASVYAWNRKRISNCVADYSVLYNSASFSTFKCYGVSPTKLNDLCFTNVYADSFVIRGDEVRQIAPGQTGKIADYNYKLPDDFTGCVIAWNSNNLDSKVGGNYNYLYRLFRKSNLKPFERDISTEIYQAGSTPCNGVEGFNCYFPLQSYGFQPTNGVGYQPYRVVVLSFELLHAPATVCGPKKSTNLVKNKCVNFNFNGLTGTGVLTESNKKFLPFQQFGRDIADTTDAVRDPQTLEILDITPCSFGGVSVITPGTNTSNQVAVLYQDVNCTEVPVAIHADQLTPTWRVYSTGSNVFQTRAGCLIGAEHVNNSYECDIPIGAGICASYQTQTNSPSGAGSVASQSIIAYTMSLGAENSVAYSNNSIAIPTNFTISVTTEILPVSMTKTSVDCTMYICGDSTECSNLLLQYGSFCTQLNRALTGIAVEQDKNTQEVFAQVKQIYKTPPIKDFGGFNFSQILPDPSKPSKRSFIEDLLFNKVTLADAGFIKQYGDCLGDIAARDLICAQKFNGLTVLPPLLTDEMIAQYTSALLAGTITSGWTFGAGAALQIPFAMQMAYRFNGIGVTQNVLYENQKLIANQFNSAIGKIQDSLSSTASALGKLQDVVNQNAQALNTLVKQLSSNFGAISSVLNDILSRLDPPEAEVQIDRLITGRLQSLQTYVTQQLIRAAEIRASANLAATKMSECVLGQSKRVDFCGKGYHLMSFPQSAPHGVVFLHVTYVPAQEKNFTTAPAICHDGKAHFPREGVFVSNGTHWFVTQRNFYEPQIITTDNTFVSGNCDVVIGIVNNTVYDPLQPELDSFKEELDKYFKNHTSPDVDLGDISGINASVVNIQKEIDRLNEVAKNLNESLIDLQELGKYEQYIKGSGRENLYFQGGGGSGYIPEAPRDGQAYVRKDGEWVLLSTFLGHHHHHHHH

SEQ ID NO: 1955 - protein, 1281 aa, Artificial Sequence
  Description of Artificial Sequence: Synthetic polypeptide
MGILPSPGMPALLSLVSLLSVLLMGCVAETGTQCVNLTTRTQLPPAYTNSFTRGVYYPDKVFRSSVLHSTQDLFLPFFSNVTWFHAIHVSGTNGTKRFDNPVLPFNDGVYFASTEKSNIIRGWIFGTTLDSKTQSLLIVNNATNVVIKVCEFQFCNDPFLGVYYHKNNKSWMESEFRVYSSANNCTFEYVSQPFLMDLEGKQGNFKNLREFVFKNIDGYFKIYSKHTPINLVRDLPQGFSALEPLVDLPIGINITRFQTLLALHRSYLTPGDSSSGWTAGAAAYYVGYLQPRTFLLKYNENGTITDAVDCALDPLSETKCTLKSFTVEKGIYQTSNFRVQPTESIVRFPNITNLCPFGEVFNATRFASVYAWNRKRISNCVADYSVLYNSASFSTFKCYGVSPTKLNDLCFTNVYADSFVIRGDEVRQIAPGQTGKIADYNYKLPDDFTGCVIAWNSNNLDSKVGGNYNYLYRLFRKSNLKPFERDISTEIYQAGSTPCNGVEGFNCYFPLQSYGFQPTNGVGYQPYRVVVLSFELLHAPATVCGPKKSTNLVKNKCVNFNFNGLTGTGVLTESNKKFLPFQQFGRDIADTTDAVRDPQTLEILDITPCSFGGVSVITPGTNTSNQVAVLYQDVNCTEVPVAIHADQLTPTWRVYSTGSNVFQTRAGCLIGAEHVNNSYECDIPIGAGICASYQTQTNSPSGAGSVASQSIIAYTMSLGAENSVAYSNNSIAIPTNFTISVTTEILPVSMTKTSVDCTMYICGDSTECSNLLLQYGSFCTQLNRALTGIAVEQDKNTQEVFAQVKQIYKTPPIKDFGGFNFSQILPDPSKPSKRSFIEDLLFNKVTLADAGFIKQYGDCLGDIAARDLICAQKFNGLTVLPPLLTDEMIAQYTSALLAGTITSGWTFGAGAALQIPFAMQMAYRFNGIGVTQNVLYENQKLIANQFNSAIGKIQDSLSSTASALGKLQDVVEQNAQALNTLVKQLSSNFGAISSVLNDILSRLDPPEAEVQIDRLITGRLQSLQTYVTQQLIRAAEIRASANLAATKMSECVLGQSKRVDFCGKGYHLMSFPQSAPHGVVFLHVTYVPAQEKNFTTAPAICHDGKAHFPREGVFVSNGTHWFVTQRNFYEPQIITTDNTFVSGNCDVVIGIVNNTVYDPLQPELDSFKEELDKYFKNHTSPDVDLGDISGINASVVNIQKEIDRLNEVAKNLNESLIDLQELGKYEQYIKGSGRENLYFQGGGGSGYIPEAPRDGQAYVRKDGEWVLLSTFLGHHHHHHHH

SEQ ID NO: 1956 - protein, 1281 aa, Artificial Sequence
  Description of Artificial Sequence: Synthetic polypeptide
MGILPSPGMPALLSLVSLLSVLLMGCVAETGTQCVNLTTRTQLPPAYTNSFTRGVYYPDKVFRSSVLHSTQDLFLPFFSNVTWFHAIHVSGTNGTKRFDNPVLPFNDGVYFASTEKSNIIRGWIFGTTLDSKTQSLLIVNNATNVVIKVCEFQFCNDPFLGVYYHKNNKSWMESEFRVYSSANNCTFEYVSQPFLMDLEGKQGNFKNLREFVFKNIDGYFKIYSKHTPINLVRDLPQGFSALEPLVDLPIGINITRFQTLLALHRSYLTPGDSSSGWTAGAAAYYVGYLQPRTFLLKYNENGYITDAVDCALDPLSETKCTLKSFTVEKGIYQTSNFRVQPTESIVRFPNITNLCPFGEVFNATRFASVYAWNRKRISNCVADYSVLYNSASFSTFKCYGVSPTKLNDLCFTNVYADSFVIRGDEVRQIAPGQTGKIADYNYKLPDDFTGCVIAWNSNNLDSKVGGNYNYLYRLFRKSNLKPFERDISTEIYQAGSTPCNGVEGFNCYFPLQSYGFQPTNGVGYQPYRVVVLSFELLHAPATVCGPKKSTNLVKNKCVNFNFNGLTGTGVLTESNKKFLPFQQFGRDIADTTDAVRDPQTLEILDITPCSFGGVSVITPGTNTSNQVAVLYQDVNCTEVPVAIHADQLTPTWRVYSTGSNVFQTRAGCLIGAEHVNNSYECDIPIGAGICASYQTQTNSPSGAGSVASQSIIAYTMSLGAENSVAYSNNSIAIPTNFTISVTTEILPVSMTKTSVDCTMYICGDSTECSNLLLQYGSFCTQLNRALTGIAVEQDKNTQEVFAQVKQIYKTPPIKDFGGFNFSQILPDPSKPSKRSFIEDLLFNKVTLADAGFIKQYGDCLGDIAARDLICAQKFNGLTVLPPLLTDEMIAQYTSALLAGTITSGWTFGAGAALQIPFAMQMAYRFNGIGVTQNVLYENQKLIANQFNSAIGKIQDSLSSTASALGKLQDVVNQNAQALNTLVKQLSSNFGAISSVLNDILSRLDPPEAEVQIDRLITGRLQSLQTYVTQQLIRAAEIRASANLAATKMSECVLGQSKRVDFCGKGYHLMSFPQSAPHGVVFLHVTYVPAQEKNFTTAPAICHDGKAHFPREGVFVSNGTHWFVTQRNFYEPQIITTDNTFVSGNCDVVIGIVNNTVYDPLQPELDSFKEELDKYFKNHTSPDVDLGDISGINASVVNIQKEIDRLNEVAKNLNESLIDLQELGKYEQYIKGSGRENLYFQGGGGSGYIPEAPRDGQAYVRKDGEWVLLSTFLGHHHHHHHH

SEQ ID NO: 1957 - protein, 1281 aa, Artificial Sequence
  Description of Artificial Sequence: Synthetic polypeptide
MGILPSPGMPALLSLVSLLSVLLMGCVAETGTQCVNLTTRTQLPPAYTNSFTRGVYYPDKVFRSNVLHSTQDLFLPFFSNVTWFHAIHVSGTNGTKRFDNPVLPFNDGVYFASTEKSNIIRGWIFGTTLDSKTQSLLIVNNATNVVIKVCEFQFCNDPFLGVYYHKNNKSWMESEFRVYSSANNCTFEYVSQPFLMDLEGKQGNFKNLREFVFKNIDGYFKIYSKHTPINLVRDLPQGFSALEPLVDLPIGINITRFQTLLALHRSYLTPGDSSSGWTAGAAAYYVGYLQPRTFLLKYNENGTITDAVDCALDPLSETKCTLKSFTVEKGIYQTSNFRVQPTESIVRFPNITNLCPFGEVFNATRFASVYAWNRKRISNCVADYSVLYNSASFSTFKCYGVSPTKLNDLCFTNVYADSFVIRGDEVRQIAPGQTGKIADYNYKLPDDFTGCVIAWNSNNLDSKVGGNYNYLYRLFRKSNLKPFERDISTEIYQAGSTPCNGVEGFNCYFPLQSYGFQPTNGVGYQPYRVVVLSFELLHAPATVCGPKKSTNLVKNKCVNFNFNGLTGTGVLTESNKKFLPFQQFGRDIADTTDAVRDPQTLEILDITPCSFGGVSVITPGTNTSNQVAVLYQDVNCTEVPVAIHADQLTPTWRVYSTGSNVFQTRAGCLIGAEHVNNSYECDIPIGAGICASYQTQTNSPSGAGSVASQSIIAYTMSLGAENSVAYSNNSIAIPTNFTISVTTEILPVSMTKTSVDCTMYICGDSTECSNLLLQYGSFCTQLNRALTGIAVEQDKNTQEVFAQVKQIYKTPPIKDFGGFNFSQILPDPSKPSKRSFIEDLLFNKVTLADAGFIKQYGDCLGDIAARDLICAQKFNGLTVLPPLLTDEMIAQYTSALLAGTITSGWTFGAGAALQIPFAMQMAYRFNGIGVTQNVLYENQKLIANQFNSAIGKIQDSLSSTASALGKLQDVVNQNAQALNTLVKQLSSNFGAISSVLNDILSRLDPPEAEVQIDRLITGRLQSLQTYVTQQLIRAAEIRASANLAATKMSECVLGQSKRVDFCGKGYHLMSFPQSAPHGVVFLHVTYVPAQEKNFTTAPAICHDGKAHFPREGVFVSNGTHWFVTQRNFYEPQIITTDNTFVSGNCDVVIGIVNNTVYDPLQPELDSFKEELDKYFKNHTSPDVDLGDISGINASVVNIQKEIDRLNEVAKNLNESLIDLQELGKYEQYIKGSGRENLYFQGGGGSGYIPEAPRDGQAYVRKDGEWVLLSTFLGHHHHHHHH

SEQ ID NO: 1958 - protein, 1281 aa, Artificial Sequence
  Description of Artificial Sequence: Synthetic polypeptide
MGILPSPGMPALLSLVSLLSVLLMGCVAETGTQCVNLTTRTQLPPAYTNSFTRGVYYPDKVFRSSVLHSTQDLFLPFFSNVTWFHAIHVSGTNGTKRFDNPVLPFNDGVYFASTEKSNIIRGWIFGTTLDSKTQSLLIVNNATNVVIKVCEFQFCNDPFLGVYYHKNNKSWMESEFRVYSSANNCTFEYVSQPFLMDLEGKQGNFKNLREFVFKNIDGYFKIYSKHTPINLVRDLPQGFSALEPLVDLPIGINITRFQTLLALHRSYLTPGDSSSGWTAGAAAYYVGYLQPRTFLLKYNENGTITDAVDCALDPLSETKCTLKSFTVEKGIYQTSNFRVQPTESIVRFPNITNLCPFGEVFNATRFASVYAWNRKRISNCVADYSVLYNSASFSTFKCYGVSPTKLNDLCFTNVYADSFVIRGDEVRQIAPGQTGKIADYNYKLPDDFTGCVIAWNSNNLDSKVGGNYNYLYRLFRKSNLKPFERDISTEIYQAGSTPCNGVEGFNCYFPLQSYGFQPTNGVGYQPYRVVVLSFELLHAPATVCGPKKSTNLVKNKCVNFNFNGLTGTGVLTDSNKKFLPFQQFGRDISDTTDAVRDPQTLEILDITPCSFGGVSVITPGTNTSNQVAVLYQDVNCTEVPVAIHADQLTPTWRVYSTGSNVFQTQAGCLIGAEHVNNSYECDIPIGAGICASYQTQTNSPSGAGSVASQSIIAYTMSLGAENSVAYSNNSIAIPTNFTISVTTEILPVSMTKTSVDCTMYICGDSTECSNLLLQYGSFCTQLNRALTGIAVEQDKNTQEVFAQVKQIYKTPPIKDFGGFNFSQILPDPSKPSKRSFIEDLLFNKVTLADAGFIKQYGDCLGDIAARDLICAQKFNGLTVLPPLLTDEMIAQYTSALLAGTITSGWTFGAGAALQIPFAMQMAYRFNGIGVTQNVLYENQKLIANQFNSAIGKIQDSLSSTASALGKLQDVVNQNAQALNTLVKQLSSNFGAISSVLNDILSRLDPPEAEVQIDRLITGRLQSLQTYVTQQLIRAAEIRASANLAATKMSECVLGQSKRVDFCGKGYHLMSFPQSAPHGVVFLHVTYVPAQEKNFTTAPAICHDGKAHFPREGVFVSNGTHWFVTQRNFYEPQIITTDNTFVSGNCDVVIGIVNNTVYDPLQPELDSFKEELDKYFKNHTSPDVDLGDISGINASVVNIQKEIDRLNEVAKNLNESLIDLQELGKYEQYIKGSGRENLYFQGGGGSGYIPEAPRDGQAYVRKDGEWVLLSTFLGHHHHHHHH

SEQ ID NO: 1959 - protein, 1281 aa, Artificial Sequence
  Description of Artificial Sequence: Synthetic polypeptide
MGILPSPGMPALLSLVSLLSVLLMGCVAETGTQCVNLTTRTQLPPAYTNSFTRGVYYPDKVFRSSVLHSTQDLFLPFFSNVTWFHAIHVSGTNGTKRFDNPVLPFNDGVYFASTEKSNIIRGWIFGTTLDSKTQSLLIVNNATNVVIKVCEFQFCNDPFLGVYYHKNNKSWMESEFRVYSSANNCTFEYVSQPFLMDLEGKQGNFKNLREFVFKNIDGYFKIYSKHTPINLVRDLPQGFSALEPLVDLPIGINITRFQTLLALHRSYLTPGDSSSGWTAGAAAYYVGYLQPRTFLLKYNENGTITDAVDCALDPLSETKCTLKSFTVEKGIYQTSNFRVQPTESIVRFPNITNLCPFGEVFNATRFASVYAWNRKRISNCVADYSVLYNSASFSTFKCYGVSPTKLNDLCFTNVYADSFVIRGDEVRQIAPGQTGKIADYNYKLPDDFTGCVIAWNSNNLDSKVGGNYNYLYRLFRKSNLKPFERDISTEIYQAGSTPCNGVEGFNCYFPLQSYGFQPTNGVGYQPYRVVVLSFELLHAPATVCGPKKSTNLVKNVCVNFNFNGLTGTGVLTESNKKFLPFQQFGRDIADTTDAVRDPQTLEILDITPCSFGGVSVITPGTNTSNQVAVLYQDVNCTEVPVAIHADQLTPTWRVYSTGSNVFQTRAGCLIGAEHVNNSYECDIPIGAGICASYQTQTNSPSGAGSVASQSIIAYTMSLGAENSVAYSNNSIAIPTNFTISVTTEILPVSMTKTSVDCTMYICGDSTECSNLLLQYGSFCTQLNRALTGIAVEQDKNTQEVFAQVKQIYKTPPIKDFGGFNFSQILPDPSKPSKRSFIEDLLFNKVTLADAGFIKQYGDCLGDIAARDLICAQKFNGLTVLPPLLTDEMIAQYTSALLAGTITSGWTFGAGAALQIPFAMQMAYRFNGIGVTQNVLYENQKLIANQFNSAIGKIQDSLSSTASALGKLQDVVNQNAQALNTLVKQLSSNFGAISSVLNDILSRLDPPEAEVQIDRLITGRLQSLQTYVTQQLIRAAEIRASANLAATKMSECVLGQSKRVDFCGKGYHLMSFPQSAPHGVVFLHVTYVPAQEKNFTTAPAICHDGKAHFPREGVFVSNGTHWFVTQRNFYEPQIITTDNTFVSGNCDVVIGIVNNTVYDPLQPELDSFKEELDKYFKNHTSPDVDLGDISGINASVVNIQKEIDRLNEVAKNLNESLIDLQELGKYEQYIKGSGRENLYFQGGGGSGYIPEAPRDGQAYVRKDGEWVLLSTFLGHHHHHHHH

SEQ ID NO: 1960 - protein, 1281 aa, Artificial Sequence
  Description of Artificial Sequence: Synthetic polypeptide
MGILPSPGMPALLSLVSLLSVLLMGCVAETGTQCVNLTTRTQLPPAYTNSFTRGVYYPDKVFRSSVLHSTQDLFLPFFSNVTWFHAIHVSGTNGTKRFDNPVLPFNDGVYFASTEKSNIIRGWIFGTTLDSKTQSLLIVNNATNVVIKVCEFQFCNDPFLGVYYHKNNKSWMESEFRVYSSANNCTFEYVSQPFLMDLEGKQGNFKNLREFVFKNIDGYFKIYSKHTPINLVRDLPQGFSALEPLVDLPIGINITRFQTLLALHRSYLTPGDSSSGWTAGAAAYYVGYLQPRTFMLKYNENGTITDAVDCALDPLSETKCTLKSFTVEKGIYQTSNFRVQPTESIVRFPNITNLCPFGEVFNATRFASVYAWNRKRISNCVADYSVLYNSASFSTFKCYGVSPTKLNDLCFTNVYADSFVIRGDEVRQIAPGQTGKIADYNYKLPDDFTGCVIAWNSNNLDSKVGGNYNYLYRLFRKSNLKPFERDISTEIYQAGSTPCNGVEGFNCYFPLQSYGFQPTNGVGYQPYRVVVLSFELLHAPATVCGPKKSTNLVKNKCVNFNFNGLTGTGVLTESNKKFLPFQQFGRDIADTTDAVRDPQTLEILDITPCSFGGVSVITPGTNTSNQVAVLYQDVNCTEVPVAIHADQLTPTWRVYSTGSNVFQTRAGCLIGAEHVNNSYECDIPIGAGICASYQTQTNSPSGAGSVASQSIIAYTMSLGAENSVAYSNNSIAIPTNFTISVTTEILPVSMTKTSVDCTMYICGDSTECSNLLLQYGSFCTQLNRALTGIAVEQDKNTQEVFAQVKQIYKTPPIKDFGGFNFSQILPDPSKPSKRSFIEDLLFNKVTLADAGFIKQYGDCLGDIAARDLICAQKFNGLTVLPPLLTDEMIAQYTSALLAGTITSGWTFGAGAALQIPFAMQMAYRFNGIGVTQNVLYENQKLIANQFNSAIGKIQDSLSSTASALGKLQDVVNQNAQALNTLVKQLSSNFGAISSVLNDILSRLDPPEAEVQIDRLITGRLQSLQTYVTQQLIRAAEIRASANLAATKMSECVLGQSKRVDFCGKGYHLMSFPQSAPHGVVFLHVTYVPAQEKNFTTAPAICHDGKAHFPREGVFVSNGTHWFVTQRNFYEPQIITTDNTFVSGNCDVVIGIVNNTVYDPLQPELDSFKEELDKYFKNHTSPDVDLGDISGINASVVNIQKEIDRLNEVAKNLNESLIDLQELGKYEQYIKGSGRENLYFQGGGGSGYIPEAPRDGQAYVRKDGEWVLLSTFLGHHHHHHHH

SEQ ID NO: 1961 - protein, 1281 aa, Artificial Sequence
  Description of Artificial Sequence: Synthetic polypeptide
MGILPSPGMPALLSLVSLLSVLLMGCVAETGTQCVNLTTRTQLPPAYTNSFTRGVYYPDKVFRSSVLHSTQDLFLPFFSNVTWFHAIHVSGTNGTKRFDNPVLPFNDGVYFASTEKSNIIRGWIFGTTLDSKTQSLLIVNNATNVVIKVCEFQFCNDPFLGVYYHKNNKSWMESEFRVYSSANNCTFEYVSQPFLMDLEGKQGNFKNLREFVFKNIDGYFKIYSKHTPINLVRDLPQGFSALEPLVDLPIGINITRFQTLLALHRSYLTPGDSSSGWTAGAAAYYVGYLQPRTFLLKYNENGTITDAVDCALDPLSETKCTLKSFTVEKGIYQTSNFRVQPTESIVRFPNITNLCPFGEVFNATRFASVYAWNRKRISNCVADYSVLYNSASFSTFKCYGVSPTKLNDLCFTNVYADSFVIRGDEVRQIAPGQTGKIADYNYKLPDDFTGCVIAWNSNNLDSKVGGNYNYLYRLFRKSNLKPFERDISTEIYQAGSTPCNGVEGFNCYFPLQSYGFQPTNGVGYQPYRVVVLSFELLHAPATVCGPKKSTNLVKNKCVNFNFNGLTGTGVLTESNKKFLPFQQFGRDIADTTDAVRDPQTLEILDITPCSFGGVSVITPGTNTSNQVAVLYQDVNCTEVPVAIHADQLTPTWRVYSTGSNVFQTRAGCLIGAEHVNNSYECDIPIGAGICASYQTQTNSPSGAGSVASQSIIAYTMSLGAENSVAYSNNSIAIPTNFTISVTTEILPVSMTKTSVDCTMYICGDSTECSNLLLQYGSFCTQLNRALTGIAVEQDKNTQEVFAQVKQIYKTPPIKDFGGFNFSQILPDPSKPSKRSFIEDLLFNKVTLADAGFIKQYGDCLGDIAARDLICAQKFNGLTVLPPLLTDEMIAQYTSALLAGTITSGWTFGAGAALQIPFAMQMAYRFNGIGVTQNVLYENQKLIANQFNSAIGKIQDSLSSTASALGKLQDVVNQQAQALNTLVKQLSSNFGAISSVLNDILSRLDPPEAEVQIDRLITGRLQSLQTYVTQQLIRAAEIRASANLAATKMSECVLGQSKRVDFCGKGYHLMSFPQSAPHGVVFLHVTYVPAQEKNFTTAPAICHDGKAHFPREGVFVSNGTHWFVTQRNFYEPQIITTDNTFVSGNCDVVIGIVNNTVYDPLQPELDSFKEELDKYFKNHTSPDVDLGDISGINASVVNIQKEIDRLNEVAKNLNESLIDLQELGKYEQYIKGSGRENLYFQGGGGSGYIPEAPRDGQAYVRKDGEWVLLSTFLGHHHHHHHH

SEQ ID NO: 1962 - protein, 1281 aa, Artificial Sequence
  Description of Artificial Sequence: Synthetic polypeptide
MGILPSPGMPALLSLVSLLSVLLMGCVAETGTQCVNLTTRTQLPPAYTNSFTRGVYYPDKVFRSSVLHMTQDLFLPFFSNVTWFHAIHVSGTNGTKRFDNPVLPFNDGVYFASTEKSNIIRGWIFGTTLDSKTQSLLIVNNATNVVIKVCEFQFCNDPFLGVYYHKNNKSWMESEFRVYSSANNCTFEYVSQPFLMDLEGKQGNFKNLREFVFKNIDGYFKIYSKHTPINLVRDLPQGFSALEPLVDLPIGINITRFQTLLALHRSYLTPGDSSSGWTAGAAAYYVGYLQPRTFLLKYNENGTITDAVDCALDPLSETKCTLKSFTVEKGIYQTSNFRVQPTESIVRFPNITNLCPFGEVFNATRFASVYAWNRKRISNCVADYSVLYNSASFSTFKCYGVSPTKLNDLCFTNVYADSFVIRGDEVRQIAPGQTGKIADYNYKLPDDFTGCVIAWNSNNLDSKVGGNYNYLYRLFRKSNLKPFERDISTEIYQAGSTPCNGVEGFNCYFPLQSYGFQPTNGVGYQPYRVVVLSFELLHAPATVCGPKKSTNLVKNKCVNFNFNGLTGTGVLTESNKKFLPFQQFGRDIADTTDAVRDPQTLEILDITPCSFGGVSVITPGTNTSNQVAVLYQDVNCTEVPVAIHADQLTPTWRVYSTGSNVFQTRAGCLIGAEHVNNSYECDIPIGAGICASYQTQTNSPSGAGSVASQSIIAYTMSLGAENSVAYSNNSIAIPTNFTISVTTEILPVSMTKTSVDCTMYICGDSTECSNLLLQYGSFCTQLNRALTGIAVEQDKNTQEVFAQVKQIYKTPPIKDFGGFNFSQILPDPSKPSKRSFIEDLLFNKVTLADAGFIKQYGDCLGDIAARDLICAQKFNGLTVLPPLLTDEMIAQYTSALLAGTITSGWTFGAGAALQIPFAMQMAYRFNGIGVTQNVLYENQKLIANQFNSAIGKIQDSLSSTASALGKLQDVVNQNAQALNTLVKQLSSNFGAISSVLNDILSRLDPPEAEVQIDRLITGRLQSLQTYVTQQLIRAAEIRASANLAATKMSECVLGQSKRVDFCGKGYHLMSFPQSAPHGVVFLHVTYVPAQEKNFTTAPAICHDGKAHFPREGVFVSNGTHWFVTQRNFYEPQIITTDNTFVSGNCDVVIGIVNNTVYDPLQPELDSFKEELDKYFKNHTSPDVDLGDISGINASVVNIQKEIDRLNEVAKNLNESLIDLQELGKYEQYIKGSGRENLYFQGGGGSGYIPEAPRDGQAYVRKDGEWVLLSTFLGHHHHHHHH

SEQ ID NO: 1963 - protein, 1281 aa, Artificial Sequence
  Description of Artificial Sequence: Synthetic polypeptide
MGILPSPGMPALLSLVSLLSVLLMGCVAETGTQCVNLTTRTQLPPAYTNSFTRGVYYPDKVFRSSVLHSTQDLFLPFFSNVTWFHAIHVSGTNGTKRFDNPVLPFNDGVYFAATEKSNIIRGWIFGTTLDSKTQSLLIVNNATNVVIKVCEFQFCNDPFLGVYYHKNNKSWMESEFRVYSSANNCTFEYVSQPFLMDLEGKQGNFKNLREFVFKNIDGYFKIYSKHTPINLVRDLPQGFSALEPLVDLPIGINITRFQTLLALHRSYLTPGDSSSGWTAGAAAYYVGYLQPRTFLLKYNENGTITDAVDCALDPLSETKCTLKSFTVEKGIYQTSNFRVQPTESIVRFPNITNLCPFGEVFNATRFASVYAWNRKRISNCVADYSVLYNSASFSTFKCYGVSPTKLNDLCFTNVYADSFVIRGDEVRQIAPGQTGKIADYNYKLPDDFTGCVIAWNSNNLDSKVGGNYNYLYRLFRKSNLKPFERDISTEIYQAGSTPCNGVEGFNCYFPLQSYGFQPTNGVGYQPYRVVVLSFELLHAPATVCGPKKSTNLVKNKCVNFNFNGLTGTGVLTESNKKFLPFQQFGRDIADTTDAVRDPQTLEILDITPCSFGGVSVITPGTNTSNQVAVLYQDVNCTEVPVAIHADQLTPTWRVYSTGSNVFQTRAGCLIGAEHVNNSYECDIPIGAGICASYQTQTNSPSGAGSVASQSIIAYTMSLGAENSVAYSNNSIAIPTNFTISVTTEILPVSMTKTSVDCTMYICGDSTECSNLLLQYGSFCTQLNRALTGIAVEQDKNTQEVFAQVKQIYKTPPIKDFGGFNFSQILPDPSKPSKRSFIEDLLFNKVTLADAGFIKQYGDCLGDIAARDLICAQKFNGLTVLPPLLTDEMIAQYTSALLAGTITSGWTFGAGAALQIPFAMQMAYRFNGIGVTQNVLYENQKLIANQFNSAIGKIQDSLSSTASALGKLQDVVNQNAQALNTLVKQLSSNFGAISSVLNDILSRLDPPEAEVQIDRLITGRLQSLQTYVTQQLIRAAEIRASANLAATKMSECVLGQSKRVDFCGKGYHLMSFPQSAPHGVVFLHVTYVPAQEKNFTTAPAICHDGKAHFPREGVFVSNGTHWFVTQRNFYEPQIITTDNTFVSGNCDVVIGIVNNTVYDPLQPELDSFKEELDKYFKNHTSPDVDLGDISGINASVVNIQKEIDRLNEVAKNLNESLIDLQELGKYEQYIKGSGRENLYFQGGGGSGYIPEAPRDGQAYVRKDGEWVLLSTFLGHHHHHHHH

SEQ ID NO: 1964 - protein, 1281 aa, Artificial Sequence
  Description of Artificial Sequence: Synthetic polypeptide
MGILPSPGMPALLSLVSLLSVLLMGCVAETGTQCVNLTTRTQLPPAYTNSFTRGVYYPDKVFRSSVLHSTQDLFLPFFSNVTWFHAIHVSGTNGTKRFDNPVLPFNDGVYFASTEKSNIIRGWIFGTTLDSKTQSLLIVNNATNVVIKVCEFQFCNDPFLGVYYHKNNKSWMESEFRVYSSANNCTFEYVSQPFLMDLEGKQGNFKNLREFVFKNIDGYFKIYSKHTPINLVRDLPQGFSALEPLVDLPIGINITRFQTLLALHRSYLTPGDSSSGWTASAAAYYVGYLQPRTFLLKYNENGTITDAVDCALDPLSETKCTLKSFTVEKGIYQTSNFRVQPTESIVRFPNITNLCPFGEVFNATRFASVYAWNRKRISNCVADYSVLYNSASFSTFKCYGVSPTKLNDLCFTNVYADSFVIRGDEVRQIAPGQTGKIADYNYKLPDDFTGCVIAWNSNNLDSKVGGNYNYLYRLFRKSNLKPFERDISTEIYQAGSTPCNGVEGFNCYFPLQSYGFQPTNGVGYQPYRVVVLSFELLHAPATVCGPKKSTNLVKNKCVNFNFNGLTGTGVLTESNKKFLPFQQFGRDIADTTDAVRDPQTLEILDITPCSFGGVSVITPGTNTSNQVAVLYQDVNCTEVPVAIHADQLTPTWRVYSTGSNVFQTRAGCLIGAEHVNNSYECDIPIGAGICASYQTQTNSPSGAGSVASQSIIAYTMSLGAENSVAYSNNSIAIPTNFTISVTTEILPVSMTKTSVDCTMYICGDSTECSNLLLQYGSFCTQLNRALTGIAVEQDKNTQEVFAQVKQIYKTPPIKDFGGFNFSQILPDPSKPSKRSFIEDLLFNKVTLADAGFIKQYGDCLGDIAARDLICAQKFNGLTVLPPLLTDEMIAQYTSALLAGTITSGWTFGAGAALQIPFAMQMAYRFNGIGVTQNVLYENQKLIANQFNSAIGKIQDSLSSTASALGKLQDVVNQNAQALNTLVKQLSSNFGAISSVLNDILSRLDPPEAEVQIDRLITGRLQSLQTYVTQQLIRAAEIRASANLAATKMSECVLGQSKRVDFCGKGYHLMSFPQSAPHGVVFLHVTYVPAQEKNFTTAPAICHDGKAHFPREGVFVSNGTHWFVTQRNFYEPQIITTDNTFVSGNCDVVIGIVNNTVYDPLQPELDSFKEELDKYFKNHTSPDVDLGDISGINASVVNIQKEIDRLNEVAKNLNESLIDLQELGKYEQYIKGSGRENLYFQGGGGSGYIPEAPRDGQAYVRKDGEWVLLSTFLGHHHHHHHH

SEQ ID NO: 1965 - protein, 1281 aa, Artificial Sequence
  Description of Artificial Sequence: Synthetic polypeptide
MGILPSPGMPALLSLVSLLSVLLMGCVAETGTQCVNLTTRTQLPPAYTNSFTRGVYYPDKVFRSSVLHSTQDLFLPFFSNVTWFHAIHVSGTNGTKRFDNPVLPFNDGVYFASTEKSNIIRGWIFGTTLDSKTQSLLIVNNATNVVIKVCEFQFCNDPFLGVYYHKNNKSWMESEFRVYSSANNCTFEYVSQPFLMDLEGKQGNFKNLREFVFKNIDGYFKIYSKHTPINLVRDLPQGFSALEPLVDLPIGINITRFQTLLALHRSYLTPGDSSSGWTAGAAAYYVGYLQPRTFLLKYNENGTITDAVDCALDPLSETKCTLKSFTVEKGIYQTSNFRVQPTESIVRFPNITNLCPFGEVFNATRFASVYAWNRKRISNCVADYSVLYNSASFSTFKCYGVSPTKLNDLCFTNVYADSFVIRGDEVRQIAPGQTGKIADYNYKLPDDFTGCVIAWNSNNLDSKVGGNYNYLYRLFRKSNLKPFERDISTEIYQAGSTPCNGVEGFNCYFPLQSYGFQPTNGVGYQPYRVVVLSFELLHAPATVCGPKKSTNLVKNKCVNFNFNGLTGTGVLTESNKKFLPFQQFGRDIADTTDAVRDPQTLEILDITPCSFGGVSVITPGTNTSNQVAVLYQDVNCTEVPVAIHADQLTPTWRVYSTGSNVFQTRAGCLIGAEHVNNSYECDIPIGAGICASYQTQTNSPSGAGSVASQSIIAYTMSLGAENSVAYSNNSIAIPTNFTISVTTEILPVSMTKTSVDCTMYICGDSTECLNLLLQYGSFCTQLNRALTGIAVEQDKNTQEVFAQVKQIYKTPPIKDFGGFNFSQILPDPSKPSKRSFIEDLLFNKVTLADAGFIKQYGDCLGDIAARDLICAQKFNGLTVLPPLLTDEMIAQYTSALLAGTITSGWTFGAGAALQIPFAMQMAYRFNGIGVTQNVLYENQKLIANQFNSAIGKIQDSLSSTASALGKLQDVVNQNAQALNTLVKQLSSNFGAISSVLNDILSRLDPPEAEVQIDRLITGRLQSLQTYVTQQLIRAAEIRASANLAATKMSECVLGQSKRVDFCGKGYHLMSFPQSAPHGVVFLHVTYVPAQEKNFTTAPAICHDGKAHFPREGVFVSNGTHWFVTQRNFYEPQIITTDNTFVSGNCDVVIGIVNNTVYDPLQPELDSFKEELDKYFKNHTSPDVDLGDISGINASVVNIQKEIDRLNEVAKNLNESLIDLQELGKYEQYIKGSGRENLYFQGGGGSGYIPEAPRDGQAYVRKDGEWVLLSTFLGHHHHHHHH

SEQ ID NO: 1966 - protein, 1281 aa, Artificial Sequence
  Description of Artificial Sequence: Synthetic polypeptide
MGILPSPGMPALLSLVSLLSVLLMGCVAETGTQCVNLTTRTQLPPAYTNSFTRGVYYPDKVFRSSVLHSTQDLFLPFFSNVTWFHAIHVSGTNGTKRFDNPVLPFNDGVYFASTEKSNIIRGWIFGTTLDSKTQSLLIVNNATNVVIKVCEFQFCNDPFLGVYYHKNNKSWMESEFRVYSSANNCTFEYVSQPFLMDLEGKQGNFKNLREFVFKNIDGYFKIYSKHTPINLVRDLPQGFSALEPLVDLPIGINITRFQTLLALHRSYLTPGDSSSGWTAGAAAYYVGYLQPRTFLLKYNENGTITDAVDCALDPLSETKCTLKSFTVEKGIYQTSNFRVQPTESIVRFPNITNLCPFGEVFNATRFASVYAWNRKRISNCVADYSVLYNSASFSTFKCYGVSPTKLNDLCFTNVYADSFVIRGDEVRQIAPGQTGKIADYNYKLPDDFTGCVIAWNSNNLDSKVGGNYNYLYRLFRKSNLKPFERDISTEIYQAGSTPCNGVEGFNCYFPLQSYGFQPTNGVGYQPYRVVVLSFELLHAPATVCGPKKSTNLVKNKCVNFNFNGLTGTGVLTESNKKFLPFQQFGRDIADTTDAVRDPQTLEILDITPCSFGGVSVITPGTNTSNQVAVLYQDVNCTEVPVAIHADQLTPTWRVYSTGSNVFQTRAGCLIGAEHVNNSYECDIPIGAGICASYQTQTNSPSGAGSVASQSIIAYTMSLGAENSVAYSNNSIAIPTNFTISVTTEILPVSMTKTSVDCTMYICGDSTECSNLLLQYGSFCTQLNRALTGIAVEQDKNTQEVFAQVKQIYKTPPIKDFGGFNFSQILPDPSKPSKRSFIEDLLFNKVTLADAGFIKQYGDCLGDIAARDLICAQKFNGLTVLPPLLTDEMIAAYTAALVAGTATAGWTFGAGAALQIPFAMQMAYRFNGIGVTQNVLYENQKLIANQFNSAIGKIQDSLSSTASALGKLQDVVNQNAQALNTLVKQLSSNFGAISSVLNDILSRLDPPEAEVQIDRLITGRLQSLQTYVTQQLIRAAEIRASANLAATKMSECVLGQSKRVDFCGKGYHLMSFPQAAPHGVVFLHVTYVPAQEKNFTTAPAICHDGKAHFPREGVFVSNGTHWFVTQRNFYEPQIITTDNTFVSGNCDVVIGIVNNTVYDPLQPELDSFKEELDKYFKNHTSPDVDLGDISGINASVVNIQKEIDRLNEVAKNLNESLIDLQELGKYEQYIKGSGRENLYFQGGGGSGYIPEAPRDGQAYVRKDGEWVLLSTFLGHHHHHHHH

SEQ ID NO: 1967 - protein, 1281 aa, Artificial Sequence
  Description of Artificial Sequence: Synthetic polypeptide
MGILPSPGMPALLSLVSLLSVLLMGCVAETGTQCVNLTTRTQLPPAYTNSFTRGVYYPDKVFRSSVLHSTQDLFLPFFSNVTWFHAIHVSGTNGTKRFDNPVLPFNDGVYFASTEKSNIIRGWIFGTTLDSKTQSLLIVNNATNVVIKVCEFQFCNDPFLGVYYHKNNKSWMESEFRVYSSANNCTFEYVSQPFLMDLEGKQGNFKNLREFVFKNIDGYFKIYSKHTPINLVRDLPQGFSALEPLVDLPIGINITRFQTLLALHRSYLTPGDSSSGWTAGAAAYYVGYLQPRTFLLKYNENGTITDAVDCALDPLSETKCTLKSFTVEKGIYQTSNFRVQPTESIVRFPNITNLCPFGEVFNATRFASVYAWNRKRISNCVADYSVLYNSASFSTFKCYGVSPTKLNDLCFTNVYADSFVIRGDEVRQIAPGQTGKIADYNYKLPDDFTGCVIAWNSNNLDSKVGGNYNYLYRLFRKSNLKPFERDISTEIYQAGSTPCNGVEGFNCYFPLQSYGFQPTNGVGYQPYRVVVLSFELLHAPATVCGPKKSTNLVKNKCVNFNFNGLTGTGVLTESNKKFLPFQQFGRDIADTTDAVRDPQTLEILDITPCSFGGVSVITPGTNTSNQVAVLYQDVNCTEVPVAIHADQLTPTWRVYSTGSNVFQTRAGCLIGAEHVNNSYECDIPIGAGICASYQTQTNSPSGAGSVASQSIIAYTMSLGAENSVAYSNNSIAIPTNFTISVTTEILPVSMTKTSVDCTMYICGDSTECSNLLLQYGSFCTQLNRALTGIAVEQDKNTQEVFAQVKQIYKTPPIKDFGGFNFSQILPDPSKPSKRSFIEDLLFNKATLADAGFIKQYGDCLGDIAARDLICAQKFNGLTVLPPLLTDEMIAQYTSALLAGTITSGWTFGAGAALQIPFAMQMAYRFNGIGVTQNVLYENQKLIANQFNSAIGKIQDSLSSTASALGKLQDVVNQNAQALNTLVKQLSSNFGAISSVLNDILSRLDPPEAEVQIDRLITGRLQSLQTYVTQQLIRAAEIRASANLAATKMSECVLGQSKRVDFCGKGYHLMSFPQSAPHGVVFLHVTYVPAQEKNFTTAPAICHDGKAHFPREGVFVSNGTHWFVTQRNFYEPQIITTDNTFVSGNCDVVIGIVNNTVYDPLQPELDSFKEELDKYFKNHTSPDVDLGDISGINASVVNIQKEIDRLNEVAKNLNESLIDLQELGKYEQYIKGSGRENLYFQGGGGSGYIPEAPRDGQAYVRKDGEWVLLSTFLGHHHHHHHH

SEQ ID NO: 1968 - protein, 1281 aa, Artificial Sequence
  Description of Artificial Sequence: Synthetic polypeptide
MGILPSPGMPALLSLVSLLSVLLMGCVAETGTQCVNLTTRTQLPPAYTNSFTRGVYYPDMVFRSSVLHSTQDLFLPFFSNVTWFHAIHVSGTNGTKRFDNPVLPFNDGVYFASTEKSNIIRGWIFGTTLDSKTQSLLIVNNATNVVIKVCEFQFCNDPFLGVYYHKNNKSWMESEFRVYSSANNCTFEYVSQPFLMDLEGKQGNFKNLREFVFKNIDGYFKIYSKHTPINLVRDLPQGFSALEPLVDLPIGINITRFQTLLALHRSYLTPGDSSSGWTAGAAAYYVGYLQPRTFLLKYNENGTITDAVDCALDPLSETKCTLKSFTVEKGIYQTSNFRVQPTESIVRFPNITNLCPFGEVFNATRFASVYAWNRKRISNCVADYSVLYNSASFSTFKCYGVSPTKLNDLCFTNVYADSFVIRGDEVRQIAPGQTGKIADYNYKLPDDFTGCVIAWNSNNLDSKVGGNYNYLYRLFRKSNLKPFERDISTEIYQAGSTPCNGVEGFNCYFPLQSYGFQPTNGVGYQPYRVVVLSFELLHAPATVCGPKKSTNLVKNKCVNFNFNGLTGTGVLTESNKKFLPFQQFGRDIADTTDAVRDPQTLEILDITPCSFGGVSVITPGTNTSNQVAVLYQDVNCTEVPVAIHADQLTPTWRVYSTGSNVFQTRAGCLIGAEHVNNSYECDIPIGAGICASYQTQTNSPSGAGSVASQSIIAYTMSLGAENSVAYSNNSIAIPTNFTISVTTEILPVSMTKTSVDCTMYICGDSTECSNLLLQYGSFCTQLNRALTGIAVEQDKNTQEVFAQVKQIYKTPPIKDFGGFNFSQILPDPSKPSKRSFIEDLLFNKVTLADAGFIKQYGDCLGDIAARDLICAQKFNGLTVLPPLLTDEMIAQYTSALLAGTITSGWTFGAGAALQIPFAMQMAYRFNGIGVTQNVLYENQKLIANQFNSAIGKIQDSLSSTASALGKLQDVVNQNAQALNTLVKQLSSNFGAISSVLNDILSRLDPPEAEVQIDRLITGRLQSLQTYVTQQLIRAAEIRASANLAATKMSECVLGQSKRVDFCGKGYHLMSFPQSAPHGVVFLHVTYVPAQEKNFTTAPAICHDGKAHFPREGVFVSNGTHWFVTQRNFYEPQIITTDNTFVSGNCDVVIGIVNNTVYDPLQPELDSFKEELDKYFKNHTSPDVDLGDISGINASVVNIQKEIDRLNEVAKNLNESLIDLQELGKYEQYIKGSGRENLYFQGGGGSGYIPEAPRDGQAYVRKDGEWVLLSTFLGHHHHHHHH

SEQ ID NO: 1969 - protein, 1281 aa, Artificial Sequence
  Description of Artificial Sequence: Synthetic polypeptide
MGILPSPGMPALLSLVSLLSVLLMGCVAETGTQCVNLTTRTQLPPAYTNSFTRGVYYPDKVFRSDVLHSTQDLFLPFFSNVTWFHAIHVSGTNGTKRFDNPVLPFNDGVYFASTEKSNIIRGWIFGTTLDSKTQSLLIVNNATNVVIKVCEFQFCDNPFLGVYYHKNNKSWMEKEFRVYSSANNCTFEYVSQPFLMDLGGKQGNFKNLREFVFKNIDGYFKIYSKHTPINLVRDLPQGFSALEPLMDLPIGINITRFQTLLALHRSYLTPGDSSSGWTAGAAAYYVGYLQPRTFLLKYNENGTITDAVDCALDPLSETKCTLKSFTVEKGIYQTSNFRVQPTESIVRFPNITNLCPFGEVFNATRFASVYAWNRKRISNCVADYSVLYNSASFSTFKCYGVSPTKLNDLCFTNVYADSFVIRGDEVRQIAPGQTGKIADYNYKLPDDFTGCVIAWNSNNLDSKVGGNYNYLYRLFRKSNLKPFERDISTEIYQAGSTPCNGVEGFNCYFPLQSYGFQPTNGVGYQPYRVVVLSFELLHAPATVCGPKKSTNLVKNKCVNFNFNGLTGTGVLTESNKKFLPFQQFGRDIADNTDAVRDPQTLEILDITPCSFGGVSVITPGTNTSNQVAVLYQDVNCTEVPNAIHADQLTPTWRVYSTGSNVFQTRAGCLIGAEHVNNSYECDIPIGAGICASYQTQTNSPSGAGSVASQSIIAYTMSLGAENSVAYSNNSIAIPTNFTISVTTEILPVSMTKTSVDCTMYICGDSTECSNLLLQYGSFCTQLNRALQGIAQEQDKNTQEVFAQVKQIYKTPPIKDFGGFNFSQILPDPSKPSKRSFIEDLLFNKVTLADAGFIKQYGDCLGDIAARDLICAQKFNGLTVLPPLLTDEMIAQYTSALLAGTITSGWTFGAGAALQIPFAMQMAYRFNGIGVTQNVLYENQKLIANQFNKAIGKIQDSLSSTASALGKLQDVVNQNAQALNTLVKQLSSNFGAISSVLNDILSRLDPPEAEVQIDRLITGRLQSLQTYVTQQLIRAAEIRASANLAATKMSECVLGQSKRVDFCGKGYHLMSFPQSAPHGVVFLHVTYVPAQEKNFTTAPAICHDGKAFFPREGVFVSNGTQWFVTQRNFYEPQIITTDNTFVSGNCDVVIGIVNNTVYDPLQPELDSFKEELDKYFKNHTSPDVDLGDISGINASVVNIQKEIDRLNEVAKNLNESLIDLQELGKYEQYIKGSGRENLYFQGGGGSGYIPEAPRDGQAYVRKDGEWVLLSTFLGHHHHHHHH

SEQ ID NO: 1970 - protein, 1281 aa, Artificial Sequence
  Description of Artificial Sequence: Synthetic polypeptide
MGILPSPGMPALLSLVSLLSVLLMGCVAETGTQCVNLTTRTQLPPAYTNSFTRGVYYPDKVFRSSVLHSTQDLFLPFFSNVTWFHAIHVSGTNGTKRFDNPVLPFNDGVYFASTEKSNIIRGWIFGTTLDSKTQSLLIVNNATNVVIKVCEFQFCNDPFLGVYYHKNNKSWMESEFRVYSSANNCTFEYVSQPFLMDLEGKQGNFKDLREFVFKNIDGYFKIYSKHTPINLVRDLPQGFSALEPLVDLPIGINITRFQTLLALHRSYLTPGDSSSGWTAGAAAYYVGYLQPRTFLLKYNENGTITDAVDCALDPLSETKCTLKSFTVEKGIYQTSNFRVQPTESIVRFPNITNLCPFGEVFNATRFASVYAWNRKRISNCVADYSVLYNSASFSTFKCYGVSPTKLNDLCFTNVYADSFVIRGDEVRQIAPGQTGKIADYNYKLPDDFTGCVIAWNSNNLDSKVGGNYNYLYRLFRKSNLKPFERDISTEIYQAGSTPCNGVEGFNCYFPLQSYGFQPTNGVGYQPYRVVVLSFELLHAPATVCGPKKSTNLVKNKCVNFNFNGLTGTGVLTESNKKFLPFQQFGRDIADTTDAVRDPQTLEILDITPCSFGGVSVITPGTNTSNQVAVLYQDVNCTEVPVAIHADQLTPTWRVYSTGSNVFQTRAGCLIGAEHVNNSYECDIPIGAGICASYQTQTNSPSGAGSVASQSIIAYTMSLGAENSVAYSNNSIAIPTNFTISVTTEILPVSMTKTSVDCTMYICGDSTECSNLLLQYGSFCTQLNRALTGIAVEQDKNTQEVFAQVKQIYKTPPIKDFGGFNFSQILPDPSKPSKRSFIEDLLFNKVTLADAGFIKQYGDCLGDIAARDLICAQKFNGLTVLPPLLTDEMIAQYTSALLAGTITSGWTFGAGAALQIPFAMQMAYRFNGIGVTQNVLYENQKLIANQFNSAIGKIQDSLSSTASALGKLQDVVNQNAQALNTLVKQLSSNFGAISSVLNDILSRLDPPEAEVQIDRLITGRLQSLQTYVTQQLIRAAEIRASANLAATKMSECVLGQSKRVDFCGKGYHLMSFPQSAPHGVVFLHVTYVPAQEKNFTTAPAICHDGKAHFPREGVFVSNGTHWFVTQRNFYEPQIITTDNTFVSGNCDVVIGIVNNTVYDPLQPELDSFKEELDKYFKNHTSPDVDLGDISGINASVVNIQKEIDRLNEVAKNLNESLIDLQELGKYEQYIKGSGRENLYFQGGGGSGYIPEAPRDGQAYVRKDGEWVLLSTFLGHHHHHHHH

SEQ ID NO: 1971 - protein, 1281 aa, Artificial Sequence
  Description of Artificial Sequence: Synthetic polypeptide
MGILPSPGMPALLSLVSLLSVLLMGCVAETGTQCVNLTTRTQLPPAYTNSFTRGVYYPDKVFRSSVLHSTQDLFLPFFSNVTWFHAIHVSGTNGTKRFDNPVLPFNDGVYFASTEKSNIIRGWIFGTTLDSKTQSLLIVNNATNVVIKVCEFQFCNDPFLGVYYHKNNKSWMESEFRVYSSANNCTFEYVSQPFLMDLEGKQGNFKNLREFVFKNIDGYFKIYSKHTPINLVRDLPQGFSALEPLVDLPIGINITRFQTLLALHRSYLTPGDSSSGWTAGAAAYYVGYLQPRTFLLKYNENGTITDAVDCALDPLSETKCTLKSFTVEKGIYQTSNFRVQPTESIVRFPNITNLCPFGEVFNATRFASVYAWNRKRISNCVADYSVLYNSASFSTFKCYGVSPTKLNDLCFTNVYADSFVIRGDEVRQIAPGQTGKIADYNYKLPDDFTGCVIAWNSNNLDSKVGGNYNYLYRLFRKSNLKPFERDISTEIYQAGSTPCNGVEGFNCYFPLQSYGFQPTNGVGYQPYRVVVLSFELLHAPATVCGPKKSTNLVKNKCVNFNFNGLTGTGVLTESNKKFLPFQQFGRDIADTTDAVRDPQTLEILDITPCSFGGVSVITPGTNTSNQVAVLYQDVNCTEVPVAIHADQLTPTWRVYSTGSNVFQTRAGCLIGAEHVNNSYECDIPIGAGICASYQTQTNSPSGAGSVASQSIIAYTMSLGAENSVAYSNNSIAIPTNFTISVTTEILPVSMTKTSVDCTMYICGDSTECSNLLLQYGSFCSQLNRALTGIAVEQDKNTQEVFAQVKQIYKTPPIKDFGGFNFSQILPDPSKPSKRSFIEDLLFNKVTLADAGFIKQYGDCLGDIAARDLICAQKFNGLTVLPPLLTDEMIAQYTSALLAGTITSGWTFGAGAALQIPFAMQMAYRFNGIGVTQNVLYENQKLIANQFNSAIGKIQDSLSSTASALGKLQDVVNQNAQALNTLVKQLSSNFGAISSVLNDILSRLDPPEAEVQIDRLITGRLQSLQTYVTQQLIRAAEIRASANLAATKMSECVLGQSKRVDFCGKGYHLMSFPQSAPHGVVFLHVTYVPAQEKNFTTAPAICHDGKAHFPREGVFVSNGTHWFVTQRNFYEPQIITTDNTFVSGNCDVVIGIVNNTVYDPLQPELDSFKEELDKYFKNHTSPDVDLGDISGINASVVNIQKEIDRLNEVAKNLNESLIDLQELGKYEQYIKGSGRENLYFQGGGGSGYIPEAPRDGQAYVRKDGEWVLLSTFLGHHHHHHHH

SEQ ID NO: 1972 - protein, 1281 aa, Artificial Sequence
  Description of Artificial Sequence: Synthetic polypeptide
MGILPSPGMPALLSLVSLLSVLLMGCVAETGTQCVNLTTRTQLPPAYTNSFTRGVYYPDKVFRSSVLHSTQDLFLPFFSNVTWFHAIHVSGTNGTKRFDNPVLPFNDGVYFASTEKSNIIRGWIFGTTLDSKTQSLLIVNNATNVVIKVCEFQFCNDPFLGVYYHKNNKSWMESEFRVYSSANNCTFEYVSQPFLMDLEGKQGNFKNLREFVFKNIDGYFKIYSKHTPINLVRDLPQGFSALEPLVDLPIGINITRFQTLLALHRSYLTPGDSSSGWTAGAAAYYVGYLQPRTFLLKYNENGTITDAVDCALDPLSETKCTLKSFTVEKGIYQTSNFRVQPTESIVRFPNITNLCPFGEVFNATRFASVYAWNRKRISNCVADYSVLYNSASFSTFKCYGVSPTKLNDLCFTNVYADSFVIRGDEVRQIAPGQTGKIADYNYKLPDDFTGCVIAWNSNNLDSKVGGNYNYLYRLFRKSNLKPFERDISTEIYQAGSTPCNGVEGFNCYFPLQSYGFQPTNGVGYQPYRVVVLSFELLHAPATVCGPKKSTNLVKNKCVNFNFNGLTGTGVLTESNKKFLPFQQFGRDIADTTDAVRDPQTLEILDITPCSFGGVSVITPGTNTSNQVAVLYQDVNCTEVPVAIHADQLTPTWRVYSTGSNVFQTRAGCLIGAEHVNNSYECDIPIGAGICASYQTQTNSPSGAGSVASQSIIAYTMSLGAENSVAYSNNSIAIPTNFTISVTTEILPVSMTKTSVDCTMYICGDSTECSNLLLQYGSFCTQLNRALTGIAVEQDKNTQEVFAQVKQIYKTPPIKDFGGFNFSQILPDPSKPSKRSFIEDLLFNKVTLADAGFIKQYGDCLGDIAARDLICAQKFNGLTVLPPLLTDEMIAQYTSALLAGTITSGWTFGAGAALQIPFAMQMAYRFNGIGVTQNVLYENQKLIANQFNSAIGKIQDSLSSTASALGKLQDVVKQNAQALNTLVKQLSSNFGAISSVLNDILSRLDPPEAEVQIDRLITGRLQSLQTYVTQQLIRAAEIRASANLAATKMSECVLGQSKRVDFCGKGYHLMSFPQSAPHGVVFLHVTYVPAQEKNFTTAPAICHDGKAHFPREGVFVSNGTHWFVTQRNFYEPQIITTDNTFVSGNCDVVIGIVNNTVYDPLQPELDSFKEELDKYFKNHTSPDVDLGDISGINASVVNIQKEIDRLNEVAKNLNESLIDLQELGKYEQYIKGSGRENLYFQGGGGSGYIPEAPRDGQAYVRKDGEWVLLSTFLGHHHHHHHH

SEQ ID NO: 1973 - protein, 1281 aa, Artificial Sequence
  Description of Artificial Sequence: Synthetic polypeptide
MGILPSPGMPALLSLVSLLSVLLMGCVAETGTQCVNLTTRTQLPPAYTNSFTRGVYYPDKVFRSSVLHSTQDLFLPFFSNVTWFHAIHVSGTNGTKRFDNPVLPFNDGVYFASTEKSNIIRGWIFGTTLDSKTQSLLIVNNATNVVIKVCEFQFCNDPFLGVYYHKNNKSWMESEFRVYSSANNCTFEYVSQPFLMDLEGKQGNFKNLREFVFKNIDGYFKIYSKHTPINLVRDLPQGFSALEPLVDLPIGINITRFQTLLALHRSYLTPGDSSSGWTAGAAAYYVGYLQPRTFLLKYNENGTITDAVDCALDPLSETKCTLKSFTVEKGIYQTSNFRVQPTESIVRFPNITNLCPFGEVFNATRFASVYAWNRKRISNCVADYSVLYNSASFSTFKCYGVSPTKLNDLCFTNVYADSFVIRGDEVRQIAPGQTGKIADYNYKLPDDFTGCVIAWNSNNLDSKVGGNYNYLYRLFRKSNLKPFERDISTEIYQAGSTPCNGVEGFNCYFPLQSYGFQPTNGVGYQPYRVVVLSFELLHAPATVCGPKKSTNLVKNKCVNFNFNGLTGTGVLTESNKKFLPFQQFGRDIADTTDAVRDPQTLEILDITPCSFGGVSVITPGTNTSNQVAVLYQDVNCTEVPVAIHADQLTPTWRVYSTGSNVFQTRAGCLIGAEHVNNSYECDIPIGAGICASYQTQTNSPSGAGSVASQSIIAYTMSLGAENSVAYSNNSIAIPTNFTISVTTEILPVSMTKTSVDCTMYICGDSTECSNLLLQYGSFCTQLNRALTGIAVEQDKNTQEVFAQVKQIYKTPPIKDFGGFNFSQILPDPSKPSKRSFIEDLLFNKVTLADAGFIKQYGDCLGDIAARDLICAQKFNGLTVLPPLLTDEMIAQYTAALLAGTITSGWTFGAGAALQIPFAMQMAYRFNGIGVTQNVLYENQKLIANQFNSAIGKIQDSLSSTASALGKLQDVVNQNAQALNTLVKQLSSNFGAISSVLNDILSRLDPPEAEVQIDRLITGRLQSLQTYVTQQLIRAAEIRASANLAATKMSECVLGQSKRVDFCGKGYHLMSFPQSAPHGVVFLHVTYVPAQEKNFTTAPAICHDGKAHFPREGVFVSNGTHWFVTQRNFYEPQIITTDNTFVSGNCDVVIGIVNNTVYDPLQPELDSFKEELDKYFKNHTSPDVDLGDISGINASVVNIQKEIDRLNEVAKNLNESLIDLQELGKYEQYIKGSGRENLYFQGGGGSGYIPEAPRDGQAYVRKDGEWVLLSTFLGHHHHHHHH

SEQ ID NO: 1974 - protein, 1281 aa, Artificial Sequence
  Description of Artificial Sequence: Synthetic polypeptide
MGILPSPGMPALLSLVSLLSVLLMGCVAETGTQCVNLTTRTQLPPAYTNSFTRGVYYPDKVFRSSVLHSTQDLFLPFFSNVTWFHAIHVSGTNGTKRFDNPVLPFNDGVYFAATEKSNIIRGWIFGTTLDSKTQSLLIVNNATNVVIKVCEFQFCNDPFLGVYYHKNNKSWMESEFRVYSSANNCTFEYVSQPFLMDLEGKQGNFKNLREFVFKNIDGYFKIYSKHTPINLVRDLPQGFSALEPLVDLPIGINITRFQTLLALHRSYLTPGDSSSGWTAGAAAYFVGYLQPRTFLLKYNENGTITDAVDCALDPLSETKCTLKSFTVEKGIYQTSNFRVQPTESIVRFPNITNLCPFGEVFNATRFASVYAWNRKRISNCVADYSVLYNSASFSTFKCYGVSPTKLNDLCFTNVYADSFVIRGDEVRQIAPGQTGKIADYNYKLPDDFTGCVIAWNSNNLDSKVGGNYNYLYRLFRKSNLKPFERDISTEIYQAGSTPCNGVEGFNCYFPLQSYGFQPTNGVGYQPYRVVVLSFELLHAPATVCGPKKSTNLVKNKCVNFNFNGLTGTGVLTESNKKFLPFQQFGRDISDTTDAVRDPQTLEILDITPCSFGGVSVITPGTNTSNQVAVLYQDVNCTEVPVAIHADQLTPTWRVYSTGSNVFQTRAGCLIGAEHVNNSYECDIPIGAGICASYQTQTNSPSGAGSVASQSIIAYTMSLGAENSVAYSNNSIAIPTNFTISVTTEILPVSMTKTSVDCTMYICGDSTECSNLLLQYGSFCTQLNRALTGIAVEQDKNTQEVFAQVKQIYKTPPIKDFGGFNFSQILPDPSKPSKRSFIEDLLFNKVTLADAGFIKQYGDCLGDIAARDLICAQKFNGLTVLPPLLTDEMIAQYTSALVAGTATAGWTFGAGAALQIPFAMQMAYRFNGIGVTQNVLYENQKLIANQFNSAIGKIQDSLSSTASALGKLQDVVNQNAQALNTLVKQLSSNFGAISSVLNDILSRLDPPEAEVQIDRLITGRLQSLQTYVTQQLIRAAEIRASANLAATKMSECVLGQSKRVDFCGKGYHLMSFPQAAPHGVVFLHVTYVPAQEKNFTTAPAICHDGKAHFPREGVFVSNGTHWFVTQRNFYEPQIITTDNTFVSGNCDVVIGIVNNTVYDPLQPELDSFKEELDKYFKNHTSPDVDLGDISGINASVVNIQKEIDRLNEVAKNLNESLIDLQELGKYEQYIKGSGRENLYFQGGGGSGYIPEAPRDGQAYVRKDGEWVLLSTFLGHHHHHHHH

SEQ ID NO: 1975 - protein, 1281 aa, Artificial Sequence
  Description of Artificial Sequence: Synthetic polypeptide
MGILPSPGMPALLSLVSLLSVLLMGCVAETGTQCVNLTTRTQLPPAYTNSFTRGVYYPDKVFRSSVLHSTQDLFLPFFSNVTWFHAIHVSGTNGTKRFDNPVLPFNDGVYFASTEKSNIIRGWIFGTTLDSKTQSLLIVNNATNVVIKVCEFQFCNDPFLGVYYHKNNKSWMESEFRVYSSANNCTFEYVSQPFLMDLEGKQGNFKNLREFVFKNIDGYFKIYSKHTPINLVRDLPQGFSALEPLVDLPIGINITRFQTLLALHRSYLTPGDSSSGWTAGAAAYYVGYLQPRTFLLKYNENGTITDAVDCALDPLSETKCTLKSFTVEKGIYQTSNFRVQPTESIVRFPNITNLCPFGEVFNATRFASVYAWNRKRISNCVADYSVLYNSASFSTFKCYGVSPTKLNDLCFTNVYADSFVIRGDEVRQIAPGQTGKIADYNYKLPDDFTGCVIAWNSNNLDSKVGGNYNYLYRLFRKSNLKPFERDISTEIYQAGSTPCNGVEGFNCYFPLQSYGFQPTNGVGYQPYRVVVLSFELLHAPATVCGPKKSTNLVKNKCVNFNFNGLTGTGVLTESNKKFLPFQQFGRDIADRTDAVRDPQTLEILDITPCSFGGVSVITPGTNTSNQVAVLYQDVNCTEVPVAIHADQLTPTWRVYSTGSNVFQTRAGCLIGAEHVNNSYECDIPIGAGICASYQTQTNSPSGAGSVASQSIIAYTMSLGAENSVAYSNNSIAIPTNFTISVTTEILPVSMTKTSVDCTMYICGDSTECSNLLLQYGSFCTQLNRALTGIAVEQDKNTQEVFAQVKQIYKTPPIKDFGGFNFSQILPDPSKPSKRSFIEDLLFNKVTLADAGFIKQYGDCLGDIAARDLICAQKFNGLTVLPPLLTDEMIAQYTSALLAGTITSGWTFGAGAALQIPFAMQMAYRFNGIGVTQNVLYENQKLIANQFNSAIGKIQDSLSSTASALGKLQDVVNQNAQALNTLVKQLSSNFGAISSVLNDILSRLDPPEAEVQIDRLITGRLQSLQTYVTQQLIRAAEIRASANLAATKMSECVLGQSKRVDFCGKGYHLMSFPQSAPHGVVFLHVTYVPAQEKNFTTAPAICHDGKAHFPREGVFVSNGTHWFVTQRNFYEPQIITTDNTFVSGNCDVVIGIVNNTVYDPLQPELDSFKEELDKYFKNHTSPDVDLGDISGINASVVNIQKEIDRLNEVAKNLNESLIDLQELGKYEQYIKGSGRENLYFQGGGGSGYIPEAPRDGQAYVRKDGEWVLLSTFLGHHHHHHHH

SEQ ID NO: 1976 - protein, 1281 aa, Artificial Sequence
  Description of Artificial Sequence: Synthetic polypeptide
MGILPSPGMPALLSLVSLLSVLLMGCVAETGTQCVNLTTRTQLPPAYTNSFTRGVYYPDKVFRSSVLHSTQDLFLPFFSNVTWFHAIHVSGTNGTKRFDNPVLPFNDGVYFAATEKSNIIRGWIFGTTLDSKTQSLLIVNNATNVVIKVCEFQFCNDPFLGVYYHKNNKSWMESEFRVYSSANNCTFEYVSQPFLMDLEGKQGNFKNLREFVFKNIDGYFKIYSKHTPINLVRDLPQGFSALEPLVDLPIGINITRFQTLLALHRSYLTPGDSSSGWTAGAAAYFVGYLQPRTFLLKYNENGTITDAVDCALDPLSETKCTLKSFTVEKGIYQTSNFRVQPTESIVRFPNITNLCPFGEVFNATRFASVYAWNRKRISNCVADYSVLYNSASFSTFKCYGVSPTKLNDLCFTNVYADSFVIRGDEVRQIAPGQTGKIADYNYKLPDDFTGCVIAWNSNNLDSKVGGNYNYLYRLFRKSNLKPFERDISTEIYQAGSTPCNGVEGFNCYFPLQSYGFQPTNGVGYQPYRVVVLSFELLHAPATVCGPKKSTNLVKNKCVNFNFNGLTGTGVLTESNKKFLPFQQFGRDISDTTDSVRDPQTLEILDITPCSFGGVSVITPGTNTSNQVAVLYQDVNCTEVPVAIHADQLTPTWRVYSTGSNVFQTRAGCLIGAEHVNNSYECDIPIGAGICASYQTQTNSPSGAGSVASQSIIAYTMSLGAENSVAYSNNSIAIPTNFTISVTTEILPVSMTKTSVDCTMYICGDSTECSNLLLQYGSFCTQLNRALTGIAVEQDKNTQEVFAQVKQIYKTPPIKDFGGFNFSQILPDPSKPSKRSFIEDLLFNKVTLADAGFIKQYGDCLGDIAARDLICAQKFNGLTVLPPLLTDEMIAQYTSALLAGTITAGWTFGAGAALQIPFAMQMAYRFNGIGVTQNVLYENQKLIANQFNSAIGKIQDSLSSTASALGKLQDVVNQNAQALNTLVKQLSSNFGAISSVLNDILSRLDPPEAEVQIDRLITGRLQSLQTYVTQQLIRAAEIRASANLAATKMSECVLGQSKRVDFCGKGYHLMSFPQAAPHGVVFLHVTYVPAQEKNFTTAPAICHDGKAHFPREGVFVSNGTHWFVTQRNFYEPQIITTDNTFVSGNCDVVIGIVNNTVYDPLQPELDSFKEELDKYFKNHTSPDVDLGDISGINASVVNIQKEIDRLNEVAKNLNESLIDLQELGKYEQYIKGSGRENLYFQGGGGSGYIPEAPRDGQAYVRKDGEWVLLSTFLGHHHHHHHH

SEQ ID NO: 1977 - protein, 1281 aa, Artificial Sequence
  Description of Artificial Sequence: Synthetic polypeptide
MGILPSPGMPALLSLVSLLSVLLMGCVAETGTQCVNLTTRTQLPPAYTNSFTRGVYYPDKVFRSSVLHSTQDLFLPFFSNVTWFHAIHVSGTNGTKRFDNPVLPFNDGVYFASTEKSNIIRGWIFGTTLDSKTQSLLIVNNATNVVIKVCEFQFCNDPFLGVYYHKNNKSWMESEFRVYSSANNCTFEYVSQPFLMDLEGKQGNFKNLREFVFKNIDGYFKIYSKHTPINLVRDLPQGFSALEPLVDLPIGINITRFQTLLALHRSYLTPGDSSSGWTAGAAAYYVGYLQPRTFLLKYNENGTITDAVDCALDPLSETKCTLKSFTVEKGIYQTSNFRVQPTESIVRFPNITNLCPFGEVFNATRFASVYAWNRKRISNCVADYSVLYNSASFSTFKCYGVSPTKLNDLCFTNVYADSFVIRGDEVRQIAPGQTGKIADYNYKLPDDFTGCVIAWNSNNLDSKVGGNYNYLYRLFRKSNLKPFERDISTEIYQAGSTPCNGVEGFNCYFPLQSYGFQPTNGVGYQPYRVVVLSFELLHAPATVCGPKKSTNLVKNKCVNFNFNGLTGTGVLTESNKKFLPFQQFGRDIADTTDAVRDPQTLEILDITPCSFGGVSVITPGTNTSNQVAVLYQDVNCTEVPVAIHADQLTPTWRVYSTGSNVFQTRAGCLIGAEHVNNSYECDIPIGAGICASYQTQTNSPSGAGSVASQSIIAYTMSLGAENSVAYSNNSIAIPTNFTISVTTEILPVSMTKTSVDCTMYICGDSTECSNLLLQYGSFCTQLNRALQGIAVEQDKNTQEVFAQVKQIYKTPPIKDFGGFNFSQILPDPSKPSKRSFIEDLLFNKVTLADAGFIKQYGDCLGDIAARDLICAQKFNGLTVLPPLLTDEMIAQYTSALLAGTITSGWTFGAGAALQIPFAMQMAYRFNGIGVTQNVLYENQKLIANQFNSAIGKIQDSLSSTASALGKLQDVVNQNAQALNTLVKQLSSNFGAISSVLNDILSRLDPPEAEVQIDRLITGRLQSLQTYVTQQLIRAAEIRASANLAATKMSECVLGQSKRVDFCGKGYHLMSFPQSAPHGVVFLHVTYVPAQEKNFTTAPAICHDGKAHFPREGVFVSNGTHWFVTQRNFYEPQIITTDNTFVSGNCDVVIGIVNNTVYDPLQPELDSFKEELDKYFKNHTSPDVDLGDISGINASVVNIQKEIDRLNEVAKNLNESLIDLQELGKYEQYIKGSGRENLYFQGGGGSGYIPEAPRDGQAYVRKDGEWVLLSTFLGHHHHHHHH

SEQ ID NO: 1978 - protein, 1281 aa, Artificial Sequence
  Description of Artificial Sequence: Synthetic polypeptide
MGILPSPGMPALLSLVSLLSVLLMGCVAETGTQCVNLTTRTQLPPAYTNSFRRGVYYPDKVFRSSVLHSTQDLFLPFFSNVTWFHAIHVSGTNGTKRFDNPVLPFNDGVYFASTEKSNIIRGWIFGTTLDSKTQSLLIVNNATNVVIKVCEFQFCNDPFLGVYYHKNNKSWMESEFRVYSSANNCTFEYVSQPFLMDLEGKQGNFKNLREFVFKNIDGYFKIYSKHTPINLVRDLPQGFSALEPLVDLPIGINITRFQTLLALHRSYLTPGDSSSGWTAGAAAYYVGYLQPRTFLLKYNENGTITDAVDCSYDPLSETKCTLKSFTVEKGIYQTSNFRVQPTESIVRFPNITNLCPFGEVFNATRFASVYAWNRKRISNCVADYSVLYNSASFSTFKCYGVSPTKLNDLCFTNVYADSFVIRGDEVRQIAPGQTGKIADYNYKLPDDFTGCVIAWNSNNLDSKVGGNYNYLYRLFRKSNLKPFERDISTEIYQAGSTPCNGVEGFNCYFPLQSYGFQPTNGVGYQPYRVVVLSFELLHAPATVCGPKKSTNLVKNKCVNFNFNGLTGTGVLTESNKKFLPFQQFGRDIADTTDAVRDPQTLEILDITPCSFGGVSVITPGTNTSNQVAVLYQDVNCTEVPEAIHADQLTPTWRVYSTGSNVFQTRAGCLIGAEHVNNSYECDIPIGAGICASYQTQTNSPSGAGSVASQSIIAYTMSLGAENSVAYSNNSIAIPTNFTISVTTEILPVSMTKTSVDCTMYICGDSTECSNLLLQYGSFCTQLNRALTGIAVEQDKNTQEVFAQVKQIYKTPPIKDFGGFNFSQILPDPSKPSKRSFIEDLLFNKVTLADAGFIKQYGDCLGDIAARDLICAQKFNGLTVLPPLLTDEMIAQYTSALLAGTITSGWTFGAGAALQIPFAMQMAYRFNGIGVTQNVLYENQKLIANQFNSAIGKIQDSLSSTASALGKLQDVVNQNAQALNTLVKQLSSNFGAISSVLNDILSRLDPPEAEVQIDRLITGRLQSLQTYVTQQLIRAAEIRASANLAATKMSECVLGQSKRVDFCGKGYHLMSFPQSAPHGVVFLHVTYVPAQEKNFTTAPAICHDGKAHFPREGVFVSNGTHWFVTQRNFYEPQIITTDNTFVSGNCDVVIGIVNNTVYDPLQPELDSFKEELDKYFKNHTSPDVDLGDISGINASVVNIQKEIDRLNEVAKNLNESLIDLQELGKYEQYIKGSGRENLYFQGGGGSGYIPEAPRDGQAYVRKDGEWVLLSTFLGHHHHHHHH

SEQ ID NO: 1979 - protein, 1281 aa, Artificial Sequence
  Description of Artificial Sequence: Synthetic polypeptide
MGILPSPGMPALLSLVSLLSVLLMGCVAETGTQCVNLTTRTQLPPAYTNSFTRGVYYPDKVFRSSVLHSTQDLFLPFFSNVTWFHAIHVSGTNGTKRFDNPVLPFNDGVYFASTEKSNIIRGWIFGTTLDSKTQSLLIVNNATNVVIKVCEFQFCNDPFLGVYYHKNNKSWMESEFRVYSSANNCTFEYVSQPFLMDLSGKQGNFKNLREFVFKNIDGYFKIYSKHTPINLVRDLPQGFSALEPLVDLPIGINITRFQTLLALHRSYLTPGDSSSGWTAGAAAYYVGYLQPRTFLLKYNENGTITDAVDCALDPLSETKCTLKSFTVEKGIYQTSNFRVQPTESIVRFPNITNLCPFGEVFNATRFASVYAWNRKRISNCVADYSVLYNSASFSTFKCYGVSPTKLNDLCFTNVYADSFVIRGDEVRQIAPGQTGKIADYNYKLPDDFTGCVIAWNSNNLDSKVGGNYNYLYRLFRKSNLKPFERDISTEIYQAGSTPCNGVEGFNCYFPLQSYGFQPTNGVGYQPYRVVVLSFELLHAPATVCGPKKSTNLVKNKCVNFNFNGLTGTGVLTESNKKFLPFQQFGRDIADTTDAVRDPQTLEILDITPCSFGGVSVITPGTNTSNQVAVLYQDVNCTEVPVAIHADQLTPTWRVYSTGSNVFQTRAGCLIGAEHVNNSYECDIPIGAGICASYQTQTNSPSGAGSVASQSIIAYTMSLGAENSVAYSNNSIAIPTNFTISVTTEILPVSMTKTSVDCTMYICGDSTECSNLLLQYGSFCTQLNRALTGIAVEQDKNTQEVFAQVKQIYKTPPIKDFGGFNFSQILPDPSKPSKRSFIEDLLFNKVTLADAGFIKQYGDCLGDIAARDLICAQKFNGLTVLPPLLTDEMIAQYTSALLAGTITSGWTFGAGAALQIPFAMQMAYRFNGIGVTQNVLYENQKLIANQFNSAIGKIQDSLSSTASALGKLQDVVNQNAQALNTLVKQLSSNFGAISSVLNDILSRLDPPEAEVQIDRLITGRLQSLQTYVTQQLIRAAEIRASANLAATKMSECVLGQSKRVDFCGKGYHLMSFPQSAPHGVVFLHVTYVPAQEKNFTTAPAICHDGKAHFPREGVFVSNGTHWFVTQRNFYEPQIITTDNTFVSGNCDVVIGIVNNTVYDPLQPELDSFKEELDKYFKNHTSPDVDLGDISGINASVVNIQKEIDRLNEVAKNLNESLIDLQELGKYEQYIKGSGRENLYFQGGGGSGYIPEAPRDGQAYVRKDGEWVLLSTFLGHHHHHHHH

SEQ ID NO: 1980 - protein, 1281 aa, Artificial Sequence
  Description of Artificial Sequence: Synthetic polypeptide
MGILPSPGMPALLSLVSLLSVLLMGCVAETGTQCVNLTTRTQLPPAYTNSFTRGVYYPDKVFRSSVLHSTQDLFLPFFSNVTWFHAIHVSGTNGTKRFDNPVLPFNDGVYFASTEKSNIIRGWIFGTTLDSKTQSLLIVNNATNVVIKVCEFQFCNDPFLGVYYHKNNKSWMESEFRVYSSANNCTFEYVSQPFLMDLEGKQGNFKNLREFVFKNIDGYFKIYSKHTPINLVRDLPQGFSALEPLVDLPIGINITRFQTLLALHRSYLTPGDSSSGWTAGAAAYYVGYLQPRTFLLKYNENGTITDAVDCALDPLSETKCTLKSFTVEKGIYQTSNFRVQPTESIVRFPNITNLCPFGEVFNATRFASVYAWNRKRISNCVADYSVLYNSASFSTFKCYGVSPTKLNDLCFTNVYADSFVIRGDEVRQIAPGQTGKIADYNYKLPDDFTGCVIAWNSNNLDSKVGGNYNYLYRLFRKSNLKPFERDISTEIYQAGSTPCNGVEGFNCYFPLQSYGFQPTNGVGYQPYRVVVLSFELLHAPATVCGPKKSTNLVKNKCVNFNFNGLTGTGVLTESNKKFLPFQQFGRDIADTTDAVRDPQTLEILDITPCSFGGVSVITPGTNTSNQVAVLYQDVNCTEVPVAIHADQLTPTWRVYSTGSNVFQTRAGCLIGAEHVNNSYECDIPIGAGICASYQTQTNSPSGAGSVASQSIIAYTMSLGAENSVAYSNNSIAIPTNFTISVTTEILPVSMTKVSVDCTMYICGDSTECSNLLLQYGSFCTQLNRALTGIAVEQDKNTQEVFAQVKQIYKTPPIKDFGGFNFSQILPDPSKPSKRSFIEDLLFNKVTLADAGFIKQYGDCLGDIAARDLICAQKFNGLTVLPPLLTDEMIAQYTSALLAGTITSGWTFGAGAALQIPFAMQMAYRFNGIGVTQNVLYENQKLIANQFNSAIGKIQDSLSSTASALGKLQDVVNQNAQALNTLVKQLSSNFGAISSVLNDILSRLDPPEAEVQIDRLITGRLQSLQTYVTQQLIRAAEIRASANLAATKMSECVLGQSKRVDFCGKGYHLMSFPQSAPHGVVFLHVTYVPAQEKNFTTAPAICHDGKAHFPREGVFVSNGTHWFVTQRNFYEPQIITTDNTFVSGNCDVVIGIVNNTVYDPLQPELDSFKEELDKYFKNHTSPDVDLGDISGINASVVNIQKEIDRLNEVAKNLNESLIDLQELGKYEQYIKGSGRENLYFQGGGGSGYIPEAPRDGQAYVRKDGEWVLLSTFLGHHHHHHHH

SEQ ID NO: 1981 - protein, 1281 aa, Artificial Sequence
  Description of Artificial Sequence: Synthetic polypeptide
MGILPSPGMPALLSLVSLLSVLLMGCVAETGTQCVNLTTRTQLPPAYTNSFTRGVYYPDKVFRSSVLHSTQDLFLPFFSNVTWFHAIHVSGTNGTKRFDNPVLPFNDGVYFASTEKSNIIRGWIFGTTLDSKTQSLLIVNNATNVVIKVCEFQFCNDPFLGVYYHKNNKSWMESEFRVYSSANNCTFEYVSQPFLMDLEGKQGNFKNLREFVFKNIDGYFKIYSKHTPINLVRDLPQGFSALEPLVDLPIGINITRFQTLLALHRSYLTPGDSSSGWTAGAAAYYVGYLQPRTFLLKYNENGTITDAVDCALDPLSETKCTLKSFTVEKGIYQTSNFRVQPTESIVRFPNITNLCPFGEVFNATRFASVYAWNRKRISNCVADYSVLYNSASFSTFKCYGVSPTKLNDLCFTNVYADSFVIRGDEVRQIAPGQTGKIADYNYKLPDDFTGCVIAWNSNNLDSKVGGNYNYLYRLFRKSNLKPFERDISTEIYQAGSTPCNGVEGFNCYFPLQSYGFQPTNGVGYQPYRVVVLSFELLHAPATVCGPKKSTNLVKNKCVNFNFNGLTGTGVLTESNKKFLPFQQFGRDIADTTDAVRDPQTLEILDITPCSFGGVSVITPGTNTSNQVAVLYQDVNCTEVPEAIHADQLTPTWRVYSTGSNVFQTRAGCLIGAEHVNNSYECDIPIGAGICASYQTQTNSPSGAGSVASQSIIAYTMSLGAENSVAYSNNSIAIPTNFTISVTTEILPVSMTKTSVDCTMYICGDSTECSNLLLQYGSFCTQLNRALTGIAVEQDKNTQEVFAQVKQIYKTPPIKDFGGFNFSQILPDPSKPSKRSFIEDLLFNKVTLADAGFIKQYGDCLGDIAARDLICAQKFNGLTVLPPLLTDEMIAQYTSALLAGTITSGWTFGAGAALQIPFAMQMAYRFNGIGVTQNVLYENQKLIANQFNSAIGKIQDSLSSTASALGKLQDVVNQNAQALNTLVKQLSSNFGAISSVLNDILSRLDPPEAEVQIDRLITGRLQSLQTYVTQQLIRAAEIRASANLAATKMSECVLGQSKRVDFCGKGYHLMSFPQSAPHGVVFLHVTYVPAQEKNFTTAPAICHDGKAHFPREGVFVSNGTHWFVTQRNFYEPQIITTDNTFVSGNCDVVIGIVNNTVYDPLQPELDSFKEELDKYFKNHTSPDVDLGDISGINASVVNIQKEIDRLNEVAKNLNESLIDLQELGKYEQYIKGSGRENLYFQGGGGSGYIPEAPRDGQAYVRKDGEWVLLSTFLGHHHHHHHH

SEQ ID NO: 1982 - protein, 1281 aa, Artificial Sequence
  Description of Artificial Sequence: Synthetic polypeptide
MGILPSPGMPALLSLVSLLSVLLMGCVAETGTQCVNLTTRTQLPPAYTNSFTRGVYYPDKVFRSSVLHSTQDLFLPFFSNVTWFHAIHVSGTNGTKRFDNPVLPFNDGVYFASTEKSNIIRGWIFGTTLDSKTQSLLIVNNATNVVIKVCEFQFCNDPFLGVYYHKNNKSWMESEFRVYSSANNCTFEYVSQPFLMDLEGKQGNFKNLREFVFKNIDGYFKIYSKHTPINLVRDLPQGFSALEPLVDLPIGINITRFQTLLALHRSYLTPGDSSSGWTAGAAAYYVGYLQPRTFLLKYNENGTITDAVDCALDPLSETKCTLKSFTVEKGIYQTSNFRVQPTESIVRFPNITNLCPFGEVFNATRFASVYAWNRKRISNCVADYSVLYNSASFSTFKCYGVSPTKLNDLCFTNVYADSFVIRGDEVRQIAPGQTGKIADYNYKLPDDFTGCVIAWNSNNLDSKVGGNYNYLYRLFRKSNLKPFERDISTEIYQAGSTPCNGVEGFNCYFPLQSYGFQPTNGVGYQPYRVVVLSFELLHAPATVCGPKKSTNLVKNKCVNFNFNGLTGTGVLTESNKKFLPFQQFGRDIADTTDAVRDPQTLEILDITPCSFGGVSVITPGTNTSNQVAVLYQDVNCTEVPVAIHADQLTPTWRVYSTGSNVFQTRAGCLIGAEHVNNSYECDIPIGAGICASYQTQTNSPSGAGSVASQSIIAYTMSLGAENSVAYSNNSIAIPTNFTISVTTEILPVSMTKTSVDCTMYICGDSPECSNLLLQYGSFCTQLNRALTGIAVEQDKNTQEVFAQVKQIYKTPPIKDFGGFNFSQILPDPSKPSKRSFIEDLLFNKVTLADAGFIKQYGDCLGDIAARDLICAQKFNGLTVLPPLLTDEMIAQYTSALLAGTITSGWTFGAGAALQIPFAMQMAYRFNGIGVTQNVLYENQKLIANQFNSAIGKIQDSLSSTASALGKLQDVVNQNAQALNTLVKQLSSNFGAISSVLNDILSRLDPPEAEVQIDRLITGRLQSLQTYVTQQLIRAAEIRASANLAATKMSECVLGQSKRVDFCGKGYHLMSFPQSAPHGVVFLHVTYVPAQEKNFTTAPAICHDGKAHFPREGVFVSNGTHWFVTQRNFYEPQIITTDNTFVSGNCDVVIGIVNNTVYDPLQPELDSFKEELDKYFKNHTSPDVDLGDISGINASVVNIQKEIDRLNEVAKNLNESLIDLQELGKYEQYIKGSGRENLYFQGGGGSGYIPEAPRDGQAYVRKDGEWVLLSTFLGHHHHHHHH

SEQ ID NO: 1983 - protein, 1281 aa, Artificial Sequence
  Description of Artificial Sequence: Synthetic polypeptide
MGILPSPGMPALLSLVSLLSVLLMGCVAETGTQCVNLTTRTQLPPAYTNSFTRGVYYPDKVFRSDVLHSTQDLFLPFFSNVTWFHAIHVSGTNGTKDFDNPVLPFNDGVYFASTEKSNIIRGWIFGTTLDSKTQSLLIVNNATNVVIKVCEFQFCENPFLGVYYHKNNKSWMEKEFRVYSSANNCTFEYVSQPFLMDLGGKQGNFKWLREFVFKNIDGYFKIYSKHTPINLVRDLPQGFSALEPLMDLPIGINITRFQTLLALHRSYLTPGDSSSGWTAGAAAYYVGYLQPRTFLLKYNENGTITDAVDCAYDPLSETKCTLKSFTVEKGIYQTSNFRVQPTESIVRFPNITNLCPFGEVFNATRFASVYAWNRKRISNCVADYSVLYNSASFSTFKCYGVSPTKLNDLCFTNVYADSFVIRGDEVRQIAPGQTGKIADYNYKLPDDFTGCVIAWNSNNLDSKVGGNYNYLYRLFRKSNLKPFERDISTEIYQAGSTPCNGVEGFNCYFPLQSYGFQPTNGVGYQPYRVVVLSFELLHAPATVCGPKKSTNLVKNKCVNFNFNGLTGTGVLTESNKKFLPFQQFGRDIADNTDAVRDPQTLEILDITPCSFGGVSVITPGTNTSNQVAVLYQDVNCTEVPNAIHADQLTPTWRVYSTGSNVFQTRAGCLIGAEHVNNSYECDIPIGAGICASYQTQTNSPSGAGSVASQSIIAYTMSLGAENSVAYSNNSIAIPTNFTISVTTEILPVSMTKTSVDCTMYICGDSTECSNLLLQYGSFCTQLNRALQGIAQEQDKNTQEVFAQVKQIYKTPPIKDFGGFNFSQILPDPSKPSKRSFIEDLLFNKVTLADAGFIKQYGDCLGDIAARDLICAQKFNGLTVLPPLLTDEMIAQYTSALLAGTITSGWTFGAGAALQIPFAMQMAYRFNGIGVTQNVLYENQKLIANQFNKAIGKIQDSLSSTASALGKLQDVVNQNAQALNTLVKQLSSNFGAISSVLNDILSRLDPPEAEVQIDRLITGRLQSLQTYVTQQLIRAAEIRASANLAATKMSECVLGQSKRVDFCGKGYHLMSFPQSAPHGVVFLHVTYVPAQEKNFTTAPAICHDGKAFFPREGVFVSNGTQWFVTQRNFYEPQIITTDNTFVSGNCDVVIGIVNNTVYDPLQPELDSFKEELDKYFKNHTSPDVDLGDISGINASVVNIQKEIDRLNEVAKNLNESLIDLQELGKYEQYIKGSGRENLYFQGGGGSGYIPEAPRDGQAYVRKDGEWVLLSTFLGHHHHHHHH

SEQ ID NO: 1984 - protein, 1281 aa, Artificial Sequence
  Description of Artificial Sequence: Synthetic polypeptide
MGILPSPGMPALLSLVSLLSVLLMGCVAETGTQCVNLTTRTQLPPAYTNSFTRGVYYPDKIFRSNVLHSTQDLFLPFFSNVTWFHALHVKGTNGTKRFDNPVLPFNDGVYFAAIEKSNIIRGWIFGTTLDSKTQSLLIVNNATNVVIRVCEFQFCENPFLGVYYHKNNKSWREEEFRWYSSANNCTFEYVSQPFLYDLNGKQGNFHHLREFVFKNIDGYFKIYSKWEPINLVRDLPQGFSPLEPLMDLPIGINITHFQTFLSLSRSYRTPGDSSSGWTAGAAAYYVGYLQPRTFLLKYDENGYITDAVDCSLDPLSETKCKLKSFTVEKGIYQTSNFRVQPTYEIVRFPNITNCCPFDEVFNAPRFASVYNWERYRISNCVADYSVLYNSASFSTFQCYGVSPTKLNDLCFTNVYADVFVIRGSEVRQIAPGQTGPIADYNYKLPDDFTGCVIAWNSNNLDSTVGGNYNYLYRLFRKSNMKPFERDISTEAYQAGCTPCNGVEGFNCYFPLQSYGFQPTNGVGYQPYRVVVLKFELLHAPATVCGPKDPTNLVKNKCVDYNFNGRTGTGVLTESNKKFLPFQQFGRDISDTTDAVRDPTTGEILCITPCSFGGVSVITPGTNTSNQVAVLYQDVNCTEVPEAIHSNQLRPTWRVYSTGSNVFQTRAGCLIGAEHVNNSYECDIPIGNGICASYQTQTNSPSGSGSVSSQSIIAYTMSLGAENPVPYSNNNIAIPTNFTISVQTEILPVSMPKVSVDCTMYICGDSTECLNLLSQYGSFCDQLERALNGIAREQDKNLLNVFAQVKQIYKTPPIKDFGGFNFSQILPDPSKPSKRSFIEDLLFNKVTLADLGFVKQYKDCLGDQAARDLICAQKFNGIMVLPPLLTDEMIAQYTASLLAGTITAGWTFGAGAALVIPFAMQMAYRFNGIGVQQNVLYENQKIIANQFNNAIGNIQDGLSTTASALSKLQDVVNQQAQALNELVKQLSSNFGAISSVINDIYNRLDKPEAQAQIDRLITGRLQSLQTYVTQQLIRATEIRASAQLAAEKMSECVKGQSNRYGFCGNGYHLMSFPQSAPHGVVFLHVTYVPTQFKNFTTAPGICHDGKAYFPREGVFVSNGTEWYITQRNFYEPRPITTDNTFVSGNCDVVIGIVNNTVYDPLQPELDSFKEELDKYFKNHTSPDVDLGDISGINASVVNIQKEIDRLNEVAKNLNESLIDLQELGKYEQYIKGSGRENLYFQGGGGSGYIPEAPRDGQAYVRKDGEWVLLSTFLGHHHHHHHH

SEQ ID NO: 1985 - protein, 1281 aa, Artificial Sequence
  Description of Artificial Sequence: Synthetic polypeptide
MGILPSPGMPALLSLVSLLSVLLMGCVAETGTQCVNLTTRTQLPPAYTNSFTRGVYYPDKVFRSSVLHSTQDLFLPFFSNVTWFHAIHVSGTNGTKRFDNPVLPFNDGVYFAATEKSNIIRGWIFGTTLDSKTQSLLIVNNATNVVIKVCEFQFCNDPFLGVYYHKNNKSWMESEFRVYSSANNCTFEYVSQPFLMDLEGKQGNFKNLREFVFKNIDGYFKIYSKHTPINLVRDLPQGFSALEPLVDLPIGINITRFQTLLALHRSYLTPGDSSSGWTAGAAAYFVGYLQPRTFLLKYNENGTITDAVDCALDPLSETKCTLKSFTVEKGIYQTSNFRVQPTESIVRFPNITNLCPFGEVFNATRFASVYAWNRKRISNCVADYSVLYNSASFSTFKCYGVSPTKLNDLCFTNVYADSFVIRGDEVRQIAPGQTGKIADYNYKLPDDFTGCVIAWNSNNLDSKVGGNYNYLYRLFRKSNLKPFERDISTEIYQAGSTPCNGVEGFNCYFPLQSYGFQPTNGVGYQPYRVVVLSFELLHAPATVCGPKKSTNLVKNKCVNFNFNGLTGTGVLTESNKKFLPFQQFGRDISDTTDAVRDPQTLEILDITPCSFGGVSVITPGTNTSNQVAVLYQDVNCTEVPVAIHADQLTPTWRVYSTGSNVFQTRAGCLIGAEHVNNSYECDIPIGAGICASYQTQTNSPSGAGSVASQSIIAYTMSLGAENSVAYSNNSIAIPTNFTISVTTEILPVSMTKTSVDCTMYICGDSTECSNLLLQYGSFCTQLNRALTGIAVEQDKNTQEVFAQVKQIYKTPPIKDFGGFNFSQILPDPSKPSKRSFIEDLLFNKVTLADAGFIKQYGDCLGDIAARDLICAQKFNGLTVLPPLLTDEMIAQYTSALVAGTITAGWTFGAGAALQIPFAMQMAYRFNGIGVTQNVLYENQKLIANQFNSAIGKIQDSLSSTASALGKLQDVVNQNAQALNTLVKQLSSNFGAISSVLNDILSRLDPPEAEVQIDRLITGRLQSLQTYVTQQLIRAAEIRASANLAATKMSECVLGQSKRVDFCGKGYHLMSFPQAAPHGVVFLHVTYVPAQEKNFTTAPAICHDGKAHFPREGVFVSNGTHWFVTQRNFYEPQIITTDNTFVSGNCDVVIGIVNNTVYDPLQPELDSFKEELDKYFKNHTSPDVDLGDISGINASVVNIQKEIDRLNEVAKNLNESLIDLQELGKYEQYIKGSGRENLYFQGGGGSGYIPEAPRDGQAYVRKDGEWVLLSTFLGHHHHHHHH

SEQ ID NO: 1986 - protein, 1281 aa, Artificial Sequence
  Description of Artificial Sequence: Synthetic polypeptide
MGILPSPGMPALLSLVSLLSVLLMGCVAETGTQCVNLTTRTQLPPAYTNSFTRGVYYPDKVFRSSVLHSTQDLFLPFFSNVTWFHAIHVSGTNGTKRFDNPVLPFNDGVYFASTEKSNIIRGWIFGTTLDSKTQSLLIVNNATNVVIKVCEFQFCNDPFLGVYYHKNNKSWMESEFRVYSSANNCTFEYVSQPFLMDLEGKQGNFKNLREFVFKNIDGYFKIYSKHTPINLVRDLPQGFSALEPLVDLPIGINITRFQTLLALHRSYLTPGDSSSGWTAGAAAYYVGYLQPRTFLLKYNENGTITDAVDCALDPLSETKCTLKSFTVEKGIYQTSNFRVQPTESIVRFPNITNLCPFGEVFNATRFASVYAWNRKRISNCVADYSVLYNSASFSTFKCYGVSPTKLNDLCFTNVYADSFVIRGDEVRQIAPGQTGKIADYNYKLPDDFTGCVIAWNSNNLDSKVGGNYNYLYRLFRKSNLKPFERDISTEIYQAGSTPCNGVEGFNCYFPLQSYGFQPTNGVGYQPYRVVVLSFELLHAPATVCGPKKSTNLVKNKCVNFNFNGLTGTGVLTESNKKFLPFQQFGRDIADTTDAVRDPQTLEILDITPCSFGGVSVITPGTNTSNQVAVLYQDVNCTEVPTAIHADQLTPTWRVYSTGSNVFQTRAGCLIGAEHVNNSYECDIPIGAGICASYQTQTNSPSGAGSVASQSIIAYTMSLGAENSVAYSNNSIAIPTNFTISVTTEILPVSMTKTSVDCTMYICGDSTECSNLLLQYGSFCTQLNRALTGIAVEQDKNTQEVFAQVKQIYKTPPIKDFGGFNFSQILPDPSKPSKRSFIEDLLFNKVTLADAGFIKQYGDCLGDIAARDLICAQKFNGLTVLPPLLTDEMIAQYTSALLAGTITSGWTFGAGAALQIPFAMQMAYRFNGIGVTQNVLYENQKLIANQFNSAIGKIQDSLSSTASALGKLQDVVNQNAQALNTLVKQLSSNFGAISSVLNDILSRLDPPEAEVQIDRLITGRLQSLQTYVTQQLIRAAEIRASANLAATKMSECVLGQSKRVDFCGKGYHLMSFPQSAPHGVVFLHVTYVPAQEKNFTTAPAICHDGKAHFPREGVFVSNGTHWFVTQRNFYEPQIITTDNTFVSGNCDVVIGIVNNTVYDPLQPELDSFKEELDKYFKNHTSPDVDLGDISGINASVVNIQKEIDRLNEVAKNLNESLIDLQELGKYEQYIKGSGRENLYFQGGGGSGYIPEAPRDGQAYVRKDGEWVLLSTFLGHHHHHHHH

SEQ ID NO: 1987 - protein, 1281 aa, Artificial Sequence
  Description of Artificial Sequence: Synthetic polypeptide
MGILPSPGMPALLSLVSLLSVLLMGCVAETGTQCVNLTTRTQLPPAYTNSFTRGVYYPDKVFRSSVLHSTQDLFLPFFSNVTWFHAIHVSGTNGTKRFDNPVLPFNDGVYFASTEKSNIIRGWIFGTTLDSKTQSLLIVNNATNVVIKVCEFQFCNDPFLGVYYHKNNKSWMESEFRVYSSANNCTFEYVSQPFLMDLEGKQGNFKNLREFVFKNIDGYFKIYSKHTPINLVRDLPQGFSALEPLVDLPIGINITRFQTLLALHRSYLTPGDSSSGWTAGAAAYYVGYLQPRTFLLKYNENGTITDAVDCNLDPLSETKCTLKSFTVEKGIYQTSNFRVQPTESIVRFPNITNLCPFGEVFNATRFASVYAWNRKRISNCVADYSVLYNSASFSTFKCYGVSPTKLNDLCFTNVYADSFVIRGDEVRQIAPGQTGKIADYNYKLPDDFTGCVIAWNSNNLDSKVGGNYNYLYRLFRKSNLKPFERDISTEIYQAGSTPCNGVEGFNCYFPLQSYGFQPTNGVGYQPYRVVVLSFELLHAPATVCGPKKSTNLVKNKCVNFNFNGLTGTGVLTESNKKFLPFQQFGRDIADTTDAVRDPQTLEILDITPCSFGGVSVITPGTNTSNQVAVLYQDVNCTEVPVAIHADQLTPTWRVYSTGSNVFQTRAGCLIGAEHVNNSYECDIPIGAGICASYQTQTNSPSGAGSVASQSIIAYTMSLGAENSVAYSNNSIAIPTNFTISVTTEILPVSMTKTSVDCTMYICGDSTECSNLLLQYGSFCTQLNRALTGIAVEQDKNTQEVFAQVKQIYKTPPIKDFGGFNFSQILPDPSKPSKRSFIEDLLFNKVTLADAGFIKQYGDCLGDIAARDLICAQKFNGLTVLPPLLTDEMIAQYTSALLAGTITSGWTFGAGAALQIPFAMQMAYRFNGIGVTQNVLYENQKLIANQFNSAIGKIQDSLSSTASALGKLQDVVNQNAQALNTLVKQLSSNFGAISSVLNDILSRLDPPEAEVQIDRLITGRLQSLQTYVTQQLIRAAEIRASANLAATKMSECVLGQSKRVDFCGKGYHLMSFPQSAPHGVVFLHVTYVPAQEKNFTTAPAICHDGKAHFPREGVFVSNGTHWFVTQRNFYEPQIITTDNTFVSGNCDVVIGIVNNTVYDPLQPELDSFKEELDKYFKNHTSPDVDLGDISGINASVVNIQKEIDRLNEVAKNLNESLIDLQELGKYEQYIKGSGRENLYFQGGGGSGYIPEAPRDGQAYVRKDGEWVLLSTFLGHHHHHHHH

SEQ ID NO: 1988 - protein, 1281 aa, Artificial Sequence
  Description of Artificial Sequence: Synthetic polypeptide
MGILPSPGMPALLSLVSLLSVLLMGCVAETGTQCVNLTTRTQLPPAYTNSFTRGVYYPDKVFRSSVLHSTQDLFLPFFSNVTWFHAIHVSGTNGTKRFDNPVLPFNDGVYFASTEKSNIIRGWIFGTTLDSKTQSLLIVNNATNVVIKVCEFQFCNDPFLGVYYHKNNKSWMESEFRVYSSANNCTFEYVSQPFLMDLEGKQGNFKNLREFVFKNIDGYFKIYSKHTPINLVRDLPQGFSALEPLVDLPIGINITRFQTLLALHRSYLTPGDSSSGWTAGAAAYYVGYLQPRTFLLKYNENGTITDAVDCALDPLSELKCTLKSFTVEKGIYQTSNFRVQPTESIVRFPNITNLCPFGEVFNATRFASVYAWNRKRISNCVADYSVLYNSASFSTFKCYGVSPTKLNDLCFTNVYADSFVIRGDEVRQIAPGQTGKIADYNYKLPDDFTGCVIAWNSNNLDSKVGGNYNYLYRLFRKSNLKPFERDISTEIYQAGSTPCNGVEGFNCYFPLQSYGFQPTNGVGYQPYRVVVLSFELLHAPATVCGPKKSTNLVKNKCVNFNFNGLTGTGVLTESNKKFLPFQQFGRDIADTTDAVRDPQTLEILDITPCSFGGVSVITPGTNTSNQVAVLYQDVNCTEVPVAIHADQLTPTWRVYSTGSNVFQTRAGCLIGAEHVNNSYECDIPIGAGICASYQTQTNSPSGAGSVASQSIIAYTMSLGAENSVAYSNNSIAIPTNFTISVTTEILPVSMTKTSVDCTMYICGDSTECSNLLLQYGSFCTQLNRALTGIAVEQDKNTQEVFAQVKQIYKTPPIKDFGGFNFSQILPDPSKPSKRSFIEDLLFNKVTLADAGFIKQYGDCLGDIAARDLICAQKFNGLTVLPPLLTDEMIAQYTSALLAGTITSGWTFGAGAALQIPFAMQMAYRFNGIGVTQNVLYENQKLIANQFNSAIGKIQDSLSSTASALGKLQDVVNQNAQALNTLVKQLSSNFGAISSVLNDILSRLDPPEAEVQIDRLITGRLQSLQTYVTQQLIRAAEIRASANLAATKMSECVLGQSKRVDFCGKGYHLMSFPQSAPHGVVFLHVTYVPAQEKNFTTAPAICHDGKAHFPREGVFVSNGTHWFVTQRNFYEPQIITTDNTFVSGNCDVVIGIVNNTVYDPLQPELDSFKEELDKYFKNHTSPDVDLGDISGINASVVNIQKEIDRLNEVAKNLNESLIDLQELGKYEQYIKGSGRENLYFQGGGGSGYIPEAPRDGQAYVRKDGEWVLLSTFLGHHHHHHHH

SEQ ID NO: 1989 - protein, 1281 aa, Artificial Sequence
  Description of Artificial Sequence: Synthetic polypeptide
MGILPSPGMPALLSLVSLLSVLLMGCVAETGTQCVNLTTRTQLPPAYTNSFTRGVYYPDKVFRSSVLHSTQDLFLPFFSNVTWFHAIHVSGTNGTKRFDNPVLPFNDGVYFASTEKSNIIRGWIFGTTLDSKTQSLLIVNNATNVVIKVCEFQFCADPFLGVYYHKNNKSWMESEFRVYSSANNCTFEYVSQPFLMDLEGKQGNFKNLREFVFKNIDGYFKIYSKHTPINLVRDLPQGFSALEPLVDLPIGINITRFQTLLALHRSYLTPGDSSSGWTAGAAAYYVGYLQPRTFLLKYNENGTITDAVDCALDPLSETKCTLKSFTVEKGIYQTSNFRVQPTESIVRFPNITNLCPFGEVFNATRFASVYAWNRKRISNCVADYSVLYNSASFSTFKCYGVSPTKLNDLCFTNVYADSFVIRGDEVRQIAPGQTGKIADYNYKLPDDFTGCVIAWNSNNLDSKVGGNYNYLYRLFRKSNLKPFERDISTEIYQAGSTPCNGVEGFNCYFPLQSYGFQPTNGVGYQPYRVVVLSFELLHAPATVCGPKKSTNLVKNKCVNFNFNGLTGTGVLTESNKKFLPFQQFGRDIADTTDAVRDPQTLEILDITPCSFGGVSVITPGTNTSNQVAVLYQDVNCTEVPVAIHADQLTPTWRVYSTGSNVFQTRAGCLIGAEHVNNSYECDIPIGAGICASYQTQTNSPSGAGSVASQSIIAYTMSLGAENSVAYSNNSIAIPTNFTISVTTEILPVSMTKTSVDCTMYICGDSTECSNLLLQYGSFCTQLNRALTGIAVEQDKNTQEVFAQVKQIYKTPPIKDFGGFNFSQILPDPSKPSKRSFIEDLLFNKVTLADAGFIKQYGDCLGDIAARDLICAQKFNGLTVLPPLLTDEMIAQYTSALLAGTITSGWTFGAGAALQIPFAMQMAYRFNGIGVTQNVLYENQKLIANQFNSAIGKIQDSLSSTASALGKLQDVVNQNAQALNTLVKQLSSNFGAISSVLNDILSRLDPPEAEVQIDRLITGRLQSLQTYVTQQLIRAAEIRASANLAATKMSECVLGQSKRVDFCGKGYHLMSFPQSAPHGVVFLHVTYVPAQEKNFTTAPAICHDGKAHFPREGVFVSNGTHWFVTQRNFYEPQIITTDNTFVSGNCDVVIGIVNNTVYDPLQPELDSFKEELDKYFKNHTSPDVDLGDISGINASVVNIQKEIDRLNEVAKNLNESLIDLQELGKYEQYIKGSGRENLYFQGGGGSGYIPEAPRDGQAYVRKDGEWVLLSTFLGHHHHHHHH

SEQ ID NO: 1990 - protein, 1281 aa, Artificial Sequence
  Description of Artificial Sequence: Synthetic polypeptide
MGILPSPGMPALLSLVSLLSVLLMGCVAETGTQCVNLTTRTQLPPAYTNSFTRGVYYPDKVFRSSVLHSTQDLFLPFFSNVTWFHAIHVSGTNGTKRFDNPVLPFNDGVYFASTEKSNIIRGWIFGTTLDSKTQSLLIVNNATNVVIKVCEFQFCNDPFLGVYYHKNNKSWMESEFRVYSSANNCTFEYVSQPFSMDLEGKQGNFKNLREFVFKNIDGYFKIYSKHTPINLVRDLPQGFSALEPLVDLPIGINITRFQTLLALHRSYLTPGDSSSGWTAGAAAYYVGYLQPRTFLLKYNENGTITDAVDCALDPLSETKCTLKSFTVEKGIYQTSNFRVQPTESIVRFPNITNLCPFGEVFNATRFASVYAWNRKRISNCVADYSVLYNSASFSTFKCYGVSPTKLNDLCFTNVYADSFVIRGDEVRQIAPGQTGKIADYNYKLPDDFTGCVIAWNSNNLDSKVGGNYNYLYRLFRKSNLKPFERDISTEIYQAGSTPCNGVEGFNCYFPLQSYGFQPTNGVGYQPYRVVVLSFELLHAPATVCGPKKSTNLVKNKCVNFNFNGLTGTGVLTESNKKFLPFQQFGRDIADTTDAVRDPQTLEILDITPCSFGGVSVITPGTNTSNQVAVLYQDVNCTEVPVAIHADQLTPTWRVYSTGSNVFQTRAGCLIGAEHVNNSYECDIPIGAGICASYQTQTNSPSGAGSVASQSIIAYTMSLGAENSVAYSNNSIAIPTNFTISVTTEILPVSMTKTSVDCTMYICGDSTECSNLLLQYGSFCTQLNRALTGIAVEQDKNTQEVFAQVKQIYKTPPIKDFGGFNFSQILPDPSKPSKRSFIEDLLFNKVTLADAGFIKQYGDCLGDIAARDLICAQKFNGLTVLPPLLTDEMIAQYTSALLAGTITSGWTFGAGAALQIPFAMQMAYRFNGIGVTQNVLYENQKLIANQFNSAIGKIQDSLSSTASALGKLQDVVNQNAQALNTLVKQLSSNFGAISSVLNDILSRLDPPEAEVQIDRLITGRLQSLQTYVTQQLIRAAEIRASANLAATKMSECVLGQSKRVDFCGKGYHLMSFPQSAPHGVVFLHVTYVPAQEKNFTTAPAICHDGKAHFPREGVFVSNGTHWFVTQRNFYEPQIITTDNTFVSGNCDVVIGIVNNTVYDPLQPELDSFKEELDKYFKNHTSPDVDLGDISGINASVVNIQKEIDRLNEVAKNLNESLIDLQELGKYEQYIKGSGRENLYFQGGGGSGYIPEAPRDGQAYVRKDGEWVLLSTFLGHHHHHHHH

SEQ ID NO: 1991 - protein, 1281 aa, Artificial Sequence
  Description of Artificial Sequence: Synthetic polypeptide
MGILPSPGMPALLSLVSLLSVLLMGCVAETGTQCVNLTTRTQLPPAYTNSFTRGVYYPDKVFRSSVLHSTQDLFLPFFSNVTWFHAIHVSGTNGTKRFDNPVLPFNDGVYFASTEKSNIIRGWIFGTTLDSKTQSLLIVNNATNVVIKVCEFQFCNDPFLSVYYHKNNKSWMESEFRVYSSANNCTFEYVSQPFLMDLEGKQGNFKNLREFVFKNIDGYFKIYSKHTPINLVRDLPQGFSALEPLVDLPIGINITRFQTLLALHRSYLTPGDSSSGWTAGAAAYYVGYLQPRTFLLKYNENGTITDAVDCALDPLSETKCTLKSFTVEKGIYQTSNFRVQPTESIVRFPNITNLCPFGEVFNATRFASVYAWNRKRISNCVADYSVLYNSASFSTFKCYGVSPTKLNDLCFTNVYADSFVIRGDEVRQIAPGQTGKIADYNYKLPDDFTGCVIAWNSNNLDSKVGGNYNYLYRLFRKSNLKPFERDISTEIYQAGSTPCNGVEGFNCYFPLQSYGFQPTNGVGYQPYRVVVLSFELLHAPATVCGPKKSTNLVKNKCVNFNFNGLTGTGVLTESNKKFLPFQQFGRDIADTTDAVRDPQTLEILDITPCSFGGVSVITPGTNTSNQVAVLYQDVNCTEVPVAIHADQLTPTWRVYSTGSNVFQTRAGCLIGAEHVNNSYECDIPIGAGICASYQTQTNSPSGAGSVASQSIIAYTMSLGAENSVAYSNNSIAIPTNFTISVTTEILPVSMTKTSVDCTMYICGDSTECSNLLLQYGSFCTQLNRALTGIAVEQDKNTQEVFAQVKQIYKTPPIKDFGGFNFSQILPDPSKPSKRSFIEDLLFNKVTLADAGFIKQYGDCLGDIAARDLICAQKFNGLTVLPPLLTDEMIAQYTSALLAGTITSGWTFGAGAALQIPFAMQMAYRFNGIGVTQNVLYENQKLIANQFNSAIGKIQDSLSSTASALGKLQDVVNQNAQALNTLVKQLSSNFGAISSVLNDILSRLDPPEAEVQIDRLITGRLQSLQTYVTQQLIRAAEIRASANLAATKMSECVLGQSKRVDFCGKGYHLMSFPQSAPHGVVFLHVTYVPAQEKNFTTAPAICHDGKAHFPREGVFVSNGTHWFVTQRNFYEPQIITTDNTFVSGNCDVVIGIVNNTVYDPLQPELDSFKEELDKYFKNHTSPDVDLGDISGINASVVNIQKEIDRLNEVAKNLNESLIDLQELGKYEQYIKGSGRENLYFQGGGGSGYIPEAPRDGQAYVRKDGEWVLLSTFLGHHHHHHHH

SEQ ID NO: 1992 - protein, 1281 aa, Artificial Sequence
  Description of Artificial Sequence: Synthetic polypeptide
MGILPSPGMPALLSLVSLLSVLLMGCVAETGTQCVNLTTRTQLPPAYTNSFTRGVYYPDKIFRSNVLHSTQDLFLPFFSNVTWFHAIHVKGTNGTKRFDNPVLPFNDGVYFAAIEKSNIIRGWIFGTTLDSKTQSLLIVNNATNVVIRVCEFQFCENPFLGVYYHKNNKSWREEEWRWYSSANNCTFEYVSQPFLYDLNGKQGNFHHLREFVFKNIDGYFKIYSKWEPINLVRDLPQGFSPLEPLMDLPIGINITHFQTFLSLSRSYRTPGDSSSGWTAGAAAYYVGYLQPRTFLLKYDENGYITDAVDCSLDPLSETKCKLKSFTVEKGIYQTSNFRVQPTYEIVRFPNITNCCPFDEVFNAPRFASVYNWNRQRISNCVADYSVLYNSASFSTFQCYGVSPTKLNDLCFTNVYADIFVIRGSEVRQIAPGQTGPIADYNYKLPDDFTGCVIAWNSNNLDSTVGGNYNYLYRLFRKSNMKPFERDISTEAYQAGCTPCNGVEGFNCYFPLQSYGFQPTNGVGYQPYRVVVLKFELLHAPATVCGPKDPTNLVKNKCVDYNFNGRTGTGVLTESNKKFLPFQQFGRDISDTLDAVRDPTTGEILCITPCSFGGVSVITPGTNTSNQVAVLYQDVNCTEVPEAIHSNQLRPTWRVYSTGSNVFQTRAGCLIGAEHVNNSYECDIPIGNGICASYQTQTNSPSGSGSVSSQSIIAYTMSLGAENPVPYSNNNIAIPTNFTISVQTEILPVSMPKVSVDCTMYICGDSTECLNLLSQYGSFCSQLERALNGIAREQDKNLLNVFAQVKQIYKTPPIKDFGGFNFSQILPDPSKPSKRSFIEDLLFNKVTLADLGFVKQYKDCLGDQAARDLICAQKFNGIMVLPPLLTDEMIAQYTASLLAGTITAGWTFGAGAALVIPFAMQMAYRFNGIGVQQNVLYENQKIIANQFNNAIGNIQDGLSTTASALSKLQDVVNQQAQALNELVKQLSSNFGAISSVINDIYNRLDKPEAQAQIDRLITGRLQSLQTYVTQQLIRATEIRASAQLAAEKMSECVKGQSNRYGFCGNGYHLMSFPQSAPHGVVFLHVTYVPTQFKNFTTAPGICHDGKAYFPREGVFVSNGTSWYITQRNFYEPRPITTDNTFVSGNCDVVIGIVNNTVYDPLQPELDSFKEELDKYFKNHTSPDVDLGDISGINASVVNIQKEIDRLNEVAKNLNESLIDLQELGKYEQYIKGSGRENLYFQGGGGSGYIPEAPRDGQAYVRKDGEWVLLSTFLGHHHHHHHH

SEQ ID NO: 1993 - protein, 1281 aa, Artificial Sequence
  Description of Artificial Sequence: Synthetic polypeptide
MGILPSPGMPALLSLVSLLSVLLMGCVAETGTQCVNLTTRTQLPPAYTNSTTRGVYYPDKVFRSSVLHSTQDLFLPFFSNVTWFHAIHVSGTNGTKRFDNPVLPFNDGVYFASTEKSNIIRGWIFGTTLDSKTQSLLIVNNATNVVIKVCEFQFCNDPFLGVYYHKNNKSWMESEFRVYSSANNCTFEYVSQPFLMDLEGKQGNFKNLREFVFKNIDGYFKIYSKHTPINLVRDLPQGFSALEPLVDLPIGINITRFQTLLALHRSYLTPGDSSSGWTAGAAAYYVGYLQPRTFLLKYNENGTITDAVDCALDPLSETKCTLKSFTVEKGIYQTSNFRVQPTESIVRFPNITNLCPFGEVFNATRFASVYAWNRKRISNCVADYSVLYNSASFSTFKCYGVSPTKLNDLCFTNVYADSFVIRGDEVRQIAPGQTGKIADYNYKLPDDFTGCVIAWNSNNLDSKVGGNYNYLYRLFRKSNLKPFERDISTEIYQAGSTPCNGVEGFNCYFPLQSYGFQPTNGVGYQPYRVVVLSFELLHAPATVCGPKKSTNLVKNKCVNFNFNGLTGTGVLTESNKKFLPFQQFGRDIADTTDAVRDPQTLEILDITPCSFGGVSVITPGTNTSNQVAVLYQDVNCTEVPVAIHADQLTPTWRVYSTGSNVFQTRAGCLIGAEHVNNSYECDIPIGAGICASYQTQTNSPSGAGSVASQSIIAYTMSLGAENSVAYSNNSIAIPTNFTISVTTEILPVSMTKTSVDCTMYICGDSTECSNLLLQYGSFCTQLNRALTGIAVEQDKNTQEVFAQVKQIYKTPPIKDFGGFNFSQILPDPSKPSKRSFIEDLLFNKVTLADAGFIKQYGDCLGDIAARDLICAQKFNGLTVLPPLLTDEMIAQYTSALLAGTITSGWTFGAGAALQIPFAMQMAYRFNGIGVTQNVLYENQKLIANQFNSAIGKIQDSLSSTASALGKLQDVVNQNAQALNTLVKQLSSNFGAISSVLNDILSRLDPPEAEVQIDRLITGRLQSLQTYVTQQLIRAAEIRASANLAATKMSECVLGQSKRVDFCGKGYHLMSFPQSAPHGVVFLHVTYVPAQEKNFTTAPAICHDGKAHFPREGVFVSNGTHWFVTQRNFYEPQIITTDNTFVSGNCDVVIGIVNNTVYDPLQPELDSFKEELDKYFKNHTSPDVDLGDISGINASVVNIQKEIDRLNEVAKNLNESLIDLQELGKYEQYIKGSGRENLYFQGGGGSGYIPEAPRDGQAYVRKDGEWVLLSTFLGHHHHHHHH

SEQ ID NO: 1994 - protein, 1281 aa, Artificial Sequence
  Description of Artificial Sequence: Synthetic polypeptide
MGILPSPGMPALLSLVSLLSVLLMGCVAETGTQCVNLTTRTQLPPAYTNSFTRGVYYPDKVFRSSVLHSTQDLFLPFFSNVTWFHAIHVSGTNGTKRFDNPVLPFNDGVYFASTEKSNIIRGWIFGTTLDSKTQSLLIVNNATNVVIKVCEFQFCNDPFLGVYYHKNNKSWMESEFRVYSSANNCTFEYVSQPFLMDLEGKQGNFKNLREFVFKNIDGYFKIYSKHTPINLVRDLPQGFSALEPLVDLPIGINITRFQTLLALHRSYLTPGDSSSGWTAGAAAYYVGYLQPRTFLLKYNENGTITDAVDCALDPLSETKCTLKSFTVEKGIYQTSNFRVQPTESIVRFPNITNLCPFGEVFNATRFASVYAWNRKRISNCVADYSVLYNSASFSTFKCYGVSPTKLNDLCFTNVYADSFVIRGDEVRQIAPGQTGKIADYNYKLPDDFTGCVIAWNSNNLDSKVGGNYNYLYRLFRKSNLKPFERDISTEIYQAGSTPCNGVEGFNCYFPLQSYGFQPTNGVGYQPYRVVVLSFELLHAPATVCGPKKSTNLVKNKCVNFNFNGLTGTGVLTESNKKFLPFQQFGRDIADTTDAVRDPQTLEILDITPCSFGGVSVITPGTNTSNQVAVLYQDVNCTEVPVAIHSDQLTPTWRVYSTGSNVFQTRAGCLIGAEHVNNSYECDIPIGAGICASYQTQTNSPSGAGSVASQSIIAYTMSLGAENSVAYSNNSIAIPTNFTISVTTEILPVSMTKTSVDCTMYICGDSTECSNLLLQYGSFCTQLNRALTGIAVEQDKNTQEVFAQVKQIYKTPPIKDFGGFNFSQILPDPSKPSKRSFIEDLLFNKVTLADAGFIKQYGDCLGDIAARDLICAQKFNGLTVLPPLLTDEMIAQYTSALLAGTITSGWTFGAGAALQIPFAMQMAYRFNGIGVTQNVLYENQKLIANQFNSAIGKIQDSLSSTASALGKLQDVVNQNAQALNTLVKQLSSNFGAISSVLNDILSRLDPPEAEVQIDRLITGRLQSLQTYVTQQLIRAAEIRASANLAATKMSECVLGQSKRVDFCGKGYHLMSFPQSAPHGVVFLHVTYVPAQEKNFTTAPAICHDGKAHFPREGVFVSNGTHWFVTQRNFYEPQIITTDNTFVSGNCDVVIGIVNNTVYDPLQPELDSFKEELDKYFKNHTSPDVDLGDISGINASVVNIQKEIDRLNEVAKNLNESLIDLQELGKYEQYIKGSGRENLYFQGGGGSGYIPEAPRDGQAYVRKDGEWVLLSTFLGHHHHHHHH

SEQ ID NO: 1995 - protein, 1281 aa, Artificial Sequence
  Description of Artificial Sequence: Synthetic polypeptide
MGILPSPGMPALLSLVSLLSVLLMGCVAETGTQCVNLTTRTQLPPAYTNSFTRGVYYPDKVFRSSVLHSTQDLFLPFFSNVTWFHAIHVSGTNGTKRFDNPVLPFNDGVYFASTEKSNIIRGWIFGTTLDSKTQSLLIVNNATNVVIKVCEFQFCNDPFLGVYYHKNNKSWMESEFRVYSSANNCTFEYVSQPFLMDLEGKQGNFKNLREFVFKNIDGYFKIYSKHTPINLVRDLPQGFSALEPLVDLPIGINITRFQTLLALHRSYLTPGDSSSGWTAGAAAYYVGYLQPRTFLLKYNENGTITDAVDCALDPLSETKCTLKSFTVEKGIYQTSNFRVQPTESIVRFPNITNLCPFGEVFNATRFASVYAWNRKRISNCVADYSVLYNSASFSTFKCYGVSPTKLNDLCFTNVYADSFVIRGDEVRQIAPGQTGKIADYNYKLPDDFTGCVIAWNSNNLDSKVGGNYNYLYRLFRKSNLKPFERDISTEIYQAGSTPCNGVEGFNCYFPLQSYGFQPTNGVGYQPYRVVVLSFELLHAPATVCGPKKSTNLVKNKCVNFNFNGLTGTGVLTESNKKFLPFQQFGRDIADTTDAVRDPQTLEILDITPCSFGGVSVITPGTNTSNQVAVLYQDVNCTEVPVAIHADQLTPTWRVYSTGSNVFQTRAGCLIGAEHVNNSYECDIPIGAGICASYQTQTNSPSGAGSVASQSIIAYTMSLGAENSVAYSNNSIAIPTNFTISVTTEILPVSMTKTSVDCTMYICGDSTECSNLLLQYGSFCTQLNRALTGIAVEQDKNTQEVFAQVKQIYKTPPIKDFGGFNFSQILPDPSKPSKRSFIEDLLFNKVTLADAGFIKQYGDCLGDIAARDLICAQKFNGLTVLPPLLTDEMIAQYTSALLAGTITSGWTFGAGAALQIPFAMQMAYRFNGIGVTQNVLYENQKLIANQFNSAIGKIQDSLSSTASALGKLQDVVNQNAQALNTLVKQLSSNFGAISSVLNDILSRLDPPEAEVQIDRLITGRLQSLQTYVTQQLIRAAEIRASANLAATKMSECVLGQSKRVDFCGKGYHLMSFPQSAPHGIVFLHVTYVPAQEKNFTTAPAICHDGKAHFPREGVFVSNGTHWFVTQRNFYEPQIITTDNTFVSGNCDVVIGIVNNTVYDPLQPELDSFKEELDKYFKNHTSPDVDLGDISGINASVVNIQKEIDRLNEVAKNLNESLIDLQELGKYEQYIKGSGRENLYFQGGGGSGYIPEAPRDGQAYVRKDGEWVLLSTFLGHHHHHHHH

SEQ ID NO: 1996 - protein, 1281 aa, Artificial Sequence
  Description of Artificial Sequence: Synthetic polypeptide
MGILPSPGMPALLSLVSLLSVLLMGCVAETGTQCVNLTTRTQLPPAYTNSFTRGVYYPDKVFRSSVLHLTQDLFLPFFSNVTWFHAIHVSGTNGTKRFDNPVLPFNDGVYFASTEKSNIIRGWIFGTTLDSKTQSLLIVNNATNVVIKVCEFQFCNDPFLGVYYHKNNKSWMESEFRVYSSANNCTFEYVSQPFLMDLEGKQGNFKNLREFVFKNIDGYFKIYSKHTPINLVRDLPQGFSALEPLVDLPIGINITRFQTLLALHRSYLTPGDSSSGWTAGAAAYYVGYLQPRTFLLKYNENGTITDAVDCALDPLSETKCTLKSFTVEKGIYQTSNFRVQPTESIVRFPNITNLCPFGEVFNATRFASVYAWNRKRISNCVADYSVLYNSASFSTFKCYGVSPTKLNDLCFTNVYADSFVIRGDEVRQIAPGQTGKIADYNYKLPDDFTGCVIAWNSNNLDSKVGGNYNYLYRLFRKSNLKPFERDISTEIYQAGSTPCNGVEGFNCYFPLQSYGFQPTNGVGYQPYRVVVLSFELLHAPATVCGPKKSTNLVKNKCVNFNFNGLTGTGVLTESNKKFLPFQQFGRDIADTTDAVRDPQTLEILDITPCSFGGVSVITPGTNTSNQVAVLYQDVNCTEVPVAIHADQLTPTWRVYSTGSNVFQTRAGCLIGAEHVNNSYECDIPIGAGICASYQTQTNSPSGAGSVASQSIIAYTMSLGAENSVAYSNNSIAIPTNFTISVTTEILPVSMTKTSVDCTMYICGDSTECSNLLLQYGSFCTQLNRALTGIAVEQDKNTQEVFAQVKQIYKTPPIKDFGGFNFSQILPDPSKPSKRSFIEDLLFNKVTLADAGFIKQYGDCLGDIAARDLICAQKFNGLTVLPPLLTDEMIAQYTSALLAGTITSGWTFGAGAALQIPFAMQMAYRFNGIGVTQNVLYENQKLIANQFNSAIGKIQDSLSSTASALGKLQDVVNQNAQALNTLVKQLSSNFGAISSVLNDILSRLDPPEAEVQIDRLITGRLQSLQTYVTQQLIRAAEIRASANLAATKMSECVLGQSKRVDFCGKGYHLMSFPQSAPHGVVFLHVTYVPAQEKNFTTAPAICHDGKAHFPREGVFVSNGTHWFVTQRNFYEPQIITTDNTFVSGNCDVVIGIVNNTVYDPLQPELDSFKEELDKYFKNHTSPDVDLGDISGINASVVNIQKEIDRLNEVAKNLNESLIDLQELGKYEQYIKGSGRENLYFQGGGGSGYIPEAPRDGQAYVRKDGEWVLLSTFLGHHHHHHHH

SEQ ID NO: 1997 - protein, 1281 aa, Artificial Sequence
  Description of Artificial Sequence: Synthetic polypeptide
MGILPSPGMPALLSLVSLLSVLLMGCVAETGTQCVNLTTRTQLPPAYTNSFTRGVYYPDKVFRSSVLHSTQDLFLPFFSNVTWFHAIHVSGTNGTKRFDNPVLPFNDGVYFASTEKSNIIRGWIFGTTLDSKTQSLLIVNNATNVVIKVCEFQFCNDPFLGVYYHKNNKSWMESEFRVYSSANNCTFEYVSQPFLMDLEGKQGNFKNLREFVFKNIDGYFKIYSKHTPINLVRDLPQGFSALEPLVDLPIGINITRFQTLLALHRSYLTPGDSSSGWTAGAAAYYVGYLQPRTFLLKYNENGTITDAVDCALDPLSETKCTLKSFTVEKGIYQTSNFRVQPTESIVRFPNITNLCPFGEVFNATRFASVYAWNRKRISNCVADYSVLYNSASFSTFKCYGVSPTKLNDLCFTNVYADSFVIRGDEVRQIAPGQTGKIADYNYKLPDDFTGCVIAWNSNNLDSKVGGNYNYLYRLFRKSNLKPFERDISTEIYQAGSTPCNGVEGFNCYFPLQSYGFQPTNGVGYQPYRVVVLSFELLHAPATVCGPKKSTNLVKNKCVNFNFNGLTGTGVLTESNKKFLPFQQFGRDIADTTDAVRDPQTLEILDITPCSFGGVSVITPGTNTSNQVAVLYQDVNCTEVPVAIHADQLTPTWRVYSTGSNVFQTRAGCLIGAEHVNNSYECDIPIGAGICASYQTQTNSPSGAGSVASQSIIAYTMSLGAENSVAYSNNSIAIPTNFTISVTTEILPVSMTKTSVDCTMYICGDSTECSNLLLQYGSFCTQLNRALTGIAKEQDKNTQEVFAQVKQIYKTPPIKDFGGFNFSQILPDPSKPSKRSFIEDLLFNKVTLADAGFIKQYGDCLGDIAARDLICAQKFNGLTVLPPLLTDEMIAQYTSALLAGTITSGWTFGAGAALQIPFAMQMAYRFNGIGVTQNVLYENQKLIANQFNSAIGKIQDSLSSTASALGKLQDVVNQNAQALNTLVKQLSSNFGAISSVLNDILSRLDPPEAEVQIDRLITGRLQSLQTYVTQQLIRAAEIRASANLAATKMSECVLGQSKRVDFCGKGYHLMSFPQSAPHGVVFLHVTYVPAQEKNFTTAPAICHDGKAHFPREGVFVSNGTHWFVTQRNFYEPQIITTDNTFVSGNCDVVIGIVNNTVYDPLQPELDSFKEELDKYFKNHTSPDVDLGDISGINASVVNIQKEIDRLNEVAKNLNESLIDLQELGKYEQYIKGSGRENLYFQGGGGSGYIPEAPRDGQAYVRKDGEWVLLSTFLGHHHHHHHH

SEQ ID NO: 1998 - protein, 1281 aa, Artificial Sequence
  Description of Artificial Sequence: Synthetic polypeptide
MGILPSPGMPALLSLVSLLSVLLMGCVAETGTQCVNLTTRTQLPPAYTNSFTRGVYYPDKVFRSSVLHSTQDLFLPFFSNVTWFHAIHVSGTNGTKDFDNPVLPFNDGVYFASTEKSNIIRGWIFGTTLDSKTQSLLIVNNATNVVIKVCEFQFCNDPFLGVYYHKNNKSWMESEFRVYSSANNCTFEYVSQPFLMDLEGKQGNFKNLREFVFKNIDGYFKIYSKHTPINLVRDLPQGFSALEPLVDLPIGINITRFQTLLALHRSYLTPGDSSSGWTAGAAAYYVGYLQPRTFLLKYNENGTITDAVDCALDPLSETKCTLKSFTVEKGIYQTSNFRVQPTESIVRFPNITNLCPFGEVFNATRFASVYAWNRKRISNCVADYSVLYNSASFSTFKCYGVSPTKLNDLCFTNVYADSFVIRGDEVRQIAPGQTGKIADYNYKLPDDFTGCVIAWNSNNLDSKVGGNYNYLYRLFRKSNLKPFERDISTEIYQAGSTPCNGVEGFNCYFPLQSYGFQPTNGVGYQPYRVVVLSFELLHAPATVCGPKKSTNLVKNKCVNFNFNGLTGTGVLTESNKKFLPFQQFGRDIADTTDAVRDPQTLEILDITPCSFGGVSVITPGTNTSNQVAVLYQDVNCTEVPVAIHADQLTPTWRVYSTGSNVFQTRAGCLIGAEHVNNSYECDIPIGAGICASYQTQTNSPSGAGSVASQSIIAYTMSLGAENSVAYSNNSIAIPTNFTISVTTEILPVSMTKTSVDCTMYICGDSTECSNLLLQYGSFCTQLNRALTGIAVEQDKNTQEVFAQVKQIYKTPPIKDFGGFNFSQILPDPSKPSKRSFIEDLLFNKVTLADAGFIKQYGDCLGDIAARDLICAQKFNGLTVLPPLLTDEMIAQYTSALLAGTITSGWTFGAGAALQIPFAMQMAYRFNGIGVTQNVLYENQKLIANQFNSAIGKIQDSLSSTASALGKLQDVVNQNAQALNTLVKQLSSNFGAISSVLNDILSRLDPPEAEVQIDRLITGRLQSLQTYVTQQLIRAAEIRASANLAATKMSECVLGQSKRVDFCGKGYHLMSFPQSAPHGVVFLHVTYVPAQEKNFTTAPAICHDGKAHFPREGVFVSNGTHWFVTQRNFYEPQIITTDNTFVSGNCDVVIGIVNNTVYDPLQPELDSFKEELDKYFKNHTSPDVDLGDISGINASVVNIQKEIDRLNEVAKNLNESLIDLQELGKYEQYIKGSGRENLYFQGGGGSGYIPEAPRDGQAYVRKDGEWVLLSTFLGHHHHHHHH

SEQ ID NO: 1999 - protein, 1281 aa, Artificial Sequence
  Description of Artificial Sequence: Synthetic polypeptide
MGILPSPGMPALLSLVSLLSVLLMGCVAETGTQCVNLTTRTQLPPAYTNSFTRGVYYPDKVFRSSVLHSTQDLFLPFFSNVTWFHAIHVSGTNGTKRFDNPVLPFNDGVYFASTEKSNIIRGWIFGTTLDSKTQSLLIVNNATNVVIKVCEFQFCNDPFLGVYYHKNNKSWRESEFRVYSSANNCTFEYVSQPFLMDLEGKQGNFKNLREFVFKNIDGYFKIYSKHTPINLVRDLPQGFSALEPLVDLPIGINITRFQTLLALHRSYLTPGDSSSGWTAGAAAYYVGYLQPRTFLLKYNENGTITDAVDCALDPLSETKCTLKSFTVEKGIYQTSNFRVQPTESIVRFPNITNLCPFGEVFNATRFASVYAWNRKRISNCVADYSVLYNSASFSTFKCYGVSPTKLNDLCFTNVYADSFVIRGDEVRQIAPGQTGKIADYNYKLPDDFTGCVIAWNSNNLDSKVGGNYNYLYRLFRKSNLKPFERDISTEIYQAGSTPCNGVEGFNCYFPLQSYGFQPTNGVGYQPYRVVVLSFELLHAPATVCGPKKSTNLVKNKCVNFNFNGLTGTGVLTESNKKFLPFQQFGRDIADTTDAVRDPQTLEILDITPCSFGGVSVITPGTNTSNQVAVLYQDVNCTEVPVAIHADQLTPTWRVYSTGSNVFQTRAGCLIGAEHVNNSYECDIPIGAGICASYQTQTNSPSGAGSVASQSIIAYTMSLGAENSVAYSNNSIAIPTNFTISVTTEILPVSMTKTSVDCTMYICGDSTECSNLLLQYGSFCTQLNRALTGIAVEQDKNTQEVFAQVKQIYKTPPIKDFGGFNFSQILPDPSKPSKRSFIEDLLFNKVTLADAGFIKQYGDCLGDIAARDLICAQKFNGLTVLPPLLTDEMIAQYTSALLAGTITSGWTFGAGAALQIPFAMQMAYRFNGIGVTQNVLYENQKLIANQFNSAIGKIQDSLSSTASALGKLQDVVNQNAQALNTLVKQLSSNFGAISSVLNDILSRLDPPEAEVQIDRLITGRLQSLQTYVTQQLIRAAEIRASANLAATKMSECVLGQSKRVDFCGKGYHLMSFPQSAPHGVVFLHVTYVPAQEKNFTTAPAICHDGKAHFPREGVFVSNGTHWFVTQRNFYEPQIITTDNTFVSGNCDVVIGIVNNTVYDPLQPELDSFKEELDKYFKNHTSPDVDLGDISGINASVVNIQKEIDRLNEVAKNLNESLIDLQELGKYEQYIKGSGRENLYFQGGGGSGYIPEAPRDGQAYVRKDGEWVLLSTFLGHHHHHHHH

SEQ ID NO: 2000 - protein, 1281 aa, Artificial Sequence
  Description of Artificial Sequence: Synthetic polypeptide
MGILPSPGMPALLSLVSLLSVLLMGCVAETGTQCVNLTTRTQLPPAYTNSFTRGVYYPDKVFRSSVLHSTQDLFLPFFSNVTWFHAIHVSGTNGTKRFDNPVLPFNDGVYFASTEKSNIIRGWIFGTTLDSKTQSLLIVNNATNVVIKVCEFQFCNDPFLGVYYHKNNKSWMESEFRVYSSANNCTFEYVSQPFLMDLEGKQGNFKNLREFVFKNIDGYFKIYSKHTPINLVRDLPQGFSALEPLVDLPIGINITRFQTLLALHRSYLTPGDSSSGWTAGAAAYYVGYLQPTTFLLKYNENGTITDAVDCALDPLSETKCTLKSFTVEKGIYQTSNFRVQPTESIVRFPNITNLCPFGEVFNATRFASVYAWNRKRISNCVADYSVLYNSASFSTFKCYGVSPTKLNDLCFTNVYADSFVIRGDEVRQIAPGQTGKIADYNYKLPDDFTGCVIAWNSNNLDSKVGGNYNYLYRLFRKSNLKPFERDISTEIYQAGSTPCNGVEGFNCYFPLQSYGFQPTNGVGYQPYRVVVLSFELLHAPATVCGPKKSTNLVKNKCVNFNFNGLTGTGVLTESNKKFLPFQQFGRDIADTTDAVRDPQTLEILDITPCSFGGVSVITPGTNTSNQVAVLYQDVNCTEVPVAIHADQLTPTWRVYSTGSNVFQTRAGCLIGAEHVNNSYECDIPIGAGICASYQTQTNSPSGAGSVASQSIIAYTMSLGAENSVAYSNNSIAIPTNFTISVTTEILPVSMTKTSVDCTMYICGDSTECSNLLLQYGSFCTQLNRALTGIAVEQDKNTQEVFAQVKQIYKTPPIKDFGGFNFSQILPDPSKPSKRSFIEDLLFNKVTLADAGFIKQYGDCLGDIAARDLICAQKFNGLTVLPPLLTDEMIAQYTSALLAGTITSGWTFGAGAALQIPFAMQMAYRFNGIGVTQNVLYENQKLIANQFNSAIGKIQDSLSSTASALGKLQDVVNQNAQALNTLVKQLSSNFGAISSVLNDILSRLDPPEAEVQIDRLITGRLQSLQTYVTQQLIRAAEIRASANLAATKMSECVLGQSKRVDFCGKGYHLMSFPQSAPHGVVFLHVTYVPAQEKNFTTAPAICHDGKAHFPREGVFVSNGTHWFVTQRNFYEPQIITTDNTFVSGNCDVVIGIVNNTVYDPLQPELDSFKEELDKYFKNHTSPDVDLGDISGINASVVNIQKEIDRLNEVAKNLNESLIDLQELGKYEQYIKGSGRENLYFQGGGGSGYIPEAPRDGQAYVRKDGEWVLLSTFLGHHHHHHHH

SEQ ID NO: 2001 - protein, 1281 aa, Artificial Sequence
  Description of Artificial Sequence: Synthetic polypeptide
MGILPSPGMPALLSLVSLLSVLLMGCVAETGTQCVNLTTRTQLPPAYTNSFTRGVYYPDKVFRSSVLHSTQDLFLPFFSNVTWFHAIHVSGTNGTKRFDNPVLPFNDGVYFASTEKSNIIRGWIFGTTLDSKTQSLLIVNNATNVVIKVCEFQFCNDPFLGVYYHKNNKSWMESEFRVYSSANNCTFEYVSQPFLMDLEGKQGNFKNLREFVFKNIDGYFKIYSKHTPINLVRDLPQGFSALEPLVDLPIGINITRFQTLLALHRSYLTPGDSSSGWTAGAAAYYVGYLQPRTFLLKYNENGTITDAVDCALDPLSETKCTLKSFTVEKGIYQTSNFRVQPTESIVRFPNITNLCPFGEVFNATRFASVYAWNRKRISNCVADYSVLYNSASFSTFKCYGVSPTKLNDLCFTNVYADSFVIRGDEVRQIAPGQTGKIADYNYKLPDDFTGCVIAWNSNNLDSKVGGNYNYLYRLFRKSNLKPFERDISTEIYQAGSTPCNGVEGFNCYFPLQSYGFQPTNGVGYQPYRVVVLSFELLHAPATVCGPKKSTNLVKNKCVNFNFNGLTGTGVLTESNKKFLPFQQFGRDIADTTDAVRDPQTLEILDITPCSFGGVSVITPGTNTSNQVAVLYQDVNCTEVPVAIHADQLTPTWRVYSTGSNVFQTRAGCLIGAEHVNNSYECDIPIGAGICASYQTQTNSPSGAGSVASQSIIAYTMSLGAENSVAYSNNSIAIPTNFTISVTTEILPVSMTKTSVDCTMYICGDSTECSNLLLQYGSFCTQLNRALTGIAVEQDKNTQEVFAQVKQIYKTPPIKDFGGFNFSQILPDPSKPSKRSFIEDLLFNKVTLADAGFIKQYGDCLGDIAARDLICAQKFNGLTVLPPLLTDEMIAQYTSALLAGTITSGWTFGAGAALQIPFAMQMAYRFNGIGVTQNVLYENQKLIANQFNSAIGKIQDSLSSTASALGKLQDVVNQNAQALNTLVKQLSSNFGAISSVLNDILSRLDPPEAEVQIDRLITGRLQSLQTYVTQQLIRAAEIRASANLAATKMSECVLGQSKRVDFCGKGYHLMSFPQSAPHGVVFLHVTYVPAQEKNFTTAPAICHDGKAHFPREGVFVSNGTEWFVTQRNFYEPQIITTDNTFVSGNCDVVIGIVNNTVYDPLQPELDSFKEELDKYFKNHTSPDVDLGDISGINASVVNIQKEIDRLNEVAKNLNESLIDLQELGKYEQYIKGSGRENLYFQGGGGSGYIPEAPRDGQAYVRKDGEWVLLSTFLGHHHHHHHH

SEQ ID NO: 2002 - protein, 1281 aa, Artificial Sequence
  Description of Artificial Sequence: Synthetic polypeptide
MGILPSPGMPALLSLVSLLSVLLMGCVAETGTQCVNLTTRTQLPPAYTNSFTRGVYYPDKVFRSSVLHSTQDLFLPFFSNVTWFHAIHVSGTNGTKRFDNPVLPFNDGVYFASTEKSNIIRGWIFGTTLDSKTQSLLIVNNATNVVIKVCEFQFCDNPFLGVYYHKNNKSWMEEEFRVYSSANNCTFEYVSQPFLMDLEGKQGNFKNLREFVFKNIDGYFKIYSKHTPINLVRDLPQGFSALEPLVDLPIGINITRFQTLLALHRSYLTPGDSSSGWTAGAAAYYVGYLQPRTFLLKYNENGTITDAVDCALDPLSETKCTLKSFTVEKGIYQTSNFRVQPTESIVRFPNITNLCPFGEVFNATRFASVYAWNRKRISNCVADYSVLYNSASFSTFKCYGVSPTKLNDLCFTNVYADSFVIRGDEVRQIAPGQTGKIADYNYKLPDDFTGCVIAWNSNNLDSKVGGNYNYLYRLFRKSNLKPFERDISTEIYQAGSTPCNGVEGFNCYFPLQSYGFQPTNGVGYQPYRVVVLSFELLHAPATVCGPKKSTNLVKNKCVNFNFNGLTGTGVLTESNKKFLPFQQFGRDIADTTDAVRDPQTLEILDITPCSFGGVSVITPGTNTSNQVAVLYQDVNCTEVPVAIHADQLTPTWRVYSTGSNVFQTRAGCLIGAEHVNNSYECDIPIGAGICASYQTQTNSPSGAGSVASQSIIAYTMSLGAENSVAYSNNSIAIPTNFTISVTTEILPVSMTKTSVDCTMYICGDSTECSNLLLQYGSFCTQLNRALTGIAVEQDKNTQEVFAQVKQIYKTPPIKDFGGFNFSQILPDPSKPSKRSFIEDLLFNKVTLADAGFIKQYGDCLGDIAARDLICAQKFNGLTVLPPLLTDEMIAQYTSALLAGTITSGWTFGAGAALQIPFAMQMAYRFNGIGVTQNVLYENQKLIANQFNSAIGKIQDSLSSTASALGKLQDVVNQNAQALNTLVKQLSSNFGAISSVLNDILSRLDPPEAEVQIDRLITGRLQSLQTYVTQQLIRAAEIRASANLAATKMSECVLGQSKRVDFCGKGYHLMSFPQSAPHGVVFLHVTYVPAQEKNFTTAPAICHDGKAHFPREGVFVSNGTHWFVTQRNFYEPQIITTDNTFVSGNCDVVIGIVNNTVYDPLQPELDSFKEELDKYFKNHTSPDVDLGDISGINASVVNIQKEIDRLNEVAKNLNESLIDLQELGKYEQYIKGSGRENLYFQGGGGSGYIPEAPRDGQAYVRKDGEWVLLSTFLGHHHHHHHH

SEQ ID NO: 2003 - protein, 1281 aa, Artificial Sequence
  Description of Artificial Sequence: Synthetic polypeptide
MGILPSPGMPALLSLVSLLSVLLMGCVAETGTQCVNLTTRTQLPPAYTNSFTRGVYYPDKVFRSSVLHSTQDLFLPFFSNVTWFHAIHVSGTNGTKRFDNPVLPFNDGVYFASTEKSNIIRGWIFGTTLDSKTQSLLIVNNATNVVIKVCEFQFCNDPFLGVYYHKNNKSWMESEFRVYSSANNCTFEYVSQPFLMDLEGKQGNFKNLREFVFKNIDGYFKIYSKHTPINLVRDLPQGFSALEPLVDLPIGINITRFQTLLALHRSYLTPGDSSSGWTAGAAAYYVGYLQPRTFLLKYNENGTITDAVDCALDPLSETKCTLKSFTVEKGIYQTSNFRVQPTESIVRFPNITNLCPFGEVFNATRFASVYAWNRKRISNCVADYSVLYNSASFSTFKCYGVSPTKLNDLCFTNVYADSFVIRGDEVRQIAPGQTGKIADYNYKLPDDFTGCVIAWNSNNLDSKVGGNYNYLYRLFRKSNLKPFERDISTEIYQAGSTPCNGVEGFNCYFPLQSYGFQPTNGVGYQPYRVVVLSFELLHAPATVCGPKKSTNLVKNKCVNFNFNGLTGTGVLTESNKKFLPFQQFGRDIADTTDAVRDPQTLEILDITPCSFGGVSVITPGTNTSNQVAVLYQDVNCTEVPVAIHADQLTPTWRVYSTGSNVFQTRAGCLIGAEHVNNSYECDIPIGAGICASYQTQTNSPSGAGSVASQSIIAYTMSLGAENSVAYSNNSIAIPTNFTISVTTEFLPVSMTKTSVDCTMYICGDSTECSNLLLQYGSFCTQLNRALTGIAVEQDKNTQEVFAQVKQIYKTPPIKDFGGFNFSQILPDPSKPSKRSFIEDLLFNKVTLADAGFIKQYGDCLGDIAARDLICAQKFNGLTVLPPLLTDEMIAQYTSALLAGTITSGWTFGAGAALQIPFAMQMAYRFNGIGVTQNVLYENQKLIANQFNSAIGKIQDSLSSTASALGKLQDVVNQNAQALNTLVKQLSSNFGAISSVLNDILSRLDPPEAEVQIDRLITGRLQSLQTYVTQQLIRAAEIRASANLAATKMSECVLGQSKRVDFCGKGYHLMSFPQSAPHGVVFLHVTYVPAQEKNFTTAPAICHDGKAHFPREGVFVSNGTHWFVTQRNFYEPQIITTDNTFVSGNCDVVIGIVNNTVYDPLQPELDSFKEELDKYFKNHTSPDVDLGDISGINASVVNIQKEIDRLNEVAKNLNESLIDLQELGKYEQYIKGSGRENLYFQGGGGSGYIPEAPRDGQAYVRKDGEWVLLSTFLGHHHHHHHH

SEQ ID NO: 2004 - protein, 1281 aa, Artificial Sequence
  Description of Artificial Sequence: Synthetic polypeptide
MGILPSPGMPALLSLVSLLSVLLMGCVAETGTQCVNLTTRTQLPPAYTNSFTRGVYYPDKVFRSSVLHSTQDLFLPFFSNVTWFHAIHVSGTNGTKRFDNPVLPFNDGVYFASTEKSNIIRGWIFGTTLDSKTQSLLIVNNATNVVIKVCEFQFCNDPFLGVYYHKNNKSWMESEFRVYSSANNCTFEYVSQPFLMDLEGKQGNFKNLREFVFKNIDGYFKIYSKHTPINLVRDLPQGFSALEPLVDLPIGINITRFQTLLALHRSYLTPGDSSSGWTAGAAAYYVGYLQPRTFLLKYNENGTITDAVDCALDPLSETKCTLKSFTVEKGIYQTSNFRVQPTESIVRFPNITNLCPFGEVFNATRFASVYAWNRKRISNCVADYSVLYNSASFSTFKCYGVSPTKLNDLCFTNVYADSFVIRGDEVRQIAPGQTGKIADYNYKLPDDFTGCVIAWNSNNLDSKVGGNYNYLYRLFRKSNLKPFERDISTEIYQAGSTPCNGVEGFNCYFPLQSYGFQPTNGVGYQPYRVVVLSFELLHAPATVCGPKKSTNLVKNKCVNFNFNGLTGTGVLTESNKKFLPFQQFGRDIADTTDAVRDPQTLEILDITPCSFGGVSVITPGTNTSNQVAVLYQDVNCTEVPVAIHADQLTPTWRVYSTGSNVFQTRAGCLIGAEHVNNSYECDIPIGAGICASYQTQTNSPSGAGSVASQSIIAYTMSLGAENSVAYSNNSIAIPTNFTISVTTEILPVSMTKTSVDCTMYICGDSTECSNLLLQYGSFCTQLNRALTGIAVEQDKNTQEVFAQVKQIYKTPPIKDFGGFNFSQILPDPSKPSKRSFIEDLLFNKVTLADAGFIKQYGDCLGDIAARDLICAQKFNGLTVLPPLLTDEMIAQYTSALLAGTITSGWTFGAGAALQIPFAMQMAYRFNGIGVTQNVLYENQKLIANQFNSAIGKIQDSLSSTASALGKLQDVVNQNAQALNTLVKQLSSNFGAISSVLNDILSRLDPPEAEVQIDRLITGRLQSLQTYVTQQLIRAAEIRASAQLAATKMSECVLGQSKRVDFCGKGYHLMSFPQSAPHGVVFLHVTYVPAQEKNFTTAPAICHDGKAHFPREGVFVSNGTHWFVTQRNFYEPQIITTDNTFVSGNCDVVIGIVNNTVYDPLQPELDSFKEELDKYFKNHTSPDVDLGDISGINASVVNIQKEIDRLNEVAKNLNESLIDLQELGKYEQYIKGSGRENLYFQGGGGSGYIPEAPRDGQAYVRKDGEWVLLSTFLGHHHHHHHH

SEQ ID NO: 2005 - protein, 1281 aa, Artificial Sequence
  Description of Artificial Sequence: Synthetic polypeptide
MGILPSPGMPALLSLVSLLSVLLMGCVAETGTQCVNLTTRTQLPPAYTNSFTRGVYYPDKVFRSSVLHSTQDLFLPFFSNVTWFHAIHVSGTNGTKRFDNPVLPFNDGVYFASTEKSNIIRGWIFGTTLDSKTQSLLIVNNATNVVIKVCEFQFCNDPFLGVYYHKNNKSWMESEFRVYSSANNCTFEYVSQPFLMDLEGKQGNFKNLREFVFKNIDGYFKIYSKHTPINLVRDLPQGFSALEPLVDLPIGINITRFQTLLALHRSYLTPGDSSSGWTAGAAAYYVGYLQPRTFLLKYNENGTITDAVDCALDPLSETKCTLKSFTVEKGIYQTSNFRVQPTESIVRFPNITNLCPFGEVFNATRFASVYAWNRKRISNCVADYSVLYNSASFSTFKCYGVSPTKLNDLCFTNVYADSFVIRGDEVRQIAPGQTGKIADYNYKLPDDFTGCVIAWNSNNLDSKVGGNYNYLYRLFRKSNLKPFERDISTEIYQAGSTPCNGVEGFNCYFPLQSYGFQPTNGVGYQPYRVVVLSFELLHAPATVCGPKKSTNLVKNKCVNFNFNGRTGTGVLTESNKKFLPFQQFGRDIADTTDAVRDPQTLEILDITPCSFGGVSVITPGTNTSNQVAVLYQDVNCTEVPVAIHADQLTPTWRVYSTGSNVFQTRAGCLIGAEHVNNSYECDIPIGAGICASYQTQTNSPSGAGSVASQSIIAYTMSLGAENSVAYSNNSIAIPTNFTISVTTEILPVSMTKTSVDCTMYICGDSTECSNLLLQYGSFCTQLNRALTGIAVEQDKNTQEVFAQVKQIYKTPPIKDFGGFNFSQILPDPSKPSKRSFIEDLLFNKVTLADAGFIKQYGDCLGDIAARDLICAQKFNGLTVLPPLLTDEMIAQYTSALLAGTITSGWTFGAGAALQIPFAMQMAYRFNGIGVTQNVLYENQKLIANQFNSAIGKIQDSLSSTASALGKLQDVVNQNAQALNTLVKQLSSNFGAISSVLNDILSRLDPPEAEVQIDRLITGRLQSLQTYVTQQLIRAAEIRASANLAATKMSECVLGQSKRVDFCGKGYHLMSFPQSAPHGVVFLHVTYVPAQEKNFTTAPAICHDGKAHFPREGVFVSNGTHWFVTQRNFYEPQIITTDNTFVSGNCDVVIGIVNNTVYDPLQPELDSFKEELDKYFKNHTSPDVDLGDISGINASVVNIQKEIDRLNEVAKNLNESLIDLQELGKYEQYIKGSGRENLYFQGGGGSGYIPEAPRDGQAYVRKDGEWVLLSTFLGHHHHHHHH

SEQ ID NO: 2006 - protein, 1281 aa, Artificial Sequence
  Description of Artificial Sequence: Synthetic polypeptide
MGILPSPGMPALLSLVSLLSVLLMGCVAETGTQCVNLTTRTQLPPAYTNSFTRGVYYPDKVFRSDVLHSTQDLFLPFFSNVTWFHAIHVSGTNGTKDFDNPVLPFNDGVYFASTEKSNIIRGWIFGTTLDSKTQSLLIVNNATNVVIKVCEFQFCENPFLGVYYHKNNKSWMEKEFRVYSSANNCTFEYVSQPFLMDLGGKQGNFKNLREFVFKNIDGYFKIYSKHTPINLVRDLPQGFSALEPLMDLPIGINITRFQTLLALHRSYLTPGDSSSGWTAGAAAYYVGYLQPRTFLLKYNENGTITDAVDCALDPLSETKCTLKSFTVEKGIYQTSNFRVQPTESIVRFPNITNLCPFGEVFNATRFASVYAWNRKRISNCVADYSVLYNSASFSTFKCYGVSPTKLNDLCFTNVYADSFVIRGDEVRQIAPGQTGKIADYNYKLPDDFTGCVIAWNSNNLDSKVGGNYNYLYRLFRKSNLKPFERDISTEIYQAGSTPCNGVEGFNCYFPLQSYGFQPTNGVGYQPYRVVVLSFELLHAPATVCGPKKSTNLVKNKCVNFNFNGLTGTGVLTESNKKFLPFQQFGRDIADNTDAVRDPQTLEILDITPCSFGGVSVITPGTNTSNQVAVLYQDVNCTEVPNAIHADQLTPTWRVYSTGSNVFQTRAGCLIGAEHVNNSYECDIPIGAGICASYQTQTNSPSGAGSVASQSIIAYTMSLGAENSVAYSNNSIAIPTNFTISVTTEILPVSMTKTSVDCTMYICGDSTECSNLLLQYGSFCTQLNRALQGIAQEQDKNTQEVFAQVKQIYKTPPIKDFGGFNFSQILPDPSKPSKRSFIEDLLFNKVTLADAGFIKQYGDCLGDIAARDLICAQKFNGLTVLPPLLTDEMIAQYTSALLAGTITSGWTFGAGAALQIPFAMQMAYRFNGIGVTQNVLYENQKLIANQFNQAIGKIQDSLSSTASALGKLQDVVNQNAQALNTLVKQLSSNFGAISSVLNDILSRLDPPEAEVQIDRLITGRLQSLQTYVTQQLIRAAEIRASANLAATKMSECVLGQSKRVDFCGKGYHLMSFPQSAPHGVVFLHVTYVPAQEKNFTTAPAICHDGKAFFPREGVFVSNGTQWFVTQRNFYEPQIITTDNTFVSGNCDVVIGIVNNTVYDPLQPELDSFKEELDKYFKNHTSPDVDLGDISGINASVVNIQKEIDRLNEVAKNLNESLIDLQELGKYEQYIKGSGRENLYFQGGGGSGYIPEAPRDGQAYVRKDGEWVLLSTFLGHHHHHHHH

SEQ ID NO: 2007 - protein, 1281 aa, Artificial Sequence
  Description of Artificial Sequence: Synthetic polypeptide
MGILPSPGMPALLSLVSLLSVLLMGCVAETGTQCVNLTTRTQLPPAYTNSFTRGVYYPDKVFRSSVLHSTQDLFLPFFSNVTWFHAIHVSGTNGTKRFDNPVLPFNDGVYFASTEKSNIIRGWIFGTTLDSKTQSLLIVNNATNVVIKVCEFQFCNDPFLGVYYHKNNKSWMESEFRVYSSANNCTFEYVSQPFLMDLEGKQGNFKNLREFVFKNIDGYFKIYSKHTPINLVRDLPQGFSALEPLVDLPIGINITRFQTLLALHRSYLTPGDSSSGWTAGAAAYYVGYLQPRTFLLKYNENGTITDAVDCALDPLSETKCTLKSFTVEKGIYQTSNFRVQPTESIVRFPNITNLCPFGEVFNATRFASVYAWNRKRISNCVADYSVLYNSASFSTFKCYGVSPTKLNDLCFTNVYADSFVIRGDEVRQIAPGQTGKIADYNYKLPDDFTGCVIAWNSNNLDSKVGGNYNYLYRLFRKSNLKPFERDISTEIYQAGSTPCNGVEGFNCYFPLQSYGFQPTNGVGYQPYRVVVLSFELLHAPATVCGPKKSTNLVKNKCVNFNFNGLTGTGVLTESNKKFLPFQQFGRDIADSTDAVRDPQTLEILDITPCSFGGVSVITPGTNTSNQVAVLYQDVNCTEVPVAIHADQLTPTWRVYSTGSNVFQTRAGCLIGAEHVNNSYECDIPIGAGICASYQTQTNSPSGAGSVASQSIIAYTMSLGAENSVAYSNNSIAIPTNFTISVTTEILPVSMTKTSVDCTMYICGDSTECSNLLLQYGSFCTQLNRALTGIAVEQDKNTQEVFAQVKQIYKTPPIKDFGGFNFSQILPDPSKPSKRSFIEDLLFNKVTLADAGFIKQYGDCLGDIAARDLICAQKFNGLTVLPPLLTDEMIAQYTSALLAGTITSGWTFGAGAALQIPFAMQMAYRFNGIGVTQNVLYENQKLIANQFNSAIGKIQDSLSSTASALGKLQDVVNQNAQALNTLVKQLSSNFGAISSVLNDILSRLDPPEAEVQIDRLITGRLQSLQTYVTQQLIRAAEIRASANLAATKMSECVLGQSKRVDFCGKGYHLMSFPQSAPHGVVFLHVTYVPAQEKNFTTAPAICHDGKAHFPREGVFVSNGTHWFVTQRNFYEPQIITTDNTFVSGNCDVVIGIVNNTVYDPLQPELDSFKEELDKYFKNHTSPDVDLGDISGINASVVNIQKEIDRLNEVAKNLNESLIDLQELGKYEQYIKGSGRENLYFQGGGGSGYIPEAPRDGQAYVRKDGEWVLLSTFLGHHHHHHHH

SEQ ID NO: 2008 - protein, 1281 aa, Artificial Sequence
  Description of Artificial Sequence: Synthetic polypeptide
MGILPSPGMPALLSLVSLLSVLLMGCVAETGTQCVNLTTRTQLPPAYTNSFTRGVYYPDKVFRSSVLHDTQDLFLPFFSNVTWFHAIHVSGTNGTKRFDNPVLPFNDGVYFASTEKSNIIRGWIFGTTLDSKTQSLLIVNNATNVVIKVCEFQFCNDPFLGVYYHKNNKSWMESEFRVYSSANNCTFEYVSQPFLMDLEGKQGNFKNLREFVFKNIDGYFKIYSKHTPINLVRDLPQGFSALEPLVDLPIGINITRFQTLLALHRSYLTPGDSSSGWTAGAAAYYVGYLQPRTFLLKYNENGTITDAVDCALDPLSETKCTLKSFTVEKGIYQTSNFRVQPTESIVRFPNITNLCPFGEVFNATRFASVYAWNRKRISNCVADYSVLYNSASFSTFKCYGVSPTKLNDLCFTNVYADSFVIRGDEVRQIAPGQTGKIADYNYKLPDDFTGCVIAWNSNNLDSKVGGNYNYLYRLFRKSNLKPFERDISTEIYQAGSTPCNGVEGFNCYFPLQSYGFQPTNGVGYQPYRVVVLSFELLHAPATVCGPKKSTNLVKNKCVNFNFNGLTGTGVLTESNKKFLPFQQFGRDIADTTDAVRDPQTLEILDITPCSFGGVSVITPGTNTSNQVAVLYQDVNCTEVPVAIHADQLTPTWRVYSTGSNVFQTRAGCLIGAEHVNNSYECDIPIGAGICASYQTQTNSPSGAGSVASQSIIAYTMSLGAENSVAYSNNSIAIPTNFTISVTTEILPVSMTKTSVDCTMYICGDSTECSNLLLQYGSFCTQLNRALTGIAVEQDKNTQEVFAQVKQIYKTPPIKDFGGFNFSQILPDPSKPSKRSFIEDLLFNKVTLADAGFIKQYGDCLGDIAARDLICAQKFNGLTVLPPLLTDEMIAQYTSALLAGTITSGWTFGAGAALQIPFAMQMAYRFNGIGVTQNVLYENQKLIANQFNSAIGKIQDSLSSTASALGKLQDVVNQNAQALNTLVKQLSSNFGAISSVLNDILSRLDPPEAEVQIDRLITGRLQSLQTYVTQQLIRAAEIRASANLAATKMSECVLGQSKRVDFCGKGYHLMSFPQSAPHGVVFLHVTYVPAQEKNFTTAPAICHDGKAHFPREGVFVSNGTHWFVTQRNFYEPQIITTDNTFVSGNCDVVIGIVNNTVYDPLQPELDSFKEELDKYFKNHTSPDVDLGDISGINASVVNIQKEIDRLNEVAKNLNESLIDLQELGKYEQYIKGSGRENLYFQGGGGSGYIPEAPRDGQAYVRKDGEWVLLSTFLGHHHHHHHH

SEQ ID NO: 2009 - protein, 1281 aa, Artificial Sequence
  Description of Artificial Sequence: Synthetic polypeptide
MGILPSPGMPALLSLVSLLSVLLMGCVAETGTQCVNLTTRTQLPPAYTNSFTRGVYYPDKVFRSSVLHSTQDLFLPFFSNVTWFHAIHVSGTNGTKRFDNPVLPFNDGVYFASTEKSNIIRGWIFGTTLDSKTQSLLIVNNATNVVIKVCEFQFCNDPFLGVYYHKNNKSWMESEFRVYSSANNCTFEYVSQPFLMDLEGKQGNFKNLREFVFKNIDGYFKIYSKHTPINLVRDLPQGFSALEPLVDLPIGINITRFQTLLALHRSYLTPGDSSSGWTAGAAAYYVGYLQPRTFLLKYNENGTITDAVDCALDPLSETKCTLKSFTVEKGIYQTSNFRVQPTESIVRFPNITNLCPFGEVFNATRFASVYAWNRKRISNCVADYSVLYNSASFSTFKCYGVSPTKLNDLCFTNVYADSFVIRGDEVRQIAPGQTGKIADYNYKLPDDFTGCVIAWNSNNLDSKVGGNYNYLYRLFRKSNLKPFERDISTEIYQAGSTPCNGVEGFNCYFPLQSYGFQPTNGVGYQPYRVVVLSFELLHAPATVCGPKKSTNLVKNKCVNFNFNGLTGTGVLTESNKKFLPFQQFGRDIADTTDAVRDPQTLEILDITPCSFGGVSVITPGTNTSNQVAVLYQDVNCTEVPVAIHADQLTPTWRVYSTGSNVFQTRAGCLIGAEHVNNSYECDIPIGAGICASYQTQTNSPSGAGSVASQSIIAYTMSLGAENSVAYSNNSIAIPTNFTISVTTEILPVSMTKTSVDCTMYICGDSTECSNLLLQYGSFCTQLNRALTGIAVEQDKNTQEVFAQVKQIYKTPPIKDFGGFNFSQILPDPSKPSKRSFIEDLLFNKVTLADAGFIKQYGDCLGDIAARDLICAQKFNGLTVLPPLLTDEMIAQYTSALLAGTITSGWTFGAGAALQIPFAMQMAYRFNGIGVTQNVLYENQKLIANQFNSAIGKIQDSLSSTASALGKLQDVVNQNAQALNTLVKQLSSNFGAISSVLNDILSRLDPPEAEVQIDRLITGRLQSLQTYVTQQLIRAAEIRASANLAATKMSECVLGQSKRVDFCGKGYHLMSFPQSAPHGVVFLHVTYVPAQEKNFTTAPAICHDGKAHFPREGVFVSNGTYWFVTQRNFYEPQIITTDNTFVSGNCDVVIGIVNNTVYDPLQPELDSFKEELDKYFKNHTSPDVDLGDISGINASVVNIQKEIDRLNEVAKNLNESLIDLQELGKYEQYIKGSGRENLYFQGGGGSGYIPEAPRDGQAYVRKDGEWVLLSTFLGHHHHHHHH

SEQ ID NO: 2010 - protein, 1281 aa, Artificial Sequence
  Description of Artificial Sequence: Synthetic polypeptide
MGILPSPGMPALLSLVSLLSVLLMGCVAETGTQCVNLTTRTQLPPAYTNSFTRGVYYPDKVFRSDVLHSTQDLFLPFFSNVTWFHAIHVSGTNGTKRFDNPVLPFNDGVYFASTEKSNIIRGWIFGTTLDSKTQSLLIVNNATNVVIKVCEFQFCDNPFLGVYYHKNNKSWMEKEFRVYSSANNCTFEYVSQPFLMDLGGKQGNFKWLREFVFKNIDGYFKIYSKHTPINLVRDLPQGFSALEPLMDLPIGINITRFQTLLALHRSYLTPGDSSSGWTAGAAAYYVGYLQPRTFLLKYNENGTITDAVDCAYDPLSETKCTLKSFTVEKGIYQTSNFRVQPTESIVRFPNITNLCPFGEVFNATRFASVYAWNRKRISNCVADYSVLYNSASFSTFKCYGVSPTKLNDLCFTNVYADSFVIRGDEVRQIAPGQTGKIADYNYKLPDDFTGCVIAWNSNNLDSKVGGNYNYLYRLFRKSNLKPFERDISTEIYQAGSTPCNGVEGFNCYFPLQSYGFQPTNGVGYQPYRVVVLSFELLHAPATVCGPKKSTNLVKNKCVNFNFNGLTGTGVLTESNKKFLPFQQFGRDIADNTDAVRDPQTLEILDITPCSFGGVSVITPGTNTSNQVAVLYQDVNCTEVPNAIHADQLTPTWRVYSTGSNVFQTRAGCLIGAEHVNNSYECDIPIGAGICASYQTQTNSPSGAGSVASQSIIAYTMSLGAENSVAYSNNSIAIPTNFTISVTTEILPVSMTKTSVDCTMYICGDSTECSNLLLQYGSFCTQLNRALQGIAQEQDKNTQEVFAQVKQIYKTPPIKDFGGFNFSQILPDPSKPSKRSFIEDLLFNKVTLADAGFIKQYGDCLGDIAARDLICAQKFNGLTVLPPLLTDEMIAQYTSALLAGTITSGWTFGAGAALQIPFAMQMAYRFNGIGVTQNVLYENQKLIANQFNKAIGKIQDSLSSTASALGKLQDVVNQNAQALNTLVKQLSSNFGAISSVLNDILSRLDPPEAEVQIDRLITGRLQSLQTYVTQQLIRAAEIRASANLAATKMSECVLGQSKRVDFCGKGYHLMSFPQSAPHGVVFLHVTYVPAQEKNFTTAPAICHDGKAFFPREGVFVSNGTQWFVTQRNFYEPQIITTDNTFVSGNCDVVIGIVNNTVYDPLQPELDSFKEELDKYFKNHTSPDVDLGDISGINASVVNIQKEIDRLNEVAKNLNESLIDLQELGKYEQYIKGSGRENLYFQGGGGSGYIPEAPRDGQAYVRKDGEWVLLSTFLGHHHHHHHH

SEQ ID NO: 2011 - protein, 1281 aa, Artificial Sequence
  Description of Artificial Sequence: Synthetic polypeptide
MGILPSPGMPALLSLVSLLSVLLMGCVAETGTQCVNLTTRTQLPPAYTNSFTRGVYYPDKVFRSSVLHSTQDLFLPFFSNVTWFHAIHVSGTNGTKRFDNPVLPFNDGVYFASTEKSNIIRGWIFGTTLDSKTQSLLIVNNATNVVIKVCEFQFCNDPFLGVYYHKNNKSWMESEFRVYSSANNCTFEYVSQPFLMDLEGKQGNFKNLREFVFKNIDGYFKIYSKHTPINLVRDLPQGFSALEPLVDLPIGINITRFQTLLALHRSYLTPGDSSSGWTAGAAAYYVGYLQPRTFLLKYNENGTITDAVDCALDPLSETKCTLKSFTVEKGIYQTSNFRVQPTESIVRFPNITNLCPFGEVFNATRFASVYAWNRKRISNCVADYSVLYNSASFSTFKCYGVSPTKLNDLCFTNVYADSFVIRGDEVRQIAPGQTGKIADYNYKLPDDFTGCVIAWNSNNLDSKVGGNYNYLYRLFRKSNLKPFERDISTEIYQAGSTPCNGVEGFNCYFPLQSYGFQPTNGVGYQPYRVVVLSFELLHAPATVCGPKKSTNLVKNKCVNFNFNGLTGTGVLTESNKKFLPFQQFGRDIADTTDAVRDPQTLEILDITPCSFGGVSVITPGTNTSNQVAVLYQDVNCTEVPVAIHADQLTPTWRVYSTGSNVFQTRAGCLIGAEHVNNSYECDIPIGAGICASYQTQTNSPSGAGSVASQSIIAYTMSLGAENSVAYSNNSIAIPTNFTISVTTEILPVSMTKTSVDCTMYICGDSTECSNLLLQYGSFCTQLNRALTGIAVEQDKNTQEVFAQVKQIYKTPPIKDFGGFNFSQILPDPSKPSKRSFIEDLLFNKVTLADAGFIKQYGDCLGDIAARDLICAQKFNGLTVLPPLLTDEMIAQYTSALLAGTITSGWTFGAGAALQIPFAMQMAYRFNGIGVTQNVLYENQKLIANQFNSAIGKIQDSLSSTASALGKLQDVVNQNAQALNTLVKQLSSNFGAISSVLNDILSRLDPPEAQVQIDRLITGRLQSLQTYVTQQLIRAAEIRASANLAATKMSECVLGQSKRVDFCGKGYHLMSFPQSAPHGVVFLHVTYVPAQEKNFTTAPAICHDGKAHFPREGVFVSNGTHWFVTQRNFYEPQIITTDNTFVSGNCDVVIGIVNNTVYDPLQPELDSFKEELDKYFKNHTSPDVDLGDISGINASVVNIQKEIDRLNEVAKNLNESLIDLQELGKYEQYIKGSGRENLYFQGGGGSGYIPEAPRDGQAYVRKDGEWVLLSTFLGHHHHHHHH

SEQ ID NO: 2012 - protein, 1281 aa, Artificial Sequence
  Description of Artificial Sequence: Synthetic polypeptide
MGILPSPGMPALLSLVSLLSVLLMGCVAETGTQCVNLTTRTQLPPAYTNSFTRGVYYPDKVFRSSVLHSTQDLFLPFFSNVTWFHAIHVSGTNGTKRFDNPVLPFNDGVYFASTEKSNIIRGWIFGTTLDSKTQSLLIVNNATNVVIKVCEFQFCNDPFFGVYYHKNNKSWMESEFRVYSSANNCTFEYVSQPFLMDLEGKQGNFKNLREFVFKNIDGYFKIYSKHTPINLVRDLPQGFSALEPLVDLPIGINITRFQTLLALHRSYLTPGDSSSGWTAGAAAYYVGYLQPRTFLLKYNENGTITDAVDCALDPLSETKCTLKSFTVEKGIYQTSNFRVQPTESIVRFPNITNLCPFGEVFNATRFASVYAWNRKRISNCVADYSVLYNSASFSTFKCYGVSPTKLNDLCFTNVYADSFVIRGDEVRQIAPGQTGKIADYNYKLPDDFTGCVIAWNSNNLDSKVGGNYNYLYRLFRKSNLKPFERDISTEIYQAGSTPCNGVEGFNCYFPLQSYGFQPTNGVGYQPYRVVVLSFELLHAPATVCGPKKSTNLVKNKCVNFNFNGLTGTGVLTESNKKFLPFQQFGRDIADTTDAVRDPQTLEILDITPCSFGGVSVITPGTNTSNQVAVLYQDVNCTEVPVAIHADQLTPTWRVYSTGSNVFQTRAGCLIGAEHVNNSYECDIPIGAGICASYQTQTNSPSGAGSVASQSIIAYTMSLGAENSVAYSNNSIAIPTNFTISVTTEILPVSMTKTSVDCTMYICGDSTECSNLLLQYGSFCTQLNRALTGIAVEQDKNTQEVFAQVKQIYKTPPIKDFGGFNFSQILPDPSKPSKRSFIEDLLFNKVTLADAGFIKQYGDCLGDIAARDLICAQKFNGLTVLPPLLTDEMIAQYTSALLAGTITSGWTFGAGAALQIPFAMQMAYRFNGIGVTQNVLYENQKLIANQFNSAIGKIQDSLSSTASALGKLQDVVNQNAQALNTLVKQLSSNFGAISSVLNDILSRLDPPEAEVQIDRLITGRLQSLQTYVTQQLIRAAEIRASANLAATKMSECVLGQSKRVDFCGKGYHLMSFPQSAPHGVVFLHVTYVPAQEKNFTTAPAICHDGKAHFPREGVFVSNGTHWFVTQRNFYEPQIITTDNTFVSGNCDVVIGIVNNTVYDPLQPELDSFKEELDKYFKNHTSPDVDLGDISGINASVVNIQKEIDRLNEVAKNLNESLIDLQELGKYEQYIKGSGRENLYFQGGGGSGYIPEAPRDGQAYVRKDGEWVLLSTFLGHHHHHHHH

SEQ ID NO: 2013 - protein, 1281 aa, Artificial Sequence
  Description of Artificial Sequence: Synthetic polypeptide
MGILPSPGMPALLSLVSLLSVLLMGCVAETGTQCVNLTTRTQLPPAYTNSFTRGVYYPDKVFRSSVLHSTQDLFLPFFSNVTWFHAIHVSGTNGTKRFDNPVLPFNDGVYFASTEKSNIIRGWIFGTTLDSKTQSLLIVNNATNVVIKVCEFQFCNDPFLGVYYHKNNKSWMESEFRVYSSANNCTFEYVSQPFLMDLEGKQGNFKNLREFVFKNIDGYFKIYSKHTPINLVRDLPQGFSALEPLVDLPIGINITRFQTLLALHRSYLTPGDSSSGWEAGAAAYYVGYLQPRTFLLKYNENGTITDAVDCALDPLSETKCTLKSFTVEKGIYQTSNFRVQPTESIVRFPNITNLCPFGEVFNATRFASVYAWNRKRISNCVADYSVLYNSASFSTFKCYGVSPTKLNDLCFTNVYADSFVIRGDEVRQIAPGQTGKIADYNYKLPDDFTGCVIAWNSNNLDSKVGGNYNYLYRLFRKSNLKPFERDISTEIYQAGSTPCNGVEGFNCYFPLQSYGFQPTNGVGYQPYRVVVLSFELLHAPATVCGPKKSTNLVKNKCVNFNFNGLTGTGVLTESNKKFLPFQQFGRDIADTTDAVRDPQTLEILDITPCSFGGVSVITPGTNTSNQVAVLYQDVNCTEVPVAIHADQLTPTWRVYSTGSNVFQTRAGCLIGAEHVNNSYECDIPIGAGICASYQTQTNSPSGAGSVASQSIIAYTMSLGAENSVAYSNNSIAIPTNFTISVTTEILPVSMTKTSVDCTMYICGDSTECSNLLLQYGSFCTQLNRALTGIAVEQDKNTQEVFAQVKQIYKTPPIKDFGGFNFSQILPDPSKPSKRSFIEDLLFNKVTLADAGFIKQYGDCLGDIAARDLICAQKFNGLTVLPPLLTDEMIAQYTSALLAGTITSGWTFGAGAALQIPFAMQMAYRFNGIGVTQNVLYENQKLIANQFNSAIGKIQDSLSSTASALGKLQDVVNQNAQALNTLVKQLSSNFGAISSVLNDILSRLDPPEAEVQIDRLITGRLQSLQTYVTQQLIRAAEIRASANLAATKMSECVLGQSKRVDFCGKGYHLMSFPQSAPHGVVFLHVTYVPAQEKNFTTAPAICHDGKAHFPREGVFVSNGTHWFVTQRNFYEPQIITTDNTFVSGNCDVVIGIVNNTVYDPLQPELDSFKEELDKYFKNHTSPDVDLGDISGINASVVNIQKEIDRLNEVAKNLNESLIDLQELGKYEQYIKGSGRENLYFQGGGGSGYIPEAPRDGQAYVRKDGEWVLLSTFLGHHHHHHHH

SEQ ID NO: 2014 - protein, 1281 aa, Artificial Sequence
  Description of Artificial Sequence: Synthetic polypeptide
MGILPSPGMPALLSLVSLLSVLLMGCVAETGTQCVNLTTRTQLPPAYTNSFTRGVYYPDKVFRSDVLHSTQDLFLPFFSNVTWFHAIHVSGTNGTKRFDNPVLPFNDGVYFASTEKSNIIRGWIFGTTLDSKTQSLLIVNNATNVVIKVCEFQFCENPFLGVYYHKNNKSWMEKEFRVYSSANNCTFEYVSQPFLMDLGGKQGNFKWLREFVFKNIDGYFKIYSKHTPINLVRDLPQGFSALEPLMDLPIGINITRFQTLLALHRSYLTPGDSSSGWTAGAAAYYVGYLQPRTFLLKYNENGTITDAVDCALDPLSETKCTLKSFTVEKGIYQTSNFRVQPTESIVRFPNITNLCPFGEVFNATRFASVYAWNRKRISNCVADYSVLYNSASFSTFKCYGVSPTKLNDLCFTNVYADSFVIRGDEVRQIAPGQTGKIADYNYKLPDDFTGCVIAWNSNNLDSKVGGNYNYLYRLFRKSNLKPFERDISTEIYQAGSTPCNGVEGFNCYFPLQSYGFQPTNGVGYQPYRVVVLSFELLHAPATVCGPKKSTNLVKNKCVNFNFNGLTGTGVLTESNKKFLPFQQFGRDIADNTDAVRDPQTLEILDITPCSFGGVSVITPGTNTSNQVAVLYQDVNCTEVPNAIHADQLTPTWRVYSTGSNVFQTRAGCLIGAEHVNNSYECDIPIGAGICASYQTQTNSPSGAGSVASQSIIAYTMSLGAENSVAYSNNSIAIPTNFTISVTTEILPVSMTKTSVDCTMYICGDSTECSNLLLQYGSFCTQLNRALQGIAREQDKNTQEVFAQVKQIYKTPPIKDFGGFNFSQILPDPSKPSKRSFIEDLLFNKVTLADAGFIKQYGDCLGDIAARDLICAQKFNGLTVLPPLLTDEMIAQYTSALLAGTITSGWTFGAGAALQIPFAMQMAYRFNGIGVTQNVLYENQKLIANQFNKAIGKIQDSLSSTASALGKLQDVVNQNAQALNTLVKQLSSNFGAISSVLNDILSRLDPPEAEVQIDRLITGRLQSLQTYVTQQLIRAAEIRASANLAATKMSECVLGQSKRVDFCGKGYHLMSFPQSAPHGVVFLHVTYVPAQEKNFTTAPAICHDGKAFFPREGVFVSNGTQWFVTQRNFYEPQIITTDNTFVSGNCDVVIGIVNNTVYDPLQPELDSFKEELDKYFKNHTSPDVDLGDISGINASVVNIQKEIDRLNEVAKNLNESLIDLQELGKYEQYIKGSGRENLYFQGGGGSGYIPEAPRDGQAYVRKDGEWVLLSTFLGHHHHHHHH

SEQ ID NO: 2015 - protein, 1281 aa, Artificial Sequence
  Description of Artificial Sequence: Synthetic polypeptide
MGILPSPGMPALLSLVSLLSVLLMGCVAETGTQCVNLTTRTQLPPAYTNSFTRGVYYPDKVFRSSVLHSTQDLFLPFFSNVTWFHALHVKGTNGTKRFDNPVLPFNDGVYFASTEKSNIIRGWIFGTTLDSKTQSLLIVNNATNVVIKVCEFQFCNDPFLGVYYHKNNKSWMESEFRVYSSANNCTFEYVSQPFLYDLNGKQGNFHHLREFVFKNIDGYFKIYSKHTPINLVRDLPQGFSALEPLVDLPIGINITRFQTLLALSRSYRTPGDSSSGWTAGAAAYYVGYLQPRTFLLKYNENGTITDAVDCALDPLSETKCTLKSFTVEKGIYQTSNFRVQPTESIVRFPNITNLCPFGEVFNATRFASVYAWNRKRISNCVADYSVLYNSASFSTFKCYGVSPTKLNDLCFTNVYADSFVIRGDEVRQIAPGQTGKIADYNYKLPDDFTGCVIAWNSNNLDSKVGGNYNYLYRLFRKSNLKPFERDISTEIYQAGSTPCNGVEGFNCYFPLQSYGFQPTNGVGYQPYRVVVLSFELLHAPATVCGPKKSTNLVKNKCVNFNFNGLTGTGVLTESNKKFLPFQQFGRDIADTTDAVRDPQTLEILDITPCSFGGVSVITPGTNTSNQVAVLYQDVNCTEVPVAIHADQLTPTWRVYSTGSNVFQTRAGCLIGAEHVNNSYECDIPIGAGICASYQTQTNSPSGAGSVASQSIIAYTMSLGAENSVAYSNNSIAIPTNFTISVTTEILPVSMTKTSVDCTMYICGDSTECSNLLLQYGSFCTQLNRALTGIAVEQDKNTQEVFAQVKQIYKTPPIKDFGGFNFSQILPDPSKPSKRSFIEDLLFNKVTLADAGFIKQYGDCLGDIAARDLICAQKFNGLTVLPPLLTDEMIAQYTSALLAGTITSGWTFGAGAALQIPFAMQMAYRFNGIGVTQNVLYENQKLIANQFNSAIGKIQDSLSSTASALGKLQDVVNQNAQALNTLVKQLSSNFGAISSVLNDILSRLDPPEAEVQIDRLITGRLQSLQTYVTQQLIRAAEIRASANLAATKMSECVLGQSKRVDFCGKGYHLMSFPQSAPHGVVFLHVTYVPAQEKNFTTAPAICHDGKAHFPREGVFVSNGTHWFVTQRNFYEPQIITTDNTFVSGNCDVVIGIVNNTVYDPLQPELDSFKEELDKYFKNHTSPDVDLGDISGINASVVNIQKEIDRLNEVAKNLNESLIDLQELGKYEQYIKGSGRENLYFQGGGGSGYIPEAPRDGQAYVRKDGEWVLLSTFLGHHHHHHHH

SEQ ID NO: 2016 - protein, 1281 aa, Artificial Sequence
  Description of Artificial Sequence: Synthetic polypeptide
MGILPSPGMPALLSLVSLLSVLLMGCVAETGTQCVNLTTRTQLPPAYTNSFTRGVYYPDKVFRSSVLHSTQDLFLPFFSNVTWFHAIHVSGTNGTKRFDNPVLPFNDGVYFASTEKSNIIRGWIFGTTLDSKTQSLLIVNNATNVVIKVCEFQFCNDPFLGVYYHKNNKSWMESEFRVYSSANNCTFEYVSQPFLMDLEGKQGNFKNLREFVFKNIDGYFKIYSKHTPINLVRDLPQGFSALEPLVDLPIGINITRFQTLLALHRSYLTPGDSSSGWTAGAAAYYVGYLQPRTFLLKYNENGTITDAVDCALDPLSETKCTLKSFTVEKGIYQTSNFRVQPTESIVRFPNITNLCPFGEVFNATRFASVYAWNRKRISNCVADYSVLYNSASFSTFKCYGVSPTKLNDLCFTNVYADSFVIRGDEVRQIAPGQTGKIADYNYKLPDDFTGCVIAWNSNNLDSKVGGNYNYLYRLFRKSNLKPFERDISTEIYQAGSTPCNGVEGFNCYFPLQSYGFQPTNGVGYQPYRVVVLSFELLHAPATVCGPKKSTNLVKNKCVNFNFNGLTGTGVLTESNKKFLPFQQFGRDIADTTDAVRDPQTLEILDITPCSFGGVSVITPGTNTSNQVAVLYQDVNCTEVPVAIHADQLTPTWRVYSTGSNVFQTRAGCLIGAEHVNNSYECDIPIGAGICASYQTQTNSPSGAGSVASQSIIAYTMSLGAENSVAYSNNSIAIPTNFTISVTTEILPVSMTKTSVDCTMYICGDSTECSNLLLQYGSFCTQLNRALTGIAVEQDKNTQEVFAQVKQIYKTPPIKDFGGFNFSQILPDPSKPSKRSFIEDLLFNKVTLADAGFIKQYGDCLGDIAARDLICAQKFNGLTVLPPLLTDEMIAQYTSALLAGTITSGWTFGAGAALQIPFAMQMAYRFNGIGVTQNVLYENQKLIANQFNEAIGKIQDSLSSTASALGKLQDVVNQNAQALNTLVKQLSSNFGAISSVLNDILSRLDPPEAEVQIDRLITGRLQSLQTYVTQQLIRAAEIRASANLAATKMSECVLGQSKRVDFCGKGYHLMSFPQSAPHGVVFLHVTYVPAQEKNFTTAPAICHDGKAHFPREGVFVSNGTHWFVTQRNFYEPQIITTDNTFVSGNCDVVIGIVNNTVYDPLQPELDSFKEELDKYFKNHTSPDVDLGDISGINASVVNIQKEIDRLNEVAKNLNESLIDLQELGKYEQYIKGSGRENLYFQGGGGSGYIPEAPRDGQAYVRKDGEWVLLSTFLGHHHHHHHH

SEQ ID NO: 2017 - protein, 1281 aa, Artificial Sequence
  Description of Artificial Sequence: Synthetic polypeptide
MGILPSPGMPALLSLVSLLSVLLMGCVAETGTQCVNLTTRTQLPPAYTNSFTRGVYYPDKVFRSSVLHSTQDLFLPFFSNVTWFHAIHVSGTNGTKRFDNPVIPFNDGVYFASTEKSNIIRGWIFGTTLDSKTQSLLIVNNATNVVIKVCEFQFCNDPFLGVYYHKNNKSWMESEFRVYSSANNCTFEYVSQPFLMDLEGKQGNFKNLREFVFKNIDGYFKIYSKHTPINLVRDLPQGFSALEPLVDLPIGINITRFQTLLALHRSYLTPGDSSSGWTAGAAAYYVGYLQPRTFLLKYNENGTITDAVDCALDPLSETKCTLKSFTVEKGIYQTSNFRVQPTESIVRFPNITNLCPFGEVFNATRFASVYAWNRKRISNCVADYSVLYNSASFSTFKCYGVSPTKLNDLCFTNVYADSFVIRGDEVRQIAPGQTGKIADYNYKLPDDFTGCVIAWNSNNLDSKVGGNYNYLYRLFRKSNLKPFERDISTEIYQAGSTPCNGVEGFNCYFPLQSYGFQPTNGVGYQPYRVVVLSFELLHAPATVCGPKKSTNLVKNKCVNFNFNGLTGTGVLTESNKKFLPFQQFGRDIADTTDAVRDPQTLEILDITPCSFGGVSVITPGTNTSNQVAVLYQDVNCTEVPVAIHADQLTPTWRVYSTGSNVFQTRAGCLIGAEHVNNSYECDIPIGAGICASYQTQTNSPSGAGSVASQSIIAYTMSLGAENSVAYSNNSIAIPTNFTISVTTEILPVSMTKTSVDCTMYICGDSTECSNLLLQYGSFCTQLNRALTGIAVEQDKNTQEVFAQVKQIYKTPPIKDFGGFNFSQILPDPSKPSKRSFIEDLLFNKVTLADAGFIKQYGDCLGDIAARDLICAQKFNGLTVLPPLLTDEMIAQYTSALLAGTITSGWTFGAGAALQIPFAMQMAYRFNGIGVTQNVLYENQKLIANQFNSAIGKIQDSLSSTASALGKLQDVVNQNAQALNTLVKQLSSNFGAISSVLNDILSRLDPPEAEVQIDRLITGRLQSLQTYVTQQLIRAAEIRASANLAATKMSECVLGQSKRVDFCGKGYHLMSFPQSAPHGVVFLHVTYVPAQEKNFTTAPAICHDGKAHFPREGVFVSNGTHWFVTQRNFYEPQIITTDNTFVSGNCDVVIGIVNNTVYDPLQPELDSFKEELDKYFKNHTSPDVDLGDISGINASVVNIQKEIDRLNEVAKNLNESLIDLQELGKYEQYIKGSGRENLYFQGGGGSGYIPEAPRDGQAYVRKDGEWVLLSTFLGHHHHHHHH

SEQ ID NO: 2018 - protein, 1281 aa, Artificial Sequence
  Description of Artificial Sequence: Synthetic polypeptide
MGILPSPGMPALLSLVSLLSVLLMGCVAETGTQCVNLTTRTQLPPAYTNSFTRGVYYPDKVFRSSVLHSTQDLFLPFFSNVTWFHAIHVSGTNGTKRFDNPVLPFNDGVYFASTEKSNIIRGWIFGTTLDSKTQSLLIVNNATNVVIKVCEFQFCNDPFLGVYYHKNNKSWMESEFRVYSSANNCTFEYKSQPFLMDLEGKQGNFKNLREFVFKNIDGYFKIYSKHTPINLVRDLPQGFSALEPLVDLPIGINITRFQTLLALHRSYLTPGDSSSGWTAGAAAYYVGYLQPRTFLLKYNENGTITDAVDCALDPLSETKCTLKSFTVEKGIYQTSNFRVQPTESIVRFPNITNLCPFGEVFNATRFASVYAWNRKRISNCVADYSVLYNSASFSTFKCYGVSPTKLNDLCFTNVYADSFVIRGDEVRQIAPGQTGKIADYNYKLPDDFTGCVIAWNSNNLDSKVGGNYNYLYRLFRKSNLKPFERDISTEIYQAGSTPCNGVEGFNCYFPLQSYGFQPTNGVGYQPYRVVVLSFELLHAPATVCGPKKSTNLVKNKCVNFNFNGLTGTGVLTESNKKFLPFQQFGRDIADTTDAVRDPQTLEILDITPCSFGGVSVITPGTNTSNQVAVLYQDVNCTEVPVAIHADQLTPTWRVYSTGSNVFQTRAGCLIGAEHVNNSYECDIPIGAGICASYQTQTNSPSGAGSVASQSIIAYTMSLGAENSVAYSNNSIAIPTNFTISVTTEILPVSMTKTSVDCTMYICGDSTECSNLLLQYGSFCTQLNRALTGIAVEQDKNTQEVFAQVKQIYKTPPIKDFGGFNFSQILPDPSKPSKRSFIEDLLFNKVTLADAGFIKQYGDCLGDIAARDLICAQKFNGLTVLPPLLTDEMIAQYTSALLAGTITSGWTFGAGAALQIPFAMQMAYRFNGIGVTQNVLYENQKLIANQFNSAIGKIQDSLSSTASALGKLQDVVNQNAQALNTLVKQLSSNFGAISSVLNDILSRLDPPEAEVQIDRLITGRLQSLQTYVTQQLIRAAEIRASANLAATKMSECVLGQSKRVDFCGKGYHLMSFPQSAPHGVVFLHVTYVPAQEKNFTTAPAICHDGKAHFPREGVFVSNGTHWFVTQRNFYEPQIITTDNTFVSGNCDVVIGIVNNTVYDPLQPELDSFKEELDKYFKNHTSPDVDLGDISGINASVVNIQKEIDRLNEVAKNLNESLIDLQELGKYEQYIKGSGRENLYFQGGGGSGYIPEAPRDGQAYVRKDGEWVLLSTFLGHHHHHHHH

SEQ ID NO: 2019 - protein, 1281 aa, Artificial Sequence
  Description of Artificial Sequence: Synthetic polypeptide
MGILPSPGMPALLSLVSLLSVLLMGCVAETGTQCVNLTTRTQLPPAYTNSFTRGVYYPDKVFRSSVLHSTQDLFLPFFSNVTWFHAIHVSGTNGTKRFDNPVLPFNDGVYFASTEKSNIIRGWIFGTTLDSKTQSLLIVNNATNVVIKVCEFQFCNDPFLGVYYHKNNKSWMESEFRVYSSANNCTFEYVSQPFLMDLEGKQGNFKNLREFVFKNIDGYFKIYSKHTPINLVRDLPQGFSALEPLVDLPIGINITRFQTLLALHRSYLTPGDSSSGWTAGAAAYYVGYLQPRTFLLKYNENGTITDAVDCALDPLSETKCTLKSFTVEKGIYQTSNFRVQPTESIVRFPNITNLCPFGEVFNATRFASVYAWNRKRISNCVADYSVLYNSASFSTFKCYGVSPTKLNDLCFTNVYADSFVIRGDEVRQIAPGQTGKIADYNYKLPDDFTGCVIAWNSNNLDSKVGGNYNYLYRLFRKSNLKPFERDISTEIYQAGSTPCNGVEGFNCYFPLQSYGFQPTNGVGYQPYRVVVLSFELLHAPATVCGPKKSTNLVKNKCVNFNFNGLTGTGVLTESNKKFLPFQQFGRDIADTTDAVRDPQTLEILDITPCSFGGVSVITPGTNTSNQVAVLYQDVNCTEVPVAIHADQLTPTWRVYSTGSNVFQTRAGCLIGAEHVNNSYECDIPIGAGICASYQTQTNSPSGAGSVASQSIIAYTMSLGAENSVAYSNNSIAIPTNFTISVTTEILPVSMTKTSVDCTMYICGDSTECSNLLLQYGSFCTQLNRALTGIAVEQDKNTQEVFAQVKQIYKTPPIKDFGGFNFSQILPDPSKPSKRSFIEDLLFNKVTLADAGFIKQYGDCLGDIAARDLICAQKFNGLTVLPPLLTDEMIAQYTSALLAGTITSGWTFGAGAALQIPFAMQMAYRFNGIGVTQNVLYENQKLIANQFNSAIGKIQDSLSSTASALGKLQDVVSQNAQALNTLVKQLSSNFGAISSVLNDILSRLDPPEAEVQIDRLITGRLQSLQTYVTQQLIRAAEIRASANLAATKMSECVLGQSKRVDFCGKGYHLMSFPQSAPHGVVFLHVTYVPAQEKNFTTAPAICHDGKAHFPREGVFVSNGTHWFVTQRNFYEPQIITTDNTFVSGNCDVVIGIVNNTVYDPLQPELDSFKEELDKYFKNHTSPDVDLGDISGINASVVNIQKEIDRLNEVAKNLNESLIDLQELGKYEQYIKGSGRENLYFQGGGGSGYIPEAPRDGQAYVRKDGEWVLLSTFLGHHHHHHHH

SEQ ID NO: 2020 - protein, 1281 aa, Artificial Sequence
  Description of Artificial Sequence: Synthetic polypeptide
MGILPSPGMPALLSLVSLLSVLLMGCVAETGTQCVNLTTRTQLPPAYTNSFTRGVYYPDKVFRSSVLHSTQDLFLPFFSNVTWFHAIHVSGTNGTKRFDNPVLPFNDGVYFASTEKSNIIRGWIFGTTLDSKTQSLLIVNNATNVVIKVCEFQFCNDPFLGVYYHKNNKSWMESEFRVYSSANNCTFEYVSQPFLMDLEGKQGNFKNLREFVFKNIDGYFKIYSKHTPINLVRDLPQGFSALEPLVDLPIGINITRFQTLLALHRSYLTPGDSSSGWTAGAAAYYVGYLQPRTFLLKYNENGTITDAVDCALDPLSETKCTLKSFTVEKGIYQTSNFRVQPTESIVRFPNITNLCPFGEVFNATRFASVYAWNRKRISNCVADYSVLYNSASFSTFKCYGVSPTKLNDLCFTNVYADSFVIRGDEVRQIAPGQTGKIADYNYKLPDDFTGCVIAWNSNNLDSKVGGNYNYLYRLFRKSNLKPFERDISTEIYQAGSTPCNGVEGFNCYFPLQSYGFQPTNGVGYQPYRVVVLSFELLHAPATVCGPKKSTNLVKNKCVNFNFNGLTGTGVLTESNKKFLPFQQFGRDIADLTDAVRDPQTLEILDITPCSFGGVSVITPGTNTSNQVAVLYQDVNCTEVPVAIHADQLTPTWRVYSTGSNVFQTRAGCLIGAEHVNNSYECDIPIGAGICASYQTQTNSPSGAGSVASQSIIAYTMSLGAENSVAYSNNSIAIPTNFTISVTTEILPVSMTKTSVDCTMYICGDSTECSNLLLQYGSFCTQLNRALTGIAVEQDKNTQEVFAQVKQIYKTPPIKDFGGFNFSQILPDPSKPSKRSFIEDLLFNKVTLADAGFIKQYGDCLGDIAARDLICAQKFNGLTVLPPLLTDEMIAQYTSALLAGTITSGWTFGAGAALQIPFAMQMAYRFNGIGVTQNVLYENQKLIANQFNSAIGKIQDSLSSTASALGKLQDVVNQNAQALNTLVKQLSSNFGAISSVLNDILSRLDPPEAEVQIDRLITGRLQSLQTYVTQQLIRAAEIRASANLAATKMSECVLGQSKRVDFCGKGYHLMSFPQSAPHGVVFLHVTYVPAQEKNFTTAPAICHDGKAHFPREGVFVSNGTHWFVTQRNFYEPQIITTDNTFVSGNCDVVIGIVNNTVYDPLQPELDSFKEELDKYFKNHTSPDVDLGDISGINASVVNIQKEIDRLNEVAKNLNESLIDLQELGKYEQYIKGSGRENLYFQGGGGSGYIPEAPRDGQAYVRKDGEWVLLSTFLGHHHHHHHH

SEQ ID NO: 2021 - protein, 1281 aa, Artificial Sequence
  Description of Artificial Sequence: Synthetic polypeptide
MGILPSPGMPALLSLVSLLSVLLMGCVAETGTQCVNLTTRTQLPPAYTNSFTRGVYYPDKVFRSSVLHSTQDLFLPFFSNVTWFHAIHVSGTNGTKRFDNPVLPFNDGVYFASTEKSNIIRGWIFGTTLDSKTQSLLIVNNATNVVIKVCEFQFCNDPFLGVYYHKNNKSWMESEFRVYSSANNCTFEYVSQPFLMDLEGKQGNFKNLREFVFKNIDGYFKIYSKHTPINLVRDLPQGFSALEPLVDLPIGINITRFQTLLALHRSYLTPGDSSSGWTAGAAAYYVGYLQPRTFLLKYNENGTITDAVDCALDPLSETKCTLKSFTVEKGIYQTSNFRVQPTESIVRFPNITNLCPFGEVFNATRFASVYAWNRKRISNCVADYSVLYNSASFSTFKCYGVSPTKLNDLCFTNVYADSFVIRGDEVRQIAPGQTGKIADYNYKLPDDFTGCVIAWNSNNLDSKVGGNYNYLYRLFRKSNLKPFERDISTEIYQAGSTPCNGVEGFNCYFPLQSYGFQPTNGVGYQPYRVVVLSFELLHAPATVCGPKKSTNLVKNKCVNFNFNGLTGTGVLTESNKKFLPFQQFGRDIADTTDAVRDPQTLEILDITPCSFGGVSVITPGTNTSNQVAVLYQDVNCTEVPVAIHADQLTPTWRVYSTGSNVFQTRAGCLIGAEHVNNSYECDIPIGAGICASYQTQTNSPSGSGSVASQSIIAYTMSLGAENSVAYSNNSIAIPTNFTISVTTEILPVSMTKTSVDCTMYICGDSTECSNLLLQYGSFCTQLNRALTGIAVEQDKNTQEVFAQVKQIYKTPPIKDFGGFNFSQILPDPSKPSKRSFIEDLLFNKVTLADAGFIKQYGDCLGDIAARDLICAQKFNGLTVLPPLLTDEMIAQYTSALLAGTITSGWTFGAGAALQIPFAMQMAYRFNGIGVTQNVLYENQKLIANQFNSAIGKIQDSLSSTASALGKLQDVVNQNAQALNTLVKQLSSNFGAISSVLNDILSRLDPPEAEVQIDRLITGRLQSLQTYVTQQLIRAAEIRASANLAATKMSECVLGQSKRVDFCGKGYHLMSFPQSAPHGVVFLHVTYVPAQEKNFTTAPAICHDGKAHFPREGVFVSNGTHWFVTQRNFYEPQIITTDNTFVSGNCDVVIGIVNNTVYDPLQPELDSFKEELDKYFKNHTSPDVDLGDISGINASVVNIQKEIDRLNEVAKNLNESLIDLQELGKYEQYIKGSGRENLYFQGGGGSGYIPEAPRDGQAYVRKDGEWVLLSTFLGHHHHHHHH

SEQ ID NO: 2022 - protein, 1281 aa, Artificial Sequence
  Description of Artificial Sequence: Synthetic polypeptide
MGILPSPGMPALLSLVSLLSVLLMGCVAETGTQCVNLTTRTQLPPAYTNSFTRGVYYPDKVFRSSVLHSTQDLFLPFFSNVTWFHAIHVSGTNGTKRFDNPVLPFNDGVYFASTEKSNIIRGWIFGTTLDSKTQSLLIVNNATNVVIKVCEFQFCNDPFLGVYYHKNNKSWMESEFRVYSSANNCTFEYVSQPFLMDTEGKQGNFKNLREFVFKNIDGYFKIYSKHTPINLVRDLPQGFSALEPLVDLPIGINITRFQTLLALHRSYLTPGDSSSGWTAGAAAYYVGYLQPRTFLLKYNENGTITDAVDCALDPLSETKCTLKSFTVEKGIYQTSNFRVQPTESIVRFPNITNLCPFGEVFNATRFASVYAWNRKRISNCVADYSVLYNSASFSTFKCYGVSPTKLNDLCFTNVYADSFVIRGDEVRQIAPGQTGKIADYNYKLPDDFTGCVIAWNSNNLDSKVGGNYNYLYRLFRKSNLKPFERDISTEIYQAGSTPCNGVEGFNCYFPLQSYGFQPTNGVGYQPYRVVVLSFELLHAPATVCGPKKSTNLVKNKCVNFNFNGLTGTGVLTESNKKFLPFQQFGRDIADTTDAVRDPQTLEILDITPCSFGGVSVITPGTNTSNQVAVLYQDVNCTEVPVAIHADQLTPTWRVYSTGSNVFQTRAGCLIGAEHVNNSYECDIPIGAGICASYQTQTNSPSGAGSVASQSIIAYTMSLGAENSVAYSNNSIAIPTNFTISVTTEILPVSMTKTSVDCTMYICGDSTECSNLLLQYGSFCTQLNRALTGIAVEQDKNTQEVFAQVKQIYKTPPIKDFGGFNFSQILPDPSKPSKRSFIEDLLFNKVTLADAGFIKQYGDCLGDIAARDLICAQKFNGLTVLPPLLTDEMIAQYTSALLAGTITSGWTFGAGAALQIPFAMQMAYRFNGIGVTQNVLYENQKLIANQFNSAIGKIQDSLSSTASALGKLQDVVNQNAQALNTLVKQLSSNFGAISSVLNDILSRLDPPEAEVQIDRLITGRLQSLQTYVTQQLIRAAEIRASANLAATKMSECVLGQSKRVDFCGKGYHLMSFPQSAPHGVVFLHVTYVPAQEKNFTTAPAICHDGKAHFPREGVFVSNGTHWFVTQRNFYEPQIITTDNTFVSGNCDVVIGIVNNTVYDPLQPELDSFKEELDKYFKNHTSPDVDLGDISGINASVVNIQKEIDRLNEVAKNLNESLIDLQELGKYEQYIKGSGRENLYFQGGGGSGYIPEAPRDGQAYVRKDGEWVLLSTFLGHHHHHHHH

SEQ ID NO: 2023 - protein, 1281 aa, Artificial Sequence
  Description of Artificial Sequence: Synthetic polypeptide
MGILPSPGMPALLSLVSLLSVLLMGCVAETGTQCVNLTTRTQLPPAYTNSFTRGVYYPDKVFRSSVLHSTQDLFLPFFSNVTWFHAIHVSGTNGTKRFDNPVLPFNDGVYFASTEKSNIIRGWIFGTTLDSKTQSLLIVNNATNVVIKVCEFQFCNDPFLGVYYHKNNKSWMESEFRVYSSANNCTFEYVSQPFKMDLEGKQGNFKNLREFVFKNIDGYFKIYSKHTPINLVRDLPQGFSALEPLVDLPIGINITRFQTLLALHRSYLTPGDSSSGWTAGAAAYYVGYLQPRTFLLKYNENGTITDAVDCALDPLSETKCTLKSFTVEKGIYQTSNFRVQPTESIVRFPNITNLCPFGEVFNATRFASVYAWNRKRISNCVADYSVLYNSASFSTFKCYGVSPTKLNDLCFTNVYADSFVIRGDEVRQIAPGQTGKIADYNYKLPDDFTGCVIAWNSNNLDSKVGGNYNYLYRLFRKSNLKPFERDISTEIYQAGSTPCNGVEGFNCYFPLQSYGFQPTNGVGYQPYRVVVLSFELLHAPATVCGPKKSTNLVKNKCVNFNFNGLTGTGVLTESNKKFLPFQQFGRDIADTTDAVRDPQTLEILDITPCSFGGVSVITPGTNTSNQVAVLYQDVNCTEVPVAIHADQLTPTWRVYSTGSNVFQTRAGCLIGAEHVNNSYECDIPIGAGICASYQTQTNSPSGAGSVASQSIIAYTMSLGAENSVAYSNNSIAIPTNFTISVTTEILPVSMTKTSVDCTMYICGDSTECSNLLLQYGSFCTQLNRALTGIAVEQDKNTQEVFAQVKQIYKTPPIKDFGGFNFSQILPDPSKPSKRSFIEDLLFNKVTLADAGFIKQYGDCLGDIAARDLICAQKFNGLTVLPPLLTDEMIAQYTSALLAGTITSGWTFGAGAALQIPFAMQMAYRFNGIGVTQNVLYENQKLIANQFNSAIGKIQDSLSSTASALGKLQDVVNQNAQALNTLVKQLSSNFGAISSVLNDILSRLDPPEAEVQIDRLITGRLQSLQTYVTQQLIRAAEIRASANLAATKMSECVLGQSKRVDFCGKGYHLMSFPQSAPHGVVFLHVTYVPAQEKNFTTAPAICHDGKAHFPREGVFVSNGTHWFVTQRNFYEPQIITTDNTFVSGNCDVVIGIVNNTVYDPLQPELDSFKEELDKYFKNHTSPDVDLGDISGINASVVNIQKEIDRLNEVAKNLNESLIDLQELGKYEQYIKGSGRENLYFQGGGGSGYIPEAPRDGQAYVRKDGEWVLLSTFLGHHHHHHHH

SEQ ID NO: 2024 - protein, 1281 aa, Artificial Sequence
  Description of Artificial Sequence: Synthetic polypeptide
MGILPSPGMPALLSLVSLLSVLLMGCVAETGTQCVNLTTRTQLPPAYTNSFTRGVYYPDKVFRSSVLHSTQDLFLPFFSNVTWFHAIHVSGTNGTKRFDNPVLPFNDGVYFASTEKSNIVRGWIFGTTLDSKTQSLLIVNNATNVVIKVCEFQFCNDPFLGVYYHKNNKSWMESEFRVYSSANNCTFEYVSQPFLMDLEGKQGNFKNLREFVFKNIDGYFKIYSKHTPINLVRDLPQGFSALEPLVDLPIGINITRFQTLLALHRSYLTPGDSSSGWTAGAAAYYVGYLQPRTFLLKYNENGTITDAVDCALDPLSETKCTLKSFTVEKGIYQTSNFRVQPTESIVRFPNITNLCPFGEVFNATRFASVYAWNRKRISNCVADYSVLYNSASFSTFKCYGVSPTKLNDLCFTNVYADSFVIRGDEVRQIAPGQTGKIADYNYKLPDDFTGCVIAWNSNNLDSKVGGNYNYLYRLFRKSNLKPFERDISTEIYQAGSTPCNGVEGFNCYFPLQSYGFQPTNGVGYQPYRVVVLSFELLHAPATVCGPKKSTNLVKNKCVNFNFNGLTGTGVLTESNKKFLPFQQFGRDIADTTDAVRDPQTLEILDITPCSFGGVSVITPGTNTSNQVAVLYQDVNCTEVPVAIHADQLTPTWRVYSTGSNVFQTRAGCLIGAEHVNNSYECDIPIGAGICASYQTQTNSPSGAGSVASQSIIAYTMSLGAENSVAYSNNSIAIPTNFTISVTTEILPVSMTKTSVDCTMYICGDSTECSNLLLQYGSFCTQLNRALTGIAVEQDKNTQEVFAQVKQIYKTPPIKDFGGFNFSQILPDPSKPSKRSFIEDLLFNKVTLADAGFIKQYGDCLGDIAARDLICAQKFNGLTVLPPLLTDEMIAQYTSALLAGTITSGWTFGAGAALQIPFAMQMAYRFNGIGVTQNVLYENQKLIANQFNSAIGKIQDSLSSTASALGKLQDVVNQNAQALNTLVKQLSSNFGAISSVLNDILSRLDPPEAEVQIDRLITGRLQSLQTYVTQQLIRAAEIRASANLAATKMSECVLGQSKRVDFCGKGYHLMSFPQSAPHGVVFLHVTYVPAQEKNFTTAPAICHDGKAHFPREGVFVSNGTHWFVTQRNFYEPQIITTDNTFVSGNCDVVIGIVNNTVYDPLQPELDSFKEELDKYFKNHTSPDVDLGDISGINASVVNIQKEIDRLNEVAKNLNESLIDLQELGKYEQYIKGSGRENLYFQGGGGSGYIPEAPRDGQAYVRKDGEWVLLSTFLGHHHHHHHH

SEQ ID NO: 2025 - protein, 1281 aa, Artificial Sequence
  Description of Artificial Sequence: Synthetic polypeptide
MGILPSPGMPALLSLVSLLSVLLMGCVAETGTQCVNLTTRTQLPPAYTNSFTRGVYYPDKVFRSSVLHSTQDLFLPFFSNVTWFHAIHVSGTNGTKRFDNPVLPFNDGVYFASTEKSNIIRGWIFGTTLDSKTQSLLIVNNATNVVIKVCEFQFCNDPFLGVYYHKNNKSWMESEFRVYSSANNCTFEYVSQPFLMDLEGKQGNFKNLREFVFKNIDGYFKIYSKHTPINLVRDLPQGFSALEPLVDLPIGINITRFQTLLALHRSYLTPGDSSSGWTAGAAAYYVGYLQPRTFLLKYNENGTITDAVDCALDPLSETKCTLKSFTVEKGIYQTSNFRVQPTESIVRFPNITNLCPFGEVFNATRFASVYAWNRKRISNCVADYSVLYNSASFSTFKCYGVSPTKLNDLCFTNVYADSFVIRGDEVRQIAPGQTGKIADYNYKLPDDFTGCVIAWNSNNLDSKVGGNYNYLYRLFRKSNLKPFERDISTEIYQAGSTPCNGVEGFNCYFPLQSYGFQPTNGVGYQPYRVVVLSFELLHAPATVCGPKKSTNLVKNKCVNFNFNGLTGTGVLTESNKKFLPFQQFGRDIADTTDAVRDPQTLEILDITPCSFGGVSVITPGTNTSNQVAVLYQDVNCTEVPVAIHADQLTPTWRVYSTGSNVFQTRAGCLIGAEHVNNSYECDIPIGAGICASYQTQTNSPSGAGSVASQSIIAYTMSLGAENPVPYSNNNIAIPTNFTISVTTEILPVSMTKTSVDCTMYICGDSTECSNLLLQYGSFCTQLNRALTGIAVEQDKNTQEVFAQVKQIYKTPPIKDFGGFNFSQILPDPSKPSKRSFIEDLLFNKVTLADAGFIKQYGDCLGDIAARDLICAQKFNGLTVLPPLLTDEMIAQYTSALLAGTITSGWTFGAGAALQIPFAMQMAYRFNGIGVTQNVLYENQKLIANQFNSAIGKIQDSLSSTASALGKLQDVVNQNAQALNTLVKQLSSNFGAISSVLNDILSRLDPPEAEVQIDRLITGRLQSLQTYVTQQLIRAAEIRASANLAATKMSECVLGQSKRVDFCGKGYHLMSFPQSAPHGVVFLHVTYVPAQEKNFTTAPGICHDGKAYFPREGVFVSNGTSWYITQRNFYEPRPITTDNTFVSGNCDVVIGIVNNTVYDPLQPELDSFKEELDKYFKNHTSPDVDLGDISGINASVVNIQKEIDRLNEVAKNLNESLIDLQELGKYEQYIKGSGRENLYFQGGGGSGYIPEAPRDGQAYVRKDGEWVLLSTFLGHHHHHHHH

SEQ ID NO: 2026 - protein, 1281 aa, Artificial Sequence
  Description of Artificial Sequence: Synthetic polypeptide
MGILPSPGMPALLSLVSLLSVLLMGCVAETGTQCVNLTTRTQLPPAYTNSFTRGVYYPDKIFRSNVLHSTQDLFLPFFSNVTWFHALHVKGTNGTKRFDNPVLPFNDGVYFAAIEKSNIIRGWIFGTTLDSKTQSLLIVNNATNVVIRVCEFQFCENPFLGVYYHKNNKSWREEEWRVYSSANNCTFEYVSQPFLYDLNGKQGNFHHLREFVFKNIDGYFKIYSKWEPINLVRDLPQGFSALEPLMDLPIGINITHFQTILSLSRSYRTPGDSSSGWTAGAAAYYVGYLQPRTFLLKYDENGYITDAVDCSLDPLSETKCKLKSFTVEKGIYQTSNFRVQPTYEIVRFPNITNCCPFDEVFNATRFASVYNWNRQRISNCVADYSVLYNSASFSTFQCYGVSPTKLNDLCFTNVYADIFVIRGSEVRQIAPGQTGEIADYNYKLPDDFTGCVIAWNSNNLDSTVGGNYNYLYRLFRKSNMKPFERDISTEAYQAGCTPCNGVEGFNCYFPLQSYGFQPTNGVGYQPYRVVVLKFELLHAPATVCGPKDSTNLVKNKCVDYNFNGRTGTGVLTESNKKFLPFQQFGRDISDTLDAVRDPTTGEILCITPCSFGGVSVITPGTNTSNQVAVLYQDVNCTEVPEAIHSNQLRPTWRVYSTGSNVFQTRAGCLIGAEHVNNSYECDIPIGNGICASYQTQTNSPSGSGSVSSQSIIAYTMSLGAENTVAYSNNNIAIPTNFTISVQTEILPVSMTKVSVDCTMYICGDSTRCLNLLSQYGSFCSQLERALNGIAREQDKNLLNVFAQVKQIYKTPPIKDFGGFNFSQILPDPSKPSKRSFIEDLLFNKVTLADLGFVKQYKDCLGDQAARDLICAQKYNGIMVLPPLLTDEMIAQYTASLLAGTITAGWTFGAGAALQIPFAMQMAYRFNGIGVQQNVLYENQKIIANQFNNAIGNIQDGLSTTASALSKLQDVVNQQAQALNELVKQLSSNFGAISSVINDIYNRLDPPEAEAQIDRLITGRLQSLQTYVTQQLIRATEIRASAQLAAEKMSECVKGQSNRYGFCGNGYHLMSFPQSAPHGVVFLHVTYVPTQFKNFTTAPGICHDGKAFFPREGVFVSNGTEWYITQRNFYEPRIITTDNTFVSGNCDVVIGIVNNTVYDPLQPELDSFKEELDKYFKNHTSPDVDLGDISGINASVVNIQKEIDRLNEVAKNLNESLIDLQELGKYEQYIKGSGRENLYFQGGGGSGYIPEAPRDGQAYVRKDGEWVLLSTFLGHHHHHHHH

SEQ ID NO: 2027 - protein, 1281 aa, Artificial Sequence
  Description of Artificial Sequence: Synthetic polypeptide
MGILPSPGMPALLSLVSLLSVLLMGCVAETGTQCVNLTTRTQLPPAYTNSFTRGVYYPDKVFRSSVLHSTQDLFLPFFSNVTWFHAIHVSGTNGTVRFDNPVLPFNDGVYFASTEKSNIIRGWIFGTTLDSKTQSLLIVNNATNVVIKVCEFQFCNDPFLGVYYHKNNKSWMESEFRVYSSANNCTFEYVSQPFLMDLEGKQGNFKNLREFVFKNIDGYFKIYSKHTPINLVRDLPQGFSALEPLVDLPIGINITRFQTLLALHRSYLTPGDSSSGWTAGAAAYYVGYLQPRTFLLKYNENGTITDAVDCALDPLSETKCTLKSFTVEKGIYQTSNFRVQPTESIVRFPNITNLCPFGEVFNATRFASVYAWNRKRISNCVADYSVLYNSASFSTFKCYGVSPTKLNDLCFTNVYADSFVIRGDEVRQIAPGQTGKIADYNYKLPDDFTGCVIAWNSNNLDSKVGGNYNYLYRLFRKSNLKPFERDISTEIYQAGSTPCNGVEGFNCYFPLQSYGFQPTNGVGYQPYRVVVLSFELLHAPATVCGPKKSTNLVKNKCVNFNFNGLTGTGVLTESNKKFLPFQQFGRDIADTTDAVRDPQTLEILDITPCSFGGVSVITPGTNTSNQVAVLYQDVNCTEVPVAIHADQLTPTWRVYSTGSNVFQTRAGCLIGAEHVNNSYECDIPIGAGICASYQTQTNSPSGAGSVASQSIIAYTMSLGAENSVAYSNNSIAIPTNFTISVTTEILPVSMTKTSVDCTMYICGDSTECSNLLLQYGSFCTQLNRALTGIAVEQDKNTQEVFAQVKQIYKTPPIKDFGGFNFSQILPDPSKPSKRSFIEDLLFNKVTLADAGFIKQYGDCLGDIAARDLICAQKFNGLTVLPPLLTDEMIAQYTSALLAGTITSGWTFGAGAALQIPFAMQMAYRFNGIGVTQNVLYENQKLIANQFNSAIGKIQDSLSSTASALGKLQDVVNQNAQALNTLVKQLSSNFGAISSVLNDILSRLDPPEAEVQIDRLITGRLQSLQTYVTQQLIRAAEIRASANLAATKMSECVLGQSKRVDFCGKGYHLMSFPQSAPHGVVFLHVTYVPAQEKNFTTAPAICHDGKAHFPREGVFVSNGTHWFVTQRNFYEPQIITTDNTFVSGNCDVVIGIVNNTVYDPLQPELDSFKEELDKYFKNHTSPDVDLGDISGINASVVNIQKEIDRLNEVAKNLNESLIDLQELGKYEQYIKGSGRENLYFQGGGGSGYIPEAPRDGQAYVRKDGEWVLLSTFLGHHHHHHHH

SEQ ID NO: 2028 - protein, 1281 aa, Artificial Sequence
  Description of Artificial Sequence: Synthetic polypeptide
MGILPSPGMPALLSLVSLLSVLLMGCVAETGTQCVNLTTRTQLPPAYTNSFTRGVYYPDKVFRSSVLHSTQDLFLPFFSNVTWFHAIHVSGTNGTKRFDNPVLPFNDGVYFASTEKSNIIRGWIFGTTLDSKTQSLLIVNNATNVVIKVCEFQFCNDPFLGVYYHKNNKSWMESEFRVYSSANNCTFEYVSQPFLMDLEGKQGNFKNLREFVFKNIDGYFKIYSKHTPINLVRDLPQGFSALEPLVDLPIGINITRFQTLLALHRSYLTPGDSSSGWTAGAAAYYVGYLQPRTFLLKYNENGTITDAVDCALDPLSETKCTLKSFTVEKGIYQTSNFRVQPTESIVRFPNITNLCPFGEVFNATRFASVYAWNRKRISNCVADYSVLYNSASFSTFKCYGVSPTKLNDLCFTNVYADSFVIRGDEVRQIAPGQTGKIADYNYKLPDDFTGCVIAWNSNNLDSKVGGNYNYLYRLFRKSNLKPFERDISTEIYQAGSTPCNGVEGFNCYFPLQSYGFQPTNGVGYQPYRVVVLSFELLHAPATVCGPKKSTNLVKNKCVNFNFNGLTGTGVLTESNKKFLPFQQFGRDIADTTDAVRDPQTLEILDITPCSFGGVSVITPGTNTSNQVAVLYQDVNCTEVPVAIHADQLTPTWRVYSTGSNVFQTRAGCLIGAEHVNNSYECDIPIGAGICASYQTQTNSPSGAGSVASQSIIAYTMSLGAENSVAYSNNSIAIPTNFTISVTTEILPVSMTKTSVDCTMYICGDSTECSNLLLQYGSFCTQLNRALTGIAVEQDKNTQEVFAQVKQIYKTPPIKDFGGFNFSQILPDPSKPSKRSFIEDLLFNKVTLADAGFIKQYGDCLGDIAARDLICAQKFNGLTVLPPLLTDEMIAQYTSALLAGTITSGWTFGAGAALQIPFAMQMAYRFNGIGVTQNVLYENQKLIANQFNNAIGKIQDSLSSTASALGKLQDVVNQNAQALNTLVKQLSSNFGAISSVLNDILSRLDPPEAEVQIDRLITGRLQSLQTYVTQQLIRAAEIRASANLAATKMSECVLGQSKRVDFCGKGYHLMSFPQSAPHGVVFLHVTYVPAQEKNFTTAPAICHDGKAHFPREGVFVSNGTHWFVTQRNFYEPQIITTDNTFVSGNCDVVIGIVNNTVYDPLQPELDSFKEELDKYFKNHTSPDVDLGDISGINASVVNIQKEIDRLNEVAKNLNESLIDLQELGKYEQYIKGSGRENLYFQGGGGSGYIPEAPRDGQAYVRKDGEWVLLSTFLGHHHHHHHH

SEQ ID NO: 2029 - protein, 1281 aa, Artificial Sequence
  Description of Artificial Sequence: Synthetic polypeptide
MGILPSPGMPALLSLVSLLSVLLMGCVAETGTQCVNLTTRTQLPPAYTNSFTRGVYYPDKVFRSSVLHSTQDLFLPFFSNVTWFHAIHVSGTNGTKRFDNPVLPFNDGVYFASTEKSNIIRGWIFGTTLDSKTQSLLIVNNATNVVIKVCEFQFCNDPFLGVYYHKNNKSWMESEFRVYSSANNCTFEYVSQPFLMDLEGKQGNFKNLREFVFKNIDGYFKIYSKHTPINLVRDLPQGFSALEPLVDLPIGINITRFQTLLALHRSYLTPGDSSSGWTAGAAAYYVGYLQPRTFLLKYNENGTITDAVDCALDPLSETKCTLKSFTVEKGIYQTSNFRVQPTESIVRFPNITNLCPFGEVFNATRFASVYAWNRKRISNCVADYSVLYNSASFSTFKCYGVSPTKLNDLCFTNVYADSFVIRGDEVRQIAPGQTGKIADYNYKLPDDFTGCVIAWNSNNLDSKVGGNYNYLYRLFRKSNLKPFERDISTEIYQAGSTPCNGVEGFNCYFPLQSYGFQPTNGVGYQPYRVVVLSFELLHAPATVCGPKKSTNLVKNKCVNFNFNGLTGTGVLTESNKKFLPFQQFGRDIADTTDAVRDPQTLEILDITPCSFGGVSVITPGTNTSNQVAVLYQDVNCTEVPVAIHADQLTPTWRVYSTGSNVFQTRAGCLIGAEHVNNSYECDIPIGAGICASYQTQTNSPSGAGSVASQSIIAYTMSLGAENSVAYSNNSIAIPTNFTISVTTEVLPVSMTKTSVDCTMYICGDSTECSNLLLQYGSFCTQLNRALTGIAVEQDKNTQEVFAQVKQIYKTPPIKDFGGFNFSQILPDPSKPSKRSFIEDLLFNKVTLADAGFIKQYGDCLGDIAARDLICAQKFNGLTVLPPLLTDEMIAQYTSALLAGTITSGWTFGAGAALQIPFAMQMAYRFNGIGVTQNVLYENQKLIANQFNSAIGKIQDSLSSTASALGKLQDVVNQNAQALNTLVKQLSSNFGAISSVLNDILSRLDPPEAEVQIDRLITGRLQSLQTYVTQQLIRAAEIRASANLAATKMSECVLGQSKRVDFCGKGYHLMSFPQSAPHGVVFLHVTYVPAQEKNFTTAPAICHDGKAHFPREGVFVSNGTHWFVTQRNFYEPQIITTDNTFVSGNCDVVIGIVNNTVYDPLQPELDSFKEELDKYFKNHTSPDVDLGDISGINASVVNIQKEIDRLNEVAKNLNESLIDLQELGKYEQYIKGSGRENLYFQGGGGSGYIPEAPRDGQAYVRKDGEWVLLSTFLGHHHHHHHH

SEQ ID NO: 2030 - protein, 1281 aa, Artificial Sequence
  Description of Artificial Sequence: Synthetic polypeptide
MGILPSPGMPALLSLVSLLSVLLMGCVAETGTQCVNLTTRTQLPPAYTNSFTRGVYYPDKVFRSSVLHSTQDLFLPFFSNVTWFHAIHVSGTNGTKRFDNPVLPFNDGVYFASTEKSNIIRGWIFGTTLDSKTQSLLIVNNATNVVIKVCEFQFCNDPFLGVYYHKNNKSWMESEFRVYSSANNCTFEYVSQPFLMDLEGKQGNFKNLREFVFKNIDGYFKIYSKHTPINLVRDLPQGFSALEPLVDLPIGINITRFQTLLALHRSYLTPGDSSSGWTAGAAAYYVGYLQPRTFLLKYNENGTITDAVDCALDPLSETKCTLKSFTVEKGIYQTSNFRVQPTESIVRFPNITNLCPFGEVFNATRFASVYAWNRKRISNCVADYSVLYNSASFSTFKCYGVSPTKLNDLCFTNVYADSFVIRGDEVRQIAPGQTGKIADYNYKLPDDFTGCVIAWNSNNLDSKVGGNYNYLYRLFRKSNLKPFERDISTEIYQAGSTPCNGVEGFNCYFPLQSYGFQPTNGVGYQPYRVVVLSFELLHAPATVCGPKKSTNLVKNKCVNFNFNGLTGTGVLTESNKKFLPFQQFGRDISDNTDAVRDPTTLEILDITPCSFGGVSVITPGTNTSNQVAVLYQDVNCTEVPVAIHADQLTPTWRVYSTGSNVFQTRAGCLIGAEHVNNSYECDIPIGAGICASYQTQTNSPSGAGSVASQSIIAYTMSLGAENSVAYSNNSIAIPTNFTISVTTEILPVSMTKTSVDCTMYICGDSTECSNLLLQYGSFCTQLNRALTGIAVEQDKNTQEVFAQVKQIYKTPPIKDFGGFNFSQILPDPSKPSKRSFIEDLLFNKVTLADAGFIKQYGDCLGDIAARDLICAQKFNGLTVLPPLLTDEMIAQYTSALLAGTITSGWTFGAGAALQIPFAMQMAYRFNGIGVTQNVLYENQKLIANQFNSAIGKIQDSLSSTASALGKLQDVVNQNAQALNTLVKQLSSNFGAISSVLNDILSRLDPPEAEVQIDRLITGRLQSLQTYVTQQLIRAAEIRASANLAATKMSECVLGQSKRVDFCGKGYHLMSFPQSAPHGVVFLHVTYVPAQEKNFTTAPAICHDGKAHFPREGVFVSNGTHWFVTQRNFYEPQIITTDNTFVSGNCDVVIGIVNNTVYDPLQPELDSFKEELDKYFKNHTSPDVDLGDISGINASVVNIQKEIDRLNEVAKNLNESLIDLQELGKYEQYIKGSGRENLYFQGGGGSGYIPEAPRDGQAYVRKDGEWVLLSTFLGHHHHHHHH

SEQ ID NO: 2031 - protein, 1281 aa, Artificial Sequence
  Description of Artificial Sequence: Synthetic polypeptide
MGILPSPGMPALLSLVSLLSVLLMGCVAETGTQCVNLTTRTQLPPAYTNSFTRGVYYPDKVFRSSVLHSTQDLFLPFFSNVTWFHAIHVSGTNGTKRFDNPVLPFNDGVYFASTEKSNIIRGWIFGTTLDSKTQSLLIVNNATNVVIKVCEFQFCNDPFLGVYYHKNNKSWMESEFRVYSSANNCTFEYVSQPFLMDLEGKQGNFKNLREFVFKNIDGYFKIYSKHTPINLVRDLPQGFSALEPLVDLPIGINITRFQTLLALHRSYLTPGDSSSGWTAGAAAYYVGYLQPRTFLLKYNENGTITDAVDCALDPLSETKCRLKSFTVEKGIYQTSNFRVQPTESIVRFPNITNLCPFGEVFNATRFASVYAWNRKRISNCVADYSVLYNSASFSTFKCYGVSPTKLNDLCFTNVYADSFVIRGDEVRQIAPGQTGKIADYNYKLPDDFTGCVIAWNSNNLDSKVGGNYNYLYRLFRKSNLKPFERDISTEIYQAGSTPCNGVEGFNCYFPLQSYGFQPTNGVGYQPYRVVVLSFELLHAPATVCGPKKSTNLVKNKCVNFNFNGLTGTGVLTESNKKFLPFQQFGRDIADTTDAVRDPQTLEILDITPCSFGGVSVITPGTNTSNQVAVLYQDVNCTEVPVAIHADQLTPTWRVYSTGSNVFQTRAGCLIGAEHVNNSYECDIPIGAGICASYQTQTNSPSGAGSVASQSIIAYTMSLGAENSVAYSNNSIAIPTNFTISVTTEILPVSMTKTSVDCTMYICGDSTECSNLLLQYGSFCTQLNRALTGIAVEQDKNTQEVFAQVKQIYKTPPIKDFGGFNFSQILPDPSKPSKRSFIEDLLFNKVTLADAGFIKQYGDCLGDIAARDLICAQKFNGLTVLPPLLTDEMIAQYTSALLAGTITSGWTFGAGAALQIPFAMQMAYRFNGIGVTQNVLYENQKLIANQFNSAIGKIQDSLSSTASALGKLQDVVNQNAQALNTLVKQLSSNFGAISSVLNDILSRLDPPEAEVQIDRLITGRLQSLQTYVTQQLIRAAEIRASANLAATKMSECVLGQSKRVDFCGKGYHLMSFPQSAPHGVVFLHVTYVPAQEKNFTTAPAICHDGKAHFPREGVFVSNGTHWFVTQRNFYEPQIITTDNTFVSGNCDVVIGIVNNTVYDPLQPELDSFKEELDKYFKNHTSPDVDLGDISGINASVVNIQKEIDRLNEVAKNLNESLIDLQELGKYEQYIKGSGRENLYFQGGGGSGYIPEAPRDGQAYVRKDGEWVLLSTFLGHHHHHHHH

SEQ ID NO: 2032 - protein, 1281 aa, Artificial Sequence
  Description of Artificial Sequence: Synthetic polypeptide
MGILPSPGMPALLSLVSLLSVLLMGCVAETGTQCVNLTTRTQLPPAYTNSFTRGVYYPDKVFRSSVLHSTQDLFLPFFSNVTWFHAIHVSGTNGTKRFDNPVLPFNDGVYFASTEKSNIIRGWIFGTTLDSKTQSLLIVNNATNVVIKVCEFQFCDDPFLGVYYHKNNKSWMETEFRVYSSANNCTFEYVSQPFLMDLEGKQGNFKNLREFVFKNIDGYFKIYSKHTPINLVRDLPQGFSALEPLVDLPIGINITRFQTLLALHRSYLTPGDSSSGWTAGAAAYYVGYLQPRTFLLKYNENGTITDAVDCALDPLSETKCTLKSFTVEKGIYQTSNFRVQPTESIVRFPNITNLCPFGEVFNATRFASVYAWNRKRISNCVADYSVLYNSASFSTFKCYGVSPTKLNDLCFTNVYADSFVIRGDEVRQIAPGQTGKIADYNYKLPDDFTGCVIAWNSNNLDSKVGGNYNYLYRLFRKSNLKPFERDISTEIYQAGSTPCNGVEGFNCYFPLQSYGFQPTNGVGYQPYRVVVLSFELLHAPATVCGPKKSTNLVKNKCVNFNFNGLTGTGVLTESNKKFLPFQQFGRDIADTTDAVRDPQTLEILDITPCSFGGVSVITPGTNTSNQVAVLYQDVNCTEVPVAIHADQLTPTWRVYSTGSNVFQTRAGCLIGAEHVNNSYECDIPIGAGICASYQTQTNSPSGAGSVASQSIIAYTMSLGAENSVAYSNNSIAIPTNFTISVTTEILPVSMTKTSVDCTMYICGDSTECSNLLLQYGSFCTQLNRALTGIAVEQDKNTQEVFAQVKQIYKTPPIKDFGGFNFSQILPDPSKPSKRSFIEDLLFNKVTLADAGFIKQYGDCLGDIAARDLICAQKFNGLTVLPPLLTDEMIAQYTSALLAGTITSGWTFGAGAALQIPFAMQMAYRFNGIGVTQNVLYENQKLIANQFNSAIGKIQDSLSSTASALGKLQDVVNQNAQALNTLVKQLSSNFGAISSVLNDILSRLDPPEAEVQIDRLITGRLQSLQTYVTQQLIRAAEIRASANLAATKMSECVLGQSKRVDFCGKGYHLMSFPQSAPHGVVFLHVTYVPAQEKNFTTAPAICHDGKAHFPREGVFVSNGTHWFVTQRNFYEPQIITTDNTFVSGNCDVVIGIVNNTVYDPLQPELDSFKEELDKYFKNHTSPDVDLGDISGINASVVNIQKEIDRLNEVAKNLNESLIDLQELGKYEQYIKGSGRENLYFQGGGGSGYIPEAPRDGQAYVRKDGEWVLLSTFLGHHHHHHHH

SEQ ID NO: 2033 - protein, 1281 aa, Artificial Sequence
  Description of Artificial Sequence: Synthetic polypeptide
MGILPSPGMPALLSLVSLLSVLLMGCVAETGTQCVNLTTRTQLPPAYTNSFTRGVYYPDKVFRSSVLHSTQDLFLPFFSNVTWFHAIHVSGTNGTKRFDNPVLPFNDGVYFASTEKSNIIRGWIFGTTLDSKTQSLLIVNNATNVVIKVCEFQFCNDPFLGVYYHKNNKSWMESEFRVYSSANNCTFEYVSQPFLMDLEGKQGNFKNLREFVFKNIDGYFKIYSKHTPINLVRDLPQGFSALEPLVDLPIGINITRFQTLLALHRSYLTPGDSSSGWTAGAAAYYVGYLQPRTFLLKYNENGTITDAVDCALDPLSETKCTLKSFTVEKGIYQTSNFRVQPTESIVRFPNITNLCPFGEVFNATRFASVYAWNRKRISNCVADYSVLYNSASFSTFKCYGVSPTKLNDLCFTNVYADSFVIRGDEVRQIAPGQTGKIADYNYKLPDDFTGCVIAWNSNNLDSKVGGNYNYLYRLFRKSNLKPFERDISTEIYQAGSTPCNGVEGFNCYFPLQSYGFQPTNGVGYQPYRVVVLSFELLHAPATVCGPKKSTNLVKNKCVNFNFNGLTGTGVLTESNKKFLPFQQFGRDIADTTDAVRDPQTLEILDITPCSFGGVSVITPGTNTSNQVAVLYQDVNCTEVPVAIHADQLTPTWRVYSTGSNVFQTRAGCLIGAEHVNNSYECDIPIGAGICASYQTQTNSPSGAGSVASQSIIAYTMSLGAENSVAYSNNSIAIPTNFTISVTTEILPVSMTKTSVDCTMYICGDSTECSNLLLQYGSFCTQLNRALTGIASEQDKNTQEVFAQVKQIYKTPPIKDFGGFNFSQILPDPSKPSKRSFIEDLLFNKVTLADAGFIKQYGDCLGDIAARDLICAQKFNGLTVLPPLLTDEMIAQYTSALLAGTITSGWTFGAGAALQIPFAMQMAYRFNGIGVTQNVLYENQKLIANQFNSAIGKIQDSLSSTASALGKLQDVVNQNAQALNTLVKQLSSNFGAISSVLNDILSRLDPPEAEVQIDRLITGRLQSLQTYVTQQLIRAAEIRASANLAATKMSECVLGQSKRVDFCGKGYHLMSFPQSAPHGVVFLHVTYVPAQEKNFTTAPAICHDGKAHFPREGVFVSNGTHWFVTQRNFYEPQIITTDNTFVSGNCDVVIGIVNNTVYDPLQPELDSFKEELDKYFKNHTSPDVDLGDISGINASVVNIQKEIDRLNEVAKNLNESLIDLQELGKYEQYIKGSGRENLYFQGGGGSGYIPEAPRDGQAYVRKDGEWVLLSTFLGHHHHHHHH

SEQ ID NO: 2034 - protein, 1281 aa, Artificial Sequence
  Description of Artificial Sequence: Synthetic polypeptide
MGILPSPGMPALLSLVSLLSVLLMGCVAETGTQCVNLTTRTQLPPAYTNSFTRGVYYPDKVFRSSVLHSTQDLFLPFFSNVTWFHAIHVSGTNGTKRFDNPVLPFNDGVYFASTEKSNIIRGWIFGTTLDSKTQSLLIVNNATNVVIKVCEFQFCNDPFLGVYYHKNNKSWMESEFRVYSSANNCTFEYVSQPFLMDLEGKQGNFKNLREFVFKNIDGYFKIYSKHTPINLVRDLPQGFSALEPLVDLPIGINITRFQTLLALHRSYLTPGDSSSGWTAGAAAYYVGYLQPRTFLLKYNENGTITDAVDCALDPLSETKCTLKSFTVEKGIYQTSNFRVQPTESIVRFPNITNLCPFGEVFNATRFASVYAWNRKRISNCVADYSVLYNSASFSTFKCYGVSPTKLNDLCFTNVYADSFVIRGDEVRQIAPGQTGKIADYNYKLPDDFTGCVIAWNSNNLDSKVGGNYNYLYRLFRKSNLKPFERDISTEIYQAGSTPCNGVEGFNCYFPLQSYGFQPTNGVGYQPYRVVVLSFELLHAPATVCGPKKSTNLVKNKCVNFNFNGLTGTGVLTESNKKFLPFQQFGRDIADTTDAVRDPQTLEILDITPCSFGGVSVITPGTNTSNQVAVLYQDVNCTEVPLAIHADQLTPTWRVYSTGSNVFQTRAGCLIGAEHVNNSYECDIPIGAGICASYQTQTNSPSGAGSVASQSIIAYTMSLGAENSVAYSNNSIAIPTNFTISVTTEILPVSMTKTSVDCTMYICGDSTECSNLLLQYGSFCTQLNRALTGIAVEQDKNTQEVFAQVKQIYKTPPIKDFGGFNFSQILPDPSKPSKRSFIEDLLFNKVTLADAGFIKQYGDCLGDIAARDLICAQKFNGLTVLPPLLTDEMIAQYTSALLAGTITSGWTFGAGAALQIPFAMQMAYRFNGIGVTQNVLYENQKLIANQFNSAIGKIQDSLSSTASALGKLQDVVNQNAQALNTLVKQLSSNFGAISSVLNDILSRLDPPEAEVQIDRLITGRLQSLQTYVTQQLIRAAEIRASANLAATKMSECVLGQSKRVDFCGKGYHLMSFPQSAPHGVVFLHVTYVPAQEKNFTTAPAICHDGKAHFPREGVFVSNGTHWFVTQRNFYEPQIITTDNTFVSGNCDVVIGIVNNTVYDPLQPELDSFKEELDKYFKNHTSPDVDLGDISGINASVVNIQKEIDRLNEVAKNLNESLIDLQELGKYEQYIKGSGRENLYFQGGGGSGYIPEAPRDGQAYVRKDGEWVLLSTFLGHHHHHHHH

SEQ ID NO: 2035 - protein, 1281 aa, Artificial Sequence
  Description of Artificial Sequence: Synthetic polypeptide
MGILPSPGMPALLSLVSLLSVLLMGCVAETGTQCVNLTTRTQLPPAYTNSFTRGVYYPDKVFRSSVLHSTQDLFLPFFSNVTWFHAIHVSGTNGTKRFDNPVLPFNDGVYFASTEKSNIIRGWIFGTTLDSKTQSLLIVNNATNVVIKVCEFQFCNDPFLGVYYHKNNKSWMEIEFRVYSSANNCTFEYVSQPFLMDLEGKQGNFKNLREFVFKNIDGYFKIYSKHTPINLVRDLPQGFSALEPLVDLPIGINITRFQTLLALHRSYLTPGDSSSGWTAGAAAYYVGYLQPRTFLLKYNENGTITDAVDCALDPLSETKCTLKSFTVEKGIYQTSNFRVQPTESIVRFPNITNLCPFGEVFNATRFASVYAWNRKRISNCVADYSVLYNSASFSTFKCYGVSPTKLNDLCFTNVYADSFVIRGDEVRQIAPGQTGKIADYNYKLPDDFTGCVIAWNSNNLDSKVGGNYNYLYRLFRKSNLKPFERDISTEIYQAGSTPCNGVEGFNCYFPLQSYGFQPTNGVGYQPYRVVVLSFELLHAPATVCGPKKSTNLVKNKCVNFNFNGLTGTGVLTESNKKFLPFQQFGRDIADTTDAVRDPQTLEILDITPCSFGGVSVITPGTNTSNQVAVLYQDVNCTEVPVAIHADQLTPTWRVYSTGSNVFQTRAGCLIGAEHVNNSYECDIPIGAGICASYQTQTNSPSGAGSVASQSIIAYTMSLGAENSVAYSNNSIAIPTNFTISVTTEILPVSMTKTSVDCTMYICGDSTECSNLLLQYGSFCTQLNRALTGIAVEQDKNTQEVFAQVKQIYKTPPIKDFGGFNFSQILPDPSKPSKRSFIEDLLFNKVTLADAGFIKQYGDCLGDIAARDLICAQKFNGLTVLPPLLTDEMIAQYTSALLAGTITSGWTFGAGAALQIPFAMQMAYRFNGIGVTQNVLYENQKLIANQFNSAIGKIQDSLSSTASALGKLQDVVNQNAQALNTLVKQLSSNFGAISSVLNDILSRLDPPEAEVQIDRLITGRLQSLQTYVTQQLIRAAEIRASANLAATKMSECVLGQSKRVDFCGKGYHLMSFPQSAPHGVVFLHVTYVPAQEKNFTTAPAICHDGKAHFPREGVFVSNGTHWFVTQRNFYEPQIITTDNTFVSGNCDVVIGIVNNTVYDPLQPELDSFKEELDKYFKNHTSPDVDLGDISGINASVVNIQKEIDRLNEVAKNLNESLIDLQELGKYEQYIKGSGRENLYFQGGGGSGYIPEAPRDGQAYVRKDGEWVLLSTFLGHHHHHHHH

SEQ ID NO: 2036 - protein, 1281 aa, Artificial Sequence
  Description of Artificial Sequence: Synthetic polypeptide
MGILPSPGMPALLSLVSLLSVLLMGCVAETGTQCVNLTTRTQLPPAYTNSFTRGVYYPDKVFRSSVLHSTQDLFLPFFSNVTWFHAIHVSGTNGTKRFDNPVLPFNDGVYFASTEKSNIIRGWIFGTTLDSKTQSLLIVNNATNVVIKVCEFQFCNDPFLGVYYHKNNKSWMESEFRVYSSANNCTFEYVSQPFLMDLEGKQGNFKNLREFVFKNIDGYFKIYSKHTPINLVRDLPQGFSALEPLVDLPIGINITRFQTLLALHRSYLTPGDSSSGWTAGAAAYYVGYLQPRTFLLKYNENGTITDAVDCALDPLSETKCTLKSFTVEKGIYQTSNFRVQPTESIVRFPNITNLCPFGEVFNATRFASVYAWNRKRISNCVADYSVLYNSASFSTFKCYGVSPTKLNDLCFTNVYADSFVIRGDEVRQIAPGQTGKIADYNYKLPDDFTGCVIAWNSNNLDSKVGGNYNYLYRLFRKSNLKPFERDISTEIYQAGSTPCNGVEGFNCYFPLQSYGFQPTNGVGYQPYRVVVLSFELLHAPATVCGPKKSTNLVKNQCVNFNFNGLTGTGVLTESNKKFLPFQQFGRDIADTTDAVRDPQTLEILDITPCSFGGVSVITPGTNTSNQVAVLYQDVNCTEVPVAIHADQLTPTWRVYSTGSNVFQTRAGCLIGAEHVNNSYECDIPIGAGICASYQTQTNSPSGAGSVASQSIIAYTMSLGAENSVAYSNNSIAIPTNFTISVTTEILPVSMTKTSVDCTMYICGDSTECSNLLLQYGSFCTQLNRALTGIAVEQDKNTQEVFAQVKQIYKTPPIKDFGGFNFSQILPDPSKPSKRSFIEDLLFNKVTLADAGFIKQYGDCLGDIAARDLICAQKFNGLTVLPPLLTDEMIAQYTSALLAGTITSGWTFGAGAALQIPFAMQMAYRFNGIGVTQNVLYENQKLIANQFNSAIGKIQDSLSSTASALGKLQDVVNQNAQALNTLVKQLSSNFGAISSVLNDILSRLDPPEAEVQIDRLITGRLQSLQTYVTQQLIRAAEIRASANLAATKMSECVLGQSKRVDFCGKGYHLMSFPQSAPHGVVFLHVTYVPAQEKNFTTAPAICHDGKAHFPREGVFVSNGTHWFVTQRNFYEPQIITTDNTFVSGNCDVVIGIVNNTVYDPLQPELDSFKEELDKYFKNHTSPDVDLGDISGINASVVNIQKEIDRLNEVAKNLNESLIDLQELGKYEQYIKGSGRENLYFQGGGGSGYIPEAPRDGQAYVRKDGEWVLLSTFLGHHHHHHHH

SEQ ID NO: 2037 - protein, 1281 aa, Artificial Sequence
  Description of Artificial Sequence: Synthetic polypeptide
MGILPSPGMPALLSLVSLLSVLLMGCVAETGTQCVNLTTRTQLPPAYTNSFTRGVYYPDKVFRSSVLHSTQDLFLPFFSNVTWFHAIHVSGTNGTKRFDNPVLPFNDGVYFANTEKSNIIRGWIFGTTLDSKTQSLLIVNNATNVVIKVCEFQFCNDPFLGVYYHKNNKSWMESEFRVYSSANNCTFEYVSQPFLMDLEGKQGNFKNLREFVFKNIDGYFKIYSKHTPINLVRDLPQGFSALEPLVDLPIGINITRFQTLLALHRSYLTPGDSSSGWTAGAAAYYVGYLQPRTFLLKYNENGTITDAVDCALDPLSETKCTLKSFTVEKGIYQTSNFRVQPTESIVRFPNITNLCPFGEVFNATRFASVYAWNRKRISNCVADYSVLYNSASFSTFKCYGVSPTKLNDLCFTNVYADSFVIRGDEVRQIAPGQTGKIADYNYKLPDDFTGCVIAWNSNNLDSKVGGNYNYLYRLFRKSNLKPFERDISTEIYQAGSTPCNGVEGFNCYFPLQSYGFQPTNGVGYQPYRVVVLSFELLHAPATVCGPKKSTNLVKNKCVNFNFNGLTGTGVLTESNKKFLPFQQFGRDIADTTDAVRDPQTLEILDITPCSFGGVSVITPGTNTSNQVAVLYQDVNCTEVPVAIHADQLTPTWRVYSTGSNVFQTRAGCLIGAEHVNNSYECDIPIGAGICASYQTQTNSPSGAGSVASQSIIAYTMSLGAENSVAYSNNSIAIPTNFTISVTTEILPVSMTKTSVDCTMYICGDSTECSNLLLQYGSFCTQLNRALTGIAVEQDKNTQEVFAQVKQIYKTPPIKDFGGFNFSQILPDPSKPSKRSFIEDLLFNKVTLADAGFIKQYGDCLGDIAARDLICAQKFNGLTVLPPLLTDEMIAQYTSALLAGTITSGWTFGAGAALQIPFAMQMAYRFNGIGVTQNVLYENQKLIANQFNSAIGKIQDSLSSTASALGKLQDVVNQNAQALNTLVKQLSSNFGAISSVLNDILSRLDPPEAEVQIDRLITGRLQSLQTYVTQQLIRAAEIRASANLAATKMSECVLGQSKRVDFCGKGYHLMSFPQSAPHGVVFLHVTYVPAQEKNFTTAPAICHDGKAHFPREGVFVSNGTHWFVTQRNFYEPQIITTDNTFVSGNCDVVIGIVNNTVYDPLQPELDSFKEELDKYFKNHTSPDVDLGDISGINASVVNIQKEIDRLNEVAKNLNESLIDLQELGKYEQYIKGSGRENLYFQGGGGSGYIPEAPRDGQAYVRKDGEWVLLSTFLGHHHHHHHH

SEQ ID NO: 2038 - protein, 1281 aa, Artificial Sequence
  Description of Artificial Sequence: Synthetic polypeptide
MGILPSPGMPALLSLVSLLSVLLMGCVAETGTQCVNLTTRTQLPPAYTNSFTRGVYYPDKVFRSSVLHSTQDLFLPFFSNVTWFHAIHVSGTNGTKRFDNPVLPFNDGVYFASTEKSNIIRGWIFGTTLDSKTQSLLIVNNATNVVIKVCEFQFCNDPFLGVYYHKNNKSWMESEFRVYSSANNCTFEYVSQPFLMDLEGKQGNFKNLREFVFKNIDGYFKIYSKHTPINLVRDLPQGFSALEPLVDLPIGINITRFQTLLALHRSYLTPGDSSSGWTAGAAAYYVGYLQPRTFLLKYNENGTITDAVDCALDPLSETKCTLKSFTVEKGIYQTSNFRVQPTESIVRFPNITNLCPFGEVFNATRFASVYAWNRKRISNCVADYSVLYNSASFSTFKCYGVSPTKLNDLCFTNVYADSFVIRGDEVRQIAPGQTGKIADYNYKLPDDFTGCVIAWNSNNLDSKVGGNYNYLYRLFRKSNLKPFERDISTEIYQAGSTPCNGVEGFNCYFPLQSYGFQPTNGVGYQPYRVVVLSFELLHAPATVCGPKKSTNLVKNKCVNFNFNGLTGTGVLTESNKKFLPFQQFGRDIADTTDAVRDPQTLEILDITPCSFGGVSVITPGTNTSNQVAVLYQDVNCTEVPVAIHADQLTPTWRVYSTGSNVFQTRAGCLIGAEHVNNSYECDIPIGAGICASYQTQTNSPSGAGSVASQSIIAYTMSLGAENSVAYSNNSIAIPTNFTISVTTEILPVSMTKTSVDCTMYICGDSTECSNLLLQYGSFCTQLNRALTGIAVEQDKNTQEVFAQVKQIYKTPPIKDFGGFNFSQILPDPSKPSKRSFIEDLLFNKVTLADAGFIKQYGDCLGDIAARDLICAQKFNGLTVLPPLLTDEMIAQYTSALLAGTITSGWTFGAGAALQIPFAMQMAYRFNGIGVTQNVLYENQKLIANQFNSAIGQIQDSLSSTASALGKLQDVVNQNAQALNTLVKQLSSNFGAISSVLNDILSRLDPPEAEVQIDRLITGRLQSLQTYVTQQLIRAAEIRASANLAATKMSECVLGQSKRVDFCGKGYHLMSFPQSAPHGVVFLHVTYVPAQEKNFTTAPAICHDGKAHFPREGVFVSNGTHWFVTQRNFYEPQIITTDNTFVSGNCDVVIGIVNNTVYDPLQPELDSFKEELDKYFKNHTSPDVDLGDISGINASVVNIQKEIDRLNEVAKNLNESLIDLQELGKYEQYIKGSGRENLYFQGGGGSGYIPEAPRDGQAYVRKDGEWVLLSTFLGHHHHHHHH

SEQ ID NO: 2039 - protein, 1281 aa, Artificial Sequence
  Description of Artificial Sequence: Synthetic polypeptide
MGILPSPGMPALLSLVSLLSVLLMGCVAETGTQCVNLTTRTQLPPAYTNSFTRGVYYPDKVFRSSVLHSTQDLFLPFFSNVTWFHAIHVSGTNGTKRFDNPVLPFNDGVYFASTEKSNIIRGWIFGTTLDSKTQSLLIVNNATNVVIKVCEFQFCNDPFLGVYYHKNNKSWMESEFRVYSSANNCTFEYVSQPFLMDLEGKQGNFKNLREFVFKNIDGYFKIYSKHTPINLVRDLPQGFSALEPLVDLPIGINITRFQTLLALHRSYLTPGDSSSGWTAGAAAYYVGYLQPRTFLLKYNENGTITDAVDCALDPLSETKCTLKSFTVEKGIYQTSNFRVQPTESIVRFPNITNLCPFGEVFNATRFASVYAWNRKRISNCVADYSVLYNSASFSTFKCYGVSPTKLNDLCFTNVYADSFVIRGDEVRQIAPGQTGKIADYNYKLPDDFTGCVIAWNSNNLDSKVGGNYNYLYRLFRKSNLKPFERDISTEIYQAGSTPCNGVEGFNCYFPLQSYGFQPTNGVGYQPYRVVVLSFELLHAPATVCGPKKSTNLVKNKCVNFNFNGLTGTGVLTESNKKFLPFQQFGRDIADTTDAVRDPQTLEILDITPCSFGGVSVITPGTNTSNQVAVLYQDVNCTEVPVAIHADQLTPTWRVYSTGSNVFQTRAGCLIGAEHVNNSYECDIPIGAGICASYQTQTNSPSGAGSVASQSIIAYTMSLGAENSVAYSNNSIAIPTNFSISVTTEILPVSMTKTSVDCTMYICGDSTECSNLLLQYGSFCTQLNRALTGIAVEQDKNTQEVFAQVKQIYKTPPIKDFGGFNFSQILPDPSKPSKRSFIEDLLFNKVTLADAGFIKQYGDCLGDIAARDLICAQKFNGLTVLPPLLTDEMIAQYTSALLAGTITSGWTFGAGAALQIPFAMQMAYRFNGIGVTQNVLYENQKLIANQFNSAIGKIQDSLSSTASALGKLQDVVNQNAQALNTLVKQLSSNFGAISSVLNDILSRLDPPEAEVQIDRLITGRLQSLQTYVTQQLIRAAEIRASANLAATKMSECVLGQSKRVDFCGKGYHLMSFPQSAPHGVVFLHVTYVPAQEKNFTTAPAICHDGKAHFPREGVFVSNGTHWFVTQRNFYEPQIITTDNTFVSGNCDVVIGIVNNTVYDPLQPELDSFKEELDKYFKNHTSPDVDLGDISGINASVVNIQKEIDRLNEVAKNLNESLIDLQELGKYEQYIKGSGRENLYFQGGGGSGYIPEAPRDGQAYVRKDGEWVLLSTFLGHHHHHHHH

SEQ ID NO: 2040 - protein, 1281 aa, Artificial Sequence
  Description of Artificial Sequence: Synthetic polypeptide
MGILPSPGMPALLSLVSLLSVLLMGCVAETGTQCVNLTTRTQLPPAYTNSFTRGVYYPDKIFRSSVLHLTQDLFLPFFSNVTWFHAIHVSGTNGTKRFDNPVLPFNDGVYFAATEKSNIIRGWIFGTTLDSKTQSLLIVNNATNVVIKVCEFQFCNDPFLGVYYHKNNKSWMESEFRVYSSANNCTFEYVSQPFLMDLEGKQGNFKNLREFVFKNIDGYFKIYSKYTPINLVRDLPQGFSALEPLVKLPIGINITRFQTLLALHRSYLTPGDSSSGWTAGAAAYYVGYLQPRTFLLKYNENGTITDAVDCALDPLSETKCTLKSFTVEKGIYQTSNFRVQPTESIVRFPNITNLCPFGEVFNATRFASVYAWNRKRISNCVADYSVLYNSASFSTFKCYGVSPTKLNDLCFTNVYADSFVIRGDEVRQIAPGQTGKIADYNYKLPDDFTGCVIAWNSNNLDSKVGGNYNYLYRLFRKSNLKPFERDISTEIYQAGSTPCNGVEGFNCYFPLQSYGFQPTNGVGYQPYRVVVLSFELLHAPATVCGPKKSTNLVKNKCVNFNFNGLTGTGVLTESNKKFLPFQQFGRDISDTTDAVRDPQTLEILDITPCSFGGVSVITPGTNTSNQVAVLYQDVNCTDVPVAIHADQLTPTWRVYSTGSNVFQTQAGCLIGAEHVNNSYECDIPIGAGICASYQTQTNSPSGAGSVASKSIIAYTMSLGAENSVAYSNNSIAIPTNFTISVTTEILPVSMTKTSVDCTMYICGDSTECSNLLLQYGSFCTQLNRALTGIAVEQDKNTQEVFAQVKQIYKTPPIKDFGGFNFSQILPDPSKPSKRSFIEDLLFNKVTLADAGFIKQYGDCLGDIAARDLICAQKFNGLTVLPPLLTDEMIAAYTAALLAGTATAGWTFGAGAALQIPFAMQMAYRFNGIGVTQNVLYENQKLIANQFNSAIGKIQDSLSSTASALGKLQDVVNQNAQALNTLVKQLSSNFGAISSVLNDILSRLDPPEAEVQIDRLITGRLQSLQTYVTQQLIRAAEIRASANLAATKMSECVLGQSKRVDFCGKGYHLMSFPQSAPHGVVFLHVTYVPAQEKNFTTAPAICHDGKAHFPREGVFVSNGTHWFVTQRNFYEPQIITTDNTFVSGNCDVVIGIVNNTVYDPLQPELDSFKEELDKYFKNHTSPDVDLGDISGINASVVNIQKEIDRLNEVAKNLNESLIDLQELGKYEQYIKGSGRENLYFQGGGGSGYIPEAPRDGQAYVRKDGEWVLLSTFLGHHHHHHHH

SEQ ID NO: 2041 - protein, 1281 aa, Artificial Sequence
  Description of Artificial Sequence: Synthetic polypeptide
MGILPSPGMPALLSLVSLLSVLLMGCVAETGTQCVNLTTRTQLPPAYTNSFTRGVYYPDKVFRSSVLHSTQDLFLPFFSNVTWFHAIHVSGTNGTKRFDNPVLPFNDGVYFASTEKSNIIRGWIFGTTLDSKTQSLLIVNNATNVVIKVCEFQFCNDPFLGVYYHKNNKSWMESEFRVYSSANNCTFEYVSQPFLMDLEGKQGNFKNLREFVFKNIDGYFKIYSKHTPINLVRDLPQGFSALEPLVDLPIGINITRFQTLLALHRSYLTPGDSSSGWTAGAAAYYVGYLEPRTFLLKYNENGTITDAVDCALDPLSETKCTLKSFTVEKGIYQTSNFRVQPTESIVRFPNITNLCPFGEVFNATRFASVYAWNRKRISNCVADYSVLYNSASFSTFKCYGVSPTKLNDLCFTNVYADSFVIRGDEVRQIAPGQTGKIADYNYKLPDDFTGCVIAWNSNNLDSKVGGNYNYLYRLFRKSNLKPFERDISTEIYQAGSTPCNGVEGFNCYFPLQSYGFQPTNGVGYQPYRVVVLSFELLHAPATVCGPKKSTNLVKNKCVNFNFNGLTGTGVLTESNKKFLPFQQFGRDIADTTDAVRDPQTLEILDITPCSFGGVSVITPGTNTSNQVAVLYQDVNCTEVPVAIHADQLTPTWRVYSTGSNVFQTRAGCLIGAEHVNNSYECDIPIGAGICASYQTQTNSPSGAGSVASQSIIAYTMSLGAENSVAYSNNSIAIPTNFTISVTTEILPVSMTKTSVDCTMYICGDSTECSNLLLQYGSFCTQLNRALTGIAVEQDKNTQEVFAQVKQIYKTPPIKDFGGFNFSQILPDPSKPSKRSFIEDLLFNKVTLADAGFIKQYGDCLGDIAARDLICAQKFNGLTVLPPLLTDEMIAQYTSALLAGTITSGWTFGAGAALQIPFAMQMAYRFNGIGVTQNVLYENQKLIANQFNSAIGKIQDSLSSTASALGKLQDVVNQNAQALNTLVKQLSSNFGAISSVLNDILSRLDPPEAEVQIDRLITGRLQSLQTYVTQQLIRAAEIRASANLAATKMSECVLGQSKRVDFCGKGYHLMSFPQSAPHGVVFLHVTYVPAQEKNFTTAPAICHDGKAHFPREGVFVSNGTHWFVTQRNFYEPQIITTDNTFVSGNCDVVIGIVNNTVYDPLQPELDSFKEELDKYFKNHTSPDVDLGDISGINASVVNIQKEIDRLNEVAKNLNESLIDLQELGKYEQYIKGSGRENLYFQGGGGSGYIPEAPRDGQAYVRKDGEWVLLSTFLGHHHHHHHH

SEQ ID NO: 2042 - protein, 1281 aa, Artificial Sequence
  Description of Artificial Sequence: Synthetic polypeptide
MGILPSPGMPALLSLVSLLSVLLMGCVAETGTQCVNLTTRTQLPPAYTNSFTRGVYYPDKVFRSSVLHSTQDLFLPFFSNVTWFHAIHVKGTNGTKRFDNPVLPFNDGVYFASTEKSNIIRGWIFGTTLDSKTQSLLIVNNATNVVIKVCEFQFCNDPFLGVYYHKNNKSWMESEFRVYSSANNCTFEYVSQPFLMDLEGKQGNFKNLREFVFKNIDGYFKIYSKHTPINLVRDLPQGFSALEPLVDLPIGINITRFQTLLALHRSYLTPGDSSSGWTAGAAAYYVGYLQPRTFLLKYNENGTITDAVDCALDPLSETKCTLKSFTVEKGIYQTSNFRVQPTESIVRFPNITNLCPFGEVFNATRFASVYAWNRKRISNCVADYSVLYNSASFSTFKCYGVSPTKLNDLCFTNVYADSFVIRGDEVRQIAPGQTGKIADYNYKLPDDFTGCVIAWNSNNLDSKVGGNYNYLYRLFRKSNLKPFERDISTEIYQAGSTPCNGVEGFNCYFPLQSYGFQPTNGVGYQPYRVVVLSFELLHAPATVCGPKKSTNLVKNKCVNFNFNGLTGTGVLTESNKKFLPFQQFGRDIADTTDAVRDPQTLEILDITPCSFGGVSVITPGTNTSNQVAVLYQDVNCTEVPVAIHADQLTPTWRVYSTGSNVFQTRAGCLIGAEHVNNSYECDIPIGAGICASYQTQTNSPSGAGSVASQSIIAYTMSLGAENSVAYSNNSIAIPTNFTISVTTEILPVSMTKTSVDCTMYICGDSTECSNLLLQYGSFCTQLNRALTGIAVEQDKNTQEVFAQVKQIYKTPPIKDFGGFNFSQILPDPSKPSKRSFIEDLLFNKVTLADAGFIKQYGDCLGDIAARDLICAQKFNGLTVLPPLLTDEMIAQYTSALLAGTITSGWTFGAGAALQIPFAMQMAYRFNGIGVTQNVLYENQKLIANQFNSAIGKIQDSLSSTASALGKLQDVVNQNAQALNTLVKQLSSNFGAISSVLNDILSRLDPPEAEVQIDRLITGRLQSLQTYVTQQLIRAAEIRASANLAATKMSECVLGQSKRVDFCGKGYHLMSFPQSAPHGVVFLHVTYVPAQEKNFTTAPAICHDGKAHFPREGVFVSNGTHWFVTQRNFYEPQIITTDNTFVSGNCDVVIGIVNNTVYDPLQPELDSFKEELDKYFKNHTSPDVDLGDISGINASVVNIQKEIDRLNEVAKNLNESLIDLQELGKYEQYIKGSGRENLYFQGGGGSGYIPEAPRDGQAYVRKDGEWVLLSTFLGHHHHHHHH

SEQ ID NO: 2043 - protein, 1281 aa, Artificial Sequence
  Description of Artificial Sequence: Synthetic polypeptide
MGILPSPGMPALLSLVSLLSVLLMGCVAETGTQCVNLTTRTQLPPAYTNSFTRGVYYPDKVFRSSVLHSTQDLFLPFFSNVTWFHAIHVSGTNGTKRFDNPVLPFNDGVYFASTEKSNIIRGWIFGTTLDSKTQSLLIVNNATNVVIKVCEFQFCNDPFLGVYYHKNNKSWMESEFRVYSSANNCTFEYVSQPFLMDLEGKQGNFKNLREFVFKNIDGYFKIYSKHTPINLVRDLPQGFSALEPLVDLPIGINITRFQTLLALHRSYLTPGDSSSGWTAGAAAYYVGYLQPRTFLLKYNENGTITDAVDCALDPLSETKCTLKSFTVEKGIYQTSNFRVQPTESIVRFPNITNLCPFGEVFNATRFASVYAWNRKRISNCVADYSVLYNSASFSTFKCYGVSPTKLNDLCFTNVYADSFVIRGDEVRQIAPGQTGKIADYNYKLPDDFTGCVIAWNSNNLDSKVGGNYNYLYRLFRKSNLKPFERDISTEIYQAGSTPCNGVEGFNCYFPLQSYGFQPTNGVGYQPYRVVVLSFELLHAPATVCGPKKPTNLVKNKCVNFNFNGLTGTGVLTESNKKFLPFQQFGRDIADTTDAVRDPQTLEILDITPCSFGGVSVITPGTNTSNQVAVLYQDVNCTEVPVAIHADQLTPTWRVYSTGSNVFQTRAGCLIGAEHVNNSYECDIPIGAGICASYQTQTNSPSGAGSVASQSIIAYTMSLGAENSVAYSNNSIAIPTNFTISVTTEILPVSMTKTSVDCTMYICGDSTECSNLLLQYGSFCTQLNRALTGIAVEQDKNTQEVFAQVKQIYKTPPIKDFGGFNFSQILPDPSKPSKRSFIEDLLFNKVTLADAGFIKQYGDCLGDIAARDLICAQKFNGLTVLPPLLTDEMIAQYTSALLAGTITSGWTFGAGAALQIPFAMQMAYRFNGIGVTQNVLYENQKLIANQFNSAIGKIQDSLSSTASALGKLQDVVNQNAQALNTLVKQLSSNFGAISSVLNDILSRLDPPEAEVQIDRLITGRLQSLQTYVTQQLIRAAEIRASANLAATKMSECVLGQSKRVDFCGKGYHLMSFPQSAPHGVVFLHVTYVPAQEKNFTTAPAICHDGKAHFPREGVFVSNGTHWFVTQRNFYEPQIITTDNTFVSGNCDVVIGIVNNTVYDPLQPELDSFKEELDKYFKNHTSPDVDLGDISGINASVVNIQKEIDRLNEVAKNLNESLIDLQELGKYEQYIKGSGRENLYFQGGGGSGYIPEAPRDGQAYVRKDGEWVLLSTFLGHHHHHHHH

SEQ ID NO: 2044 - protein, 1281 aa, Artificial Sequence
  Description of Artificial Sequence: Synthetic polypeptide
MGILPSPGMPALLSLVSLLSVLLMGCVAETGTQCVNLTTRTQLPPAYTNSFTRGVYYPDKVFRSSVLHSTQDLFLPFFSNVTWFHAIHVSGTNGTKRFDNPVLPFNDGVYFASTEKSNIIRGWIFGTTLDSKTQSLLIVNNATNVVIKVCEFQFCNDPFLGVYYHKNNKSWMESEFRVYSSANNCTFEYVSQPFLMDLEGKQGNFKNLREFVFKNIDGYFKIYSKHTPINLVRDLPQGFSALEPLVDLPIGINITRFQTLLALHRSYLTPGDSSSGWTAGAAAYYVGYLQPRTFLLKYNENGTITDAVDCALDPLSETKCTLKSFTVEKGIYQTSNFRVQPTESIVRFPNITNLCPFGEVFNATRFASVYAWNRKRISNCVADYSVLYNSASFSTFKCYGVSPTKLNDLCFTNVYADSFVIRGDEVRQIAPGQTGKIADYNYKLPDDFTGCVIAWNSNNLDSKVGGNYNYLYRLFRKSNLKPFERDISTEIYQAGSTPCNGVEGFNCYFPLQSYGFQPTNGVGYQPYRVVVLSFELLHAPATVCGPKKSTNLVKNKCVNFNFNGLTGTGVLTESNKKFLPFQQFGRDAADTTDAVRDPQTLEILDITPCSFGGVSVITPGTNTSNQVAVLYQDVNCTEVPVAIHADQLTPTWRVYSTGSNVFQTRAGCLIGAEHVNNSYECDIPIGAGICASYQTQTNSPSGAGSVASQSIIAYTMSLGAENSVAYSNNSIAIPTNFTISVTTEILPVSMTKTSVDCTMYICGDSTECSNLLLQYGSFCTQLNRALTGIAVEQDKNTQEVFAQVKQIYKTPPIKDFGGFNFSQILPDPSKPSKRSFIEDLLFNKVTLADAGFIKQYGDCLGDIAARDLICAQKFNGLTVLPPLLTDEMIAQYTSALLAGTITSGWTFGAGAALQIPFAMQMAYRFNGIGVTQNVLYENQKLIANQFNSAIGKIQDSLSSTASALGKLQDVVNQNAQALNTLVKQLSSNFGAISSVLNDILSRLDPPEAEVQIDRLITGRLQSLQTYVTQQLIRAAEIRASANLAATKMSECVLGQSKRVDFCGKGYHLMSFPQSAPHGVVFLHVTYVPAQEKNFTTAPAICHDGKAHFPREGVFVSNGTHWFVTQRNFYEPQIITTDNTFVSGNCDVVIGIVNNTVYDPLQPELDSFKEELDKYFKNHTSPDVDLGDISGINASVVNIQKEIDRLNEVAKNLNESLIDLQELGKYEQYIKGSGRENLYFQGGGGSGYIPEAPRDGQAYVRKDGEWVLLSTFLGHHHHHHHH

SEQ ID NO: 2045 - protein, 1281 aa, Artificial Sequence
  Description of Artificial Sequence: Synthetic polypeptide
MGILPSPGMPALLSLVSLLSVLLMGCVAETGTQCVNLTTRTQLPPAYTNSFTRGVYYPDKVFRSSVLHSTQDLFLPFFSNVTWFHAIHVSGTNGTKRFDNPVLPFNDGVYFASTEKSNIIRGWIFGTTLDSKTQSLLIVNNATNVVIKVCEFQFCNDPFLGVYYHKNNKSWMESEFRVYSSANNCTFEYVSQPFLMDLEGKQGNFKNLREFVFKNIDGYFKIYSKHTPINLVRDLPQGFSALEPLVDLPIGINITRFQTLLALHRSYLTPGDSSSGWTAGAAAYYVGYLQPRTFLLKYNENGTITDAVDCALDPLSETKCTLKSFTVEKGIYQTSNFRVQPTESIVRFPNITNLCPFGEVFNATRFASVYAWNRKRISNCVADYSVLYNSASFSTFKCYGVSPTKLNDLCFTNVYADSFVIRGDEVRQIAPGQTGKIADYNYKLPDDFTGCVIAWNSNNLDSKVGGNYNYLYRLFRKSNLKPFERDISTEIYQAGSTPCNGVEGFNCYFPLQSYGFQPTNGVGYQPYRVVVLSFELLHAPATVCGPKKSTNLVKNKCVNFNFNGLTGTGVLTESNKKFLPFQQFGRDIADTTDAVRDPQTLEILDITPCSFGGVSVITPGTNTSNQVAVLYQDVNCTEVPVAIHADQLTPTWRVYSTGSNVFQTRAGCLIGAEHVNNSYECDIPIGAGICASYQTQTNSPSGAGSVASQSIIAYTMSLGAENSVAYSNNSIAIPTNFTISVTTEILPVSMTKTSVDCTMYICGDSTECSNLLLQYGSFCTQLNRALTGIAIEQDKNTQEVFAQVKQIYKTPPIKDFGGFNFSQILPDPSKPSKRSFIEDLLFNKVTLADAGFIKQYGDCLGDIAARDLICAQKFNGLTVLPPLLTDEMIAQYTSALLAGTITSGWTFGAGAALQIPFAMQMAYRFNGIGVTQNVLYENQKLIANQFNSAIGKIQDSLSSTASALGKLQDVVNQNAQALNTLVKQLSSNFGAISSVLNDILSRLDPPEAEVQIDRLITGRLQSLQTYVTQQLIRAAEIRASANLAATKMSECVLGQSKRVDFCGKGYHLMSFPQSAPHGVVFLHVTYVPAQEKNFTTAPAICHDGKAHFPREGVFVSNGTHWFVTQRNFYEPQIITTDNTFVSGNCDVVIGIVNNTVYDPLQPELDSFKEELDKYFKNHTSPDVDLGDISGINASVVNIQKEIDRLNEVAKNLNESLIDLQELGKYEQYIKGSGRENLYFQGGGGSGYIPEAPRDGQAYVRKDGEWVLLSTFLGHHHHHHHH

SEQ ID NO: 2046 - protein, 1281 aa, Artificial Sequence
  Description of Artificial Sequence: Synthetic polypeptide
MGILPSPGMPALLSLVSLLSVLLMGCVAETGTQCVNLTTRTQLPPAYTNSFTRGVYYPDKVFRSDVLHSTQDLFLPFFSNVTWFHAIHVSGTNGTKDFDNPVLPFNDGVYFASTEKSNIIRGWIFGTTLDSKTQSLLIVNNATNVVIKVCEFQFCENPFLGVYYHKNNKSWMEKEFRVYSSANNCTFEYVSQPFLMDLGGKQGNFKWLREFVFKNIDGYFKIYSKHTPINLVRDLPQGFSALEPLMDLPIGINITRFQTLLALHRSYLTPGDSSSGWTAGAAAYYVGYLQPRTFLLKYNENGTITDAVDCALDPLSETKCTLKSFTVEKGIYQTSNFRVQPTESIVRFPNITNLCPFGEVFNATRFASVYAWNRKRISNCVADYSVLYNSASFSTFKCYGVSPTKLNDLCFTNVYADSFVIRGDEVRQIAPGQTGKIADYNYKLPDDFTGCVIAWNSNNLDSKVGGNYNYLYRLFRKSNLKPFERDISTEIYQAGSTPCNGVEGFNCYFPLQSYGFQPTNGVGYQPYRVVVLSFELLHAPATVCGPKKSTNLVKNKCVNFNFNGLTGTGVLTESNKKFLPFQQFGRDIADNTDAVRDPQTLEILDITPCSFGGVSVITPGTNTSNQVAVLYQDVNCTEVPNAIHADQLTPTWRVYSTGSNVFQTRAGCLIGAEHVNNSYECDIPIGAGICASYQTQTNSPSGAGSVASQSIIAYTMSLGAENSVAYSNNSIAIPTNFTISVTTEILPVSMTKTSVDCTMYICGDSTECSNLLLQYGSFCTQLNRALQGIAQEQDKNTQEVFAQVKQIYKTPPIKDFGGFNFSQILPDPSKPSKRSFIEDLLFNKVTLADAGFIKQYGDCLGDIAARDLICAQKFNGLTVLPPLLTDEMIAQYTSALLAGTITSGWTFGAGAALQIPFAMQMAYRFNGIGVTQNVLYENQKLIANQFNKAIGKIQDSLSSTASALGKLQDVVNQNAQALNTLVKQLSSNFGAISSVLNDILSRLDPPEAEVQIDRLITGRLQSLQTYVTQQLIRAAEIRASANLAATKMSECVLGQSKRVDFCGKGYHLMSFPQSAPHGVVFLHVTYVPAQEKNFTTAPAICHDGKAFFPREGVFVSNGTQWFVTQRNFYEPQIITTDNTFVSGNCDVVIGIVNNTVYDPLQPELDSFKEELDKYFKNHTSPDVDLGDISGINASVVNIQKEIDRLNEVAKNLNESLIDLQELGKYEQYIKGSGRENLYFQGGGGSGYIPEAPRDGQAYVRKDGEWVLLSTFLGHHHHHHHH

SEQ ID NO: 2047 - protein, 1281 aa, Artificial Sequence
  Description of Artificial Sequence: Synthetic polypeptide
MGILPSPGMPALLSLVSLLSVLLMGCVAETGTQCVNLTTRTQLPPAYTNSFTRGVYYPDKVFRSSVLHSTQDLFLPFFSNVTWFHAIHVSGTNGTKRFDNPVLPFNDGVYFASTEKSNIIRGWIFGTTLDSKTQSLLIVNNATNVVIKVCEFQFCNDPFLGVYYHKNNKSWMESEFRVYSSANNCTFEYVSQPFLMDLEGKQGNFKNLREFVFKNIDGYFKIYSKHTPINLVRDLPQGFSALEPLVDLPIGINITRFQTLLALHRSYLTPGDSSSGWTAGAAAYYVGYLQPRTFLLKYNENGTITDAVDCALDPLSETKCTLKSFTVEKGIYQTSNFRVQPTESIVRFPNITNLCPFGEVFNATRFASVYAWNRKRISNCVADYSVLYNSASFSTFKCYGVSPTKLNDLCFTNVYADSFVIRGDEVRQIAPGQTGKIADYNYKLPDDFTGCVIAWNSNNLDSKVGGNYNYLYRLFRKSNLKPFERDISTEIYQAGSTPCNGVEGFNCYFPLQSYGFQPTNGVGYQPYRVVVLSFELLHAPATVCGPKKSTNLVKNKCVNFNFNGLTGTGVLTESNKKFLPFQQFGRDIADTTDAVRDPQTLEILDITPCSFGGVSVITPGTNTSNQVAVLYQDVNCTEVPVAIHADQLTPTWRVYSTGSNVFQTRAGCLIGAEHVNNSYECDIPIGAGICASYQTQTNSPSGAGSVASQSIIAYTMSLGAENSVAYSNNSIAIPTNFTISVTTEILPVSMTKTSVDCTMYICGDSTECSNLLLQYGSFCTQLNRALTGIAVEQDKNTQEVFAQVKQIYKTPPIKDFGGFNFSQILPDPSKPSKRSFIEDLLFNKVTLADAGFIKQYGDCLGDISARDLICAQKFNGLTVLPPLLTDEMIAQYTSALLAGTITSGWTFGAGAALQIPFAMQMAYRFNGIGVTQNVLYENQKLIANQFNSAIGKIQDSLSSTASALGKLQDVVNQNAQALNTLVKQLSSNFGAISSVLNDILSRLDPPEAEVQIDRLITGRLQSLQTYVTQQLIRAAEIRASANLAATKMSECVLGQSKRVDFCGKGYHLMSFPQSAPHGVVFLHVTYVPAQEKNFTTAPAICHDGKAHFPREGVFVSNGTHWFVTQRNFYEPQIITTDNTFVSGNCDVVIGIVNNTVYDPLQPELDSFKEELDKYFKNHTSPDVDLGDISGINASVVNIQKEIDRLNEVAKNLNESLIDLQELGKYEQYIKGSGRENLYFQGGGGSGYIPEAPRDGQAYVRKDGEWVLLSTFLGHHHHHHHH

SEQ ID NO: 2048 - protein, 1281 aa, Artificial Sequence
  Description of Artificial Sequence: Synthetic polypeptide
MGILPSPGMPALLSLVSLLSVLLMGCVAETGTQCVNLTTRTQLPPAYTNSFTRGVYYPDKVFRSSVLHSTQDLFLPFFSNVTWFHAIHVSGTNGTKRFDNPVLPFNDGVYFASTEKSNIIRGWIFGTTLDSKTQSLLIVNNATNVVIKVCEFQFCNDPFLGVYYHKNNKSWMESEFRVYSSANNCTFEYVSQPFLMDLEGKQGNFKNLREFVFKNIDGYFKIYSKHTPINLVRDLPQGFSALEPLVVLPIGINITRFQTLLALHRSYLTPGDSSSGWTAGAAAYYVGYLQPRTFLLKYNENGTITDAVDCALDPLSETKCTLKSFTVEKGIYQTSNFRVQPTESIVRFPNITNLCPFGEVFNATRFASVYAWNRKRISNCVADYSVLYNSASFSTFKCYGVSPTKLNDLCFTNVYADSFVIRGDEVRQIAPGQTGKIADYNYKLPDDFTGCVIAWNSNNLDSKVGGNYNYLYRLFRKSNLKPFERDISTEIYQAGSTPCNGVEGFNCYFPLQSYGFQPTNGVGYQPYRVVVLSFELLHAPATVCGPKKSTNLVKNKCVNFNFNGLTGTGVLTESNKKFLPFQQFGRDIADTTDAVRDPQTLEILDITPCSFGGVSVITPGTNTSNQVAVLYQDVNCTEVPVAIHADQLTPTWRVYSTGSNVFQTRAGCLIGAEHVNNSYECDIPIGAGICASYQTQTNSPSGAGSVASQSIIAYTMSLGAENSVAYSNNSIAIPTNFTISVTTEILPVSMTKTSVDCTMYICGDSTECSNLLLQYGSFCTQLNRALTGIAVEQDKNTQEVFAQVKQIYKTPPIKDFGGFNFSQILPDPSKPSKRSFIEDLLFNKVTLADAGFIKQYGDCLGDIAARDLICAQKFNGLTVLPPLLTDEMIAQYTSALLAGTITSGWTFGAGAALQIPFAMQMAYRFNGIGVTQNVLYENQKLIANQFNSAIGKIQDSLSSTASALGKLQDVVNQNAQALNTLVKQLSSNFGAISSVLNDILSRLDPPEAEVQIDRLITGRLQSLQTYVTQQLIRAAEIRASANLAATKMSECVLGQSKRVDFCGKGYHLMSFPQSAPHGVVFLHVTYVPAQEKNFTTAPAICHDGKAHFPREGVFVSNGTHWFVTQRNFYEPQIITTDNTFVSGNCDVVIGIVNNTVYDPLQPELDSFKEELDKYFKNHTSPDVDLGDISGINASVVNIQKEIDRLNEVAKNLNESLIDLQELGKYEQYIKGSGRENLYFQGGGGSGYIPEAPRDGQAYVRKDGEWVLLSTFLGHHHHHHHH

SEQ ID NO: 2049 - protein, 1281 aa, Artificial Sequence
  Description of Artificial Sequence: Synthetic polypeptide
MGILPSPGMPALLSLVSLLSVLLMGCVAETGTQCVNLTTRTQLPPAYTNSFTRGVYYPDKVFRSSVLHSTQDLFLPFFSNVTWFHAIHVSGTNGTKRFDNPVLPFNDGVYFASTEKSNIIRGWIFGTTLDSKTQSLLIVNNATNVVIKVCEFQFCNDPFLGVYYHKNNKSWMESEFRVYSSANNCTFEYVSQPFLMDLEGKQGNFKNLREFVFKNIDGYFKIYSKHTPINLVRDLPQGFSALEPLVDLPIGINITRFQTLLALHRSYLTPGDSSSGWTAGAAAYYVGYLQPRTFLLKYNENGTITDAVDCALDPLSETKCTLKSFTVEKGIYQTSNFRVQPTESIVRFPNITNLCPFGEVFNATRFASVYAWNRKRISNCVADYSVLYNSASFSTFKCYGVSPTKLNDLCFTNVYADSFVIRGDEVRQIAPGQTGKIADYNYKLPDDFTGCVIAWNSNNLDSKVGGNYNYLYRLFRKSNLKPFERDISTEIYQAGSTPCNGVEGFNCYFPLQSYGFQPTNGVGYQPYRVVVLSFELLHAPATVCGPKKSTNLVKNKCVNYNFNGLTGTGVLTESNKKFLPFQQFGRDIADTTDAVRDPQTLEILDITPCSFGGVSVITPGTNTSNQVAVLYQDVNCTEVPVAIHADQLTPTWRVYSTGSNVFQTRAGCLIGAEHVNNSYECDIPIGAGICASYQTQTNSPSGAGSVASQSIIAYTMSLGAENSVAYSNNSIAIPTNFTISVTTEILPVSMTKTSVDCTMYICGDSTECSNLLLQYGSFCTQLNRALTGIAVEQDKNTQEVFAQVKQIYKTPPIKDFGGFNFSQILPDPSKPSKRSFIEDLLFNKVTLADAGFIKQYGDCLGDIAARDLICAQKFNGLTVLPPLLTDEMIAQYTSALLAGTITSGWTFGAGAALQIPFAMQMAYRFNGIGVTQNVLYENQKLIANQFNSAIGKIQDSLSSTASALGKLQDVVNQNAQALNTLVKQLSSNFGAISSVLNDILSRLDPPEAEVQIDRLITGRLQSLQTYVTQQLIRAAEIRASANLAATKMSECVLGQSKRVDFCGKGYHLMSFPQSAPHGVVFLHVTYVPAQEKNFTTAPAICHDGKAHFPREGVFVSNGTHWFVTQRNFYEPQIITTDNTFVSGNCDVVIGIVNNTVYDPLQPELDSFKEELDKYFKNHTSPDVDLGDISGINASVVNIQKEIDRLNEVAKNLNESLIDLQELGKYEQYIKGSGRENLYFQGGGGSGYIPEAPRDGQAYVRKDGEWVLLSTFLGHHHHHHHH

SEQ ID NO: 2050 - protein, 1281 aa, Artificial Sequence
  Description of Artificial Sequence: Synthetic polypeptide
MGILPSPGMPALLSLVSLLSVLLMGCVAETGTQCVNLTTRTQLPPAYTNSFTRGVYYPDKVFRSDVLHSTQDLFLPFFSNVTWFHAIHVSGTNGTKRFDNPVLPFNDGVYFASTEKSNIIRGWIFGTTLDSKTQSLLIVNNATNVVIKVCEFQFCENPFLGVYYHKNNKSWMEKEFRVYSSANNCTFEYVSQPFLMDLGGKQGNFKNLREFVFKNIDGYFKIYSKHTPINLVRDLPQGFSALEPLMDLPIGINITRFQTLLALHRSYLTPGDSSSGWTAGAAAYYVGYLQPRTFLLKYNENGTITDAVDCALDPLSETKCTLKSFTVEKGIYQTSNFRVQPTESIVRFPNITNLCPFGEVFNATRFASVYAWNRKRISNCVADYSVLYNSASFSTFKCYGVSPTKLNDLCFTNVYADSFVIRGDEVRQIAPGQTGKIADYNYKLPDDFTGCVIAWNSNNLDSKVGGNYNYLYRLFRKSNLKPFERDISTEIYQAGSTPCNGVEGFNCYFPLQSYGFQPTNGVGYQPYRVVVLSFELLHAPATVCGPKKSTNLVKNKCVNFNFNGLTGTGVLTESNKKFLPFQQFGRDIADNTDAVRDPQTLEILDITPCSFGGVSVITPGTNTSNQVAVLYQDVNCTEVPNAIHADQLTPTWRVYSTGSNVFQTRAGCLIGAEHVNNSYECDIPIGAGICASYQTQTNSPSGAGSVASQSIIAYTMSLGAENSVAYSNNSIAIPTNFTISVTTEILPVSMTKTSVDCTMYICGDSTECSNLLLQYGSFCTQLNRALQGIAREQDKNTQEVFAQVKQIYKTPPIKDFGGFNFSQILPDPSKPSKRSFIEDLLFNKVTLADAGFIKQYGDCLGDIAARDLICAQKFNGLTVLPPLLTDEMIAQYTSALLAGTITSGWTFGAGAALQIPFAMQMAYRFNGIGVTQNVLYENQKLIANQFNQAIGKIQDSLSSTASALGKLQDVVNQNAQALNTLVKQLSSNFGAISSVLNDILSRLDPPEAEVQIDRLITGRLQSLQTYVTQQLIRAAEIRASANLAATKMSECVLGQSKRVDFCGKGYHLMSFPQSAPHGVVFLHVTYVPAQEKNFTTAPAICHDGKAFFPREGVFVSNGTQWFVTQRNFYEPQIITTDNTFVSGNCDVVIGIVNNTVYDPLQPELDSFKEELDKYFKNHTSPDVDLGDISGINASVVNIQKEIDRLNEVAKNLNESLIDLQELGKYEQYIKGSGRENLYFQGGGGSGYIPEAPRDGQAYVRKDGEWVLLSTFLGHHHHHHHH

SEQ ID NO: 2051 - protein, 1281 aa, Artificial Sequence
  Description of Artificial Sequence: Synthetic polypeptide
MGILPSPGMPALLSLVSLLSVLLMGCVAETGTQCVNLTTRTQLPPAYTNSFTRGVYYPDKVFRSSVLHSTQDLFLPFFSNVTWFHAIHVSGTNGTKRFDNPVLPFNDGVYFASTEKSNIIRGWIFGTTLDSKTQSLLIVNNATNVVIKVCEFQFCENPFLGVYYHKNNKSWMEEEFRVYSSANNCTFEYVSQPFLMDLEGKQGNFKNLREFVFKNIDGYFKIYSKHTPINLVRDLPQGFSALEPLVDLPIGINITRFQTLLALHRSYLTPGDSSSGWTAGAAAYYVGYLQPRTFLLKYNENGTITDAVDCALDPLSETKCTLKSFTVEKGIYQTSNFRVQPTESIVRFPNITNLCPFGEVFNATRFASVYAWNRKRISNCVADYSVLYNSASFSTFKCYGVSPTKLNDLCFTNVYADSFVIRGDEVRQIAPGQTGKIADYNYKLPDDFTGCVIAWNSNNLDSKVGGNYNYLYRLFRKSNLKPFERDISTEIYQAGSTPCNGVEGFNCYFPLQSYGFQPTNGVGYQPYRVVVLSFELLHAPATVCGPKKSTNLVKNKCVNFNFNGLTGTGVLTESNKKFLPFQQFGRDIADTTDAVRDPQTLEILDITPCSFGGVSVITPGTNTSNQVAVLYQDVNCTEVPVAIHADQLTPTWRVYSTGSNVFQTRAGCLIGAEHVNNSYECDIPIGAGICASYQTQTNSPSGAGSVASQSIIAYTMSLGAENSVAYSNNSIAIPTNFTISVTTEILPVSMTKTSVDCTMYICGDSTECSNLLLQYGSFCTQLNRALTGIAVEQDKNTQEVFAQVKQIYKTPPIKDFGGFNFSQILPDPSKPSKRSFIEDLLFNKVTLADAGFIKQYGDCLGDIAARDLICAQKFNGLTVLPPLLTDEMIAQYTSALLAGTITSGWTFGAGAALQIPFAMQMAYRFNGIGVTQNVLYENQKLIANQFNSAIGKIQDSLSSTASALGKLQDVVNQNAQALNTLVKQLSSNFGAISSVLNDILSRLDPPEAEVQIDRLITGRLQSLQTYVTQQLIRAAEIRASANLAATKMSECVLGQSKRVDFCGKGYHLMSFPQSAPHGVVFLHVTYVPAQEKNFTTAPAICHDGKAHFPREGVFVSNGTHWFVTQRNFYEPQIITTDNTFVSGNCDVVIGIVNNTVYDPLQPELDSFKEELDKYFKNHTSPDVDLGDISGINASVVNIQKEIDRLNEVAKNLNESLIDLQELGKYEQYIKGSGRENLYFQGGGGSGYIPEAPRDGQAYVRKDGEWVLLSTFLGHHHHHHHH

SEQ ID NO: 2052 - protein, 1281 aa, Artificial Sequence
  Description of Artificial Sequence: Synthetic polypeptide
MGILPSPGMPALLSLVSLLSVLLMGCVAETGTQCVNLTTRTQLPPAYTNSFTRGVYYPDKVFRSSVLHSTQDLFLPFFSNVTWFHAIHVSGTNGTKRFDNPVLPFNDGVYFASTEKSNIIRGWIFGTTLDSKTQSLLIVNNATNVVIKVCEFQFCNDPFLGVYYHKNNKSWMESEFRVYSSANNCTFEYVSQPFLMDLEGKQGNFKNLREFVFKNIDGYFKIYSKHTPINLVRDLPQGFSALEPLVDLPIGINITRFQTLLALHRSYLTPGDSSSGWTAGAAAYYVGYLQPRTFLLKYNENGTITDAVDCALDPLSETKCTLKSFTVEKGIYQTSNFRVQPTESIVRFPNITNLCPFGEVFNATRFASVYAWNRKRISNCVADYSVLYNSASFSTFKCYGVSPTKLNDLCFTNVYADSFVIRGDEVRQIAPGQTGKIADYNYKLPDDFTGCVIAWNSNNLDSKVGGNYNYLYRLFRKSNLKPFERDISTEIYQAGSTPCNGVEGFNCYFPLQSYGFQPTNGVGYQPYRVVVLSFELLHAPATVCGPKKSTNLVKNKCVNFNFNGLTGTGVLTESNKKFLPFQQFGRDIADTTDAVRDPQTLEILDITPCSFGGVSVITPGTNTSNQVAVLYQDVNCTEVPVAIHADQLTPTWRVYSTGSNVFQTRAGCLIGAEHVNNSYECDIPIGAGICASYQTQTNSPSGAGSVASQSIIAYTMSLGAENSVAYSNNSIAIPTNFTISVTTEILPVSMTKTSVDCTMYICGDSTECSNLLLQYGSFCTQLNRALTGIAVEQDKNTQEVFAQVKQIYKTPPIKDFGGFNFSQILPDPSKPSKRSFIEDLLFNKVTLADAGFIKQYGDCLGDIAARDLICAQKFNGLTVLPPLLTDEMIAQYTSALLAGTITSGWTFGAGAALQIPFAMQMAYRFNGIGVTQNVLYENQKLIANQFNSAIGKIQDSLSSTASALGKLQDVVNQNAQALNTLVKQLSSNFGAISSVLNDILSRLDPPEAEVQIDRLITGRLQSLQTYVTQQLIRAAEIRASANLAATKMSECVLGQSKRVDFCGKGYHLMSFPQSAPHGVVFLHVTYVPAQEKNFTTAPAICHDGKAYFPREGVFVSNGTSWFITQRNFYEPQIITTDNTFVSGNCDVVIGIVNNTVYDPLQPELDSFKEELDKYFKNHTSPDVDLGDISGINASVVNIQKEIDRLNEVAKNLNESLIDLQELGKYEQYIKGSGRENLYFQGGGGSGYIPEAPRDGQAYVRKDGEWVLLSTFLGHHHHHHHH

SEQ ID NO: 2053 - protein, 1281 aa, Artificial Sequence
  Description of Artificial Sequence: Synthetic polypeptide
MGILPSPGMPALLSLVSLLSVLLMGCVAETGTQCVNLTTRTQLPPAYTNSFTRGVYYPDKVFRSSVLHSTQDLFLPFFSNVTWFHAIHVSGTNGTKRFDNPVLPFNDGVYFASTEKSNIIRGWIFGTTLDSKTQSLLIVNNATNVVIKVCEFQFCNDPFLGVYYHKNNKSWMESEFRVYSSANNCTFEYVSQPFLYDLNGKQGNFKNLREFVFKNIDGYFKIYSKHTPINLVRDLPQGFSALEPLVDLPIGINITRFQTLLALHRSYLTPGDSSSGWTAGAAAYYVGYLQPRTFLLKYNENGTITDAVDCALDPLSETKCTLKSFTVEKGIYQTSNFRVQPTESIVRFPNITNLCPFGEVFNATRFASVYAWNRKRISNCVADYSVLYNSASFSTFKCYGVSPTKLNDLCFTNVYADSFVIRGDEVRQIAPGQTGKIADYNYKLPDDFTGCVIAWNSNNLDSKVGGNYNYLYRLFRKSNLKPFERDISTEIYQAGSTPCNGVEGFNCYFPLQSYGFQPTNGVGYQPYRVVVLSFELLHAPATVCGPKKSTNLVKNKCVNFNFNGLTGTGVLTESNKKFLPFQQFGRDIADTTDAVRDPQTLEILDITPCSFGGVSVITPGTNTSNQVAVLYQDVNCTEVPVAIHADQLTPTWRVYSTGSNVFQTRAGCLIGAEHVNNSYECDIPIGAGICASYQTQTNSPSGAGSVASQSIIAYTMSLGAENSVAYSNNSIAIPTNFTISVTTEILPVSMTKTSVDCTMYICGDSTECSNLLLQYGSFCTQLNRALTGIAVEQDKNTQEVFAQVKQIYKTPPIKDFGGFNFSQILPDPSKPSKRSFIEDLLFNKVTLADAGFIKQYGDCLGDIAARDLICAQKFNGLTVLPPLLTDEMIAQYTSALLAGTITSGWTFGAGAALQIPFAMQMAYRFNGIGVTQNVLYENQKLIANQFNSAIGKIQDSLSSTASALGKLQDVVNQNAQALNTLVKQLSSNFGAISSVLNDILSRLDPPEAEVQIDRLITGRLQSLQTYVTQQLIRAAEIRASANLAATKMSECVLGQSKRVDFCGKGYHLMSFPQSAPHGVVFLHVTYVPAQEKNFTTAPAICHDGKAHFPREGVFVSNGTHWFVTQRNFYEPQIITTDNTFVSGNCDVVIGIVNNTVYDPLQPELDSFKEELDKYFKNHTSPDVDLGDISGINASVVNIQKEIDRLNEVAKNLNESLIDLQELGKYEQYIKGSGRENLYFQGGGGSGYIPEAPRDGQAYVRKDGEWVLLSTFLGHHHHHHHH

SEQ ID NO: 2054 - protein, 1281 aa, Artificial Sequence
  Description of Artificial Sequence: Synthetic polypeptide
MGILPSPGMPALLSLVSLLSVLLMGCVAETGTQCVNLTTRTQLPPAYTNSFTRGVYYPDKVFRSSVLHSTQDLFLPFFSNVTWFHAIHVSGTNGTKRFDNPVLPFNDGVYFASTEKSNIIRGWIFGTTLDSKTQSLLIVNNATNVVIKVCEFQFCNDPFLGVYYHKNNKSWMESEFRVYSSANNCTFEYVSQPFLMDLEGKQGNFKNLREFVFKNIDGYFKIYSKHTPINLVRDLPQGFSALEPLVDLPIGINITRFQTLLALHRSYLTPGDSSSGWGAGAAAYYVGYLQPRTFLLKYNENGTITDAVDCALDPLSETKCTLKSFTVEKGIYQTSNFRVQPTESIVRFPNITNLCPFGEVFNATRFASVYAWNRKRISNCVADYSVLYNSASFSTFKCYGVSPTKLNDLCFTNVYADSFVIRGDEVRQIAPGQTGKIADYNYKLPDDFTGCVIAWNSNNLDSKVGGNYNYLYRLFRKSNLKPFERDISTEIYQAGSTPCNGVEGFNCYFPLQSYGFQPTNGVGYQPYRVVVLSFELLHAPATVCGPKKSTNLVKNKCVNFNFNGLTGTGVLTESNKKFLPFQQFGRDIADTTDAVRDPQTLEILDITPCSFGGVSVITPGTNTSNQVAVLYQDVNCTEVPVAIHADQLTPTWRVYSTGSNVFQTRAGCLIGAEHVNNSYECDIPIGAGICASYQTQTNSPSGAGSVASQSIIAYTMSLGAENSVAYSNNSIAIPTNFTISVTTEILPVSMTKTSVDCTMYICGDSTECSNLLLQYGSFCTQLNRALTGIAVEQDKNTQEVFAQVKQIYKTPPIKDFGGFNFSQILPDPSKPSKRSFIEDLLFNKVTLADAGFIKQYGDCLGDIAARDLICAQKFNGLTVLPPLLTDEMIAQYTSALLAGTITSGWTFGAGAALQIPFAMQMAYRFNGIGVTQNVLYENQKLIANQFNSAIGKIQDSLSSTASALGKLQDVVNQNAQALNTLVKQLSSNFGAISSVLNDILSRLDPPEAEVQIDRLITGRLQSLQTYVTQQLIRAAEIRASANLAATKMSECVLGQSKRVDFCGKGYHLMSFPQSAPHGVVFLHVTYVPAQEKNFTTAPAICHDGKAHFPREGVFVSNGTHWFVTQRNFYEPQIITTDNTFVSGNCDVVIGIVNNTVYDPLQPELDSFKEELDKYFKNHTSPDVDLGDISGINASVVNIQKEIDRLNEVAKNLNESLIDLQELGKYEQYIKGSGRENLYFQGGGGSGYIPEAPRDGQAYVRKDGEWVLLSTFLGHHHHHHHH

SEQ ID NO: 2055 - protein, 1281 aa, Artificial Sequence
  Description of Artificial Sequence: Synthetic polypeptide
MGILPSPGMPALLSLVSLLSVLLMGCVAETGTQCVNLTTRTQLPPAYTNSFTRGVYYPDKVFRSSVLHSTQDLFLPFFSNVTWFHAIHVSGTNGTKRFDNPVLPFNDGVYFASTEKSNIIRGWIFGTTLDSKTQSLLIVNNATNVVIKVCEFQFCNDPFLGVYYHKNNKSWMESEFRVYSSANNCTFEYVSQPFLMDLEGKQGNFKNLREFVFKNIDGYFKIYSKHTPINLVRDLPQGFSALEPLVDLPIGINITRFQTLLALHRSYLTPGDSSSGWTAGAAAYYVGYLQPRTFLLKYNENGTITDAVDCALDPLSETKCTLKSFTVEKGIYQTSNFRVQPTESIVRFPNITNLCPFGEVFNATRFASVYAWNRKRISNCVADYSVLYNSASFSTFKCYGVSPTKLNDLCFTNVYADSFVIRGDEVRQIAPGQTGKIADYNYKLPDDFTGCVIAWNSNNLDSKVGGNYNYLYRLFRKSNLKPFERDISTEIYQAGSTPCNGVEGFNCYFPLQSYGFQPTNGVGYQPYRVVVLSFELLHAPATVCGPKKSTNLVKNKCVNFNFNGLTGTGVLTESNKKFLPFQQFGRDIADTLDAVRDPQTLEILDITPCSFGGVSVITPGTNTSNQVAVLYQDVNCTEVPVAIHADQLTPTWRVYSTGSNVFQTRAGCLIGAEHVNNSYECDIPIGAGICASYQTQTNSPSGAGSVASQSIIAYTMSLGAENSVAYSNNSIAIPTNFTISVTTEILPVSMTKTSVDCTMYICGDSTECSNLLLQYGSFCTQLNRALTGIAVEQDKNTQEVFAQVKQIYKTPPIKDFGGFNFSQILPDPSKPSKRSFIEDLLFNKVTLADAGFIKQYGDCLGDIAARDLICAQKFNGLTVLPPLLTDEMIAQYTSALLAGTITSGWTFGAGAALQIPFAMQMAYRFNGIGVTQNVLYENQKLIANQFNSAIGKIQDSLSSTASALGKLQDVVNQNAQALNTLVKQLSSNFGAISSVLNDILSRLDPPEAEVQIDRLITGRLQSLQTYVTQQLIRAAEIRASANLAATKMSECVLGQSKRVDFCGKGYHLMSFPQSAPHGVVFLHVTYVPAQEKNFTTAPAICHDGKAHFPREGVFVSNGTHWFVTQRNFYEPQIITTDNTFVSGNCDVVIGIVNNTVYDPLQPELDSFKEELDKYFKNHTSPDVDLGDISGINASVVNIQKEIDRLNEVAKNLNESLIDLQELGKYEQYIKGSGRENLYFQGGGGSGYIPEAPRDGQAYVRKDGEWVLLSTFLGHHHHHHHH

SEQ ID NO: 2056 - protein, 1281 aa, Artificial Sequence
  Description of Artificial Sequence: Synthetic polypeptide
MGILPSPGMPALLSLVSLLSVLLMGCVAETGTQCVNLTTRTQLPPAYTNSFTRGVYYPDKVFRSSVLHSTQDLFLPFFSNVTWFHAIHVSGTNGTKRFDNPVLPFNDGVYFASTEKSNIIRGWIFGTTLDSKTQSLLIVNNATNVVIKVCEFQFCNDPFLGVYYHKNNKSWMESEFRVYSSANNCTFEYVSQPFNMDLEGKQGNFKNLREFVFKNIDGYFKIYSKHTPINLVRDLPQGFSALEPLVDLPIGINITRFQTLLALHRSYLTPGDSSSGWTAGAAAYYVGYLQPRTFLLKYNENGTITDAVDCALDPLSETKCTLKSFTVEKGIYQTSNFRVQPTESIVRFPNITNLCPFGEVFNATRFASVYAWNRKRISNCVADYSVLYNSASFSTFKCYGVSPTKLNDLCFTNVYADSFVIRGDEVRQIAPGQTGKIADYNYKLPDDFTGCVIAWNSNNLDSKVGGNYNYLYRLFRKSNLKPFERDISTEIYQAGSTPCNGVEGFNCYFPLQSYGFQPTNGVGYQPYRVVVLSFELLHAPATVCGPKKSTNLVKNKCVNFNFNGLTGTGVLTESNKKFLPFQQFGRDIADTTDAVRDPQTLEILDITPCSFGGVSVITPGTNTSNQVAVLYQDVNCTEVPVAIHADQLTPTWRVYSTGSNVFQTRAGCLIGAEHVNNSYECDIPIGAGICASYQTQTNSPSGAGSVASQSIIAYTMSLGAENSVAYSNNSIAIPTNFTISVTTEILPVSMTKTSVDCTMYICGDSTECSNLLLQYGSFCTQLNRALTGIAVEQDKNTQEVFAQVKQIYKTPPIKDFGGFNFSQILPDPSKPSKRSFIEDLLFNKVTLADAGFIKQYGDCLGDIAARDLICAQKFNGLTVLPPLLTDEMIAQYTSALLAGTITSGWTFGAGAALQIPFAMQMAYRFNGIGVTQNVLYENQKLIANQFNSAIGKIQDSLSSTASALGKLQDVVNQNAQALNTLVKQLSSNFGAISSVLNDILSRLDPPEAEVQIDRLITGRLQSLQTYVTQQLIRAAEIRASANLAATKMSECVLGQSKRVDFCGKGYHLMSFPQSAPHGVVFLHVTYVPAQEKNFTTAPAICHDGKAHFPREGVFVSNGTHWFVTQRNFYEPQIITTDNTFVSGNCDVVIGIVNNTVYDPLQPELDSFKEELDKYFKNHTSPDVDLGDISGINASVVNIQKEIDRLNEVAKNLNESLIDLQELGKYEQYIKGSGRENLYFQGGGGSGYIPEAPRDGQAYVRKDGEWVLLSTFLGHHHHHHHH

SEQ ID NO: 2057 - protein, 1281 aa, Artificial Sequence
  Description of Artificial Sequence: Synthetic polypeptide
MGILPSPGMPALLSLVSLLSVLLMGCVAETGTQCVNLTTRTQLPPAYTNSFTRGVYYPDKVFRSSVLHSTQDLFLPFFSNVTWFHAIHVSGTNGTKRFDNPVLPFNDGVYFASTEKSNIIRGWIFGTTLDSKTQSLLIVNNATNVVIKVCEFQFCNDPFLGVYYHKNNKSWMESEFRVYSSANNCTFEYVSQPFLMDLEGKQGNFKNLREFVFKNIDGYFKIYSKHTPINLVRDLPQGFSALEPLVDLPIGINITRFQTLLALHRSYLTPGDSSSGWTAGAAAYYVGYLQPRTFLLKYNENGTITDAVDCALDPLSETKCTLKSFTVEKGIYQTSNFRVQPTESIVRFPNITNLCPFGEVFNATRFASVYAWNRKRISNCVADYSVLYNSASFSTFKCYGVSPTKLNDLCFTNVYADSFVIRGDEVRQIAPGQTGKIADYNYKLPDDFTGCVIAWNSNNLDSKVGGNYNYLYRLFRKSNLKPFERDISTEIYQAGSTPCNGVEGFNCYFPLQSYGFQPTNGVGYQPYRVVVLSFELLHAPATVCGPKKSTNLVKNKCVNFNFNGLTGTGVLTESNKKFLPFQQFGRDIADTTDAVRDPQTLEILDITPCSFGGVSVITPGTNTSNQVAVLYQDVNCTEVPVAIHADQLTPTWRVYSTGSNVFQTRAGCLIGAEHVNNSYECDIPIGAGICASYQTQTNSPSGAGSVASQSIIAYTMSLGAENSVAYSNNSIAIPTNFTISVTTEILPVSMTKTSVDCTMYICGDSTECSNLLLQYGSFCTQLNRALTGIAVEQDKNTQEVFAQVKQIYKTPPIKDFGGFNFSQILPDPSKPSKRSFIEDLLFNKVTLADAGFIKQYGDCLGDIAARDLICAQKFNGLTVLPPLLTDEMIAQYTSALLAGTITSGWTFGAGAALQIPFAMQMAYRFNGIGVTQNVLYENQKLIANQFNSAIGKIQDSLSSTASALGKLQDVVNQNAQALNTLVKQLSSNFGAISSVLNDILSRLDPPEAEVQIDRLITGRLQSLQTYVTQQLIRAAEIRASANLAATKMSECVLGQSKRVDFCGKGYHLMSFPQSAPHGVVFLHVTYVPAQEKNFTTAPAICHDGKAHFPREGVFVSNGTHWFITQRNFYEPQIITTDNTFVSGNCDVVIGIVNNTVYDPLQPELDSFKEELDKYFKNHTSPDVDLGDISGINASVVNIQKEIDRLNEVAKNLNESLIDLQELGKYEQYIKGSGRENLYFQGGGGSGYIPEAPRDGQAYVRKDGEWVLLSTFLGHHHHHHHH

SEQ ID NO: 2058 - protein, 1281 aa, Artificial Sequence
  Description of Artificial Sequence: Synthetic polypeptide
MGILPSPGMPALLSLVSLLSVLLMGCVAETGTQCVNLTTRTQLPPAYTNSVTRGVYYPDKVFRSSVLHSTQDLFLPFFSNVTWFHAIHVSGTNGTKRFDNPVLPFNDGVYFASTEKSNIIRGWIFGTTLDSKTQSLLIVNNATNVVIKVCEFQFCNDPFLGVYYHKNNKSWMESEFRVYSSANNCTFEYVSQPFLMDLEGKQGNFKNLREFVFKNIDGYFKIYSKHTPINLVRDLPQGFSALEPLVDLPIGINITRFQTLLALHRSYLTPGDSSSGWTAGAAAYYVGYLQPRTFLLKYNENGTITDAVDCALDPLSETKCTLKSFTVEKGIYQTSNFRVQPTESIVRFPNITNLCPFGEVFNATRFASVYAWNRKRISNCVADYSVLYNSASFSTFKCYGVSPTKLNDLCFTNVYADSFVIRGDEVRQIAPGQTGKIADYNYKLPDDFTGCVIAWNSNNLDSKVGGNYNYLYRLFRKSNLKPFERDISTEIYQAGSTPCNGVEGFNCYFPLQSYGFQPTNGVGYQPYRVVVLSFELLHAPATVCGPKKSTNLVKNKCVNFNFNGLTGTGVLTESNKKFLPFQQFGRDIADTTDAVRDPQTLEILDITPCSFGGVSVITPGTNTSNQVAVLYQDVNCTEVPVAIHADQLTPTWRVYSTGSNVFQTRAGCLIGAEHVNNSYECDIPIGAGICASYQTQTNSPSGAGSVASQSIIAYTMSLGAENSVAYSNNSIAIPTNFTISVTTEILPVSMTKTSVDCTMYICGDSTECSNLLLQYGSFCTQLNRALTGIAVEQDKNTQEVFAQVKQIYKTPPIKDFGGFNFSQILPDPSKPSKRSFIEDLLFNKVTLADAGFIKQYGDCLGDIAARDLICAQKFNGLTVLPPLLTDEMIAQYTSALLAGTITSGWTFGAGAALQIPFAMQMAYRFNGIGVTQNVLYENQKLIANQFNSAIGKIQDSLSSTASALGKLQDVVNQNAQALNTLVKQLSSNFGAISSVLNDILSRLDPPEAEVQIDRLITGRLQSLQTYVTQQLIRAAEIRASANLAATKMSECVLGQSKRVDFCGKGYHLMSFPQSAPHGVVFLHVTYVPAQEKNFTTAPAICHDGKAHFPREGVFVSNGTHWFVTQRNFYEPQIITTDNTFVSGNCDVVIGIVNNTVYDPLQPELDSFKEELDKYFKNHTSPDVDLGDISGINASVVNIQKEIDRLNEVAKNLNESLIDLQELGKYEQYIKGSGRENLYFQGGGGSGYIPEAPRDGQAYVRKDGEWVLLSTFLGHHHHHHHH

SEQ ID NO: 2059 - protein, 1281 aa, Artificial Sequence
  Description of Artificial Sequence: Synthetic polypeptide
MGILPSPGMPALLSLVSLLSVLLMGCVAETGTQCVNLTTRTQLPPAYTNSFTRGVYYPDKVFRSSVLHSTQDLFLPFFSNVTWFHAWHVSGTNGTKRFDNPVLPFNDGVYFASTEKSNIIRGWIFGTTLDSKTQSLLIVNNATNVVIKVCEFQFCNDPFLGVYYHKNNKSWMESEFRVYSSANNCTFEYVSQPFLMDLEGKQGNFKNLREFVFKNIDGYFKIYSKHTPINLVRDLPQGFSALEPLVDLPIGINITRFQTLLALHRSYLTPGDSSSGWTAGAAAYYVGYLQPRTFLLKYNENGTITDAVDCALDPLSETKCTLKSFTVEKGIYQTSNFRVQPTESIVRFPNITNLCPFGEVFNATRFASVYAWNRKRISNCVADYSVLYNSASFSTFKCYGVSPTKLNDLCFTNVYADSFVIRGDEVRQIAPGQTGKIADYNYKLPDDFTGCVIAWNSNNLDSKVGGNYNYLYRLFRKSNLKPFERDISTEIYQAGSTPCNGVEGFNCYFPLQSYGFQPTNGVGYQPYRVVVLSFELLHAPATVCGPKKSTNLVKNKCVNFNFNGLTGTGVLTESNKKFLPFQQFGRDIADTTDAVRDPQTLEILDITPCSFGGVSVITPGTNTSNQVAVLYQDVNCTEVPVAIHADQLTPTWRVYSTGSNVFQTRAGCLIGAEHVNNSYECDIPIGAGICASYQTQTNSPSGAGSVASQSIIAYTMSLGAENSVAYSNNSIAIPTNFTISVTTEILPVSMTKTSVDCTMYICGDSTECSNLLLQYGSFCTQLNRALTGIAVEQDKNTQEVFAQVKQIYKTPPIKDFGGFNFSQILPDPSKPSKRSFIEDLLFNKVTLADAGFIKQYGDCLGDIAARDLICAQKFNGLTVLPPLLTDEMIAQYTSALLAGTITSGWTFGAGAALQIPFAMQMAYRFNGIGVTQNVLYENQKLIANQFNSAIGKIQDSLSSTASALGKLQDVVNQNAQALNTLVKQLSSNFGAISSVLNDILSRLDPPEAEVQIDRLITGRLQSLQTYVTQQLIRAAEIRASANLAATKMSECVLGQSKRVDFCGKGYHLMSFPQSAPHGVVFLHVTYVPAQEKNFTTAPAICHDGKAHFPREGVFVSNGTHWFVTQRNFYEPQIITTDNTFVSGNCDVVIGIVNNTVYDPLQPELDSFKEELDKYFKNHTSPDVDLGDISGINASVVNIQKEIDRLNEVAKNLNESLIDLQELGKYEQYIKGSGRENLYFQGGGGSGYIPEAPRDGQAYVRKDGEWVLLSTFLGHHHHHHHH

SEQ ID NO: 2060 - protein, 1281 aa, Artificial Sequence
  Description of Artificial Sequence: Synthetic polypeptide
MGILPSPGMPALLSLVSLLSVLLMGCVAETGTQCVNLTTRTQLPPAYTNSFTRGVYYPDKIFRSNVLHSTQDLFLPFFSNVTWFHALHVKGTNGTKDFDNPVLPFNDGVYFAAIEKSNIIRGWIFGTTLDSKTQSLLIVNNATNVVIRVCEFQFCENPFLGVYYHKNNKSWREEEWRWYSSANNCTFEYVSQPFLYDLNGKQGNFHHLREFVFKNIDGYFKIYSKWEPINLVRDLPQGFSPLEPLMDLPIGINITHFQTFLSLSRSYRTPGDSSSGWTAGAAAYYVGYLQPRTFLLKYDENGYITDAVDCSLDPLSETKCKLKSFTVEKGIYQTSNFRVQPTYEIVRFPNITNACPFDEVFNAPRFASVYNWERYRISNCVADYSVLYNSASFSTFQCYGVSPTKLNDLCFTNVYADVFVIRGSEVRQIAPGQTGPIADYNYKLPDDFTGCVIAWNSNNLDSTVGGNYNYLYRLFRKSNMKPFERDISTEAYQAGCTPCNGVEGFNCYFPLQSYGFQPTNGVGYQPYRVVVLKFELLHAPATVCGPKDPTNLVKNKCVDYNFNGRTGTGVLTESNKKFLPFQQFGRDISDNLDAVRDPTTGEILCITPCSFGGVSVITPGTNTSNQVAVLYQDVNCTEVPEAIHSNQLRPTWRVYSTGSNVFQTRAGCLIGAEHVNNSYECDIPIGNGICASYQTQTNSPSGSGSVSSQSIIAYTMSLGAENPVPYSNNNIAIPTNFTISVQTEILPVSMPKVSVDCTMYICGDSTECLNLLSQYGSFCSQLERALNGIAREQDKNLLNVFAQVKQIYKTPPIKDFGGFNFSQILPDPSKPSKRSFIEDLLFNKVTLADLGFVKQYKDCLGDQAARDLICAQKFNGIMVLPPLLTDEMIAQYTASLLAGTITAGWTFGAGAALVIPFAMQMAYRFNGIGVQQNVLYENQKIIANQFNNAIGNIQDGLSTTASALSKLQDVVNQQAQALNELVKQLSSNFGAISSVINDIYNRLDRPEAEAQIDRLITGRLQSLQTYVTQQLIRATEIRASAQLAAEKMSECVKGQSNRYGFCGNGYHLMSFPQSAPHGVVFLHVTYVPTQFKNFTTAPGICHDGKAYFPREGVFVSNGTSWYITQRNFYEPRPITTDNTFVSGNCDVVIGIVNNTVYDPLQPELDSFKEELDKYFKNHTSPDVDLGDISGINASVVNIQKEIDRLNEVAKNLNESLIDLQELGKYEQYIKGSGRENLYFQGGGGSGYIPEAPRDGQAYVRKDGEWVLLSTFLGHHHHHHHH

SEQ ID NO: 2061 - protein, 1281 aa, Artificial Sequence
  Description of Artificial Sequence: Synthetic polypeptide
MGILPSPGMPALLSLVSLLSVLLMGCVAETGTQCVNLTTRTQLPPAYTNSFTRGVYYPDKVFRSSVLHSTQDLFLPFFSNVTWFHAIHVSGTNGTKRFDNPVLPFNDGVYFASTEKSNIIRGWIFGTTLDSKTQSLLIVNNATNVVIKVCEFQFCNDPFLGVYYHKNNKSWMESEFRVYSSANNCTFEYVSQPFLMDLEGKQGNFKNLREFVFKNIDGYFKIYSKHTPINLVRDLPQGFSALEPLVDLPIGINITRFQTLLALHRSYLTPGDSSSGWTAGAAAYYVGYLQPRTFLLKYNENGTITDAVDCALDPLSETKCTLKSFTVEKGIYQTSNFRVQPTESIVRFPNITNLCPFGEVFNATRFASVYAWNRKRISNCVADYSVLYNSASFSTFKCYGVSPTKLNDLCFTNVYADSFVIRGDEVRQIAPGQTGKIADYNYKLPDDFTGCVIAWNSNNLDSKVGGNYNYLYRLFRKSNLKPFERDISTEIYQAGSTPCNGVEGFNCYFPLQSYGFQPTNGVGYQPYRVVVLSFELLHAPATVCGPKKSTNLVKNKCVNFNFNGLTGTGVLTESNKKFLPFQQFGRDIADTTDAVRDPQTLEILDITPCSFGGVSVITPGTNTSNQVAVLYQDVNCTEVPVAIHADQLTPTWRVYSTGSNVFQTRAGCLIGAEHVNNSYECDIPIGAGICASYQTQTNSPSGAGSVASQSIIAYTMSLGAENSVAYSNNSIAIPTNFTISVTTEILPVSMTKTSVDCTMYICGDSTECSNLLLQYGSFCTQLNRALTGIAVEQDKNTQEVFAQVKQIYKTPPIKDFGGFNFSQILPDPSKPSKRSFIEDLLFNKVTLADAGFIKQYGDCLGDIAARDLICAQKFNGLTVLPPLLTDEMIAQYTSALLAGTITSGWTFGAGAALQIPFAMQMAYRFNGIGVTQNVLYENQKLIANQFNSAIGKIQDSLSSTASALGKLQDVVNQNAQALNTLVKQLSSNFGAISSVLNDILNRLDPPEAEVQIDRLITGRLQSLQTYVTQQLIRAAEIRASANLAATKMSECVLGQSKRVDFCGKGYHLMSFPQSAPHGVVFLHVTYVPAQEKNFTTAPAICHDGKAHFPREGVFVSNGTHWFVTQRNFYEPQIITTDNTFVSGNCDVVIGIVNNTVYDPLQPELDSFKEELDKYFKNHTSPDVDLGDISGINASVVNIQKEIDRLNEVAKNLNESLIDLQELGKYEQYIKGSGRENLYFQGGGGSGYIPEAPRDGQAYVRKDGEWVLLSTFLGHHHHHHHH

SEQ ID NO: 2062 - protein, 1281 aa, Artificial Sequence
  Description of Artificial Sequence: Synthetic polypeptide
MGILPSPGMPALLSLVSLLSVLLMGCVAETGTQCVNLTTRTQLPPAYTNSFTRGVYYPDKVFRSSVLHSTQDLFLPFFSNVTWFHAIHVSGTNGTKRFDNPVLPFNDGVYFASTEKSNIIRGWIFGTTLDSKTQSLLIVNNATNVVIKVCEFQFCNDPFLGVYYHKNNKSWMESEFRVYSSANNCTFEYVSQPFLMDLEGKQGNFKNLREFVFKNIDGYFKIYSKHTPINLVRDLPQGFSALEPLVDLPIGINITRFQTLLALHRSYLTPGDSSSGWTAGAAAYYVGYLQPRTFLLKYNENGTITDAVDCALDPLSETKCTLKSFTVEKGIYQTSNFRVQPTESIVRFPNITNLCPFGEVFNATRFASVYAWNRKRISNCVADYSVLYNSASFSTFKCYGVSPTKLNDLCFTNVYADSFVIRGDEVRQIAPGQTGKIADYNYKLPDDFTGCVIAWNSNNLDSKVGGNYNYLYRLFRKSNLKPFERDISTEIYQAGSTPCNGVEGFNCYFPLQSYGFQPTNGVGYQPYRVVVLSFELLHAPATVCGPKKSTNLVKNKCVNFNFNGLTGTGVLTESNKKFLPFQQFGRDIADTTDAVRDPQTLEILDITPCSFGGVSVITPGTNTSNQVAVLYQDVNCTEVPVAIHANQLTPTWRVYSTGSNVFQTRAGCLIGAEHVNNSYECDIPIGAGICASYQTQTNSPSGAGSVASQSIIAYTMSLGAENSVAYSNNSIAIPTNFTISVTTEILPVSMTKTSVDCTMYICGDSTECSNLLLQYGSFCTQLNRALTGIAVEQDKNTQEVFAQVKQIYKTPPIKDFGGFNFSQILPDPSKPSKRSFIEDLLFNKVTLADAGFIKQYGDCLGDIAARDLICAQKFNGLTVLPPLLTDEMIAQYTSALLAGTITSGWTFGAGAALQIPFAMQMAYRFNGIGVTQNVLYENQKLIANQFNSAIGKIQDSLSSTASALGKLQDVVNQNAQALNTLVKQLSSNFGAISSVLNDILSRLDPPEAEVQIDRLITGRLQSLQTYVTQQLIRAAEIRASANLAATKMSECVLGQSKRVDFCGKGYHLMSFPQSAPHGVVFLHVTYVPAQEKNFTTAPAICHDGKAHFPREGVFVSNGTHWFVTQRNFYEPQIITTDNTFVSGNCDVVIGIVNNTVYDPLQPELDSFKEELDKYFKNHTSPDVDLGDISGINASVVNIQKEIDRLNEVAKNLNESLIDLQELGKYEQYIKGSGRENLYFQGGGGSGYIPEAPRDGQAYVRKDGEWVLLSTFLGHHHHHHHH

SEQ ID NO: 2063 - protein, 1281 aa, Artificial Sequence
  Description of Artificial Sequence: Synthetic polypeptide
MGILPSPGMPALLSLVSLLSVLLMGCVAETGTQCVNLTTRTQLPPAYTNSFTRGVYYPDKVFRSSVLHSTQDLFLPFFSNVTWFHAIHVSGTNGTKRFDNPVLPFNDGVYFASTEKSNIIRGWIFGTTLDSKTQSLLIVNNATNVVIKVCEFQFCNDPFLGVYYHKNNKSWMESEFRVYSSANNCTFEYVSQPFLMDLEGKQGNFKNLREFVFKNIDGYFKIYSKHTPINLVRDLPQGFSALEPLVDLPIGINITRFQTLLALHRSYLTPGDSSSGWTAGAAAYYVGYLQPRTFLLKYNENGTITDAVDCALDPLSETKCTLKSFTVEKGIYQTSNFRVQPTESIVRFPNITNLCPFGEVFNATRFASVYAWNRKRISNCVADYSVLYNSASFSTFKCYGVSPTKLNDLCFTNVYADSFVIRGDEVRQIAPGQTGKIADYNYKLPDDFTGCVIAWNSNNLDSKVGGNYNYLYRLFRKSNLKPFERDISTEIYQAGSTPCNGVEGFNCYFPLQSYGFQPTNGVGYQPYRVVVLSFELLHAPATVCGPKKSTNLVKNKCVNFNFNGLTGTGVLTESNKKFLPFQQFGRDIADTTDAVRDPQTLEILDITPCSFGGVSVITPGTNTSNQVAVLYQDVNCTEVPVAIHADQLTPTWRVYSTGSNVFQTRAGCLIGAEHVNNSYECDIPIGAGICASYQTQTNSPSGAGSVASQSIIAYTMSLGAENSVAYSNNSIAIPTNFTISVTTEILPVSMTKTSVDCTMYICGDSTECSNLLLQYGSFCTQLNRALTGIAVEQDKNTQEVFAQVKQIYKTPPIKDFGGFNFSQILPDPSKPSKRSFIEDLLFNKVTLADAGFIKQYGDCLGDIAARDLICAQKFNGLTVLPPLLTDEMIAQYTSALLAGTITSGWTFGAGAALQIPFAMQMAYRFNGIGVTQNVLYENQKLIANQFNSAIGKIQDSLSSTASALGKLQDVVNQNAQALNTLVKQLSSNFGAISSVLNDILSRLDPPEAEVQIDRLITGRLQSLQTYVTQQLIRAAEIRASANLAATKMSECVLGQSKRVDFCGKGYHLMSFPQAAPHGVVFLHVTYVPAQEKNFTTAPAICHDGKAHFPREGVFVSNGTHWFVTQRNFYEPQIITTDNTFVSGNCDVVIGIVNNTVYDPLQPELDSFKEELDKYFKNHTSPDVDLGDISGINASVVNIQKEIDRLNEVAKNLNESLIDLQELGKYEQYIKGSGRENLYFQGGGGSGYIPEAPRDGQAYVRKDGEWVLLSTFLGHHHHHHHH

SEQ ID NO: 2064 - protein, 1281 aa, Artificial Sequence
  Description of Artificial Sequence: Synthetic polypeptide
MGILPSPGMPALLSLVSLLSVLLMGCVAETGTQCVNLTTRTQLPPAYTNSFTRGVYYPDKVFRSSVLHSTQDLFLPFFSNVTWFHAIHVSGTNGTKRFDNPVLPFNDGVYFASTEKSNIIRGWIFGTTLDSKTQSLLIVNNATNVVIKVCEFQFCNDPFLGVYYHKNNKSWMESEFRVYSSANNCTFEYVSQPFLMDLEGKQGNFKNLREFVFKNIDGYFKIYSKHTPINLVRDLPQGFSALEPLVDLPIGINITRFQTLLALHRSYLTPGDSSSGWTAGAAAYYVGYLQPRTFLLKYNENGTITDAVDCALDPLSETKCTLKSFTVEKGIYQTSNFRVQPTESIVRFPNITNLCPFGEVFNATRFASVYAWNRKRISNCVADYSVLYNSASFSTFKCYGVSPTKLNDLCFTNVYADSFVIRGDEVRQIAPGQTGKIADYNYKLPDDFTGCVIAWNSNNLDSKVGGNYNYLYRLFRKSNLKPFERDISTEIYQAGSTPCNGVEGFNCYFPLQSYGFQPTNGVGYQPYRVVVLSFELLHAPATVCGPKKSTNLVKNKCVNFNFNGLTGTGVLTESNKKFLPFQQFGRDIADTTDAVRDPQTLEILDITPCSFGGVSVITPGTNTSNQVAVLYQDVNCTEVPVAIHADQLTPTWRVYSTGSNVFQTRAGCLIGAEHVNNSYECDIPIGAGICASYQTQTNSPSGAGSVASQSIIAYTMSLGAENSVAYSNNSIAIPTNFTISVTTEILPVSMTKTSVDCTMYICGDSTECSNLLLQYGSFCTQLNRALTGIAVEQDKNTQEVFAQVKQIYKTPPIKDFGGFNFSQILPDPSKPSKRSFIEDLLFNKVTLADAGFIKQYGDCLGDIAARDLICAQKFNGLTVLPPLLTDEMIAQYTSALLAGTITSGWTFGAGAALQIPFAMQMAYRFNGIGVTQNVLYENQKLIANQFNDAIGKIQDSLSSTASALGKLQDVVNQNAQALNTLVKQLSSNFGAISSVLNDILSRLDPPEAEVQIDRLITGRLQSLQTYVTQQLIRAAEIRASANLAATKMSECVLGQSKRVDFCGKGYHLMSFPQSAPHGVVFLHVTYVPAQEKNFTTAPAICHDGKAHFPREGVFVSNGTHWFVTQRNFYEPQIITTDNTFVSGNCDVVIGIVNNTVYDPLQPELDSFKEELDKYFKNHTSPDVDLGDISGINASVVNIQKEIDRLNEVAKNLNESLIDLQELGKYEQYIKGSGRENLYFQGGGGSGYIPEAPRDGQAYVRKDGEWVLLSTFLGHHHHHHHH

SEQ ID NO: 2065 - protein, 1281 aa, Artificial Sequence
  Description of Artificial Sequence: Synthetic polypeptide
MGILPSPGMPALLSLVSLLSVLLMGCVAETGTQCVNLTTRTQLPPAYTNSFTRGVYYPDKVFRSSVLHSTQDLFLPFFSNVTWFHAIHVSGTNGTKRFDNPVLPFNDGVYFASTEKSNIIRGWIFGTTLDSKTQSLLIVNNATNVVIKVCEFQFCNDPFLGVYYHKNNKSWMESEFRVYSSANNCTFEYVSQPFDMDLEGKQGNFKNLREFVFKNIDGYFKIYSKHTPINLVRDLPQGFSALEPLVDLPIGINITRFQTLLALHRSYLTPGDSSSGWTAGAAAYYVGYLQPRTFLLKYNENGTITDAVDCALDPLSETKCTLKSFTVEKGIYQTSNFRVQPTESIVRFPNITNLCPFGEVFNATRFASVYAWNRKRISNCVADYSVLYNSASFSTFKCYGVSPTKLNDLCFTNVYADSFVIRGDEVRQIAPGQTGKIADYNYKLPDDFTGCVIAWNSNNLDSKVGGNYNYLYRLFRKSNLKPFERDISTEIYQAGSTPCNGVEGFNCYFPLQSYGFQPTNGVGYQPYRVVVLSFELLHAPATVCGPKKSTNLVKNKCVNFNFNGLTGTGVLTESNKKFLPFQQFGRDIADTTDAVRDPQTLEILDITPCSFGGVSVITPGTNTSNQVAVLYQDVNCTEVPVAIHADQLTPTWRVYSTGSNVFQTRAGCLIGAEHVNNSYECDIPIGAGICASYQTQTNSPSGAGSVASQSIIAYTMSLGAENSVAYSNNSIAIPTNFTISVTTEILPVSMTKTSVDCTMYICGDSTECSNLLLQYGSFCTQLNRALTGIAVEQDKNTQEVFAQVKQIYKTPPIKDFGGFNFSQILPDPSKPSKRSFIEDLLFNKVTLADAGFIKQYGDCLGDIAARDLICAQKFNGLTVLPPLLTDEMIAQYTSALLAGTITSGWTFGAGAALQIPFAMQMAYRFNGIGVTQNVLYENQKLIANQFNSAIGKIQDSLSSTASALGKLQDVVNQNAQALNTLVKQLSSNFGAISSVLNDILSRLDPPEAEVQIDRLITGRLQSLQTYVTQQLIRAAEIRASANLAATKMSECVLGQSKRVDFCGKGYHLMSFPQSAPHGVVFLHVTYVPAQEKNFTTAPAICHDGKAHFPREGVFVSNGTHWFVTQRNFYEPQIITTDNTFVSGNCDVVIGIVNNTVYDPLQPELDSFKEELDKYFKNHTSPDVDLGDISGINASVVNIQKEIDRLNEVAKNLNESLIDLQELGKYEQYIKGSGRENLYFQGGGGSGYIPEAPRDGQAYVRKDGEWVLLSTFLGHHHHHHHH

SEQ ID NO: 2066 - protein, 1281 aa, Artificial Sequence
  Description of Artificial Sequence: Synthetic polypeptide
MGILPSPGMPALLSLVSLLSVLLMGCVAETGTQCVNLTTRTQLPPAYTNSFTRGVYYPDKVFRSSVLHSTQDLFLPFFSNVTWFHAIHVSGTNGTKRFDNPVLPFNDGVYFASTEKSNIIRGWIFGTTLDSKTQSLLIVNNATNVVIKVCEFQFCNDPFLGVYYHKNNKSWMESEFRVYSSANNCTFEYVSQPFLMDLEGKQGNFKNLREFVFKNIDGYFKIYSKHTPINLVRDLPQGFSALEPLVELPIGINITRFQTLLALHRSYLTPGDSSSGWTAGAAAYYVGYLQPRTFLLKYNENGTITDAVDCALDPLSETKCTLKSFTVEKGIYQTSNFRVQPTESIVRFPNITNLCPFGEVFNATRFASVYAWNRKRISNCVADYSVLYNSASFSTFKCYGVSPTKLNDLCFTNVYADSFVIRGDEVRQIAPGQTGKIADYNYKLPDDFTGCVIAWNSNNLDSKVGGNYNYLYRLFRKSNLKPFERDISTEIYQAGSTPCNGVEGFNCYFPLQSYGFQPTNGVGYQPYRVVVLSFELLHAPATVCGPKKSTNLVKNKCVNFNFNGLTGTGVLTESNKKFLPFQQFGRDIADTTDAVRDPQTLEILDITPCSFGGVSVITPGTNTSNQVAVLYQDVNCTEVPVAIHADQLTPTWRVYSTGSNVFQTRAGCLIGAEHVNNSYECDIPIGAGICASYQTQTNSPSGAGSVASQSIIAYTMSLGAENSVAYSNNSIAIPTNFTISVTTEILPVSMTKTSVDCTMYICGDSTECSNLLLQYGSFCTQLNRALTGIAVEQDKNTQEVFAQVKQIYKTPPIKDFGGFNFSQILPDPSKPSKRSFIEDLLFNKVTLADAGFIKQYGDCLGDIAARDLICAQKFNGLTVLPPLLTDEMIAQYTSALLAGTITSGWTFGAGAALQIPFAMQMAYRFNGIGVTQNVLYENQKLIANQFNSAIGKIQDSLSSTASALGKLQDVVNQNAQALNTLVKQLSSNFGAISSVLNDILSRLDPPEAEVQIDRLITGRLQSLQTYVTQQLIRAAEIRASANLAATKMSECVLGQSKRVDFCGKGYHLMSFPQSAPHGVVFLHVTYVPAQEKNFTTAPAICHDGKAHFPREGVFVSNGTHWFVTQRNFYEPQIITTDNTFVSGNCDVVIGIVNNTVYDPLQPELDSFKEELDKYFKNHTSPDVDLGDISGINASVVNIQKEIDRLNEVAKNLNESLIDLQELGKYEQYIKGSGRENLYFQGGGGSGYIPEAPRDGQAYVRKDGEWVLLSTFLGHHHHHHHH

SEQ ID NO: 2067 - protein, 1281 aa, Artificial Sequence
  Description of Artificial Sequence: Synthetic polypeptide
MGILPSPGMPALLSLVSLLSVLLMGCVAETGTQCVNLTTRTQLPPAYTNSFTRGVYYPDKVFRSSVLHSTQDLFLPFFSNVTWFHAIHVSGTNGTKRFDNPVLPFNDGVYFAAIEKSNIIRGWIFGTTLDSKTQSLLIVNNATNVVIKVCEFQFCNDPFLGVYYHKNNKSWMESEFRVYSSANNCTFEYVSQPFLMDLEGKQGNFKNLREFVFKNIDGYFKIYSKHTPINLVRDLPQGFSALEPLVDLPIGINITRFQTLLALHRSYLTPGDSSSGWTAGAAAYYVGYLQPRTFLLKYNENGTITDAVDCALDPLSETKCTLKSFTVEKGIYQTSNFRVQPTESIVRFPNITNLCPFGEVFNATRFASVYAWNRKRISNCVADYSVLYNSASFSTFKCYGVSPTKLNDLCFTNVYADSFVIRGDEVRQIAPGQTGKIADYNYKLPDDFTGCVIAWNSNNLDSKVGGNYNYLYRLFRKSNLKPFERDISTEIYQAGSTPCNGVEGFNCYFPLQSYGFQPTNGVGYQPYRVVVLSFELLHAPATVCGPKKSTNLVKNKCVNFNFNGLTGTGVLTESNKKFLPFQQFGRDISDTTDAVRDPQTLEILDITPCSFGGVSVITPGTNTSNQVAVLYQDVNCTEVPVAIHADQLTPTWRVYSTGSNVFQTRAGCLIGAEHVNNSYECDIPIGAGICASYQTQTNSPSGAGSVASQSIIAYTMSLGAENSVAYSNNSIAIPTNFTISVTTEILPVSMTKTSVDCTMYICGDSTECSNLLLQYGSFCTQLNRALTGIAVEEDKNTQEVFAQVKQIYKTPPIKDFGGFNFSQILPDPSKPSKRSFIEDLLFNKVTLADAGFIKQYGDCLGDIAARDLICAQKFNGLTVLPPLLTDEMIAQYTSSLLAGTITAGWTFGAGAALQIPFAMQMAYRFNGIGVTQNVLYENQKLIANQFNSAIGKIQDSLSSTASALGKLQDVVNQNAQALNTLVKQLSSNFGAISSVLNDILSRLDPPEAEVQIDRLITGRLQSLQTYVTQQLIRAAEIRASANLAATKMSECVKGQSKRVDFCGKGYHLMSFPQSAPHGIVFLHVTYVPAQEKNFTTAPAICHDGKAHFPREGVFVSNGTHWFVTQRNFYEPQIITTDNTFVSGNCDVVIGIVNNTVYDPLQPELDSFKEELDKYFKNHTSPDVDLGDISGINASVVNIQKEIDRLNEVAKNLNESLIDLQELGKYEQYIKGSGRENLYFQGGGGSGYIPEAPRDGQAYVRKDGEWVLLSTFLGHHHHHHHH

SEQ ID NO: 2068 - protein, 1281 aa, Artificial Sequence
  Description of Artificial Sequence: Synthetic polypeptide
MGILPSPGMPALLSLVSLLSVLLMGCVAETGTQCVNLTTRTQLPPAYTNSFTRGVYYPDKVFRSSVLHSTQDLFLPFFSNVTWFHAIHVSGTNGTKRFDNPVLPFNDGVYFASTEKSNIIRGWIFGTTLDSKTQSLLIVNNATNVVIKVCEFQFCNDPFLGVYYHKNNKSWMESEFRVYSSANNCTFEYVSQPFLMDLEGKQGNFKNLREFVFKNIDGYFKIYSKHTPINLVRDLPQGFSALEPLVDLPIGINITRFQTLLALHRSYLTPGDSSSGWTAGAAAYYVGYLQPRTFLLKYNENGTITDAVDCALDPLSETKCTLKSFTVEKGIYQTSNFRVQPTESIVRFPNITNLCPFGEVFNATRFASVYAWNRKRISNCVADYSVLYNSASFSTFKCYGVSPTKLNDLCFTNVYADSFVIRGDEVRQIAPGQTGKIADYNYKLPDDFTGCVIAWNSNNLDSKVGGNYNYLYRLFRKSNLKPFERDISTEIYQAGSTPCNGVEGFNCYFPLQSYGFQPTNGVGYQPYRVVVLSFELLHAPATVCGPKKSTNLVKNKCVNFNFNGLTGTGVLTESNKKFLPFQQFGRDIADTTDAVRDPQTLEILDITPCSFGGVSVITPGTNTSNQVAVLYQDVNCTEVPVAIHADQLTPTWRVYSTGSNVFQTRAGCLIGAEHVNNSYECDIPIGAGICASYQTQTNSPSGAGSVASQSIIAYTMSLGAENSVAYSNNSIAIPTNFTISVTTEILPVSMTKTSVDCTMYICGDSTECSNLLLQYGSFCTQLERALTGIAVEQDKNTQEVFAQVKQIYKTPPIKDFGGFNFSQILPDPSKPSKRSFIEDLLFNKVTLADAGFIKQYGDCLGDIAARDLICAQKFNGLTVLPPLLTDEMIAQYTSALLAGTITSGWTFGAGAALQIPFAMQMAYRFNGIGVTQNVLYENQKLIANQFNSAIGKIQDSLSSTASALGKLQDVVNQNAQALNTLVKQLSSNFGAISSVLNDILSRLDPPEAEVQIDRLITGRLQSLQTYVTQQLIRAAEIRASANLAATKMSECVLGQSKRVDFCGKGYHLMSFPQSAPHGVVFLHVTYVPAQEKNFTTAPAICHDGKAHFPREGVFVSNGTHWFVTQRNFYEPQIITTDNTFVSGNCDVVIGIVNNTVYDPLQPELDSFKEELDKYFKNHTSPDVDLGDISGINASVVNIQKEIDRLNEVAKNLNESLIDLQELGKYEQYIKGSGRENLYFQGGGGSGYIPEAPRDGQAYVRKDGEWVLLSTFLGHHHHHHHH

SEQ ID NO: 2069 - protein, 1281 aa, Artificial Sequence
  Description of Artificial Sequence: Synthetic polypeptide
MGILPSPGMPALLSLVSLLSVLLMGCVAETGTQCVNLTTRTQLPPAYTNSFTRGVYYPDKVFRSSVLHSTQDLFLPFFSNVTWFHAIHVSGTNGTKRFDNPVLPFNDGVYFASTEKSNIIRGWIFGTTLDSKTQSLLIVNNATNVVIKVCEFQFCNDPFLGVYYHKNNKSWMESEFRVYSSANNCTFEYVSQPFLMDLEGKQGNFKNLREFVFKNIDGYFKIYSKHTPINLVRDLPQGFSALEPLVDLPIGINITRFQTLLALHRSYLTPGDSSSGWTAGAAAYYVGYLQPRTFLLKYNENGTITDAVDCALDPLSETKCTLKSFTVEKGIYQTSNFRVQPTESIVRFPNITNLCPFGEVFNATRFASVYAWNRKRISNCVADYSVLYNSASFSTFKCYGVSPTKLNDLCFTNVYADSFVIRGDEVRQIAPGQTGKIADYNYKLPDDFTGCVIAWNSNNLDSKVGGNYNYLYRLFRKSNLKPFERDISTEIYQAGSTPCNGVEGFNCYFPLQSYGFQPTNGVGYQPYRVVVLSFELLHAPATVCGPKKSTNLVKNKCVNFNFNGLTGTGVLTESNKKFLPFQQFGRDIADTTDAVRDPQTLEILDITPCSFGGVSVITPGTNTSNQVAVLYQDVNCTEVPVAIHADQLTPTWRVYSTGSNVFQTRAGCLIGAEHVNNSYECDIPIGAGICASYQTQTNSPSGAGSVSSQSIIAYTMSLGAENSVAYSNNSIAIPTNFTISVTTEILPVSMTKTSVDCTMYICGDSTECSNLLLQYGSFCTQLNRALTGIAVEQDKNTQEVFAQVKQIYKTPPIKDFGGFNFSQILPDPSKPSKRSFIEDLLFNKVTLADAGFIKQYGDCLGDIAARDLICAQKFNGLTVLPPLLTDEMIAQYTSALLAGTITSGWTFGAGAALQIPFAMQMAYRFNGIGVTQNVLYENQKLIANQFNSAIGKIQDSLSSTASALGKLQDVVNQNAQALNTLVKQLSSNFGAISSVLNDILSRLDPPEAEVQIDRLITGRLQSLQTYVTQQLIRAAEIRASANLAATKMSECVLGQSKRVDFCGKGYHLMSFPQSAPHGVVFLHVTYVPAQEKNFTTAPAICHDGKAHFPREGVFVSNGTHWFVTQRNFYEPQIITTDNTFVSGNCDVVIGIVNNTVYDPLQPELDSFKEELDKYFKNHTSPDVDLGDISGINASVVNIQKEIDRLNEVAKNLNESLIDLQELGKYEQYIKGSGRENLYFQGGGGSGYIPEAPRDGQAYVRKDGEWVLLSTFLGHHHHHHHH

SEQ ID NO: 2070 - protein, 1281 aa, Artificial Sequence
  Description of Artificial Sequence: Synthetic polypeptide
MGILPSPGMPALLSLVSLLSVLLMGCVAETGTQCVNLTTRTQLPPAYTNSFTRGVYYPDKVFRSSVLHSTQDLFLPFFSNVTWFHAIHVSGTNGTKRFDNPVLPFNDGVYFASTEKSNIIRGWIFGTTLDSKTQSLLIVNNATNVVIKVCEFQFCNDPFLGVYYHKNNKSWMESEFRVYSSANNCTFEYVSQPFLMDLEGKQGNFKNLREFVFKNIDGYFKIYSKHTPINLVRDLPQGFSALEPLVDLPIGINITRFQTLLALHRSYLTPGDSSSGWTAGAAAYYVGYLQPRTFLLKYNENGTITDAVDCALDPLSETKCTLKSFTVEKGIYQTSNFRVQPTESIVRFPNITNLCPFGEVFNATRFASVYAWNRKRISNCVADYSVLYNSASFSTFKCYGVSPTKLNDLCFTNVYADSFVIRGDEVRQIAPGQTGKIADYNYKLPDDFTGCVIAWNSNNLDSKVGGNYNYLYRLFRKSNLKPFERDISTEIYQAGSTPCNGVEGFNCYFPLQSYGFQPTNGVGYQPYRVVVLSFELLHAPATVCGPKKSTNLVKNKCVNFNFNGLTGTGVLTESNKKFLPFQQFGRDIADTTDAVRDPQTLEILDITPCSFGGVSVITPGTNTSNQVAVLYQDVNCTEVPVAIHADQLTPTWRVYSTGSNVFQTRAGCLIGAEHVNNSYECDIPIGAGICASYQTQTNSPSGAGSVASQSIIAYTMSLGAENSVAYSNNSIAIPTNFTISVTTEILPVSMTKTSVDCTMYICGDSTECSNLLLQYGSFCTQLNRALNGIAVEQDKNTQEVFAQVKQIYKTPPIKDFGGFNFSQILPDPSKPSKRSFIEDLLFNKVTLADAGFIKQYGDCLGDIAARDLICAQKFNGLTVLPPLLTDEMIAQYTSALLAGTITSGWTFGAGAALQIPFAMQMAYRFNGIGVTQNVLYENQKLIANQFNSAIGKIQDSLSSTASALGKLQDVVNQNAQALNTLVKQLSSNFGAISSVLNDILSRLDPPEAEVQIDRLITGRLQSLQTYVTQQLIRAAEIRASANLAATKMSECVLGQSKRVDFCGKGYHLMSFPQSAPHGVVFLHVTYVPAQEKNFTTAPAICHDGKAHFPREGVFVSNGTHWFVTQRNFYEPQIITTDNTFVSGNCDVVIGIVNNTVYDPLQPELDSFKEELDKYFKNHTSPDVDLGDISGINASVVNIQKEIDRLNEVAKNLNESLIDLQELGKYEQYIKGSGRENLYFQGGGGSGYIPEAPRDGQAYVRKDGEWVLLSTFLGHHHHHHHH

SEQ ID NO: 2071 - protein, 1281 aa, Artificial Sequence
  Description of Artificial Sequence: Synthetic polypeptide
MGILPSPGMPALLSLVSLLSVLLMGCVAETGTQCVNLTTRTQLPPAYTNSFTRGVYYPDKVFRSSVLHSTQDLFLPFFSNVTWFHAIHVSGTNGTKQFDNPVLPFNDGVYFASTEKSNIIRGWIFGTTLDSKTQSLLIVNNATNVVIKVCEFQFCNDPFLGVYYHKNNKSWMESEFRVYSSANNCTFEYVSQPFLMDLEGKQGNFKNLREFVFKNIDGYFKIYSKHTPINLVRDLPQGFSALEPLVDLPIGINITRFQTLLALHRSYLTPGDSSSGWTAGAAAYYVGYLQPRTFLLKYNENGTITDAVDCALDPLSETKCTLKSFTVEKGIYQTSNFRVQPTESIVRFPNITNLCPFGEVFNATRFASVYAWNRKRISNCVADYSVLYNSASFSTFKCYGVSPTKLNDLCFTNVYADSFVIRGDEVRQIAPGQTGKIADYNYKLPDDFTGCVIAWNSNNLDSKVGGNYNYLYRLFRKSNLKPFERDISTEIYQAGSTPCNGVEGFNCYFPLQSYGFQPTNGVGYQPYRVVVLSFELLHAPATVCGPKKSTNLVKNKCVNFNFNGLTGTGVLTESNKKFLPFQQFGRDIADTTDAVRDPQTLEILDITPCSFGGVSVITPGTNTSNQVAVLYQDVNCTEVPVAIHADQLTPTWRVYSTGSNVFQTRAGCLIGAEHVNNSYECDIPIGAGICASYQTQTNSPSGAGSVASQSIIAYTMSLGAENSVAYSNNSIAIPTNFTISVTTEILPVSMTKTSVDCTMYICGDSTECSNLLLQYGSFCTQLNRALTGIAVEQDKNTQEVFAQVKQIYKTPPIKDFGGFNFSQILPDPSKPSKRSFIEDLLFNKVTLADAGFIKQYGDCLGDIAARDLICAQKFNGLTVLPPLLTDEMIAQYTSALLAGTITSGWTFGAGAALQIPFAMQMAYRFNGIGVTQNVLYENQKLIANQFNSAIGKIQDSLSSTASALGKLQDVVNQNAQALNTLVKQLSSNFGAISSVLNDILSRLDPPEAEVQIDRLITGRLQSLQTYVTQQLIRAAEIRASANLAATKMSECVLGQSKRVDFCGKGYHLMSFPQSAPHGVVFLHVTYVPAQEKNFTTAPAICHDGKAHFPREGVFVSNGTHWFVTQRNFYEPQIITTDNTFVSGNCDVVIGIVNNTVYDPLQPELDSFKEELDKYFKNHTSPDVDLGDISGINASVVNIQKEIDRLNEVAKNLNESLIDLQELGKYEQYIKGSGRENLYFQGGGGSGYIPEAPRDGQAYVRKDGEWVLLSTFLGHHHHHHHH

SEQ ID NO: 2072 - protein, 1281 aa, Artificial Sequence
  Description of Artificial Sequence: Synthetic polypeptide
MGILPSPGMPALLSLVSLLSVLLMGCVAETGTQCVNLTTRTQLPPAYTNSFTRGVYYPDKVFRSSVLHSTQDLFLPFFSNVTWFHAIHVSGTNGTKRFDNPVLPFNDGVYFASTEKSNIIRGWIFGTTLDSKTQSLLIVNNATNVVIKVCEFQFCNDPFLGVYYHKNNKSWMESEFRVYSSANNCTFEYVSQPFLMDLEGKQGNFKNLREFVFKNIDGYFKIYSKHTPINLVRDLPQGFSALEPLVDLPIGINITRFQTLLALHRSYLTPGDSSSGWTAGAAAYYVGYLQPRTFLLKYNENGTITDAVDCALDPLSETKCTLKSFTVEKGIYQTSNFRVQPTESIVRFPNITNLCPFGEVFNATRFASVYAWNRKRISNCVADYSVLYNSASFSTFKCYGVSPTKLNDLCFTNVYADSFVIRGDEVRQIAPGQTGKIADYNYKLPDDFTGCVIAWNSNNLDSKVGGNYNYLYRLFRKSNLKPFERDISTEIYQAGSTPCNGVEGFNCYFPLQSYGFQPTNGVGYQPYRVVVLSFELLHAPATVCGPKKSTNLVKNKCVNFNFNGLTGTGVLTESNKKFLPFQQFGRDIADTTDAVRDPQTLEILDITPCSFGGVSVITPGTNTSNQVAVLYQDVNCTEVPVAIHADQLTPTWRVYSTGSNVFQTRAGCLIGAEHVNNSYECDIPIGAGICASYQTQTNSPSGAGSVASQSIIAYTMSLGAENSVAYSNNSIAIPTNFTISVTTEILPVSMTKTSVDCTMYICGDSTECSNLLLQYGSFCTQLNRALTGIAVEQDKNTQEVFAQVKQIYKTPPIKDFGGFNFSQILPDPSKPSKRSFIEDLLFNKVTLADAGFIKQYGDCLGDIAARDLICAQKFNGLTVLPPLLTDEMIAQYTSALLAGTATSGWTFGAGAALQIPFAMQMAYRFNGIGVTQNVLYENQKLIANQFNSAIGKIQDSLSSTASALGKLQDVVNQNAQALNTLVKQLSSNFGAISSVLNDILSRLDPPEAEVQIDRLITGRLQSLQTYVTQQLIRAAEIRASANLAATKMSECVLGQSKRVDFCGKGYHLMSFPQSAPHGVVFLHVTYVPAQEKNFTTAPAICHDGKAHFPREGVFVSNGTHWFVTQRNFYEPQIITTDNTFVSGNCDVVIGIVNNTVYDPLQPELDSFKEELDKYFKNHTSPDVDLGDISGINASVVNIQKEIDRLNEVAKNLNESLIDLQELGKYEQYIKGSGRENLYFQGGGGSGYIPEAPRDGQAYVRKDGEWVLLSTFLGHHHHHHHH

SEQ ID NO: 2073 - protein, 1281 aa, Artificial Sequence
  Description of Artificial Sequence: Synthetic polypeptide
MGILPSPGMPALLSLVSLLSVLLMGCVAETGTQCVNLTTRTQLPPAYTNSFTRGVYYPDKIFRSSVLHLTQDLFLPFFSNVTWFHAIHVSGTNGTKRFDNPVLPFNDGVYFAATEKSNIIRGWIFGTTLDSKTQSLLIVNNATNVVIKVCNFQFCNDPFLGVYYHKNNKSWMESEFRVYSSANNCTFEYVSQPFLMDLEGKQGNFKNLREFVFKNIDGYFKIYSKHTPINLVRDLPQGFSALKPLVKLPIGINITRFQTLLALHRSYLTPGDSSSGWTAGAAAYYVGYLQPRTFLLKYNENGTITDAVDCALDPLSETKCTLKSFTVEKGIYQTSNFRVQPTESIVRFPNITNLCPFGEVFNATRFASVYAWNRKRISNCVADYSVLYNSASFSTFKCYGVSPTKLNDLCFTNVYADSFVIRGDEVRQIAPGQTGKIADYNYKLPDDFTGCVIAWNSNNLDSKVGGNYNYLYRLFRKSNLKPFERDISTEIYQAGSTPCNGVEGFNCYFPLQSYGFQPTNGVGYQPYRVVVLSFELLHAPATVCGPKKSTNLVKNKCVNFNFNGLTGTGVLTESNKKFLPFQQFGRDISDTTDAVRDPQTLEILDITPCSFGGVSVITPGTNTSNQVAVLYQDVNCTDVPVAIHADQLTPTWRVYSTGSNVFQTQAGCLIGAEHVNNSYECDIPIGAGICASYQTQTNSPSGAGSVASQSIIAYTMSLGAENSVAYSNNSIAIPTNFTISVTTEILPVSMTKTSVDCTMYICGDSTECSNLLLQYGSFCTQLNRALTGIAVEQDKNTQEVFAQVKQIYKTPPIKDFGGFNFSQILPDPSKPSKRSFIEDLLFNKVTLADAGFIKQYGDCLGDIAARDLICAQKFNGLTVLPPLLTDEMIAAYTAALLAGTATAGWTFGAGAALQIPFAMQMAYRFNGIGVTQNVLYENQKLIANQFNSAIGKIQDSLSSTASALGKLQDVVNQNAQALNTLVKQLSSNFGAISSVLNDILSRLDPPEAEVQIDRLITGRLQSLQTYVTQQLIRAAEIRASANLAATKMSECVLGQSKRVDFCGKGYHLMSFPQSAPHGVVFLHVTYVPAQEKNFTTAPAICHDGKAHFPREGVFVSNGTHWFVTQRNFYEPQIITTDNTFVSGNCDVVIGIVNNTVYDPLQPELDSFKEELDKYFKNHTSPDVDLGDISGINASVVNIQKEIDRLNEVAKNLNESLIDLQELGKYEQYIKGSGRENLYFQGGGGSGYIPEAPRDGQAYVRKDGEWVLLSTFLGHHHHHHHH

SEQ ID NO: 2074 - protein, 1281 aa, Artificial Sequence
  Description of Artificial Sequence: Synthetic polypeptide
MGILPSPGMPALLSLVSLLSVLLMGCVAETGTQCVNLTTRTQLPPAYTNSFTRGVYYPDKVFRSSVLHSTQDLFLPFFSNVTWFHAIHVSGTNGTKRFDNPVLPFNDGVYFASTEKSNIIRGWIFGTTLDSKTQSLLIVNNATNVVIKVCEFQFCNDPFLGVYYHKNNKSWMESEFRVYSSANNCTFEYVSQPFLMDLEGKQGNFKNLREFVFKNIDGYFKIYSKHTPINLVRDLPQGFSALEPLVDLPIGINITRFQTLLALHRSYLTPGDSSSGWTAGAAAYYVGYLQPRTFLLKYNENGTITDAVDCALDPLSETKCTLKSFTVEKGIYQTSNFRVQPTESIVRFPNITNLCPFGEVFNATRFASVYAWNRKRISNCVADYSVLYNSASFSTFKCYGVSPTKLNDLCFTNVYADSFVIRGDEVRQIAPGQTGKIADYNYKLPDDFTGCVIAWNSNNLDSKVGGNYNYLYRLFRKSNLKPFERDISTEIYQAGSTPCNGVEGFNCYFPLQSYGFQPTNGVGYQPYRVVVLSFELLHAPATVCGPKKSTNLVKNKCVNFNFNGLTGTGVLTESNKKFLPFQQFGRDIADTTDAVRDPQTLEILDITPCSFGGVSVITPGTNTSNQVAVLYQDVNCTEVPVAIHADQLTPTWRVYSTGSNVFQTRAGCLIGAEHVNNSYECDIPIGAGICASYQTQTNSPSGAGSVASQSIIAYTMSLGAENSVAYSNNSIAIPTNFTISVTTEILPVSMTKTSVDCTMYICGDSTECSNLLLQYGSFCTQLNRALTGIAVEQDKNTQEVFAQVKQIYKTPPIKDFGGFNFSQILPDPSKPSKRSFIEDLLFNKVTLADAGFIKQYGDCLGDIAARDLICAQKFNGLTVLPPLLTDEMIAQYTSALLAGTITSGWTFGAGAALQIPFAMQMAYRFNGIGVTQNVLYENQKLIANQFNSAIGKIQDSLSSTASALGKLQDVVNQNAQALNTLVKQLSSNFGAISSVLNDILSRLDPPEAEVQIDRLITGRLQSLQTYVTQQLIRAAEIRASANLAATKMSECVLGQSKRVDFCGKGYHLMSFPQSAPHGVVFLHVTYVPTQEKNFTTAPAICHDGKAHFPREGVFVSNGTHWFVTQRNFYEPQIITTDNTFVSGNCDVVIGIVNNTVYDPLQPELDSFKEELDKYFKNHTSPDVDLGDISGINASVVNIQKEIDRLNEVAKNLNESLIDLQELGKYEQYIKGSGRENLYFQGGGGSGYIPEAPRDGQAYVRKDGEWVLLSTFLGHHHHHHHH

SEQ ID NO: 2075 - protein, 1281 aa, Artificial Sequence
  Description of Artificial Sequence: Synthetic polypeptide
MGILPSPGMPALLSLVSLLSVLLMGCVAETGTQCVNLTTRTQLPPAYTNSFTRGVYYPDKVFRSSVLHSTQDLFLPFFSNVTWFHAIHVSGTNGTKRFDNPVLPFNDGVYFASTEKSNIIRGWIFGTTLDSKTQSLLIVNNATNVVIKVCEFQFCNDPFLGVYYHKNNKSWMESEFRVYSSANNCTFEYVSQPFLMDLEGKQGNFKNLREFVFKNIDGYFKIYSKHTPINLVRDLPQGFSALEPLVDLPIGINITRFQTLLALHRSYLTPGDSSSGWTAGAAAYYVGYLQPRTFLLKYNENGTITDAVDCALDPLSETKCTLKSFTVEKGIYQTSNFRVQPTESIVRFPNITNLCPFGEVFNATRFASVYAWNRKRISNCVADYSVLYNSASFSTFKCYGVSPTKLNDLCFTNVYADSFVIRGDEVRQIAPGQTGKIADYNYKLPDDFTGCVIAWNSNNLDSKVGGNYNYLYRLFRKSNLKPFERDISTEIYQAGSTPCNGVEGFNCYFPLQSYGFQPTNGVGYQPYRVVVLSFELLHAPATVCGPKKSTNLVKNKCVNFNFNGLTGTGVLTESNKKFLPFQQFGRDIADTTDAVRDPQTLEILDITPCSFGGVSVITPGTNTSNQVAVLYQDVNCTEVPKAIHADQLTPTWRVYSTGSNVFQTRAGCLIGAEHVNNSYECDIPIGAGICASYQTQTNSPSGAGSVASQSIIAYTMSLGAENSVAYSNNSIAIPTNFTISVTTEILPVSMTKTSVDCTMYICGDSTECSNLLLQYGSFCTQLNRALTGIAVEQDKNTQEVFAQVKQIYKTPPIKDFGGFNFSQILPDPSKPSKRSFIEDLLFNKVTLADAGFIKQYGDCLGDIAARDLICAQKFNGLTVLPPLLTDEMIAQYTSALLAGTITSGWTFGAGAALQIPFAMQMAYRFNGIGVTQNVLYENQKLIANQFNSAIGKIQDSLSSTASALGKLQDVVNQNAQALNTLVKQLSSNFGAISSVLNDILSRLDPPEAEVQIDRLITGRLQSLQTYVTQQLIRAAEIRASANLAATKMSECVLGQSKRVDFCGKGYHLMSFPQSAPHGVVFLHVTYVPAQEKNFTTAPAICHDGKAHFPREGVFVSNGTHWFVTQRNFYEPQIITTDNTFVSGNCDVVIGIVNNTVYDPLQPELDSFKEELDKYFKNHTSPDVDLGDISGINASVVNIQKEIDRLNEVAKNLNESLIDLQELGKYEQYIKGSGRENLYFQGGGGSGYIPEAPRDGQAYVRKDGEWVLLSTFLGHHHHHHHH

SEQ ID NO: 2076 - protein, 1281 aa, Artificial Sequence
  Description of Artificial Sequence: Synthetic polypeptide
MGILPSPGMPALLSLVSLLSVLLMGCVAETGTQCVNLTTRTQLPPAYTNSFTRGVYYPDKVFRSSVLHSTQDLFLPFFSNVTWFHAIHVSGTNGTKRFDNPVLPFNDGVYFASTEKSNIIRGWIFGTTLDSKTQSLLIVNNATNVVIKVCEFQFCNDPFLGVYYHKNNKSWMESEFRVYSSANNCTFEYVSQPFLMDLEGKQGNFKNLREFVFKNIDGYFKIYSKHTPINLVRDLPQGFSALEPLVDLPIGINITRFQTLLALHRSYLTPGDSSSGWTAGAAAYYVGYLQPRTFLLKYNENGTITDAVDCALDPLSETKCTLKSFTVEKGIYQTSNFRVQPTESIVRFPNITNLCPFGEVFNATRFASVYAWNRKRISNCVADYSVLYNSASFSTFKCYGVSPTKLNDLCFTNVYADSFVIRGDEVRQIAPGQTGKIADYNYKLPDDFTGCVIAWNSNNLDSKVGGNYNYLYRLFRKSNLKPFERDISTEIYQAGSTPCNGVEGFNCYFPLQSYGFQPTNGVGYQPYRVVVLSFELLHAPATVCGPKKSTNLVKNKCVNFNFNGLTGTGVLTESNKKFLPFQQFGRDIADTTDAVRDPQTLEILDITPCSFGGVSVITPGTNTSNQVAVLYQDVNCTEVPVAIHADQLTPTWRVYSTGSNVFQTRAGCLIGAEHVNNSYECDIPIGAGICASYQTQTNSPSGAGSVASQSIIAYTMSLGAENSVAYSNNSIAIPTNFTISVTTEILPVSMTKTSVDCTMYICGDSTECSNLLLQYGSFCTQLNRALTGIAVEQDKNTQEVFAQVKQIYKTPPIKDFGGFNFSQILPDPSKPSKRSFIEDLLFNKVTLADAGFIKQYGDCLGDIAARDLICAQKFNGITVLPPLLTDEMIAQYTSALLAGTITSGWTFGAGAALQIPFAMQMAYRFNGIGVTQNVLYENQKLIANQFNSAIGKIQDSLSSTASALGKLQDVVNQNAQALNTLVKQLSSNFGAISSVLNDILSRLDPPEAEVQIDRLITGRLQSLQTYVTQQLIRAAEIRASANLAATKMSECVLGQSKRVDFCGKGYHLMSFPQSAPHGVVFLHVTYVPAQEKNFTTAPAICHDGKAHFPREGVFVSNGTHWFVTQRNFYEPQIITTDNTFVSGNCDVVIGIVNNTVYDPLQPELDSFKEELDKYFKNHTSPDVDLGDISGINASVVNIQKEIDRLNEVAKNLNESLIDLQELGKYEQYIKGSGRENLYFQGGGGSGYIPEAPRDGQAYVRKDGEWVLLSTFLGHHHHHHHH

SEQ ID NO: 2077 - protein, 1281 aa, Artificial Sequence
  Description of Artificial Sequence: Synthetic polypeptide
MGILPSPGMPALLSLVSLLSVLLMGCVAETGTQCVNLTTRTQLPPAYTNSFTRGVYYPDKVFRSSVLHSTQDLFLPFFSNVTWFHAIHVSGTNGTKRFDNPVLPFNDGVYFASTEKSNIIRGWIFGTTLDSKTQSLLIVNNATNVVIKVCEFQFCNDPFLGVYYHKNNKSWMESEFRVYSSANNCTFEYVSQPFLMDLEGKQGNFKNLREFVFKNIDGYFKIYSKHTPINLVRDLPQGFSALEPLVDLPIGINITRFQTLLALHRSYLTPGDSSSGWTAGAAAYYVGYLQPRTFLLKYNENGTITDAVDCALDPLSETKCTLKSFTVEKGIYQTSNFRVQPTESIVRFPNITNLCPFGEVFNATRFASVYAWNRKRISNCVADYSVLYNSASFSTFKCYGVSPTKLNDLCFTNVYADSFVIRGDEVRQIAPGQTGKIADYNYKLPDDFTGCVIAWNSNNLDSKVGGNYNYLYRLFRKSNLKPFERDISTEIYQAGSTPCNGVEGFNCYFPLQSYGFQPTNGVGYQPYRVVVLSFELLHAPATVCGPKKSTNLVKNKCVNFNFNGLTGTGVLTESNKKFLPFQQFGRDIADTTDAVRDPQTLEILDITPCSFGGVSVITPGTNTSNQVAVLYQDVNCTEVPVAIHADQLTPTWRVYSTGSNVFQTRAGCLIGAEHVNNSYECDIPIGAGICASYQTQTNSPSGAGSVASQSIIAYTMSLGAENSVAYSNNSIAIPTNFTISVTTEILPVSMTKTSVDCTMYICGDSTECSNLLLQYGSFCTQLNRALTGIAVEQDKNTQEVFAQVKQIYKTPPIKDFGGFNFSQILPDPSKPSKRSFIEDLLFNKVTLADAGFIKQYGDCLGDIAARDLICAQKFNGLTVLPPLLTDEMIAQYTSALLAGTITSGWTFGAGAALQIPFAMQMAYRFNGIGVTQNVLYENQKLIANQFNSAIGKIQDSLSSTASALGKLQDVVNQNAQALNTLVKQLSSNFGAISSVLNDILSRLDRPEAEVQIDRLITGRLQSLQTYVTQQLIRAAEIRASANLAATKMSECVLGQSKRVDFCGKGYHLMSFPQSAPHGVVFLHVTYVPAQEKNFTTAPAICHDGKAHFPREGVFVSNGTHWFVTQRNFYEPQIITTDNTFVSGNCDVVIGIVNNTVYDPLQPELDSFKEELDKYFKNHTSPDVDLGDISGINASVVNIQKEIDRLNEVAKNLNESLIDLQELGKYEQYIKGSGRENLYFQGGGGSGYIPEAPRDGQAYVRKDGEWVLLSTFLGHHHHHHHH

SEQ ID NO: 2078 - protein, 1281 aa, Artificial Sequence
  Description of Artificial Sequence: Synthetic polypeptide
MGILPSPGMPALLSLVSLLSVLLMGCVAETGTQCVNLTTRTQLPPAYTNSFTRGVYYPDKVFRSSVLHSTQDLFLPFFSNVTWFHAIHVSGTNGTKRFDNPVLPFNDGVYFASTEKSNIIRGWIFGTTLDSKTQSLLIVNNATNVVIKVCEFQFCNDPFLGVYYHKNNKSWMESEFRVYSSANNCTFEYVSQPFLMDLEGKQGNFKNLREFVFKNIDGYFKIYSKHTPINLVRDLPQGFSALEPLVDLPIGINITRFQTLLALHRSYLTPGDSSSGWTAGAAAYYVGYLQPRTFLLKYNENGTITDAVDCALDPLSETKCTLKSFTVEKGIYQTSNFRVQPTESIVRFPNITNLCPFGEVFNATRFASVYAWNRKRISNCVADYSVLYNSASFSTFKCYGVSPTKLNDLCFTNVYADSFVIRGDEVRQIAPGQTGKIADYNYKLPDDFTGCVIAWNSNNLDSKVGGNYNYLYRLFRKSNLKPFERDISTEIYQAGSTPCNGVEGFNCYFPLQSYGFQPTNGVGYQPYRVVVLSFELLHAPATVCGPKKSTNLVKNKCVNFNFNGLTGTGVLTESNKKFLPFQQFGRDIADTTDAVRDPQTLEILDITPCSFGGVSVITPGTNTSNQVAVLYQDVNCTEVPVAIHADQLTPTWRVYSTGSNVFQTRAGCLIGAEHVNNSYECDIPIGAGICASYQTQTNSPSGAGSVASQSIIAYTMSLGAENSVAYSNNSIAIPTNFTISVTTEILPVSMTKTSVDCTMYICGDSTECSNLLLQYGSFCTQLNRALTGIAVEQDKNTQEVFAQVKQIYKTPPIKDFGGFNFSQILPDPSKPSKRSFIEDLLFNKVTLADAGFIKQYGDCLGDIAARDLICAQKFNGLTVLPPLLTDEMIAQYTSALLAGTITSGWTFGAGAALQIPFAMQMAYRFNGIGVTQNVLYENQKLIANQFNSAIGKIQDSLSSTASALGKLQDVVNQNAQALETLVKQLSSNFGAISSVLNDILSRLDPPEAEVQIDRLITGRLQSLQTYVTQQLIRAAEIRASANLAATKMSECVLGQSKRVDFCGKGYHLMSFPQSAPHGVVFLHVTYVPAQEKNFTTAPAICHDGKAHFPREGVFVSNGTHWFVTQRNFYEPQIITTDNTFVSGNCDVVIGIVNNTVYDPLQPELDSFKEELDKYFKNHTSPDVDLGDISGINASVVNIQKEIDRLNEVAKNLNESLIDLQELGKYEQYIKGSGRENLYFQGGGGSGYIPEAPRDGQAYVRKDGEWVLLSTFLGHHHHHHHH

SEQ ID NO: 2079 - protein, 1281 aa, Artificial Sequence
  Description of Artificial Sequence: Synthetic polypeptide
MGILPSPGMPALLSLVSLLSVLLMGCVAETGTQCVNLTTRTQLPPAYTNSFTRGVYYPDKVFRSSVLHSTQDLFLPFFSNVTWFHAIHVSGTNGTKRFDNPVLPFNDGVYFASTEKSNIIRGWIFGTTLDSKTQSLLIVNNATNVVIKVCEFQFCNDPFLGVYYHKNNKSWMESEFRVYSSANNCTFEYVSQPFLMDLEGKQGNFKNLREFVFKNIDGYFKIYSKHTPINLVRDLPQGFSALKPLVDLPIGINITRFQTLLALHRSYLTPGDSSSGWTAGAAAYYVGYLQPRTFLLKYNENGTITDAVDCALDPLSETKCTLKSFTVEKGIYQTSNFRVQPTESIVRFPNITNLCPFGEVFNATRFASVYAWNRKRISNCVADYSVLYNSASFSTFKCYGVSPTKLNDLCFTNVYADSFVIRGDEVRQIAPGQTGKIADYNYKLPDDFTGCVIAWNSNNLDSKVGGNYNYLYRLFRKSNLKPFERDISTEIYQAGSTPCNGVEGFNCYFPLQSYGFQPTNGVGYQPYRVVVLSFELLHAPATVCGPKKSTNLVKNKCVNFNFNGLTGTGVLTESNKKFLPFQQFGRDIADTTDAVRDPQTLEILDITPCSFGGVSVITPGTNTSNQVAVLYQDVNCTEVPVAIHADQLTPTWRVYSTGSNVFQTRAGCLIGAEHVNNSYECDIPIGAGICASYQTQTNSPSGAGSVASQSIIAYTMSLGAENSVAYSNNSIAIPTNFTISVTTEILPVSMTKTSVDCTMYICGDSTECSNLLLQYGSFCTQLNRALTGIAVEQDKNTQEVFAQVKQIYKTPPIKDFGGFNFSQILPDPSKPSKRSFIEDLLFNKVTLADAGFIKQYGDCLGDIAARDLICAQKFNGLTVLPPLLTDEMIAQYTSALLAGTITSGWTFGAGAALQIPFAMQMAYRFNGIGVTQNVLYENQKLIANQFNSAIGKIQDSLSSTASALGKLQDVVNQNAQALNTLVKQLSSNFGAISSVLNDILSRLDPPEAEVQIDRLITGRLQSLQTYVTQQLIRAAEIRASANLAATKMSECVLGQSKRVDFCGKGYHLMSFPQSAPHGVVFLHVTYVPAQEKNFTTAPAICHDGKAHFPREGVFVSNGTHWFVTQRNFYEPQIITTDNTFVSGNCDVVIGIVNNTVYDPLQPELDSFKEELDKYFKNHTSPDVDLGDISGINASVVNIQKEIDRLNEVAKNLNESLIDLQELGKYEQYIKGSGRENLYFQGGGGSGYIPEAPRDGQAYVRKDGEWVLLSTFLGHHHHHHHH

SEQ ID NO: 2080 - protein, 1281 aa, Artificial Sequence
  Description of Artificial Sequence: Synthetic polypeptide
MGILPSPGMPALLSLVSLLSVLLMGCVAETGTQCVNLTTRTQLPPAYTNSFTRGVYYPDKVFRSSVLHSTQDLFLPFFSNVTWFHALHVKGTNGTKRFDNPVLPFNDGVYFAAIEKSNIIRGWIFGTTLDSKTQSLLIVNNATNVVIKVCEFQFCNDPFLGVYYHKNNKSWMESEFRVYSSANNCTFEYVSQPFLYDLNGKQGNFHHLREFVFKNIDGYFKIYSKWEPINLVRDLPQGFSALEPLVDLPIGINITRFQTILSLSRSYRTPGDSSSGWTAGAAAYYVGYLQPRTFLLKYNENGTITDAVDCALDPLSETKCTLKSFTVEKGIYQTSNFRVQPTESIVRFPNITNLCPFGEVFNATRFASVYAWNRKRISNCVADYSVLYNSASFSTFKCYGVSPTKLNDLCFTNVYADSFVIRGDEVRQIAPGQTGKIADYNYKLPDDFTGCVIAWNSNNLDSKVGGNYNYLYRLFRKSNLKPFERDISTEIYQAGSTPCNGVEGFNCYFPLQSYGFQPTNGVGYQPYRVVVLSFELLHAPATVCGPKKSTNLVKNKCVNFNFNGLTGTGVLTESNKKFLPFQQFGRDIADTTDAVRDPQTLEILDITPCSFGGVSVITPGTNTSNQVAVLYQDVNCTEVPVAIHADQLTPTWRVYSTGSNVFQTRAGCLIGAEHVNNSYECDIPIGAGICASYQTQTNSPSGAGSVASQSIIAYTMSLGAENSVAYSNNSIAIPTNFTISVTTEILPVSMTKTSVDCTMYICGDSTECSNLLLQYGSFCTQLNRALTGIAVEQDKNTQEVFAQVKQIYKTPPIKDFGGFNFSQILPDPSKPSKRSFIEDLLFNKVTLADAGFIKQYGDCLGDIAARDLICAQKFNGLTVLPPLLTDEMIAQYTSALLAGTITSGWTFGAGAALQIPFAMQMAYRFNGIGVTQNVLYENQKLIANQFNSAIGKIQDSLSSTASALGKLQDVVNQNAQALNTLVKQLSSNFGAISSVLNDILSRLDPPEAEVQIDRLITGRLQSLQTYVTQQLIRAAEIRASANLAATKMSECVLGQSKRVDFCGKGYHLMSFPQSAPHGVVFLHVTYVPAQEKNFTTAPAICHDGKAHFPREGVFVSNGTHWFVTQRNFYEPQIITTDNTFVSGNCDVVIGIVNNTVYDPLQPELDSFKEELDKYFKNHTSPDVDLGDISGINASVVNIQKEIDRLNEVAKNLNESLIDLQELGKYEQYIKGSGRENLYFQGGGGSGYIPEAPRDGQAYVRKDGEWVLLSTFLGHHHHHHHH

SEQ ID NO: 2081 - protein, 1281 aa, Artificial Sequence
  Description of Artificial Sequence: Synthetic polypeptide
MGILPSPGMPALLSLVSLLSVLLMGCVAETGTQCVNLTTRTQLPPAYTNSFTRGVYYPDKVFRSSVLHSTQDLFLPFFSNVTWFHAIHVSGTNGTKRFDNPVLPFNDGVYFASTEKSNIIRGWIFGTTLDSKTQSLLIVNNATNVVIKVCEFQFCNDPFLGVYYHKNNKSWMESEFRVYSSANNCTFEYVSQPFLMDLEGKQGNFKNLREFVFKNIDGYFKIYSKHTPINLVRDLPQGFSALEPLVDLPIGINITRFQTLLALHRSYLTPGDSSSGWTAGAAAYYVGYLQPRTFLLKYNENGTITDAVDCALDPLSETKCTLKSFTVEKGIYQTSNFRVQPTESIVRFPNITNLCPFGEVFNATRFASVYAWNRKRISNCVADYSVLYNSASFSTFKCYGVSPTKLNDLCFTNVYADSFVIRGDEVRQIAPGQTGKIADYNYKLPDDFTGCVIAWNSNNLDSKVGGNYNYLYRLFRKSNLKPFERDISTEIYQAGSTPCNGVEGFNCYFPLQSYGFQPTNGVGYQPYRVVVLSFELLHAPATVCGPKKSTNLVKNKCVNFNFNGLTGTGVLTESNKKFLPFQQFGRDIADTTDAVRDPQTLEILDITPCSFGGVSVITPGTNTSNQVAVLYQDVNCTEVPVAIHADQLTPTWRVYSTGSNVFQTRAGCLIGAEHVNNSYECDIPIGAGICASYQTQTNSPSGAGSVASQSIIAYTMSLGAENSVAYSNNSIAIPTNFTISVTTEILPVSMTKTSVDCTMYICGDSTECSNLLLQYGSFCTQLNRALTGIAVEQDKNTQEVFAQVKQIYKTPPIKDFGGFNFSQILPDPSKPSKRSFIEDLLFNKVTLADAGFIKQYGDCLGDIAARDLICAQKFNGLTVLPPLLTDEMIAQYTSALLAGTITSGWTFGAGAALQIPFAMQMAYRFNGIGVTQNVLYENQKLIANQFNSAIGKIQDSLSSTASALGKLQDVVNQNAQALNTLVKQLSSNFGAISSVLNDILSRLDPPEAEVQIDRLITGRLQSLQTYVTQQLIRAAEIRASANLAATKMSECVLGQSKRVDFCGKGYHLMSFPQSAPHGVVFLHVTYVPAQEKNFTTAPAICHDGKAYFPREGVFVSNGTEWFITQRNFYEPQIITTDNTFVSGNCDVVIGIVNNTVYDPLQPELDSFKEELDKYFKNHTSPDVDLGDISGINASVVNIQKEIDRLNEVAKNLNESLIDLQELGKYEQYIKGSGRENLYFQGGGGSGYIPEAPRDGQAYVRKDGEWVLLSTFLGHHHHHHHH

SEQ ID NO: 2082 - protein, 1281 aa, Artificial Sequence
  Description of Artificial Sequence: Synthetic polypeptide
MGILPSPGMPALLSLVSLLSVLLMGCVAETGTQCVNLTTRTQLPPAYTNSFTRGVYYPDKVFRSDVLHSTQDLFLPFFSNVTWFHAIHVSGTNGTKDFDNPVLPFNDGVYFASTEKSNIIRGWIFGTTLDSKTQSLLIVNNATNVVIKVCEFQFCENPFLGVYYHKNNKSWMEKEFRVYSSANNCTFEYVSQPFLMDLGGKQGNFKNLREFVFKNIDGYFKIYSKHTPINLVRDLPQGFSALEPLMDLPIGINITRFQTLLALHRSYLTPGDSSSGWTAGAAAYYVGYLQPRTFLLKYNENGTITDAVDCALDPLSETKCTLKSFTVEKGIYQTSNFRVQPTESIVRFPNITNLCPFGEVFNATRFASVYAWNRKRISNCVADYSVLYNSASFSTFKCYGVSPTKLNDLCFTNVYADSFVIRGDEVRQIAPGQTGKIADYNYKLPDDFTGCVIAWNSNNLDSKVGGNYNYLYRLFRKSNLKPFERDISTEIYQAGSTPCNGVEGFNCYFPLQSYGFQPTNGVGYQPYRVVVLSFELLHAPATVCGPKKSTNLVKNKCVNFNFNGLTGTGVLTESNKKFLPFQQFGRDIADNTDAVRDPQTLEILDITPCSFGGVSVITPGTNTSNQVAVLYQDVNCTEVPNAIHADQLTPTWRVYSTGSNVFQTRAGCLIGAEHVNNSYECDIPIGAGICASYQTQTNSPSGAGSVASQSIIAYTMSLGAENSVAYSNNSIAIPTNFTISVTTEILPVSMTKTSVDCTMYICGDSTECSNLLLQYGSFCTQLNRALQGIAQEQDKNTQEVFAQVKQIYKTPPIKDFGGFNFSQILPDPSKPSKRSFIEDLLFNKVTLADAGFIKQYGDCLGDIAARDLICAQKFNGLTVLPPLLTDEMIAQYTSALLAGTITSGWTFGAGAALQIPFAMQMAYRFNGIGVTQNVLYENQKLIANQFNKAIGKIQDSLSSTASALGKLQDVVNQNAQALNTLVKQLSSNFGAISSVLNDILSRLDPPEAEVQIDRLITGRLQSLQTYVTQQLIRAAEIRASANLAATKMSECVLGQSKRVDFCGKGYHLMSFPQSAPHGVVFLHVTYVPAQEKNFTTAPAICHDGKAFFPREGVFVSNGTQWFVTQRNFYEPQIITTDNTFVSGNCDVVIGIVNNTVYDPLQPELDSFKEELDKYFKNHTSPDVDLGDISGINASVVNIQKEIDRLNEVAKNLNESLIDLQELGKYEQYIKGSGRENLYFQGGGGSGYIPEAPRDGQAYVRKDGEWVLLSTFLGHHHHHHHH

SEQ ID NO: 2083 - protein, 1281 aa, Artificial Sequence
  Description of Artificial Sequence: Synthetic polypeptide
MGILPSPGMPALLSLVSLLSVLLMGCVAETGTQCVNLTTRTQLPPAYTNSFTRGVYYPDKVFRSSVLHSTQDLFLPFFSNVTWFHAIHVSGTNGTKRFDNPVLPFNDGVYFASTEKSNIIRGWIFGTTLDSKTQSLLIVNNATNVVIKVCEFQFCNDPFLGVYYHKNNKSWMESEFRVYSSANNCTFEYVSQPFLMDLEGKQGNFKNLREFVFKNIDGYFKIYSKHTPINLVRDLPQGFSALEPLVDLPIGINITRFQTLLALHRSYLTPGDSSSGWTAGAAAYYVGYLQPRTFLLKYNENGTITDAVDCALDPLSETKCTLKSFTVEKGIYQTSNFRVQPTESIVRFPNITNLCPFGEVFNATRFASVYAWNRKRISNCVADYSVLYNSASFSTFKCYGVSPTKLNDLCFTNVYADSFVIRGDEVRQIAPGQTGKIADYNYKLPDDFTGCVIAWNSNNLDSKVGGNYNYLYRLFRKSNLKPFERDISTEIYQAGSTPCNGVEGFNCYFPLQSYGFQPTNGVGYQPYRVVVLSFELLHAPATVCGPKKSTNLVKNKCVNFNFNGLTGTGVLTESNKKFLPFQQFGRDIADTTDAVRDPQTLEILDITPCSFGGVSVITPGTNTSNQVAVLYQDVNCTEVPVAIHADQLTPTWRVYSTGSNVFQTRAGCLIGAEHVNNSYECDIPIGAGICASYQTQTNSPSGAGSVASQSIIAYTMSLGAENPVAYSNNSIAIPTNFTISVTTEILPVSMTKTSVDCTMYICGDSTECSNLLLQYGSFCTQLNRALTGIAVEQDKNTQEVFAQVKQIYKTPPIKDFGGFNFSQILPDPSKPSKRSFIEDLLFNKVTLADAGFIKQYGDCLGDIAARDLICAQKFNGLTVLPPLLTDEMIAQYTSALLAGTITSGWTFGAGAALQIPFAMQMAYRFNGIGVTQNVLYENQKLIANQFNSAIGKIQDSLSSTASALGKLQDVVNQNAQALNTLVKQLSSNFGAISSVLNDILSRLDPPEAEVQIDRLITGRLQSLQTYVTQQLIRAAEIRASANLAATKMSECVLGQSKRVDFCGKGYHLMSFPQSAPHGVVFLHVTYVPAQEKNFTTAPAICHDGKAHFPREGVFVSNGTHWFVTQRNFYEPQIITTDNTFVSGNCDVVIGIVNNTVYDPLQPELDSFKEELDKYFKNHTSPDVDLGDISGINASVVNIQKEIDRLNEVAKNLNESLIDLQELGKYEQYIKGSGRENLYFQGGGGSGYIPEAPRDGQAYVRKDGEWVLLSTFLGHHHHHHHH

SEQ ID NO: 2084 - protein, 1281 aa, Artificial Sequence
  Description of Artificial Sequence: Synthetic polypeptide
MGILPSPGMPALLSLVSLLSVLLMGCVAETGTQCVNLTTRTQLPPAYTNSFTRGVYYPDKVFRSSVLHSTQDLFLPFFSNVTWFHAIHVSGTNGTKRFDNPVLPFNDGVYFASTEKSNIIRGWIFGTTLDSKTQSLLIVNNATNVVIKVCEFQFCNDPFLGVYYHKNNKSWMEYEFRVYSSANNCTFEYVSQPFLMDLEGKQGNFKNLREFVFKNIDGYFKIYSKHTPINLVRDLPQGFSALEPLVDLPIGINITRFQTLLALHRSYLTPGDSSSGWTAGAAAYYVGYLQPRTFLLKYNENGTITDAVDCALDPLSETKCTLKSFTVEKGIYQTSNFRVQPTESIVRFPNITNLCPFGEVFNATRFASVYAWNRKRISNCVADYSVLYNSASFSTFKCYGVSPTKLNDLCFTNVYADSFVIRGDEVRQIAPGQTGKIADYNYKLPDDFTGCVIAWNSNNLDSKVGGNYNYLYRLFRKSNLKPFERDISTEIYQAGSTPCNGVEGFNCYFPLQSYGFQPTNGVGYQPYRVVVLSFELLHAPATVCGPKKSTNLVKNKCVNFNFNGLTGTGVLTESNKKFLPFQQFGRDIADTTDAVRDPQTLEILDITPCSFGGVSVITPGTNTSNQVAVLYQDVNCTEVPVAIHADQLTPTWRVYSTGSNVFQTRAGCLIGAEHVNNSYECDIPIGAGICASYQTQTNSPSGAGSVASQSIIAYTMSLGAENSVAYSNNSIAIPTNFTISVTTEILPVSMTKTSVDCTMYICGDSTECSNLLLQYGSFCTQLNRALTGIAVEQDKNTQEVFAQVKQIYKTPPIKDFGGFNFSQILPDPSKPSKRSFIEDLLFNKVTLADAGFIKQYGDCLGDIAARDLICAQKFNGLTVLPPLLTDEMIAQYTSALLAGTITSGWTFGAGAALQIPFAMQMAYRFNGIGVTQNVLYENQKLIANQFNSAIGKIQDSLSSTASALGKLQDVVNQNAQALNTLVKQLSSNFGAISSVLNDILSRLDPPEAEVQIDRLITGRLQSLQTYVTQQLIRAAEIRASANLAATKMSECVLGQSKRVDFCGKGYHLMSFPQSAPHGVVFLHVTYVPAQEKNFTTAPAICHDGKAHFPREGVFVSNGTHWFVTQRNFYEPQIITTDNTFVSGNCDVVIGIVNNTVYDPLQPELDSFKEELDKYFKNHTSPDVDLGDISGINASVVNIQKEIDRLNEVAKNLNESLIDLQELGKYEQYIKGSGRENLYFQGGGGSGYIPEAPRDGQAYVRKDGEWVLLSTFLGHHHHHHHH

SEQ ID NO: 2085 - protein, 1281 aa, Artificial Sequence
  Description of Artificial Sequence: Synthetic polypeptide
MGILPSPGMPALLSLVSLLSVLLMGCVAETGTQCVNLTTRTQLPPAYTNSFTRGVYYPDKVFRSSVLHSTQDLFLPFFSNVTWFHAIHVSGTNGTKRFDNPVLPFNDGVYFASTEKSNIIRGWIFGTTLDSKTQSLLIVNNATNVVIKVCEFQFCNDPFLGVYYHKNNKSWMESEFRVYSSANNCTFEYVSQPFLMDLEGKQGNFKNLREFVFKNIDGYFKIYSKHTPINLVRDLPQGFSALEPLVDLPIGINITRFQTLLALHRSYLTPGDSSSGWTAGAAAYYVGYLQPRTFLLKYNENGTITDAVDCALDPLSETKCTLKSFTVEKGIYQTSNFRVQPTESIVRFPNITNLCPFGEVFNATRFASVYAWNRKRISNCVADYSVLYNSASFSTFKCYGVSPTKLNDLCFTNVYADSFVIRGDEVRQIAPGQTGKIADYNYKLPDDFTGCVIAWNSNNLDSKVGGNYNYLYRLFRKSNLKPFERDISTEIYQAGSTPCNGVEGFNCYFPLQSYGFQPTNGVGYQPYRVVVLSFELLHAPATVCGPKKSTNLVKNKCVNFNFNGLTGTGVLTESNKKFLPFQQFGRDIADTTDAVRDPQTLEILDITPCSFGGVSVITPGTNTSNQVAVLYQDVNCTEVPVAIHADQLTPTWRVYSTGSNVFQTRAGCLIGAEHVNNSYECDIPIGAGICASYQTQTNSPSGAGSVASQSIIAYTMSLGAENSVAYSNNSIAIPTNFTISVTTEILPVSMTKTSVDCTMYICGDSTECSNLLLQYGSFCTQLNRALTGIAVEQDKNTQEVFAQVKQIYKTPPIKDFGGFNFSQILPDPSKPSKRSFIEDLLFNKVTLADAGFIKQYGDCTGDIAARDLICAQKFNGLTVLPPLLTDEMIAQYTSALLAGTITSGWTFGAGAALQIPFAMQMAYRFNGIGVTQNVLYENQKLIANQFNSAIGKIQDSLSSTASALGKLQDVVNQNAQALNTLVKQLSSNFGAISSVLNDILSRLDPPEAEVQIDRLITGRLQSLQTYVTQQLIRAAEIRASANLAATKMSECVLGQSKRVDFCGKGYHLMSFPQSAPHGVVFLHVTYVPAQEKNFTTAPAICHDGKAHFPREGVFVSNGTHWFVTQRNFYEPQIITTDNTFVSGNCDVVIGIVNNTVYDPLQPELDSFKEELDKYFKNHTSPDVDLGDISGINASVVNIQKEIDRLNEVAKNLNESLIDLQELGKYEQYIKGSGRENLYFQGGGGSGYIPEAPRDGQAYVRKDGEWVLLSTFLGHHHHHHHH

SEQ ID NO: 2086 - protein, 1281 aa, Artificial Sequence
  Description of Artificial Sequence: Synthetic polypeptide
MGILPSPGMPALLSLVSLLSVLLMGCVAETGTQCVNLTTRTQLPPAYTNSFTRGVYYPDKVFRSSVLHSTQDLFLPFFSNVTWFHAIHVSGTNGTKRFDNPVLPFNDGVYFASTEKSNIIRGWIFGTTLDSKTQSLLIVNNATNVVIKVCEFQFCNDPFLGVYYHKNNKSWMESEFRVYSSANNCTFEYVSQPFLMDLEGKQGNFHNLREFVFKNIDGYFKIYSKHTPINLVRDLPQGFSALEPLVDLPIGINITRFQTLLALHRSYLTPGDSSSGWTAGAAAYYVGYLQPRTFLLKYNENGTITDAVDCALDPLSETKCTLKSFTVEKGIYQTSNFRVQPTESIVRFPNITNLCPFGEVFNATRFASVYAWNRKRISNCVADYSVLYNSASFSTFKCYGVSPTKLNDLCFTNVYADSFVIRGDEVRQIAPGQTGKIADYNYKLPDDFTGCVIAWNSNNLDSKVGGNYNYLYRLFRKSNLKPFERDISTEIYQAGSTPCNGVEGFNCYFPLQSYGFQPTNGVGYQPYRVVVLSFELLHAPATVCGPKKSTNLVKNKCVNFNFNGLTGTGVLTESNKKFLPFQQFGRDIADTTDAVRDPQTLEILDITPCSFGGVSVITPGTNTSNQVAVLYQDVNCTEVPVAIHADQLTPTWRVYSTGSNVFQTRAGCLIGAEHVNNSYECDIPIGAGICASYQTQTNSPSGAGSVASQSIIAYTMSLGAENSVAYSNNSIAIPTNFTISVTTEILPVSMTKTSVDCTMYICGDSTECSNLLLQYGSFCTQLNRALTGIAVEQDKNTQEVFAQVKQIYKTPPIKDFGGFNFSQILPDPSKPSKRSFIEDLLFNKVTLADAGFIKQYGDCLGDIAARDLICAQKFNGLTVLPPLLTDEMIAQYTSALLAGTITSGWTFGAGAALQIPFAMQMAYRFNGIGVTQNVLYENQKLIANQFNSAIGKIQDSLSSTASALGKLQDVVNQNAQALNTLVKQLSSNFGAISSVLNDILSRLDPPEAEVQIDRLITGRLQSLQTYVTQQLIRAAEIRASANLAATKMSECVLGQSKRVDFCGKGYHLMSFPQSAPHGVVFLHVTYVPAQEKNFTTAPAICHDGKAHFPREGVFVSNGTHWFVTQRNFYEPQIITTDNTFVSGNCDVVIGIVNNTVYDPLQPELDSFKEELDKYFKNHTSPDVDLGDISGINASVVNIQKEIDRLNEVAKNLNESLIDLQELGKYEQYIKGSGRENLYFQGGGGSGYIPEAPRDGQAYVRKDGEWVLLSTFLGHHHHHHHH

SEQ ID NO: 2087 - protein, 1281 aa, Artificial Sequence
  Description of Artificial Sequence: Synthetic polypeptide
MGILPSPGMPALLSLVSLLSVLLMGCVAETGTQCVNLTTRTQLPPAYTNSFTRGVYYPDKVFRSSVLHSTQDLFLPFFSNVTWFHAIHVSGTNGTKRFDNPVLPFNDGVYFASTEKSNIIRGWIFGTTLDSKTQSLLIVNNATNVVIKVCEFQFCNDPFLGVYYHKNNKSWMESEFRVYSSANNCTFEYVSQPFLMDLEGKQGNFKNLREFVFKNIDGYFKIYSKHTPINLVRDLPQGFSALEPLVDLPIGINITRFQTILALHRSYLTPGDSSSGWTAGAAAYYVGYLQPRTFLLKYNENGTITDAVDCALDPLSETKCTLKSFTVEKGIYQTSNFRVQPTESIVRFPNITNLCPFGEVFNATRFASVYAWNRKRISNCVADYSVLYNSASFSTFKCYGVSPTKLNDLCFTNVYADSFVIRGDEVRQIAPGQTGKIADYNYKLPDDFTGCVIAWNSNNLDSKVGGNYNYLYRLFRKSNLKPFERDISTEIYQAGSTPCNGVEGFNCYFPLQSYGFQPTNGVGYQPYRVVVLSFELLHAPATVCGPKKSTNLVKNKCVNFNFNGLTGTGVLTESNKKFLPFQQFGRDIADTTDAVRDPQTLEILDITPCSFGGVSVITPGTNTSNQVAVLYQDVNCTEVPVAIHADQLTPTWRVYSTGSNVFQTRAGCLIGAEHVNNSYECDIPIGAGICASYQTQTNSPSGAGSVASQSIIAYTMSLGAENSVAYSNNSIAIPTNFTISVTTEILPVSMTKTSVDCTMYICGDSTECSNLLLQYGSFCTQLNRALTGIAVEQDKNTQEVFAQVKQIYKTPPIKDFGGFNFSQILPDPSKPSKRSFIEDLLFNKVTLADAGFIKQYGDCLGDIAARDLICAQKFNGLTVLPPLLTDEMIAQYTSALLAGTITSGWTFGAGAALQIPFAMQMAYRFNGIGVTQNVLYENQKLIANQFNSAIGKIQDSLSSTASALGKLQDVVNQNAQALNTLVKQLSSNFGAISSVLNDILSRLDPPEAEVQIDRLITGRLQSLQTYVTQQLIRAAEIRASANLAATKMSECVLGQSKRVDFCGKGYHLMSFPQSAPHGVVFLHVTYVPAQEKNFTTAPAICHDGKAHFPREGVFVSNGTHWFVTQRNFYEPQIITTDNTFVSGNCDVVIGIVNNTVYDPLQPELDSFKEELDKYFKNHTSPDVDLGDISGINASVVNIQKEIDRLNEVAKNLNESLIDLQELGKYEQYIKGSGRENLYFQGGGGSGYIPEAPRDGQAYVRKDGEWVLLSTFLGHHHHHHHH

SEQ ID NO: 2088 - protein, 1281 aa, Artificial Sequence
  Description of Artificial Sequence: Synthetic polypeptide
MGILPSPGMPALLSLVSLLSVLLMGCVAETGTQCVNLTTRTQLPPAYTNSFTRGVYYPDKVFRSDVLHSTQDLFLPFFSNVTWFHAIHVSGTNGTKRFDNPVLPFNDGVYFASTEKSNIIRGWIFGTTLDSKTQSLLIVNNATNVVIKVCEFQFCDDPFLGVYYHKNNKSWMEKEFRVYSSANNCTFEYVSQPFLMDLGGKQGNFKNLREFVFKNIDGYFKIYSKHTPINLVRDLPQGFSALEPLMDLPIGINITRFQTLLALHRSYLTPGDSSSGWTAGAAAYYVGYLQPRTFLLKYNENGTITDAVDCALDPLSETKCTLKSFTVEKGIYQTSNFRVQPTESIVRFPNITNLCPFGEVFNATRFASVYAWNRKRISNCVADYSVLYNSASFSTFKCYGVSPTKLNDLCFTNVYADSFVIRGDEVRQIAPGQTGKIADYNYKLPDDFTGCVIAWNSNNLDSKVGGNYNYLYRLFRKSNLKPFERDISTEIYQAGSTPCNGVEGFNCYFPLQSYGFQPTNGVGYQPYRVVVLSFELLHAPATVCGPKKSTNLVKNKCVNFNFNGLTGTGVLTESNKKFLPFQQFGRDIADNTDAVRDPQTLEILDITPCSFGGVSVITPGTNTSNQVAVLYQDVNCTEVPNAIHADQLTPTWRVYSTGSNVFQTRAGCLIGAEHVNNSYECDIPIGAGICASYQTQTNSPSGAGSVASQSIIAYTMSLGAENSVAYSNNSIAIPTNFTISVTTEILPVSMTKTSVDCTMYICGDSTECSNLLLQYGSFCTQLNRALQGIAQEQDKNTQEVFAQVKQIYKTPPIKDFGGFNFSQILPDPSKPSKRSFIEDLLFNKVTLADAGFIKQYGDCLGDIAARDLICAQKFNGLTVLPPLLTDEMIAQYTSALLAGTITSGWTFGAGAALQIPFAMQMAYRFNGIGVTQNVLYENQKLIANQFNKAIGKIQDSLSSTASALGKLQDVVNQNAQALNTLVKQLSSNFGAISSVLNDILSRLDPPEAEVQIDRLITGRLQSLQTYVTQQLIRAAEIRASANLAATKMSECVLGQSKRVDFCGKGYHLMSFPQSAPHGVVFLHVTYVPAQEKNFTTAPAICHDGKAFFPREGVFVSNGTQWFVTQRNFYEPQIITTDNTFVSGNCDVVIGIVNNTVYDPLQPELDSFKEELDKYFKNHTSPDVDLGDISGINASVVNIQKEIDRLNEVAKNLNESLIDLQELGKYEQYIKGSGRENLYFQGGGGSGYIPEAPRDGQAYVRKDGEWVLLSTFLGHHHHHHHH

SEQ ID NO: 2089 - protein, 1281 aa, Artificial Sequence
  Description of Artificial Sequence: Synthetic polypeptide
MGILPSPGMPALLSLVSLLSVLLMGCVAETGTQCVNLTTRTQLPPAYTNSFTRGVYYPDKVFRSSVLHSTQDLFLPFFSNVTWFHAIHVSGTNGTKRFDNPVLPFNDGVYFASTEKSNIIRGWIFGTTLDSKTQSLLIVNNATNVVIKVCEFQFCNDPFLGVYYHKNNKSWMESEFRVYSSANNCTFEYVQQPFLMDLEGKQGNFKNLREFVFKNIDGYFKIYSKHTPINLVRDLPQGFSALEPLVDLPIGINITRFQTLLALHRSYLTPGDSSSGWTAGAAAYYVGYLQPRTFLLKYNENGTITDAVDCALDPLSETKCTLKSFTVEKGIYQTSNFRVQPTESIVRFPNITNLCPFGEVFNATRFASVYAWNRKRISNCVADYSVLYNSASFSTFKCYGVSPTKLNDLCFTNVYADSFVIRGDEVRQIAPGQTGKIADYNYKLPDDFTGCVIAWNSNNLDSKVGGNYNYLYRLFRKSNLKPFERDISTEIYQAGSTPCNGVEGFNCYFPLQSYGFQPTNGVGYQPYRVVVLSFELLHAPATVCGPKKSTNLVKNKCVNFNFNGLTGTGVLTESNKKFLPFQQFGRDIADTTDAVRDPQTLEILDITPCSFGGVSVITPGTNTSNQVAVLYQDVNCTEVPVAIHADQLTPTWRVYSTGSNVFQTRAGCLIGAEHVNNSYECDIPIGAGICASYQTQTNSPSGAGSVASQSIIAYTMSLGAENSVAYSNNSIAIPTNFTISVTTEILPVSMTKTSVDCTMYICGDSTECSNLLLQYGSFCTQLNRALTGIAVEQDKNTQEVFAQVKQIYKTPPIKDFGGFNFSQILPDPSKPSKRSFIEDLLFNKVTLADAGFIKQYGDCLGDIAARDLICAQKFNGLTVLPPLLTDEMIAQYTSALLAGTITSGWTFGAGAALQIPFAMQMAYRFNGIGVTQNVLYENQKLIANQFNSAIGKIQDSLSSTASALGKLQDVVNQNAQALNTLVKQLSSNFGAISSVLNDILSRLDPPEAEVQIDRLITGRLQSLQTYVTQQLIRAAEIRASANLAATKMSECVLGQSKRVDFCGKGYHLMSFPQSAPHGVVFLHVTYVPAQEKNFTTAPAICHDGKAHFPREGVFVSNGTHWFVTQRNFYEPQIITTDNTFVSGNCDVVIGIVNNTVYDPLQPELDSFKEELDKYFKNHTSPDVDLGDISGINASVVNIQKEIDRLNEVAKNLNESLIDLQELGKYEQYIKGSGRENLYFQGGGGSGYIPEAPRDGQAYVRKDGEWVLLSTFLGHHHHHHHH

SEQ ID NO: 2090 - protein, 1281 aa, Artificial Sequence
  Description of Artificial Sequence: Synthetic polypeptide
MGILPSPGMPALLSLVSLLSVLLMGCVAETGTQCVNLTTRTQLPPAYTNSFTRGVYYPDKVFRSSVLHSTQDLFLPFFSNVTWFHAIHVSGTNGTKRFDNPVLPFNDGVYFASTEKSNVIRGWIFGTTLDSKTQSLLIVNNATNVVIKVCEFQFCNDPFLGVYYHKNNKSWMESEFRVYSSANNCTFEYVSQPFLMDLEGKQGNFKNLREFVFKNIDGYFKIYSKHTPINLVRDLPQGFSALEPLVDLPIGINITRFQTLLALHRSYLTPGDSSSGWTAGAAAYYVGYLQPRTFLLKYNENGTITDAVDCALDPLSETKCTLKSFTVEKGIYQTSNFRVQPTESIVRFPNITNLCPFGEVFNATRFASVYAWNRKRISNCVADYSVLYNSASFSTFKCYGVSPTKLNDLCFTNVYADSFVIRGDEVRQIAPGQTGKIADYNYKLPDDFTGCVIAWNSNNLDSKVGGNYNYLYRLFRKSNLKPFERDISTEIYQAGSTPCNGVEGFNCYFPLQSYGFQPTNGVGYQPYRVVVLSFELLHAPATVCGPKKSTNLVKNKCVNFNFNGLTGTGVLTESNKKFLPFQQFGRDIADTTDAVRDPQTLEILDITPCSFGGVSVITPGTNTSNQVAVLYQDVNCTEVPVAIHADQLTPTWRVYSTGSNVFQTRAGCLIGAEHVNNSYECDIPIGAGICASYQTQTNSPSGAGSVASQSIIAYTMSLGAENSVAYSNNSIAIPTNFTISVTTEILPVSMTKTSVDCTMYICGDSTECSNLLLQYGSFCTQLNRALTGIAVEQDKNTQEVFAQVKQIYKTPPIKDFGGFNFSQILPDPSKPSKRSFIEDLLFNKVTLADAGFIKQYGDCLGDIAARDLICAQKFNGLTVLPPLLTDEMIAQYTSALLAGTITSGWTFGAGAALQIPFAMQMAYRFNGIGVTQNVLYENQKLIANQFNSAIGKIQDSLSSTASALGKLQDVVNQNAQALNTLVKQLSSNFGAISSVLNDILSRLDPPEAEVQIDRLITGRLQSLQTYVTQQLIRAAEIRASANLAATKMSECVLGQSKRVDFCGKGYHLMSFPQSAPHGVVFLHVTYVPAQEKNFTTAPAICHDGKAHFPREGVFVSNGTHWFVTQRNFYEPQIITTDNTFVSGNCDVVIGIVNNTVYDPLQPELDSFKEELDKYFKNHTSPDVDLGDISGINASVVNIQKEIDRLNEVAKNLNESLIDLQELGKYEQYIKGSGRENLYFQGGGGSGYIPEAPRDGQAYVRKDGEWVLLSTFLGHHHHHHHH

SEQ ID NO: 2091 - protein, 1281 aa, Artificial Sequence
  Description of Artificial Sequence: Synthetic polypeptide
MGILPSPGMPALLSLVSLLSVLLMGCVAETGTQCVNLTTRTQLPPAYTNSFTRGVYYPDKVFRSSVLHSTQDLFLPFFSNVTWFHAIHVSGTNGTKRFDNPVLPFNDGVYFASTEKSNIIRGWIFGTTLDSKTQSLLIVNNATNVVIRVCEFQFCNDPFLGVYYHKNNKSWMESEFRVYSSANNCTFEYVSQPFLMDLEGKQGNFKNLREFVFKNIDGYFKIYSKHTPINLVRDLPQGFSALEPLVDLPIGINITRFQTLLALHRSYLTPGDSSSGWTAGAAAYYVGYLQPRTFLLKYNENGTITDAVDCALDPLSETKCTLKSFTVEKGIYQTSNFRVQPTESIVRFPNITNLCPFGEVFNATRFASVYAWNRKRISNCVADYSVLYNSASFSTFKCYGVSPTKLNDLCFTNVYADSFVIRGDEVRQIAPGQTGKIADYNYKLPDDFTGCVIAWNSNNLDSKVGGNYNYLYRLFRKSNLKPFERDISTEIYQAGSTPCNGVEGFNCYFPLQSYGFQPTNGVGYQPYRVVVLSFELLHAPATVCGPKKSTNLVKNKCVNFNFNGLTGTGVLTESNKKFLPFQQFGRDIADTTDAVRDPQTLEILDITPCSFGGVSVITPGTNTSNQVAVLYQDVNCTEVPVAIHADQLTPTWRVYSTGSNVFQTRAGCLIGAEHVNNSYECDIPIGAGICASYQTQTNSPSGAGSVASQSIIAYTMSLGAENSVAYSNNSIAIPTNFTISVTTEILPVSMTKTSVDCTMYICGDSTECSNLLLQYGSFCTQLNRALTGIAVEQDKNTQEVFAQVKQIYKTPPIKDFGGFNFSQILPDPSKPSKRSFIEDLLFNKVTLADAGFIKQYGDCLGDIAARDLICAQKFNGLTVLPPLLTDEMIAQYTSALLAGTITSGWTFGAGAALQIPFAMQMAYRFNGIGVTQNVLYENQKLIANQFNSAIGKIQDSLSSTASALGKLQDVVNQNAQALNTLVKQLSSNFGAISSVLNDILSRLDPPEAEVQIDRLITGRLQSLQTYVTQQLIRAAEIRASANLAATKMSECVLGQSKRVDFCGKGYHLMSFPQSAPHGVVFLHVTYVPAQEKNFTTAPAICHDGKAHFPREGVFVSNGTHWFVTQRNFYEPQIITTDNTFVSGNCDVVIGIVNNTVYDPLQPELDSFKEELDKYFKNHTSPDVDLGDISGINASVVNIQKEIDRLNEVAKNLNESLIDLQELGKYEQYIKGSGRENLYFQGGGGSGYIPEAPRDGQAYVRKDGEWVLLSTFLGHHHHHHHH

SEQ ID NO: 2092 - protein, 1281 aa, Artificial Sequence
  Description of Artificial Sequence: Synthetic polypeptide
MGILPSPGMPALLSLVSLLSVLLMGCVAETGTQCVNLTTRTQLPPAYTNSFTRGVYYPDKVFRSSVLHSTQDLFLPFFSNVTWFHAIHVSGTNGTKRFDNPVLPFNDGVYFASTEKSNIIRGWIFGTTLDSKTQSLLIVNNATNVVIKVCEFQFCNDPFLGVYYHKNNKSWMESEFRVYSSANNCTFEYVHQPFLMDLEGKQGNFKNLREFVFKNIDGYFKIYSKHTPINLVRDLPQGFSALEPLVDLPIGINITRFQTLLALHRSYLTPGDSSSGWTAGAAAYYVGYLQPRTFLLKYNENGTITDAVDCALDPLSETKCTLKSFTVEKGIYQTSNFRVQPTESIVRFPNITNLCPFGEVFNATRFASVYAWNRKRISNCVADYSVLYNSASFSTFKCYGVSPTKLNDLCFTNVYADSFVIRGDEVRQIAPGQTGKIADYNYKLPDDFTGCVIAWNSNNLDSKVGGNYNYLYRLFRKSNLKPFERDISTEIYQAGSTPCNGVEGFNCYFPLQSYGFQPTNGVGYQPYRVVVLSFELLHAPATVCGPKKSTNLVKNKCVNFNFNGLTGTGVLTESNKKFLPFQQFGRDIADTTDAVRDPQTLEILDITPCSFGGVSVITPGTNTSNQVAVLYQDVNCTEVPVAIHADQLTPTWRVYSTGSNVFQTRAGCLIGAEHVNNSYECDIPIGAGICASYQTQTNSPSGAGSVASQSIIAYTMSLGAENSVAYSNNSIAIPTNFTISVTTEILPVSMTKTSVDCTMYICGDSTECSNLLLQYGSFCTQLNRALTGIAVEQDKNTQEVFAQVKQIYKTPPIKDFGGFNFSQILPDPSKPSKRSFIEDLLFNKVTLADAGFIKQYGDCLGDIAARDLICAQKFNGLTVLPPLLTDEMIAQYTSALLAGTITSGWTFGAGAALQIPFAMQMAYRFNGIGVTQNVLYENQKLIANQFNSAIGKIQDSLSSTASALGKLQDVVNQNAQALNTLVKQLSSNFGAISSVLNDILSRLDPPEAEVQIDRLITGRLQSLQTYVTQQLIRAAEIRASANLAATKMSECVLGQSKRVDFCGKGYHLMSFPQSAPHGVVFLHVTYVPAQEKNFTTAPAICHDGKAHFPREGVFVSNGTHWFVTQRNFYEPQIITTDNTFVSGNCDVVIGIVNNTVYDPLQPELDSFKEELDKYFKNHTSPDVDLGDISGINASVVNIQKEIDRLNEVAKNLNESLIDLQELGKYEQYIKGSGRENLYFQGGGGSGYIPEAPRDGQAYVRKDGEWVLLSTFLGHHHHHHHH

SEQ ID NO: 2093 - protein, 1281 aa, Artificial Sequence
  Description of Artificial Sequence: Synthetic polypeptide
MGILPSPGMPALLSLVSLLSVLLMGCVAETGTQCVNLTTRTQLPPAYTNSFTRGVYYPDKVFRSSVLHSTQDLFLPFFSNVTWFHAIHVSGTNGTKRFDNPVLPFNDGVYFASTEKSNIIRGWIFGTTLDSKTQSLLIVNNATNVVIKVCEFQFCNDPFLGVYYHKNNKSWMESEFRVYSSANNCTFEYVSQPFLMDLEGKQGNFKNLREFVFKNIDGYFKIYSKHTPINLVRDLPQGFSALEPLVDLPIGINITRFQTLLALHRSYLTPGDSSSGWTAGAAAYYVGYLQPRTFLLKYNENGTITDAVDCALDPLSETKCTLKSFTVEKGIYQTSNFRVQPTESIVRFPNITNLCPFGEVFNATRFASVYAWNRKRISNCVADYSVLYNSASFSTFKCYGVSPTKLNDLCFTNVYADSFVIRGDEVRQIAPGQTGKIADYNYKLPDDFTGCVIAWNSNNLDSKVGGNYNYLYRLFRKSNLKPFERDISTEIYQAGSTPCNGVEGFNCYFPLQSYGFQPTNGVGYQPYRVVVLSFELLHAPATVCGPKKSTNLVKNKCVNFNFNGLTGTGVLTESNKKFLPFQQFGRDIADTTDAVRDPQTLEILDITPCSFGGVSVITPGTNTSNQVAVLYQDVNCTEVPVSIHADQLTPTWRVYSTGSNVFQTRAGCLIGAEHVNNSYECDIPIGAGICASYQTQTNSPSGAGSVASQSIIAYTMSLGAENSVAYSNNSIAIPTNFTISVTTEILPVSMTKTSVDCTMYICGDSTECSNLLLQYGSFCTQLNRALTGIAVEQDKNTQEVFAQVKQIYKTPPIKDFGGFNFSQILPDPSKPSKRSFIEDLLFNKVTLADAGFIKQYGDCLGDIAARDLICAQKFNGLTVLPPLLTDEMIAQYTSALLAGTITSGWTFGAGAALQIPFAMQMAYRFNGIGVTQNVLYENQKLIANQFNSAIGKIQDSLSSTASALGKLQDVVNQNAQALNTLVKQLSSNFGAISSVLNDILSRLDPPEAEVQIDRLITGRLQSLQTYVTQQLIRAAEIRASANLAATKMSECVLGQSKRVDFCGKGYHLMSFPQSAPHGVVFLHVTYVPAQEKNFTTAPAICHDGKAHFPREGVFVSNGTHWFVTQRNFYEPQIITTDNTFVSGNCDVVIGIVNNTVYDPLQPELDSFKEELDKYFKNHTSPDVDLGDISGINASVVNIQKEIDRLNEVAKNLNESLIDLQELGKYEQYIKGSGRENLYFQGGGGSGYIPEAPRDGQAYVRKDGEWVLLSTFLGHHHHHHHH

SEQ ID NO: 2094 - protein, 1281 aa, Artificial Sequence
  Description of Artificial Sequence: Synthetic polypeptide
MGILPSPGMPALLSLVSLLSVLLMGCVAETGTQCVNLTTRTQLPPAYTNSFTRGVYYPDKIFRSSVLHLTQDLFLPFFSNVTWFHAIHVSGTNGTKRFDNPVLPFNDGVYFAATEKSNIIRGWIFGTTLDSKTQSLLIVNNATNVVIKVCEFQFCNDPFLGVYYHKNNKSWMESEFRVYSSANNCTFEYVSQPFLMDLEGKQGNFKNLREFVFKNIDGYFKIYSKHTPINLVRDLPQGFSALEPLVKLPIGINITRFQTLLALHRSYLTPGDSSSGWTAGAAAYYVGYLQPRTFLLKYNENGTITDAVDCALDPLSETKCTLKSFTVEKGIYQTSNFRVQPTESIVRFPNITNLCPFGEVFNATRFASVYAWNRKRISNCVADYSVLYNSASFSTFKCYGVSPTKLNDLCFTNVYADSFVIRGDEVRQIAPGQTGKIADYNYKLPDDFTGCVIAWNSNNLDSKVGGNYNYLYRLFRKSNLKPFERDISTEIYQAGSTPCNGVEGFNCYFPLQSYGFQPTNGVGYQPYRVVVLSFELLHAPATVCGPKKSTNLVKNKCVNFNFNGLTGTGVLTESNKKFLPFQQFGRDISDTTDAVRDPQTLEILDITPCSFGGVSVITPGTNTSNEVAVLYQDVNCTDVPVAIHADQLTPTWRVYSTGSNVFQTQAGCLIGAEHVNNSYECDIPIGAGICASYQTQTNSPSGAGSVASQSIIAYTMSLGAENSVAYSNNSIAIPTNFTISVTTEILPVSMTKTSVDCTMYICGDSTECSNLLLQYGSFCTQLNRALTGIAVEQDKNTQEVFAQVKQIYKTPPIKDFGGFNFSQILPDPSKPSKRSFIEDLLFNKVTLADAGFIKQYGDCLGDIAARDLICAQKFNGLTVLPPLLTDEMIAAYTAALLAGTATAGWTFGAGAALQIPFAMQMAYRFNGIGVTQNVLYENQKLIANQFNSAIGKIQDSLSSTASALGKLQDVVNQNAQALNTLVKQLSSNFGAISSVLNDILSRLDPPEAEVQIDRLITGRLQSLQTYVTQQLIRAAEIRASANLAATKMSECVLGQSKRVDFCGKGYHLMSFPQSAPHGVVFLHVTYVPAQEKNFTTAPAICHDGKAHFPREGVFVSNGTHWFVTQRNFYEPQIITTDNTFVSGNCDVVIGIVNNTVYDPLQPELDSFKEELDKYFKNHTSPDVDLGDISGINASVVNIQKEIDRLNEVAKNLNESLIDLQELGKYEQYIKGSGRENLYFQGGGGSGYIPEAPRDGQAYVRKDGEWVLLSTFLGHHHHHHHH

SEQ ID NO: 2095 - protein, 1281 aa, Artificial Sequence
  Description of Artificial Sequence: Synthetic polypeptide
MGILPSPGMPALLSLVSLLSVLLMGCVAETGTQCVNLTTRTQLPPAYTNSFTRGVYYPDKVFRSSVLHSTQDLFLPFFSNVTWFHAIHVSGTNGTKRFDNPVLPFNDGVYFASTEKSNIIRGWIFGTTLDSKTQSLLIVNNATNVVIKVCEFQFCNDPFLGVYYHKNNKSWMESEFRVYSSANNCTFEYVSQPFLMDLEGKQGNFKNLREFVFKNIDGYFKIYSKHTPINLVRDLPQGFSALEPLVDLPIGINITRFQTLLALHRSYLTPGDSSSGWTAGAAAYYVGYLQPRTFLLKYNENGTITDAVDCALDPLSETKCTLKSFTVEKGIYQTSNFRVQPTESIVRFPNITNLCPFGEVFNATRFASVYAWNRKRISNCVADYSVLYNSASFSTFKCYGVSPTKLNDLCFTNVYADSFVIRGDEVRQIAPGQTGKIADYNYKLPDDFTGCVIAWNSNNLDSKVGGNYNYLYRLFRKSNLKPFERDISTEIYQAGSTPCNGVEGFNCYFPLQSYGFQPTNGVGYQPYRVVVLSFELLHAPATVCGPKKSTNLVKNKCVNFNFNGLTGTGVLTESNKKFLPFQQFGRDIADTTDAVRDPQTLEILDITPCSFGGVSVITPGTNTSNQVAVLYQDVNCTEVPVAIHADQLTPTWRVYSTGSNVFQTRAGCLIGAEHVNNSYECDIPIGAGICASYQTQTNSPSGAGSVASQSIIAYTMSLGAENSVAYSNNSIAIPTNFTISVTTEILPVSMTKTSVDCTMYICGDSTECSNLLLQYGSFCTQLNRALTGIALEQDKNTQEVFAQVKQIYKTPPIKDFGGFNFSQILPDPSKPSKRSFIEDLLFNKVTLADAGFIKQYGDCLGDIAARDLICAQKFNGLTVLPPLLTDEMIAQYTSALLAGTITSGWTFGAGAALQIPFAMQMAYRFNGIGVTQNVLYENQKLIANQFNSAIGKIQDSLSSTASALGKLQDVVNQNAQALNTLVKQLSSNFGAISSVLNDILSRLDPPEAEVQIDRLITGRLQSLQTYVTQQLIRAAEIRASANLAATKMSECVLGQSKRVDFCGKGYHLMSFPQSAPHGVVFLHVTYVPAQEKNFTTAPAICHDGKAHFPREGVFVSNGTHWFVTQRNFYEPQIITTDNTFVSGNCDVVIGIVNNTVYDPLQPELDSFKEELDKYFKNHTSPDVDLGDISGINASVVNIQKEIDRLNEVAKNLNESLIDLQELGKYEQYIKGSGRENLYFQGGGGSGYIPEAPRDGQAYVRKDGEWVLLSTFLGHHHHHHHH

SEQ ID NO: 2096 - protein, 1281 aa, Artificial Sequence
  Description of Artificial Sequence: Synthetic polypeptide
MGILPSPGMPALLSLVSLLSVLLMGCVAETGTQCVNLTTRTQLPPAYTNSFTRGVYYPDKVFRSSVLHNTQDLFLPFFSNVTWFHAIHVSGTNGTKRFDNPVLPFNDGVYFASTEKSNIIRGWIFGTTLDSKTQSLLIVNNATNVVIKVCEFQFCNDPFLGVYYHKNNKSWMESEFRVYSSANNCTFEYVSQPFLMDLEGKQGNFKNLREFVFKNIDGYFKIYSKHTPINLVRDLPQGFSALEPLVDLPIGINITRFQTLLALHRSYLTPGDSSSGWTAGAAAYYVGYLQPRTFLLKYNENGTITDAVDCALDPLSETKCTLKSFTVEKGIYQTSNFRVQPTESIVRFPNITNLCPFGEVFNATRFASVYAWNRKRISNCVADYSVLYNSASFSTFKCYGVSPTKLNDLCFTNVYADSFVIRGDEVRQIAPGQTGKIADYNYKLPDDFTGCVIAWNSNNLDSKVGGNYNYLYRLFRKSNLKPFERDISTEIYQAGSTPCNGVEGFNCYFPLQSYGFQPTNGVGYQPYRVVVLSFELLHAPATVCGPKKSTNLVKNKCVNFNFNGLTGTGVLTESNKKFLPFQQFGRDIADTTDAVRDPQTLEILDITPCSFGGVSVITPGTNTSNQVAVLYQDVNCTEVPVAIHADQLTPTWRVYSTGSNVFQTRAGCLIGAEHVNNSYECDIPIGAGICASYQTQTNSPSGAGSVASQSIIAYTMSLGAENSVAYSNNSIAIPTNFTISVTTEILPVSMTKTSVDCTMYICGDSTECSNLLLQYGSFCTQLNRALTGIAVEQDKNTQEVFAQVKQIYKTPPIKDFGGFNFSQILPDPSKPSKRSFIEDLLFNKVTLADAGFIKQYGDCLGDIAARDLICAQKFNGLTVLPPLLTDEMIAQYTSALLAGTITSGWTFGAGAALQIPFAMQMAYRFNGIGVTQNVLYENQKLIANQFNSAIGKIQDSLSSTASALGKLQDVVNQNAQALNTLVKQLSSNFGAISSVLNDILSRLDPPEAEVQIDRLITGRLQSLQTYVTQQLIRAAEIRASANLAATKMSECVLGQSKRVDFCGKGYHLMSFPQSAPHGVVFLHVTYVPAQEKNFTTAPAICHDGKAHFPREGVFVSNGTHWFVTQRNFYEPQIITTDNTFVSGNCDVVIGIVNNTVYDPLQPELDSFKEELDKYFKNHTSPDVDLGDISGINASVVNIQKEIDRLNEVAKNLNESLIDLQELGKYEQYIKGSGRENLYFQGGGGSGYIPEAPRDGQAYVRKDGEWVLLSTFLGHHHHHHHH

SEQ ID NO: 2097 - protein, 1281 aa, Artificial Sequence
  Description of Artificial Sequence: Synthetic polypeptide
MGILPSPGMPALLSLVSLLSVLLMGCVAETGTQCVNLTTRTQLPPAYTNSFTRGVYYPDKVFRSSVLHSTQDLFLPFFSNVTWFHAIHVSGTNGTKRFDNPVLPFNDGVYFASTEKSNIIRGWIFGTTLDSKTQSLLIVNNATNVVIKVCEFQFCNDPFLGVYYHKNNKSWMESEFRVYSSANNCTFEYVSQPFLMDLEGKQGNFKNLREFVFKNIDGYFKIYSKHTPINLVRDLPQGFSALEPLVDLPIGINITRFQTLLALHRSYLTPGDSSSGWTAGAAAYYVGYLQPRTFLLKYNENGTITDAVDCALDPLSETKCTLKSFTVEKGIYQTSNFRVQPTESIVRFPNITNLCPFGEVFNATRFASVYAWNRKRISNCVADYSVLYNSASFSTFKCYGVSPTKLNDLCFTNVYADSFVIRGDEVRQIAPGQTGKIADYNYKLPDDFTGCVIAWNSNNLDSKVGGNYNYLYRLFRKSNLKPFERDISTEIYQAGSTPCNGVEGFNCYFPLQSYGFQPTNGVGYQPYRVVVLSFELLHAPATVCGPKKSTNLVKNKCVNFNFNGLTGTGVLTESNKKFLPFQQFGRDIADTTDAVRDPQTLEILDITPCSFGGVSVITPGTNTSNQVAVLYQDVNCTEVPVAIHADQLTPTWRVYSTGSNVFQTRAGCLIGAEHVNNSYECDIPIGAGICASYQTQTNSPSGAGSVASQSIIAYTMSLGAENSVAYSNNSIAIPTNFTISVTTEILPVSMTKTSVDCTMYICGDSTECSNLLLQYGSFCTQLNRALTGIAVEQDKNTQEVFAQVKQIYKTPPIKDFGGFNFSQILPDPSKPSKRSFIEDLLFNKVTLADAGFIKQYKDCLGDIAARDLICAQKFNGLTVLPPLLTDEMIAQYTSALLAGTITSGWTFGAGAALQIPFAMQMAYRFNGIGVTQNVLYENQKLIANQFNSAIGKIQDSLSSTASALGKLQDVVNQNAQALNTLVKQLSSNFGAISSVLNDILSRLDPPEAEVQIDRLITGRLQSLQTYVTQQLIRAAEIRASANLAATKMSECVLGQSKRVDFCGKGYHLMSFPQSAPHGVVFLHVTYVPAQEKNFTTAPAICHDGKAHFPREGVFVSNGTHWFVTQRNFYEPQIITTDNTFVSGNCDVVIGIVNNTVYDPLQPELDSFKEELDKYFKNHTSPDVDLGDISGINASVVNIQKEIDRLNEVAKNLNESLIDLQELGKYEQYIKGSGRENLYFQGGGGSGYIPEAPRDGQAYVRKDGEWVLLSTFLGHHHHHHHH

SEQ ID NO: 2098 - protein, 1281 aa, Artificial Sequence
  Description of Artificial Sequence: Synthetic polypeptide
MGILPSPGMPALLSLVSLLSVLLMGCVAETGTQCVNLTTRTQLPPAYTNSFTRGVYYPDKVFRSDVLHSTQDLFLPFFSNVTWFHAIHVSGTNGTKRFDNPVLPFNDGVYFASTEKSNIIRGWIFGTTLDSKTQSLLIVNNATNVVIKVCEFQFCENPFLGVYYHKNNKSWMEKEFRVYSSANNCTFEYVSQPFLMDLGGKQGNFKWLREFVFKNIDGYFKIYSKHTPINLVRDLPQGFSALEPLMDLPIGINITRFQTLLALHRSYLTPGDSSSGWTAGAAAYYVGYLQPRTFLLKYNENGTITDAVDCALDPLSETKCTLKSFTVEKGIYQTSNFRVQPTESIVRFPNITNLCPFGEVFNATRFASVYAWNRKRISNCVADYSVLYNSASFSTFKCYGVSPTKLNDLCFTNVYADSFVIRGDEVRQIAPGQTGKIADYNYKLPDDFTGCVIAWNSNNLDSKVGGNYNYLYRLFRKSNLKPFERDISTEIYQAGSTPCNGVEGFNCYFPLQSYGFQPTNGVGYQPYRVVVLSFELLHAPATVCGPKKSTNLVKNKCVNFNFNGLTGTGVLTESNKKFLPFQQFGRDIADNTDAVRDPQTLEILDITPCSFGGVSVITPGTNTSNQVAVLYQDVNCTEVPNAIHADQLTPTWRVYSTGSNVFQTRAGCLIGAEHVNNSYECDIPIGAGICASYQTQTNSPSGAGSVASQSIIAYTMSLGAENSVAYSNNSIAIPTNFTISVTTEILPVSMTKTSVDCTMYICGDSTECSNLLLQYGSFCTQLNRALQGIAQEQDKNTQEVFAQVKQIYKTPPIKDFGGFNFSQILPDPSKPSKRSFIEDLLFNKVTLADAGFIKQYGDCLGDISARDLICAQKFNGLTVLPPLLTDEMIAQYTSALLAGTITSGWTFGAGAALQIPFAMQMAYRFNGIGVTQNVLYENQKLIANQFNKAIGKIQDSLSSTASALGKLQDVVNQNAQALNTLVKQLSSNFGAISSVLNDILSRLDPPEAEVQIDRLITGRLQSLQTYVTQQLIRAAEIRASANLAATKMSECVLGQSKRVDFCGKGYHLMSFPQSAPHGVVFLHVTYVPAQEKNFTTAPAICHDGKAFFPREGVFVSNGTQWFVTQRNFYEPQIITTDNTFVSGNCDVVIGIVNNTVYDPLQPELDSFKEELDKYFKNHTSPDVDLGDISGINASVVNIQKEIDRLNEVAKNLNESLIDLQELGKYEQYIKGSGRENLYFQGGGGSGYIPEAPRDGQAYVRKDGEWVLLSTFLGHHHHHHHH

SEQ ID NO: 2099 - protein, 1281 aa, Artificial Sequence
  Description of Artificial Sequence: Synthetic polypeptide
MGILPSPGMPALLSLVSLLSVLLMGCVAETGTQCVNLTTRTQLPPAYTNSFRRGVYYPDKVFRSSVLHSTQDLFLPFFSNVTWFHAIHVSGTNGTKRFDNPVLPFNDGVYFASTEKSNIIRGWIFGTTLDSKTQSLLIVNNATNVVIKVCEFQFCNDPFLGVYYHKNNKSWMESEFRVYSSANNCTFEYVSQPFLMDLEGKQGNFKNLREFVFKNIDGYFKIYSKHTPINLVRDLPQGFSALEPLVDLPIGINITRFQTLLALHRSYLTPGDSSSGWTAGAAAYYVGYLQPRTFLLKYNENGTITDAVDCALDPLSETKCTLKSFTVEKGIYQTSNFRVQPTESIVRFPNITNLCPFGEVFNATRFASVYAWNRKRISNCVADYSVLYNSASFSTFKCYGVSPTKLNDLCFTNVYADSFVIRGDEVRQIAPGQTGKIADYNYKLPDDFTGCVIAWNSNNLDSKVGGNYNYLYRLFRKSNLKPFERDISTEIYQAGSTPCNGVEGFNCYFPLQSYGFQPTNGVGYQPYRVVVLSFELLHAPATVCGPKKSTNLVKNKCVNFNFNGLTGTGVLTESNKKFLPFQQFGRDIADTTDAVRDPQTLEILDITPCSFGGVSVITPGTNTSNQVAVLYQDVNCTEVPVAIHADQLTPTWRVYSTGSNVFQTRAGCLIGAEHVNNSYECDIPIGAGICASYQTQTNSPSGAGSVASQSIIAYTMSLGAENSVAYSNNSIAIPTNFTISVTTEILPVSMTKTSVDCTMYICGDSTECSNLLLQYGSFCTQLNRALTGIAVEQDKNTQEVFAQVKQIYKTPPIKDFGGFNFSQILPDPSKPSKRSFIEDLLFNKVTLADAGFIKQYGDCLGDIAARDLICAQKFNGLTVLPPLLTDEMIAQYTSALLAGTITSGWTFGAGAALQIPFAMQMAYRFNGIGVTQNVLYENQKLIANQFNSAIGKIQDSLSSTASALGKLQDVVNQNAQALNTLVKQLSSNFGAISSVLNDILSRLDPPEAEVQIDRLITGRLQSLQTYVTQQLIRAAEIRASANLAATKMSECVLGQSKRVDFCGKGYHLMSFPQSAPHGVVFLHVTYVPAQEKNFTTAPAICHDGKAHFPREGVFVSNGTHWFVTQRNFYEPQIITTDNTFVSGNCDVVIGIVNNTVYDPLQPELDSFKEELDKYFKNHTSPDVDLGDISGINASVVNIQKEIDRLNEVAKNLNESLIDLQELGKYEQYIKGSGRENLYFQGGGGSGYIPEAPRDGQAYVRKDGEWVLLSTFLGHHHHHHHH

SEQ ID NO: 2100 - protein, 1281 aa, Artificial Sequence
  Description of Artificial Sequence: Synthetic polypeptide
MGILPSPGMPALLSLVSLLSVLLMGCVAETGTQCVNLTTRTQLPPAYTNSFTRGVYYPDKVFRSSVLHSTQDLFLPFFSNVTWFHAIHVSGTNGTKRFDNPVLPFNDGVYFASTEKSNIIRGWIFGTTLDSKTQSLLIVNNATNVVIKVCEFQFCNDPFLGVYYHKNNKSWMESEFRVYSSANNCTFEYVSQPFLMDLEGKQGNFKNLREFVFKNIDGYFKIYSKHTPINLVRDLPQGFSALEPLVDLPIGINITRFQTLLALHRSYLTPGDSSSGWTAGAAAYYVGYLQPRTFLLKYNENGTITDAVDCALDPLSETKCTLKSFTVEKGIYQTSNFRVQPTESIVRFPNITNLCPFGEVFNATRFASVYAWNRKRISNCVADYSVLYNSASFSTFKCYGVSPTKLNDLCFTNVYADSFVIRGDEVRQIAPGQTGKIADYNYKLPDDFTGCVIAWNSNNLDSKVGGNYNYLYRLFRKSNLKPFERDISTEIYQAGSTPCNGVEGFNCYFPLQSYGFQPTNGVGYQPYRVVVLSFELLHAPATVCGPKKSTNLVKNKCVNFNFNGLTGTGVLTESNKKFLPFQQFGRDIADTTDAVRDPQTLEILDITPCSFGGVSVITPGTNTSNQVAVLYQDVNCTEVPVAIHADQLTPTWRVYSTGSNVFQTRAGCLIGAEHVNNSYECDIPIGAGICASYQTQTNSPSGAGSVASQSIIAYTMSLGAENSVAYSNNSIAIPTNFQISVTTEILPVSMTKTSVDCTMYICGDSTECSNLLLQYGSFCTQLNRALTGIAVEQDKNTQEVFAQVKQIYKTPPIKDFGGFNFSQILPDPSKPSKRSFIEDLLFNKVTLADAGFIKQYGDCLGDIAARDLICAQKFNGLTVLPPLLTDEMIAQYTSALLAGTITSGWTFGAGAALQIPFAMQMAYRFNGIGVTQNVLYENQKLIANQFNSAIGKIQDSLSSTASALGKLQDVVNQNAQALNTLVKQLSSNFGAISSVLNDILSRLDPPEAEVQIDRLITGRLQSLQTYVTQQLIRAAEIRASANLAATKMSECVLGQSKRVDFCGKGYHLMSFPQSAPHGVVFLHVTYVPAQEKNFTTAPAICHDGKAHFPREGVFVSNGTHWFVTQRNFYEPQIITTDNTFVSGNCDVVIGIVNNTVYDPLQPELDSFKEELDKYFKNHTSPDVDLGDISGINASVVNIQKEIDRLNEVAKNLNESLIDLQELGKYEQYIKGSGRENLYFQGGGGSGYIPEAPRDGQAYVRKDGEWVLLSTFLGHHHHHHHH

SEQ ID NO: 2101 - protein, 1281 aa, Artificial Sequence
  Description of Artificial Sequence: Synthetic polypeptide
MGILPSPGMPALLSLVSLLSVLLMGCVAETGTQCVNLTTRTQLPPAYTNSFTRGVYYPDKVFRSSVLHSTQDLFLPFFSNVTWFHAIHVSGTNGTKRFDNPVLPFNDGVYFASTEKSNIIRGWIFGTTLDSKTQSLLIVNNATNVVIKVCEFQFCNDPFLGVYYHKNNKSWMESEFRVYSSANNCTFEYVSQPFLMDLEGKQGNFKNLREFVFKNIDGYFKIYSKHTPINLVRDLPQGFSALEPLVDLPIGINITRFQTLLALHRSYLTPGDSSSGWTAGAAAYYVGYLQPRTFLLKYNENGTITDAVDCALDPLSETKCTLKSFTVEKGIYQTSNFRVQPTESIVRFPNITNLCPFGEVFNATRFASVYAWNRKRISNCVADYSVLYNSASFSTFKCYGVSPTKLNDLCFTNVYADSFVIRGDEVRQIAPGQTGKIADYNYKLPDDFTGCVIAWNSNNLDSKVGGNYNYLYRLFRKSNLKPFERDISTEIYQAGSTPCNGVEGFNCYFPLQSYGFQPTNGVGYQPYRVVVLSFELLHAPATVCGPKKSTNLVKNKCVNFNFNGLTGTGVLTESNKKFLPFQQFGRDIADTTDAVRDPQTLEILDITPCSFGGVSVITPGTNTSNQVAVLYQDVNCTEVPVAIHADQLTPTWRVYSTGSNVFQTRAGCLIGAEHVNNSYECDIPIGAGICASYQTQTNSPSGAGSVASQSIIAYTMSLGAENSVAYSNNSIAIPTNFTISVTTEILPVSMTKTSVDCTMYICGDSTECSNLLLQYGSFCTQLNRALTGIAVEQDKNTQEVFAQVKQIYKTPPIKDFGGFNFSQILPDPSKPSKRSFIEDLLFNKVTLADAGFIKQYGDCLGDIAARDLICAQKFNGLTVLPPLLTDEMIAQYTSALLAGTITSGWTFGAGAALQIPFAMQMAYRFNGIGVTQNVLYENQKIIANQFNSAIGKIQDSLSSTASALGKLQDVVNQNAQALNTLVKQLSSNFGAISSVLNDILSRLDPPEAEVQIDRLITGRLQSLQTYVTQQLIRAAEIRASANLAATKMSECVLGQSKRVDFCGKGYHLMSFPQSAPHGVVFLHVTYVPAQEKNFTTAPAICHDGKAHFPREGVFVSNGTHWFVTQRNFYEPQIITTDNTFVSGNCDVVIGIVNNTVYDPLQPELDSFKEELDKYFKNHTSPDVDLGDISGINASVVNIQKEIDRLNEVAKNLNESLIDLQELGKYEQYIKGSGRENLYFQGGGGSGYIPEAPRDGQAYVRKDGEWVLLSTFLGHHHHHHHH

SEQ ID NO: 2102 - protein, 1281 aa, Artificial Sequence
  Description of Artificial Sequence: Synthetic polypeptide
MGILPSPGMPALLSLVSLLSVLLMGCVAETGTQCVNLTTRTQLPPAYTNSFTRGVYYPDDIFRSSVLHSTQDLFLPFFSNVTWFHAIHVSGTNGTKRFDNPVLPFGDGVYFASTEKSNIIRGWIFGTTLDSKTQSLLIVNNATNVVIKVCEFQFCNDPFLGVYYHKNNKSWMESEFRVYSSANNCTFEYVSQPFLMDLEGKQGNFKNLREFVFKNIDGYFKIYSKHTPINLVRDLPQGFSALKPLVKLPIGINITRFQTLLALHRSYLTPGDSSSGWTAGAAAYYVGYLKPRTFLLKYNENGTITDAVDCALDPLSETKCTLKSFTVEKGIYQTSNFRVQPTESIVRFPNITNLCPFGEVFNATRFASVYAWNRKRISNCVADYSVLYNSASFSTFKCYGVSPTKLNDLCFTNVYADSFVIRGDEVRQIAPGQTGKIADYNYKLPDDFTGCVIAWNSNNLDSKVGGNYNYLYRLFRKSNLKPFERDISTEIYQAGSTPCNGVEGFNCYFPLQSYGFQPTNGVGYQPYRVVVLSFELLHAPATVCGPKKSTNLVKNKCVNFNFNGLTGTGVLTESNKKFLPFQQFGRDIADTTDAVRDPQTLEILDITPCSFGGVSVITPGTNTSNQVAVLYQDVNCTEVPVAIHADQLTPTWRVYSTGSNVFQTRAGCLIGAEHVNNSYECDIPIGAGICASYQTQTNSPSGAGSVASQSIIAYTMSLGAENSVAYSNNSIAIPTNFTISVTTEILPVSMTKTSVDCTMYICGDSTECSNLLLQYGSFCTQLNRALTGIAVEQDKNTQEVFAQVKQIYKTPPIKDFGGFNFSQILPDPSKPSKRSFIEDLLFNKVTLADAGFIKQYGDCLGDIAARDLICAQKFNGLTVLPPLLTDEMIAQYTSALLAGTITSGWTFGAGAALQIPFAMQMAYRFNGIGVTQNVLYENQKLIANQFNSAIGKIQDSLSSTASALGKLQDVVNQNAQALNTLVKQLSSNFGAISSVLNDILSRLDPPEAEVQIDRLITGRLQSLQTYVTQQLIRAAEIRASANLAATKMSECVLGQSKRVDFCGKGYHLMSFPQSAPHGVVFLHVTYVPAQEKNFTTAPAICHDGKAHFPREGVFVSNGTHWFVTQRNFYEPQIITTDNTFVSGNCDVVIGIVNNTVYDPLQPELDSFKEELDKYFKNHTSPDVDLGDISGINASVVNIQKEIDRLNEVAKNLNESLIDLQELGKYEQYIKGSGRENLYFQGGGGSGYIPEAPRDGQAYVRKDGEWVLLSTFLGHHHHHHHH

SEQ ID NO: 2103 - protein, 1281 aa, Artificial Sequence
  Description of Artificial Sequence: Synthetic polypeptide
MGILPSPGMPALLSLVSLLSVLLMGCVAETGTQCVNLTTRTQLPPAYTNSFTRGVYYPDKVFRSDVLHSTQDLFLPFFSNVTWFHAIHVSGTNGTKRFDNPVLPFNDGVYFASTEKSNIIRGWIFGTTLDSKTQSLLIVNNATNVVIKVCEFQFCENPFLGVYYHKNNKSWMEKEFRVYSSANNCTFEYVSQPFLMDLGGKQGNFKWLREFVFKNIDGYFKIYSKHTPINLVRDLPQGFSALEPLMDLPIGINITRFQTLLALHRSYLTPGDSSSGWTAGAAAYYVGYLQPRTFLLKYNENGTITDAVDCALDPLSETKCTLKSFTVEKGIYQTSNFRVQPTESIVRFPNITNLCPFGEVFNATRFASVYAWNRKRISNCVADYSVLYNSASFSTFKCYGVSPTKLNDLCFTNVYADSFVIRGDEVRQIAPGQTGKIADYNYKLPDDFTGCVIAWNSNNLDSKVGGNYNYLYRLFRKSNLKPFERDISTEIYQAGSTPCNGVEGFNCYFPLQSYGFQPTNGVGYQPYRVVVLSFELLHAPATVCGPKKSTNLVKNKCVNFNFNGLTGTGVLTESNKKFLPFQQFGRDIADNTDAVRDPQTLEILDITPCSFGGVSVITPGTNTSNQVAVLYQDVNCTEVPNAIHADQLTPTWRVYSTGSNVFQTRAGCLIGAEHVNNSYECDIPIGAGICASYQTQTNSPSGAGSVASQSIIAYTMSLGAENSVAYSNNSIAIPTNFTISVTTEILPVSMTKTSVDCTMYICGDSTECSNLLLQYGSFCTQLNRALQGIAREQDKNTQEVFAQVKQIYKTPPIKDFGGFNFSQILPDPSKPSKRSFIEDLLFNKVTLADAGFIKQYGDCLGDIAARDLICAQKFNGLTVLPPLLTDEMIAQYTSALLAGTITSGWTFGAGAALQIPFAMQMAYRFNGIGVTQNVLYENQKLIANQFNQAIGKIQDSLSSTASALGKLQDVVNQNAQALNTLVKQLSSNFGAISSVLNDILSRLDPPEAEVQIDRLITGRLQSLQTYVTQQLIRAAEIRASANLAATKMSECVLGQSKRVDFCGKGYHLMSFPQSAPHGVVFLHVTYVPAQEKNFTTAPAICHDGKAFFPREGVFVSNGTQWFVTQRNFYEPQIITTDNTFVSGNCDVVIGIVNNTVYDPLQPELDSFKEELDKYFKNHTSPDVDLGDISGINASVVNIQKEIDRLNEVAKNLNESLIDLQELGKYEQYIKGSGRENLYFQGGGGSGYIPEAPRDGQAYVRKDGEWVLLSTFLGHHHHHHHH

SEQ ID NO: 2104 - protein, 1281 aa, Artificial Sequence
  Description of Artificial Sequence: Synthetic polypeptide
MGILPSPGMPALLSLVSLLSVLLMGCVAETGTQCVNLTTRTQLPPAYTNSFTRGVYYPDKVFRSDVLHSTQDLFLPFFSNVTWFHAIHVSGTNGTKRFDNPVLPFNDGVYFASTEKSNIIRGWIFGTTLDSKTQSLLIVNNATNVVIKVCEFQFCEDPFLGVYYHKNNKSWMEKEFRVYSSANNCTFEYVSQPFLMDLGGKQGNFKWLREFVFKNIDGYFKIYSKHTPINLVRDLPQGFSALEPLMDLPIGINITRFQTLLALHRSYLTPGDSSSGWTAGAAAYYVGYLQPRTFLLKYNENGTITDAVDCALDPLSETKCTLKSFTVEKGIYQTSNFRVQPTESIVRFPNITNLCPFGEVFNATRFASVYAWNRKRISNCVADYSVLYNSASFSTFKCYGVSPTKLNDLCFTNVYADSFVIRGDEVRQIAPGQTGKIADYNYKLPDDFTGCVIAWNSNNLDSKVGGNYNYLYRLFRKSNLKPFERDISTEIYQAGSTPCNGVEGFNCYFPLQSYGFQPTNGVGYQPYRVVVLSFELLHAPATVCGPKKSTNLVKNKCVNFNFNGLTGTGVLTESNKKFLPFQQFGRDIADNTDAVRDPQTLEILDITPCSFGGVSVITPGTNTSNQVAVLYQDVNCTEVPNAIHADQLTPTWRVYSTGSNVFQTRAGCLIGAEHVNNSYECDIPIGAGICASYQTQTNSPSGAGSVASQSIIAYTMSLGAENSVAYSNNSIAIPTNFTISVTTEILPVSMTKTSVDCTMYICGDSTECSNLLLQYGSFCTQLNRALQGIAQEQDKNTQEVFAQVKQIYKTPPIKDFGGFNFSQILPDPSKPSKRSFIEDLLFNKVTLADAGFIKQYGDCLGDIAARDLICAQKFNGLTVLPPLLTDEMIAQYTSALLAGTITSGWTFGAGAALQIPFAMQMAYRFNGIGVTQNVLYENQKLIANQFNKAIGKIQDSLSSTASALGKLQDVVNQNAQALNTLVKQLSSNFGAISSVLNDILSRLDPPEAEVQIDRLITGRLQSLQTYVTQQLIRAAEIRASANLAATKMSECVLGQSKRVDFCGKGYHLMSFPQSAPHGVVFLHVTYVPAQEKNFTTAPAICHDGKAFFPREGVFVSNGTQWFVTQRNFYEPQIITTDNTFVSGNCDVVIGIVNNTVYDPLQPELDSFKEELDKYFKNHTSPDVDLGDISGINASVVNIQKEIDRLNEVAKNLNESLIDLQELGKYEQYIKGSGRENLYFQGGGGSGYIPEAPRDGQAYVRKDGEWVLLSTFLGHHHHHHHH

SEQ ID NO: 2105 - protein, 1281 aa, Artificial Sequence
  Description of Artificial Sequence: Synthetic polypeptide
MGILPSPGMPALLSLVSLLSVLLMGCVAETGTQCVNLTTRTQLPPAYTNSFTRGVYYPDKVFRSSVLHSTQDLFLPFFSNVTWFHAIHVSGTNGTKRFDNPVLPFNDGVYFASTEKSNIIRGWIFGTTLDSKTQSLLIVNNATNVVIKVCEFQFCNDPFLGVYYHKNNKSWMESEFRVYSSANNCTFEYVSQPFLMDLEGKQGNFKNLREFVFKNIDGYFKIYSKHTPINLVRDLPQGFSALEPLVDLPIGINITRFQTLLALHRSYLTPGDSSSGWTAGAAAYFVGYLQPRTFLLKYNENGTITDAVDCALDPLSETKCTLKSFTVEKGIYQTSNFRVQPTESIVRFPNITNLCPFGEVFNATRFASVYAWNRKRISNCVADYSVLYNSASFSTFKCYGVSPTKLNDLCFTNVYADSFVIRGDEVRQIAPGQTGKIADYNYKLPDDFTGCVIAWNSNNLDSKVGGNYNYLYRLFRKSNLKPFERDISTEIYQAGSTPCNGVEGFNCYFPLQSYGFQPTNGVGYQPYRVVVLSFELLHAPATVCGPKKSTNLVKNKCVNFNFNGLTGTGVLTESNKKFLPFQQFGRDIADTTDAVRDPQTLEILDITPCSFGGVSVITPGTNTSNQVAVLYQDVNCTEVPVAIHADQLTPTWRVYSTGSNVFQTRAGCLIGAEHVNNSYECDIPIGAGICASYQTQTNSPSGAGSVASQSIIAYTMSLGAENSVAYSNNSIAIPTNFTISVTTEILPVSMTKTSVDCTMYICGDSTECSNLLLQYGSFCTQLNRALTGIAVEQDKNTQEVFAQVKQIYKTPPIKDFGGFNFSQILPDPSKPSKRSFIEDLLFNKVTLADAGFIKQYGDCLGDIAARDLICAQKFNGLTVLPPLLTDEMIAQYTSALLAGTITSGWTFGAGAALQIPFAMQMAYRFNGIGVTQNVLYENQKLIANQFNSAIGKIQDSLSSTASALGKLQDVVNQNAQALNTLVKQLSSNFGAISSVLNDILSRLDPPEAEVQIDRLITGRLQSLQTYVTQQLIRAAEIRASANLAATKMSECVLGQSKRVDFCGKGYHLMSFPQSAPHGVVFLHVTYVPAQEKNFTTAPAICHDGKAHFPREGVFVSNGTHWFVTQRNFYEPQIITTDNTFVSGNCDVVIGIVNNTVYDPLQPELDSFKEELDKYFKNHTSPDVDLGDISGINASVVNIQKEIDRLNEVAKNLNESLIDLQELGKYEQYIKGSGRENLYFQGGGGSGYIPEAPRDGQAYVRKDGEWVLLSTFLGHHHHHHHH

SEQ ID NO: 2106 - protein, 1281 aa, Artificial Sequence
  Description of Artificial Sequence: Synthetic polypeptide
MGILPSPGMPALLSLVSLLSVLLMGCVAETGTQCVNLTTRTQLPPAYTNSFTRGVYYPDKVFRSSVLHSTQDLFLPFFSNVTWFHAIHVSGTNGTKRFDNPVLPFNDGVYFASTEKSNIIRGWIFGTTLDSKTQSLLIVNNATNVVIKVCEFQFCNDPFLGVYYHKNNKSWMESEFRVYSSANNCTFEYVSQPFLMDLEGKQGNFKNLREFVFKNIDGYFKIYSKHTPINLVRDLPQGFSALEPLVDLPIGINITRFQTLLALHRSYLTPGDSSSGWTAGAAAYYVGYLQPRTFLLKYNENGTITDAVDCALDPLSETKCTLKSFTVEKGIYQTSNFRVQPTESIVRFPNITNLCPFGEVFNATRFASVYAWNRKRISNCVADYSVLYNSASFSTFKCYGVSPTKLNDLCFTNVYADSFVIRGDEVRQIAPGQTGKIADYNYKLPDDFTGCVIAWNSNNLDSKVGGNYNYLYRLFRKSNLKPFERDISTEIYQAGSTPCNGVEGFNCYFPLQSYGFQPTNGVGYQPYRVVVLSFELLHAPATVCGPKKSTNLVKNKCVNFNFNGLTGTGVLTESNKKFLPFQQFGRDIADTTDAVRDPQTLEILDITPCSFGGVSVITPGTNTSNQVAVLYQDVNCTEVPVAIHADQLTPTWRVYSTGSNVFQTRAGCLIGAEHVNNSYECDIPIGAGICASYQTQTNSPSGAGSVASQSIIAYTMSLGAENSVAYSNNSIAIPTNFTISVTTEILPVSMTKTSVDCTMYICGDSTECSNLLLQYGSFCTQLNRALTGIAVEQDKNTQEVFAQVKQIYKTPPIKDFGGFNFSQILPDPSKPSKRSFIEDLLFNKVTLADAGFIKQYGECLGDIAARDLICAQKFNGLTVLPPLLTDEMIAQYTSALLAGTITSGWTFGAGAALQIPFAMQMAYRFNGIGVTQNVLYENQKLIANQFNSAIGKIQDSLSSTASALGKLQDVVNQNAQALNTLVKQLSSNFGAISSVLNDILSRLDPPEAEVQIDRLITGRLQSLQTYVTQQLIRAAEIRASANLAATKMSECVLGQSKRVDFCGKGYHLMSFPQSAPHGVVFLHVTYVPAQEKNFTTAPAICHDGKAHFPREGVFVSNGTHWFVTQRNFYEPQIITTDNTFVSGNCDVVIGIVNNTVYDPLQPELDSFKEELDKYFKNHTSPDVDLGDISGINASVVNIQKEIDRLNEVAKNLNESLIDLQELGKYEQYIKGSGRENLYFQGGGGSGYIPEAPRDGQAYVRKDGEWVLLSTFLGHHHHHHHH

SEQ ID NO: 2107 - protein, 1281 aa, Artificial Sequence
  Description of Artificial Sequence: Synthetic polypeptide
MGILPSPGMPALLSLVSLLSVLLMGCVAETGTQCVNLTTRTQLPPAYTNSFTRGVYYPDKVFRSSVLHSTQDLFLPFFSNVTWFHAIHVSGTNGTKRFDNPVLPFNDGVYFASTEKSNIIRGWIFGTTLDSKTQSLLIVNNATNVVIKVCEFQFCNDPFLGVYYHKNNKSWMESEFRVYSSANNCTFEYVSQPFLMDLEGKQGNFKNLREFVFKNIDGYFKIYSKHTPINLVRDLPQGFSALEPLVDLPIGINITRFQTLLALHRSYLTPGDSSSGWTAGAAAYYVGYLQPRTFLLKYNENGTITDAVDCALDPLSETKCTLKSFTVEKGIYQTSNFRVQPTESIVRFPNITNLCPFGEVFNATRFASVYAWNRKRISNCVADYSVLYNSASFSTFKCYGVSPTKLNDLCFTNVYADSFVIRGDEVRQIAPGQTGKIADYNYKLPDDFTGCVIAWNSNNLDSKVGGNYNYLYRLFRKSNLKPFERDISTEIYQAGSTPCNGVEGFNCYFPLQSYGFQPTNGVGYQPYRVVVLSFELLHAPATVCGPKKSTNLVKNKCVNFNFNGLTGTGVLTESNKKFLPFQQFGRDIADTTDAVRDPQTLEILDITPCSFGGVSVITPGTNTSNQVAVLYQDVNCTEVPVAIHADQLTPTWRVYSTGSNVFQTRAGCLIGAEHVNNSYECDIPIGAGICASYQTQTNSPSGAGSVASQSIIAYTMSLGAENSVAYSNNSIAIPTNFTISVTTEILPVSMDKTSVDCTMYICGDSTECSNLLLQYGSFCTQLNRALTGIAVEQDKNTQEVFAQVKQIYKTPPIKDFGGFNFSQILPDPSKPSKRSFIEDLLFNKVTLADAGFIKQYGDCLGDIAARDLICAQKFNGLTVLPPLLTDEMIAQYTSALLAGTITSGWTFGAGAALQIPFAMQMAYRFNGIGVTQNVLYENQKLIANQFNSAIGKIQDSLSSTASALGKLQDVVNQNAQALNTLVKQLSSNFGAISSVLNDILSRLDPPEAEVQIDRLITGRLQSLQTYVTQQLIRAAEIRASANLAATKMSECVLGQSKRVDFCGKGYHLMSFPQSAPHGVVFLHVTYVPAQEKNFTTAPAICHDGKAHFPREGVFVSNGTHWFVTQRNFYEPQIITTDNTFVSGNCDVVIGIVNNTVYDPLQPELDSFKEELDKYFKNHTSPDVDLGDISGINASVVNIQKEIDRLNEVAKNLNESLIDLQELGKYEQYIKGSGRENLYFQGGGGSGYIPEAPRDGQAYVRKDGEWVLLSTFLGHHHHHHHH

SEQ ID NO: 2108 - protein, 1281 aa, Artificial Sequence
  Description of Artificial Sequence: Synthetic polypeptide
MGILPSPGMPALLSLVSLLSVLLMGCVAETGTQCVNLTTRTQLPPAYTNSFTRGVYYPDKVFRSSVLHSTQDLFLPFFSNVTWFHAIHVSGTNGTKRFDNPVLPFNDGVYFASTEKSNIIRGWIFGTTLDSKTQSLLIVNNATNVVIKVCEFQFCNDPFLGVYYHKNNKSWMESEFRVYSSANNCTFEYVSQPFLMDLEGKQGNFKNLREFVFKNIDGYFKIYSKHTPINLVRDLPQGFSALEPLVDLPIGINITRFQTLLALHRSYLTPGDSSSGWTAGAAAYYVGYLQPRTFLLKYNENGTITDAVDCALDPLSETKCTLKSFTVEKGIYQTSNFRVQPTESIVRFPNITNLCPFGEVFNATRFASVYAWNRKRISNCVADYSVLYNSASFSTFKCYGVSPTKLNDLCFTNVYADSFVIRGDEVRQIAPGQTGKIADYNYKLPDDFTGCVIAWNSNNLDSKVGGNYNYLYRLFRKSNLKPFERDISTEIYQAGSTPCNGVEGFNCYFPLQSYGFQPTNGVGYQPYRVVVLSFELLHAPATVCGPKKSTNLVKNKCVNFNFNGLTGTGVLTESNKKFLPFQQFGRDIADTTDAVRDPQTLEILDITPCSFGGVSVITPGTNTSNQVAVLYQDVNCTEVPVAIHADQLTPTWRVYSTGSNVFQTRAGCLIGAEHVNNSYECDIPIGAGICASYQTQTNSPSGAGSVASQSIIAYTMSLGAENSVAYSNNSIAIPTNFTISVTTEILPVSMTKTSVDCTMYICGDSTECSNLLLQYGSFCTQLNRALTGIAVEQDKNTQEVFAQVKQIYKTPPIKDFGGFNFSQILPDPSKPSKRSFIEDLLFNKVTLADAGFIKQYGDCLGDIAARDLICAQKFNGLTVLPPLLTDEMIAQYTSALIAGTITSGWTFGAGAALQIPFAMQMAYRFNGIGVTQNVLYENQKLIANQFNSAIGKIQDSLSSTASALGKLQDVVNQNAQALNTLVKQLSSNFGAISSVLNDILSRLDPPEAEVQIDRLITGRLQSLQTYVTQQLIRAAEIRASANLAATKMSECVLGQSKRVDFCGKGYHLMSFPQSAPHGVVFLHVTYVPAQEKNFTTAPAICHDGKAHFPREGVFVSNGTHWFVTQRNFYEPQIITTDNTFVSGNCDVVIGIVNNTVYDPLQPELDSFKEELDKYFKNHTSPDVDLGDISGINASVVNIQKEIDRLNEVAKNLNESLIDLQELGKYEQYIKGSGRENLYFQGGGGSGYIPEAPRDGQAYVRKDGEWVLLSTFLGHHHHHHHH

SEQ ID NO: 2109 - protein, 1281 aa, Artificial Sequence
  Description of Artificial Sequence: Synthetic polypeptide
MGILPSPGMPALLSLVSLLSVLLMGCVAETGTQCVNLTTRTQLPPAYTNSFTRGVYYPDKVFRSSVLHSTQDLFLPFFSNVTWFHAIHVSGTNGTKRFDNPVLPFNDGVYFAATEKSNIIRGWIFGTTLDSKTQSLLIVNNATNVVIKVCEFQFCNDPFLGVYYHKNNKSWMESEFRVYSSANNCTFEYVSQPFLMDLEGKQGNFKNLREFVFKNIDGYFKIYSKHTPINLVRDLPQGFSALEPLVDLPIGINITRFQTLLALHRSYLTPGDSSSGWTAGAAAYFVGYLQPRTFLLKYNENGTITDAVDCALDPLSETKCTLKSFTVEKGIYQTSNFRVQPTESIVRFPNITNLCPFGEVFNATRFASVYAWNRKRISNCVADYSVLYNSASFSTFKCYGVSPTKLNDLCFTNVYADSFVIRGDEVRQIAPGQTGKIADYNYKLPDDFTGCVIAWNSNNLDSKVGGNYNYLYRLFRKSNLKPFERDISTEIYQAGSTPCNGVEGFNCYFPLQSYGFQPTNGVGYQPYRVVVLSFELLHAPATVCGPKKSTNLVKNKCVNFNFNGLTGTGVLTESNKKFLPFQQFGRDISDTTDAVRDPQTLEILDITPCSFGGVSVITPGTNTSNQVAVLYQDVNCTEVPVAIHADQLTPTWRVYSTGSNVFQTRAGCLIGAEHVNNSYECDIPIGAGICASYQTQTNSPSGAGSVASQSIVAYTMSLGAENSVAYSNNSIAIPTNFTISVTTEILPVSMTKTSVDCTMYICGDSTECSNLLLQYGSFCTQLNRALTGIAVEQDKNTQEVFAQVKQIYKTPPIKDFGGFNFSQILPDPSKPSKRSFIEDLLFNKVTLADAGFIKQYGDCLGDIAARDLICAQKFNGLTVLPPLLTDEMIAQYTSALLAGTITAGWTFGAGAALQIPFAMQMAYRFNGIGVTQNVLYENQKLIANQFNSAIGKIQDSLSSTASALGKLQDVVNQNAQALNTLVKQLSSNFGAISSVLNDILSRLDPPEAEVQIDRLITGRLQSLQTYVTQQLIRAAEIRASANLAATKMSECVLGQSKRVDFCGKGYHLMSFPQAAPHGVVFLHVTYVPAQEKNFTTAPAICHDGKAHFPREGVFVSNGTHWFVTQRNFYEPQIITTDNTFVSGNCDVVIGIVNNTVYDPLQPELDSFKEELDKYFKNHTSPDVDLGDISGINASVVNIQKEIDRLNEVAKNLNESLIDLQELGKYEQYIKGSGRENLYFQGGGGSGYIPEAPRDGQAYVRKDGEWVLLSTFLGHHHHHHHH

SEQ ID NO: 2110 - protein, 1281 aa, Artificial Sequence
  Description of Artificial Sequence: Synthetic polypeptide
MGILPSPGMPALLSLVSLLSVLLMGCVAETGTQCVNLTTRTQLPPAYTNSFTRGVYYPDKVFRSSVLHSTQDLFLPFFSNVTWFHAIHVSGTNGTKRFDNPVLPFNDGVYFAATEKSNIIRGWIFGTTLDSKTQSLLIVNNATNVVIKVCEFQFCNDPFLGVYYHKNNKSWMESEFRVYSSANNCTFEYVSQPFLMDLEGKQGNFKNLREFVFKNIDGYFKIYSKHTPINLVRDLPQGFSALEPLVDLPIGINITRFQTLLALHRSYLTPGDSSSGWTAGAAAYFVGYLQPRTFLLKYNENGTITDAVDCALDPLSETKCTLKSFTVEKGIYQTSNFRVQPTESIVRFPNITNLCPFGEVFNATRFASVYAWNRKRISNCVADYSVLYNSASFSTFKCYGVSPTKLNDLCFTNVYADSFVIRGDEVRQIAPGQTGKIADYNYKLPDDFTGCVIAWNSNNLDSKVGGNYNYLYRLFRKSNLKPFERDISTEIYQAGSTPCNGVEGFNCYFPLQSYGFQPTNGVGYQPYRVVVLSFELLHAPATVCGPKKSTNLVKNKCVNFNFNGLTGTGVLTESNKKFLPFQQFGRDISDTTDAVRDPQTLEILDITPCSFGGVSVITPGTNTSNQVAVLYQDVNCTEVPVAIHADQLTPTWRVYSTGSNVFQTRAGCLIGAEHVNNSYECDIPIGAGICASYQTQTNSPSGAGSVASQSIIAYTMSLGAENSVAYSNNSIAIPTNFTISVTTEILPVSMTKTSVDCTMYICGDSTECSNLLLQYGSFCTQLNRALTGIAVEQDKNTQEVFAQVKQIYKTPPIKDFGGFNFSQILPDPSKPSKRSFIEDLLFNKVTLADAGFIKQYGDCLGDIAARDLICAQKFNGLTVLPPLLTDEMIAQYTSALLAGTATAGWTFGAGAALQIPFAMQMAYRFNGIGVTQNVLYENQKLIANQFNSAIGKIQDSLSSTASALGKLQDVVNQNAQALNTLVKQLSSNFGAISSVLNDILSRLDPPEAEVQIDRLITGRLQSLQTYVTQQLIRAAEIRASANLAATKMSECVLGQSKRVDFCGKGYHLMSFPQAAPHGVVFLHVTYVPAQEKNFTTAPAICHDGKAHFPREGVFVSNGTHWFVTQRNFYEPQIITTDNTFVSGNCDVVIGIVNNTVYDPLQPELDSFKEELDKYFKNHTSPDVDLGDISGINASVVNIQKEIDRLNEVAKNLNESLIDLQELGKYEQYIKGSGRENLYFQGGGGSGYIPEAPRDGQAYVRKDGEWVLLSTFLGHHHHHHHH

SEQ ID NO: 2111 - protein, 1281 aa, Artificial Sequence
  Description of Artificial Sequence: Synthetic polypeptide
MGILPSPGMPALLSLVSLLSVLLMGCVAETGTQCVNLTTRTQLPPAYTNSFTRGVYYPDKVFRSSVLHSTQDLFLPFFSNVTWFHAIHVSGTNGTKRFDNPVLPFNDGVYFASTEKSNIIRGWIFGTTLDSKTQSLLIVNNATNVVIKVCEFQFCNDPFLGVYYHKNNKSWMESEFRVYSSANNCTFEYVSQPFLMDLEGKQGNFKNLREFVFKNIDGYFKIYSKHTPINLVRDLPQGFSALEPLVDLPIGINITRFQTLLALHRSYLTPGDSSSGWTAGAAAYYVGYLQPRTFLLKYNENGTITDAVDCALDPLSETKCTLKSFTVEKGIYQTSNFRVQPTESIVRFPNITNLCPFGEVFNATRFASVYAWNRKRISNCVADYSVLYNSASFSTFKCYGVSPTKLNDLCFTNVYADSFVIRGDEVRQIAPGQTGKIADYNYKLPDDFTGCVIAWNSNNLDSKVGGNYNYLYRLFRKSNLKPFERDISTEIYQAGSTPCNGVEGFNCYFPLQSYGFQPTNGVGYQPYRVVVLSFELLHAPATVCGPKKSTNLVKNKCVNFNFNGLTGTGVLTESNKKFLPFQQFGRDIADTTDAVRDPQTLEILDITPCSFGGVSVITPGTNTSNQVAVLYQDVNCTEVPVAIHADQLTPTWRVYSTGSNVFQTRAGCLIGAEHVNNSYECDIPIGAGICASYQTQTNSPSGAGSVASQSIIAYTMSLGAENSVAYSNNSIAIPTNFTISVTTEILPVSMTKTSVDCTMYICGDSTECSNLLLQYGSFCTQLNRALTGIAVEQDKNTQEVFAQVKQIYKTPPIKDFGGFNFSQILPDPSKPSKRSFIEDLLFNKVTLADAGFIKQYGDCLGDIAARDLICAQKFNGLTVLPPLLTDEMIAQYTSALLAGTITSGWTFGAGAALQIPFAMQMAYRFNGIGVTQNVLYENQKLIANQFNSAIGKIQDSLSSTASALGKLQDVVNQNAQALNTLVKQLSSNFGAISSVLNDILSRLDPPEAEVQIDRLITGRLQSLQTYVTQQLIRAAEIRASANLAATKMSECVLGQSKRVDFCGKGYHLMSFPQSAPHGVVFLHVTYVPAQEKNFTTAPAICHEGKAHFPREGVFVSNGTHWFVTQRNFYEPQIITTDNTFVSGNCDVVIGIVNNTVYDPLQPELDSFKEELDKYFKNHTSPDVDLGDISGINASVVNIQKEIDRLNEVAKNLNESLIDLQELGKYEQYIKGSGRENLYFQGGGGSGYIPEAPRDGQAYVRKDGEWVLLSTFLGHHHHHHHH

SEQ ID NO: 2112 - protein, 1281 aa, Artificial Sequence
  Description of Artificial Sequence: Synthetic polypeptide
MGILPSPGMPALLSLVSLLSVLLMGCVAETGTQCVNLTTRTQLPPAYTNSFTRGVYYPDKVFRSSVLHSTQDLFLPFFSNVTWFHAIHVSGTNGTKRFDNPVLPFNDGVYFASTEKSNIIRGWIFGTTLDSKTQSLLIVNNATNVVIKVCEFQFCNDPFLGVYYHKNNKSWMESEFRVYSSANNCTFEYVSQPFLMDLEGKQGNFKNLREFVFKNIDGYFKIYSKHTPINLVRDLPQGFSALQPLVDLPIGINITRFQTLLALHRSYLTPGDSSSGWTAGAAAYYVGYLQPRTFLLKYNENGTITDAVDCALDPLSETKCTLKSFTVEKGIYQTSNFRVQPTESIVRFPNITNLCPFGEVFNATRFASVYAWNRKRISNCVADYSVLYNSASFSTFKCYGVSPTKLNDLCFTNVYADSFVIRGDEVRQIAPGQTGKIADYNYKLPDDFTGCVIAWNSNNLDSKVGGNYNYLYRLFRKSNLKPFERDISTEIYQAGSTPCNGVEGFNCYFPLQSYGFQPTNGVGYQPYRVVVLSFELLHAPATVCGPKKSTNLVKNKCVNFNFNGLTGTGVLTESNKKFLPFQQFGRDIADTTDAVRDPQTLEILDITPCSFGGVSVITPGTNTSNQVAVLYQDVNCTEVPVAIHADQLTPTWRVYSTGSNVFQTRAGCLIGAEHVNNSYECDIPIGAGICASYQTQTNSPSGAGSVASQSIIAYTMSLGAENSVAYSNNSIAIPTNFTISVTTEILPVSMTKTSVDCTMYICGDSTECSNLLLQYGSFCTQLNRALTGIAVEQDKNTQEVFAQVKQIYKTPPIKDFGGFNFSQILPDPSKPSKRSFIEDLLFNKVTLADAGFIKQYGDCLGDIAARDLICAQKFNGLTVLPPLLTDEMIAQYTSALLAGTITSGWTFGAGAALQIPFAMQMAYRFNGIGVTQNVLYENQKLIANQFNSAIGKIQDSLSSTASALGKLQDVVNQNAQALNTLVKQLSSNFGAISSVLNDILSRLDPPEAEVQIDRLITGRLQSLQTYVTQQLIRAAEIRASANLAATKMSECVLGQSKRVDFCGKGYHLMSFPQSAPHGVVFLHVTYVPAQEKNFTTAPAICHDGKAHFPREGVFVSNGTHWFVTQRNFYEPQIITTDNTFVSGNCDVVIGIVNNTVYDPLQPELDSFKEELDKYFKNHTSPDVDLGDISGINASVVNIQKEIDRLNEVAKNLNESLIDLQELGKYEQYIKGSGRENLYFQGGGGSGYIPEAPRDGQAYVRKDGEWVLLSTFLGHHHHHHHH

SEQ ID NO: 2113 - protein, 1281 aa, Artificial Sequence
  Description of Artificial Sequence: Synthetic polypeptide
MGILPSPGMPALLSLVSLLSVLLMGCVAETGTQCVNLTTRTQLPPAYTNSFTRGVYYPDKVFRSSVLHSTQDLFLPFFSNVTWFHAIHVSGTNGTKRFDNPVLPFNDGVYFASTEKSNIIRGWIFGTTLDSKTQSLLIVNNATNVVIKVCEFQFCNDPFLGVYYHKNNKSWMESEFRVYSSANNCTFEYVSQPFLMDLEGKQGNFKNLREFVFKNIDGYFKIYSKHTPINLVRDLPQGFSALEPLVDLPIGINITRFQTLLALHRSYLTPGDSSSGWTAGAAAYYVGYLQPRTFLLKYNENGTITDAVDCALDPLSETKCTLKSFTVEKGIYQTSNFRVQPTESIVRFPNITNLCPFGEVFNATRFASVYAWNRKRISNCVADYSVLYNSASFSTFKCYGVSPTKLNDLCFTNVYADSFVIRGDEVRQIAPGQTGKIADYNYKLPDDFTGCVIAWNSNNLDSKVGGNYNYLYRLFRKSNLKPFERDISTEIYQAGSTPCNGVEGFNCYFPLQSYGFQPTNGVGYQPYRVVVLSFELLHAPATVCGPKKSTNLVKNKCVNFNFNGLTGTGVLTESNKKFLPFQQFGRDIADTTDAVRDPQTLEILDITPCSFGGVSVITPGTNTSNQVAVLYQDVNCTEVPVAIHADQLTPTWRVYSTGSNVFQTRAGCLIGAEHVNNSYECDIPIGAGICASYQTQTNSPSGAGSVASQSIIAYTMSLGAENSVAYSNNSIAIPTNFTISVTTEILPVSMTKTSVDCTMYICGDSTECSNLLLQYGSFCTQLNRALTGIAVEQDKNTQEVFAQVKQIYKTPPIKDFGGFNFSQILPDPSKPSKRSFIEDLLFNKVTLADAGFIKQYGDCLGDIAARDLICAQKFNGLTVLPPLLTDEMIAQYTSALLAGTITSGWTFGAGAALQIPFAMQMAYRFNGIGVTQNVLYENQKLIANQFNSAIGKIQDSLSSTASALGKLQDVVNQNAQALNTLVKQLSSNFGAISSVLNDILSRLDPPEAEVQIDRLITGRLQSLQTYVTQQLIRAAEIRASANLAATKMSECVLGQSKRVDFCGKGYHLMSFPQSAPHGVVFLHVTYVPAQEKNFTTAPAICHDGKAHFPREGVFVSNGTHWYVTQRNFYEPQIITTDNTFVSGNCDVVIGIVNNTVYDPLQPELDSFKEELDKYFKNHTSPDVDLGDISGINASVVNIQKEIDRLNEVAKNLNESLIDLQELGKYEQYIKGSGRENLYFQGGGGSGYIPEAPRDGQAYVRKDGEWVLLSTFLGHHHHHHHH

SEQ ID NO: 2114 - protein, 1281 aa, Artificial Sequence
  Description of Artificial Sequence: Synthetic polypeptide
MGILPSPGMPALLSLVSLLSVLLMGCVAETGTQCVNLTTRTQLPPAYTNSFTRGVYYPDKVFRSSVLHSTQDLFLPFFSNVTWFHAIHVSGTNGTKRFDNPVLPFNDGVYFASTEKSNIIRGWIFGTTLDSKTQSLLIVNNATNVVIKVCEFQFCNDPFLGVYYHKNNKSWMESEFRVYSSANNCTFEYVSQPFLMDLEGKQGNFKHLREFVFKNIDGYFKIYSKHTPINLVRDLPQGFSALEPLVDLPIGINITRFQTLLALHRSYLTPGDSSSGWTAGAAAYYVGYLQPRTFLLKYNENGTITDAVDCALDPLSETKCTLKSFTVEKGIYQTSNFRVQPTESIVRFPNITNLCPFGEVFNATRFASVYAWNRKRISNCVADYSVLYNSASFSTFKCYGVSPTKLNDLCFTNVYADSFVIRGDEVRQIAPGQTGKIADYNYKLPDDFTGCVIAWNSNNLDSKVGGNYNYLYRLFRKSNLKPFERDISTEIYQAGSTPCNGVEGFNCYFPLQSYGFQPTNGVGYQPYRVVVLSFELLHAPATVCGPKKSTNLVKNKCVNFNFNGLTGTGVLTESNKKFLPFQQFGRDIADTTDAVRDPQTLEILDITPCSFGGVSVITPGTNTSNQVAVLYQDVNCTEVPVAIHADQLTPTWRVYSTGSNVFQTRAGCLIGAEHVNNSYECDIPIGAGICASYQTQTNSPSGAGSVASQSIIAYTMSLGAENSVAYSNNSIAIPTNFTISVTTEILPVSMTKTSVDCTMYICGDSTECSNLLLQYGSFCTQLNRALTGIAVEQDKNTQEVFAQVKQIYKTPPIKDFGGFNFSQILPDPSKPSKRSFIEDLLFNKVTLADAGFIKQYGDCLGDIAARDLICAQKFNGLTVLPPLLTDEMIAQYTSALLAGTITSGWTFGAGAALQIPFAMQMAYRFNGIGVTQNVLYENQKLIANQFNSAIGKIQDSLSSTASALGKLQDVVNQNAQALNTLVKQLSSNFGAISSVLNDILSRLDPPEAEVQIDRLITGRLQSLQTYVTQQLIRAAEIRASANLAATKMSECVLGQSKRVDFCGKGYHLMSFPQSAPHGVVFLHVTYVPAQEKNFTTAPAICHDGKAHFPREGVFVSNGTHWFVTQRNFYEPQIITTDNTFVSGNCDVVIGIVNNTVYDPLQPELDSFKEELDKYFKNHTSPDVDLGDISGINASVVNIQKEIDRLNEVAKNLNESLIDLQELGKYEQYIKGSGRENLYFQGGGGSGYIPEAPRDGQAYVRKDGEWVLLSTFLGHHHHHHHH

SEQ ID NO: 2115 - protein, 1281 aa, Artificial Sequence
  Description of Artificial Sequence: Synthetic polypeptide
MGILPSPGMPALLSLVSLLSVLLMGCVAETGTQCVNLTTRTQLPPAYTNSFTRGVYYPDKVFRSSVLHSTQDLFLPFFSNVTWFHAIHVSGTNGTKRFDNPVLPFNDGVYFASTEKSNIIRGWIFGTTLDSKTQSLLIVNNATNVVIKVCEFQFCNDPFLGVYYHKNNKSWMESEFRVYSSANNCTFEYVSQPFLMDLEGKQGNFKNLREFVFKNIDGYFKIYSKHTPINLVRDLPQGFSALEPLVDLPIGINITRFQTLLALHRSYLTPGDSSSGWTAGAAAYYVGYLQPRTFLLKYNENGTITDAVDCALDPLSETKCTLKSFTVEKGIYQTSNFRVQPTESIVRFPNITNLCPFGEVFNATRFASVYAWNRKRISNCVADYSVLYNSASFSTFKCYGVSPTKLNDLCFTNVYADSFVIRGDEVRQIAPGQTGKIADYNYKLPDDFTGCVIAWNSNNLDSKVGGNYNYLYRLFRKSNLKPFERDISTEIYQAGSTPCNGVEGFNCYFPLQSYGFQPTNGVGYQPYRVVVLSFELLHAPATVCGPKKSTNLVKNKCVNFNFNGLTGTGVLTESNKKFLPFQQFGRDIADTTDAVRDPQTLEILDITPCSFGGVSVITPGTNTSNQVAVLYQDVNCTEVPVAIHADQLTPTWRVYSTGSNVFQTRAGCLIGAEHVNNSYECDIPIGAGICASYQTQTNSPSGAGSVASQSIIAYTMSLGAENSVAYSNNSIAIPTNFTISVTTEILPVSMTKTSVDCTMYICGDSTECSNLLLQYGSFCTQLNRALTGIAVEQDKNTQEVFAQVKQIYKTPPIKDFGGFNFSQILPDPSKPSKRSFIEDLLFNKVTLADAGFIKQYGDCLGDIAARDLICAQKFNGLTVLPPLLTDEMIAQYTSALLAGTITSGWTFGAGAALQIPFAMQMAYRFNGIGVTQNVLYENQKLIANQFNSAIGKIQDSLSSTASALGKLQDVVNQNAQALMTLVKQLSSNFGAISSVLNDILSRLDPPEAEVQIDRLITGRLQSLQTYVTQQLIRAAEIRASANLAATKMSECVLGQSKRVDFCGKGYHLMSFPQSAPHGVVFLHVTYVPAQEKNFTTAPAICHDGKAHFPREGVFVSNGTHWFVTQRNFYEPQIITTDNTFVSGNCDVVIGIVNNTVYDPLQPELDSFKEELDKYFKNHTSPDVDLGDISGINASVVNIQKEIDRLNEVAKNLNESLIDLQELGKYEQYIKGSGRENLYFQGGGGSGYIPEAPRDGQAYVRKDGEWVLLSTFLGHHHHHHHH

SEQ ID NO: 2116 - protein, 1281 aa, Artificial Sequence
  Description of Artificial Sequence: Synthetic polypeptide
MGILPSPGMPALLSLVSLLSVLLMGCVAETGTQCVNLTTRTQLPPAYTNSFTRGVYYPDKIFRSSVLHLTQDLFLPFFSNVTWFHAIHVSGTNGTKRFDNPVLPFNDGVYFAATEKSNIIRGWIFGTTLDSKTQSLLIVNNATNVVIKVCEFQFCNDPFLGVYYHKNNKSWMESEFRVYSSANNCTFEYVSQPFLMDLEGKQGNFKNLREFVFKNIDGYFKIYSKHTPINLVRDLPQGFSALEPLVKLPIGINITRFQTLLALHRSYLTPGDSSSGWTAGAAAYYVGYLQPRTFLLKYNENGTITDAVDCALDPLSETKCTLKSFTVEKGIYQTSNFRVQPTESIVRFPNITNLCPFGEVFNATRFASVYAWNRKRISNCVADYSVLYNSASFSTFKCYGVSPTKLNDLCFTNVYADSFVIRGDEVRQIAPGQTGKIADYNYKLPDDFTGCVIAWNSNNLDSKVGGNYNYLYRLFRKSNLKPFERDISTEIYQAGSTPCNGVEGFNCYFPLQSYGFQPTNGVGYQPYRVVVLSFELLHAPATVCGPKKSTNLVKNKCVNFNFNGLTGTGVLTESNKKFLPFQQFGRDISDTTDAVRDPQTLEILDITPCSFGGVSVITPGTNTSNQVAVLYQDVNCTDVPVAIHADQLTPTWRVYSTGSNVFQTQAGCLIGAEHVNNSYECDIPIGAGICASYQTQTNSPSGAGSVASQSIVAYTMSLGAENSVAYSNNSIAIPTNFTISVTTEILPVSMTKTSVDCTMYICGDSTECSNLLLQYGSFCTQLNRALTGIAVEQDKNTQEVFAQVKQIYKTPPIKDFGGFNFSQILPDPSKPSKRSFIEDLLFNKVTLADAGFIKQYGDCLGDIAARDLICAQKFNGLTVLPPLLTDEMIAAYTAALLAGTATAGWTFGAGAALQIPFAMQMAYRFNGIGVTQNVLYENQKLIANQFNSAIGKIQDSLSSTASALGKLQDVVNQNAQALNTLVKQLSSNFGAISSVLNDILSRLDPPEAEVQIDRLITGRLQSLQTYVTQQLIRAAEIRASANLAATKMSECVLGQSKRVDFCGKGYHLMSFPQSAPHGVVFLHVTYVPAQEKNFTTAPAICHDGKAHFPREGVFVSNGTHWFVTQRNFYEPQIITTDNTFVSGNCDVVIGIVNNTVYDPLQPELDSFKEELDKYFKNHTSPDVDLGDISGINASVVNIQKEIDRLNEVAKNLNESLIDLQELGKYEQYIKGSGRENLYFQGGGGSGYIPEAPRDGQAYVRKDGEWVLLSTFLGHHHHHHHH

SEQ ID NO: 2117 - protein, 1281 aa, Artificial Sequence
  Description of Artificial Sequence: Synthetic polypeptide
MGILPSPGMPALLSLVSLLSVLLMGCVAETGTQCVNLTTRTQLPPAYTNSFTRGVYYPDKVFRSSVLHSTQDLFLPFFSNVTWFHAIHVSGTNGTKRFDNPVLPFNDGVYFASTEKSNIIRGWIFGTTLDSKTQSLLIVNNATNVVIKVCEFQFCNDPFLGVYYHKNNKSWMESEFRVYSSANNCTFEYVSQPFLMDLEGKQGNFKNLREFVFKNIDGYFKIYSKHTPINLVRDLPQGFSALEPLVDLPIGINITRFQTLLALHRSYLTPGDSSSGWTAGAAAYYVGYLQPRTFLLKYNENGTITDAVDCALDPLSETKCTLKSFTVEKGIYQTSNFRVQPTESIVRFPNITNLCPFGEVFNATRFASVYAWNRKRISNCVADYSVLYNSASFSTFKCYGVSPTKLNDLCFTNVYADSFVIRGDEVRQIAPGQTGKIADYNYKLPDDFTGCVIAWNSNNLDSKVGGNYNYLYRLFRKSNLKPFERDISTEIYQAGSTPCNGVEGFNCYFPLQSYGFQPTNGVGYQPYRVVVLSFELLHAPATVCGPKKSTNLVKNKCVNFNFNGLTGTGVLTESNKKFLPFQQFGRDIADTTDAVRDPQTLEILDITPCSFGGVSVITPGTNTSNQVAVLYQDVNCTEVPVAIHADQLTPTWRVYSTGSNVFQTRAGCLIGAEHVNNSYECDIPIGAGICASYQTQTNSPSGAGSVASQSIIAYTMSLGAENSVAYSNNSIAIPTNFTISVTTEILPVSMTKTSVDCTMYICGDSTECSNLLLQYGSFCTQLNRALTGIAVEQDKNTQEVFAQVKQIYKTPPIKDFGGFNFSQILPDPSKPSKRSFIEDLLFNKTTLADAGFIKQYGDCLGDIAARDLICAQKFNGLTVLPPLLTDEMIAQYTSALLAGTITSGWTFGAGAALQIPFAMQMAYRFNGIGVTQNVLYENQKLIANQFNSAIGKIQDSLSSTASALGKLQDVVNQNAQALNTLVKQLSSNFGAISSVLNDILSRLDPPEAEVQIDRLITGRLQSLQTYVTQQLIRAAEIRASANLAATKMSECVLGQSKRVDFCGKGYHLMSFPQSAPHGVVFLHVTYVPAQEKNFTTAPAICHDGKAHFPREGVFVSNGTHWFVTQRNFYEPQIITTDNTFVSGNCDVVIGIVNNTVYDPLQPELDSFKEELDKYFKNHTSPDVDLGDISGINASVVNIQKEIDRLNEVAKNLNESLIDLQELGKYEQYIKGSGRENLYFQGGGGSGYIPEAPRDGQAYVRKDGEWVLLSTFLGHHHHHHHH

SEQ ID NO: 2118 - protein, 1281 aa, Artificial Sequence
  Description of Artificial Sequence: Synthetic polypeptide
MGILPSPGMPALLSLVSLLSVLLMGCVAETGTQCVNLTTRTQLPPAYTNSFTRGVYYPDKVFRSSVLHSTQDLFLPFFSNVTWFHAIHVSGTNGTKRFDNPVLPFNDGVYFASTEKSNIIRGWIFGTTLDSKTQSLLIVNNATNVVIKVCEFQFCNDPFLGVYYHKNNKSWMESEFRVYSSANNCTFEYVSQPFLMDLEGKQGNFKNLREFVFKNIDGYFKIYSKHTPINLVRDLPQGFSALEPLVDLPIGINITRFQTLLALHRSYLTPGDSSSGWTAGAAAYYVGYLQPRTFLLKYNENGTITDAVDCALDPLSETKCTLKSFTVEKGIYQTSNFRVQPTYSIVRFPNITNLCPFGEVFNATRFASVYAWNRKRISNCVADYSVLYNSASFSTFKCYGVSPTKLNDLCFTNVYADSFVIRGDEVRQIAPGQTGKIADYNYKLPDDFTGCVIAWNSNNLDSKVGGNYNYLYRLFRKSNLKPFERDISTEIYQAGSTPCNGVEGFNCYFPLQSYGFQPTNGVGYQPYRVVVLSFELLHAPATVCGPKKSTNLVKNKCVNFNFNGLTGTGVLTESNKKFLPFQQFGRDIADTTDAVRDPQTLEILDITPCSFGGVSVITPGTNTSNQVAVLYQDVNCTEVPVAIHADQLTPTWRVYSTGSNVFQTRAGCLIGAEHVNNSYECDIPIGAGICASYQTQTNSPSGAGSVASQSIIAYTMSLGAENSVAYSNNSIAIPTNFTISVTTEILPVSMTKTSVDCTMYICGDSTECSNLLLQYGSFCTQLNRALTGIAVEQDKNTQEVFAQVKQIYKTPPIKDFGGFNFSQILPDPSKPSKRSFIEDLLFNKVTLADAGFIKQYGDCLGDIAARDLICAQKFNGLTVLPPLLTDEMIAQYTSALLAGTITSGWTFGAGAALQIPFAMQMAYRFNGIGVTQNVLYENQKLIANQFNSAIGKIQDSLSSTASALGKLQDVVNQNAQALNTLVKQLSSNFGAISSVLNDILSRLDPPEAEVQIDRLITGRLQSLQTYVTQQLIRAAEIRASANLAATKMSECVLGQSKRVDFCGKGYHLMSFPQSAPHGVVFLHVTYVPAQEKNFTTAPAICHDGKAHFPREGVFVSNGTHWFVTQRNFYEPQIITTDNTFVSGNCDVVIGIVNNTVYDPLQPELDSFKEELDKYFKNHTSPDVDLGDISGINASVVNIQKEIDRLNEVAKNLNESLIDLQELGKYEQYIKGSGRENLYFQGGGGSGYIPEAPRDGQAYVRKDGEWVLLSTFLGHHHHHHHH

SEQ ID NO: 2119 - protein, 1281 aa, Artificial Sequence
  Description of Artificial Sequence: Synthetic polypeptide
MGILPSPGMPALLSLVSLLSVLLMGCVAETGTQCVNLTTRTQLPPAYTNSFTRGVYYPDKVFRSSVLHSTQDLFLPFFSNVTWFHAIHVSGTNGTKRFDNPVLPFNDGVYFAAIEKSNIIRGWIFGTTLDSKTQSLLIVNNATNVVIKVCEFQFCNDPFLGVYYHKNNKSWMESEFRVYSSANNCTFEYVSQPFLMDLEGKQGNFKNLREFVFKNIDGYFKIYSKHTPINLVRDLPQGFSALEPLVDLPIGINITRFQTLLALHRSYLTPGDSSSGWTAGAAAYYVGYLQPRTFLLKYNENGTITDAVDCALDPLSETKCTLKSFTVEKGIYQTSNFRVQPTESIVRFPNITNLCPFGEVFNATRFASVYAWNRKRISNCVADYSVLYNSASFSTFKCYGVSPTKLNDLCFTNVYADSFVIRGDEVRQIAPGQTGKIADYNYKLPDDFTGCVIAWNSNNLDSKVGGNYNYLYRLFRKSNLKPFERDISTEIYQAGSTPCNGVEGFNCYFPLQSYGFQPTNGVGYQPYRVVVLSFELLHAPATVCGPKKSTNLVKNKCVNFNFNGLTGTGVLTESNKKFLPFQQFGRDISDTTDAVRDPQTLEILDITPCSFGGVSVVTPGTNTSNQVAVLYQDVNCTEVPVAIHADQLTPTWRVYSTGSNVFQTRAGCLIGAEHVNNSYECDIPIGAGICASYQTQTNSPSGAGSVASQSIIAYTMSLGAENSVAYSNNSIAIPTNFTISVTTEILPVSMTKTSVDCTMYICGDSTECSNLLLQYGSFCTQLNRALTGIAVEEDKNTQEVFAQVKQIYKTPPIKDFGGFNFSQILPDPSKPSKRSFIEDLLFNKVTLADAGFIKQYGDCLGDIAARDLICAQKFNGLTVLPPLLTDEMIAQYTSSLLAGTITAGWTFGAGAALQIPFAMQMAYRFNGIGVTQNVLYENQKLIANQFNSAIGKIQDSLSSTASALGKLQDVVNQNAQALNTLVKQLSSNFGAISSVLNDILSRLDPPEAEVQVDRLITGRLQSLQTYVTQQLIRAAEIRASANLAATKMSECVKGQSKRVDFCGKGYHLMSFPQSAPHGIVFLHVTYVPAQEKNFTTAPAICHDGKAHFPREGVFVSNGTHWFVTQRNFYEPQIITTDNTFVSGNCDVVIGIVNNTVYDPLQPELDSFKEELDKYFKNHTSPDVDLGDISGINASVVNIQKEIDRLNEVAKNLNESLIDLQELGKYEQYIKGSGRENLYFQGGGGSGYIPEAPRDGQAYVRKDGEWVLLSTFLGHHHHHHHH

SEQ ID NO: 2120 - protein, 1281 aa, Artificial Sequence
  Description of Artificial Sequence: Synthetic polypeptide
MGILPSPGMPALLSLVSLLSVLLMGCVAETGTQCVNLTTRTQLPPAYTNSFTRGVYYPDKVFRSSVLHSTQDLFLPFFSNVTWFHAIHVSGTNGTKRFDNPVLPFNDGVYFASTEKSNIIRGWIFGTTLDSKTQSLLIVNNATNVVIKVCEFQFCNDPFLGVYYHKNNKSWMESEFRVYSSANNCTFEYVSQPFLMDLEGKQGNFKNLREFVFKNIDGYFKIYSKHTPINLVRDLPQGFSALEPLVDLPIGINITRFQTLLALHRSYLTPGDSSSGWTAGAAAYYVGYLQPRTFLLKYNENGTITDAVDCALDPLSETKCTLKSFTVEKGIYQTSNFRVQPTESIVRFPNITNLCPFGEVFNATRFASVYAWNRKRISNCVADYSVLYNSASFSTFKCYGVSPTKLNDLCFTNVYADSFVIRGDEVRQIAPGQTGKIADYNYKLPDDFTGCVIAWNSNNLDSKVGGNYNYLYRLFRKSNLKPFERDISTEIYQAGSTPCNGVEGFNCYFPLQSYGFQPTNGVGYQPYRVVVLSFELLHAPATVCGPKKSTNLVKNKCVNFNFNGLTGTGVLTESNKKFLPFQQFGRDIADTTDAVRDPQTLEILDITPCSFGGVSVITPGTNTSNQVAVLYQDVNCTEVPVAIHADQLTPTWRVYSTGSNVFQTRAGCLIGAEHVNNSYECDIPIGAGICASYQTQTNSPSGAGSVASQSIIAYTMSLGAENSVAYSNNSIAIPTNFTISVTTEILPVSMTKTSVDCTMYICGDSTECSNLLLQYGSFCTQLNRALTGIAVEQDKNTQEVFAQVKQIYKTPPIKDFGGFNFSQILPDPSKPSKRSFIEDLLFNKVTLADAGFIKQYGDCLGDIAARDLICAQKFNGLTVLPPLLTDEMIAQYTSALLAGTITSGWTFGAGAALQIPFAMQMAYRFNGIGVTQNVLYENQKLIANQFNSAIGKIQDSLSSTASALGKLQDVVNQNAQALNTLVKQLSSNFGAISSVLNDILSRLDPPEAEVQIDRLITGRLQSLQTYVTQQLIRAAEIRASANLAAEKMSECVLGQSKRVDFCGKGYHLMSFPQSAPHGVVFLHVTYVPAQEKNFTTAPAICHDGKAHFPREGVFVSNGTHWFVTQRNFYEPQIITTDNTFVSGNCDVVIGIVNNTVYDPLQPELDSFKEELDKYFKNHTSPDVDLGDISGINASVVNIQKEIDRLNEVAKNLNESLIDLQELGKYEQYIKGSGRENLYFQGGGGSGYIPEAPRDGQAYVRKDGEWVLLSTFLGHHHHHHHH

SEQ ID NO: 2121 - protein, 1281 aa, Artificial Sequence
  Description of Artificial Sequence: Synthetic polypeptide
MGILPSPGMPALLSLVSLLSVLLMGCVAETGTQCVNLTTRTQLPPAYTNSFTRGVYYPDKVFRSSVLHSTQDLFLPFFSNVTWFHAIHVSGTNGTKRFDNPVLPFNDGVYFASTEKSNIIRGWIFGTTLDSKTQSLLIVNNATNVVIKVCEFQFCNDPFLGVYYHKNNKSWMESEFRVYSSANNCTFEYVSQPFLMDLEGKQGNFKNLREFVFKNIDGYFKIYSKHTPINLVRDLPQGFSALEPLVDLPIGINITRFQTLLALHRSYLTPGDSSSGWTAGAAAYYVGYLQPRTFLLKYNENGTITDAVDCALDPLSETKCTLKSFTVEKGIYQTSNFRVQPTESIVRFPNITNLCPFGEVFNATRFASVYAWNRKRISNCVADYSVLYNSASFSTFKCYGVSPTKLNDLCFTNVYADSFVIRGDEVRQIAPGQTGKIADYNYKLPDDFTGCVIAWNSNNLDSKVGGNYNYLYRLFRKSNLKPFERDISTEIYQAGSTPCNGVEGFNCYFPLQSYGFQPTNGVGYQPYRVVVLSFELLHAPATVCGPKKSTNLVKNKCVNFNFNGLTGTGVLTESNKKFLPFQQFGRDIADTTDAVRDPQTLEILDITPCSFGGVSVITPGTNTSNQVAVLYQDVNCTEVPVAIHADQLTPTWRVYSTGSNVFQTRAGCLIGAEHVNNSYECDIPIGAGICASYQTQTNSPSGAGSVASQSIIAYTMSLGAENSVAYSNNSIAIPTNFTISVTTEILPVSMTKTSVDCTMYICGDSTECSNLLLQYGSFCTQLNRALTGIAVEQDKNTQEVFAQVKQIYKTPPIKDFGGFNFSQILPDPSKPSKRSFIEDLLFNKVTLADAGFIKQYGDCLGDIAARDLICAQKFNGLTVLPPLLTDEMIAQYTSALLAGTITSGWTFGAGAALQIPFAMQMAYRFNGIGVTQNVLYENQKLIANQFNSAIGKIQDSLSSTASALGKLQDVVNQNAQALNTLVKQLSSNFGAISSVLNDILSRLDPPEAEVQIDRLITGRLQSLQTYVTQQLIRAAEIRASANLAATKMSECVLGQSKRVDFCGKGYHLMSFPQSAPHGVVFLHVTYVPAQEKNFTTAPGICHDGKAHFPREGVFVSNGTHWFVTQRNFYEPQIITTDNTFVSGNCDVVIGIVNNTVYDPLQPELDSFKEELDKYFKNHTSPDVDLGDISGINASVVNIQKEIDRLNEVAKNLNESLIDLQELGKYEQYIKGSGRENLYFQGGGGSGYIPEAPRDGQAYVRKDGEWVLLSTFLGHHHHHHHH

SEQ ID NO: 2122 - protein, 1281 aa, Artificial Sequence
  Description of Artificial Sequence: Synthetic polypeptide
MGILPSPGMPALLSLVSLLSVLLMGCVAETGTQCVNLTTRTQLPPAYTNSFTRGVYYPDKVFRSSVLHSTQDLFLPFFSNVTWFHAIHVSGTNGTKRFDNPVLPFNDGVYFASTEKSNIIRGWIFGTTLDSKTQSLLIVNNATNVVIKVCEFQFCNDPFLGVYYHKNNKSWMESEFRVYSSANNCTFEYVSQPFLMDLEGKQGNFKNLREFVFKNIDGYFKIYSKHTPINLVRDLPQGFSALEPLVDLPIGINITRFQTLLALHRSYLTPGDSSSGWTAGAAAYYVGYLQPRTFLLKYNENGTITDAVDCALDPLSETKCTLKSFTVEKGIYQTSNFRVQPTESIVRFPNITNLCPFGEVFNATRFASVYAWNRKRISNCVADYSVLYNSASFSTFKCYGVSPTKLNDLCFTNVYADSFVIRGDEVRQIAPGQTGKIADYNYKLPDDFTGCVIAWNSNNLDSKVGGNYNYLYRLFRKSNLKPFERDISTEIYQAGSTPCNGVEGFNCYFPLQSYGFQPTNGVGYQPYRVVVLSFELLHAPATVCGPKKSTNLVKNKCVNFNFNGLTGTGVLTESNKKFLPFQQFGRDIADTTDAVRDPQTLEILDITPCSFGGVSVITPGTNTSNQVAVLYQDVNCTEVPVAIHADQLTPTWRVYSTGSNVFQTRAGCLIGAEHVNNSYECDIPIGAGICASYQTQTNSPSGAGSVASQSIIAYTMSLGAENSVAYSNNSIAIPTNFTISVTTEILPVSMTKTSVDCTMYICGDSTECSNLLLQYGSFCTQLNRALTGIAVEQDKNTQEVFAQVKQIYKTPPIKDFGGFNFSQILPDPSKPSKRSFIEDLLFNKVTLADAGFIKQYGDCLGDIAARDLICAQKFNGLTVLPPLLTDEMIAQYTSALLAGTITSGWTFGAGAALQIPFAMQMAYRFNGIGVTQNVLYENQKLIANQFNSAIGKIQDSLSSTASALGKLQDVVNQNAQALNTLVKQLSSNFGAISSVLNDILSRLDPPEAEVQIDRLITGRLQSLQTYVTQQLIRAAEIRASANLAATKMSECVLGQSKRVDFCGKGYHLMSFPQSAPHGVVFLHVTYVPAQEKNFTTAPAICHDGKAHFPREGVFVSNGTHWFVTQRNFYEPQNITTDNTFVSGNCDVVIGIVNNTVYDPLQPELDSFKEELDKYFKNHTSPDVDLGDISGINASVVNIQKEIDRLNEVAKNLNESLIDLQELGKYEQYIKGSGRENLYFQGGGGSGYIPEAPRDGQAYVRKDGEWVLLSTFLGHHHHHHHH

SEQ ID NO: 2123 - protein, 1281 aa, Artificial Sequence
  Description of Artificial Sequence: Synthetic polypeptide
MGILPSPGMPALLSLVSLLSVLLMGCVAETGTQCVNLTTRTQLPPAYTNSFTRGVYYPDKVFRSSVLHSTQDLFLPFFSNVTWFHAIHVSGTNGTKRFDNPVLPFNDGVYFASTEKSNIIRGWIFGTTLDSKTQSLLIVNNATNVVIKVCEFQFCNDPFLGVYYHKNNKSWMESEFRWYSSANNCTFEYVSQPFLMDLEGKQGNFKNLREFVFKNIDGYFKIYSKHTPINLVRDLPQGFSALEPLVDLPIGINITRFQTLLALHRSYLTPGDSSSGWTAGAAAYYVGYLQPRTFLLKYNENGTITDAVDCALDPLSETKCTLKSFTVEKGIYQTSNFRVQPTESIVRFPNITNLCPFGEVFNATRFASVYAWNRKRISNCVADYSVLYNSASFSTFKCYGVSPTKLNDLCFTNVYADSFVIRGDEVRQIAPGQTGKIADYNYKLPDDFTGCVIAWNSNNLDSKVGGNYNYLYRLFRKSNLKPFERDISTEIYQAGSTPCNGVEGFNCYFPLQSYGFQPTNGVGYQPYRVVVLSFELLHAPATVCGPKKSTNLVKNKCVNFNFNGLTGTGVLTESNKKFLPFQQFGRDIADTTDAVRDPQTLEILDITPCSFGGVSVITPGTNTSNQVAVLYQDVNCTEVPVAIHADQLTPTWRVYSTGSNVFQTRAGCLIGAEHVNNSYECDIPIGAGICASYQTQTNSPSGAGSVASQSIIAYTMSLGAENSVAYSNNSIAIPTNFTISVTTEILPVSMTKTSVDCTMYICGDSTECSNLLLQYGSFCTQLNRALTGIAVEQDKNTQEVFAQVKQIYKTPPIKDFGGFNFSQILPDPSKPSKRSFIEDLLFNKVTLADAGFIKQYGDCLGDIAARDLICAQKFNGLTVLPPLLTDEMIAQYTSALLAGTITSGWTFGAGAALQIPFAMQMAYRFNGIGVTQNVLYENQKLIANQFNSAIGKIQDSLSSTASALGKLQDVVNQNAQALNTLVKQLSSNFGAISSVLNDILSRLDPPEAEVQIDRLITGRLQSLQTYVTQQLIRAAEIRASANLAATKMSECVLGQSKRVDFCGKGYHLMSFPQSAPHGVVFLHVTYVPAQEKNFTTAPAICHDGKAHFPREGVFVSNGTHWFVTQRNFYEPQIITTDNTFVSGNCDVVIGIVNNTVYDPLQPELDSFKEELDKYFKNHTSPDVDLGDISGINASVVNIQKEIDRLNEVAKNLNESLIDLQELGKYEQYIKGSGRENLYFQGGGGSGYIPEAPRDGQAYVRKDGEWVLLSTFLGHHHHHHHH

SEQ ID NO: 2124 - protein, 1281 aa, Artificial Sequence
  Description of Artificial Sequence: Synthetic polypeptide
MGILPSPGMPALLSLVSLLSVLLMGCVAETGTQCVNLTTRTQLPPAYTNSFTRGVYYPDKVFRSDVLHSTQDLFLPFFSNVTWFHAIHVSGTNGTKRFDNPVLPFNDGVYFASTEKSNIIRGWIFGTTLDSKTQSLLIVNNATNVVIKVCEFQFCENPFLGVYYHKNNKSWMEKEFRVYSSANNCTFEYVSQPFLMDLGGKQGNFKNLREFVFKNIDGYFKIYSKHTPINLVRDLPQGFSALEPLMDLPIGINITRFQTLLALHRSYLTPGDSSSGWTAGAAAYYVGYLQPRTFLLKYNENGTITDAVDCAYDPLSETKCTLKSFTVEKGIYQTSNFRVQPTESIVRFPNITNLCPFGEVFNATRFASVYAWNRKRISNCVADYSVLYNSASFSTFKCYGVSPTKLNDLCFTNVYADSFVIRGDEVRQIAPGQTGKIADYNYKLPDDFTGCVIAWNSNNLDSKVGGNYNYLYRLFRKSNLKPFERDISTEIYQAGSTPCNGVEGFNCYFPLQSYGFQPTNGVGYQPYRVVVLSFELLHAPATVCGPKKSTNLVKNKCVNFNFNGLTGTGVLTESNKKFLPFQQFGRDIADNTDAVRDPQTLEILDITPCSFGGVSVITPGTNTSNQVAVLYQDVNCTEVPNAIHADQLTPTWRVYSTGSNVFQTRAGCLIGAEHVNNSYECDIPIGAGICASYQTQTNSPSGAGSVASQSIIAYTMSLGAENSVAYSNNSIAIPTNFTISVTTEILPVSMTKTSVDCTMYICGDSTECSNLLLQYGSFCTQLNRALQGIAQEQDKNTQEVFAQVKQIYKTPPIKDFGGFNFSQILPDPSKPSKRSFIEDLLFNKVTLADAGFIKQYGDCLGDIAARDLICAQKFNGLTVLPPLLTDEMIAQYTSALLAGTITSGWTFGAGAALQIPFAMQMAYRFNGIGVTQNVLYENQKLIANQFNQAIGKIQDSLSSTASALGKLQDVVNQNAQALNTLVKQLSSNFGAISSVLNDILSRLDPPEAEVQIDRLITGRLQSLQTYVTQQLIRAAEIRASANLAATKMSECVLGQSKRVDFCGKGYHLMSFPQSAPHGVVFLHVTYVPAQEKNFTTAPAICHDGKAFFPREGVFVSNGTQWFVTQRNFYEPQIITTDNTFVSGNCDVVIGIVNNTVYDPLQPELDSFKEELDKYFKNHTSPDVDLGDISGINASVVNIQKEIDRLNEVAKNLNESLIDLQELGKYEQYIKGSGRENLYFQGGGGSGYIPEAPRDGQAYVRKDGEWVLLSTFLGHHHHHHHH

SEQ ID NO: 2125 - protein, 1281 aa, Artificial Sequence
  Description of Artificial Sequence: Synthetic polypeptide
MGILPSPGMPALLSLVSLLSVLLMGCVAETGTQCVNLTTRTQLPPAYTNSFTRGVYYPDKVFRSSVLHSTQDLFLPFFSNVTWFHAIHVSGTNGTKRFDNPVLPFNDGVYFASTEKSNIIRGWIFGTTLDSKTQSLLIVNNATNVVIKVCEFQFCNDPFLGVYYHKNNKSWMEQEFRVYSSANNCTFEYVSQPFLMDLEGKQGNFKNLREFVFKNIDGYFKIYSKHTPINLVRDLPQGFSALEPLVDLPIGINITRFQTLLALHRSYLTPGDSSSGWTAGAAAYYVGYLQPRTFLLKYNENGTITDAVDCALDPLSETKCTLKSFTVEKGIYQTSNFRVQPTESIVRFPNITNLCPFGEVFNATRFASVYAWNRKRISNCVADYSVLYNSASFSTFKCYGVSPTKLNDLCFTNVYADSFVIRGDEVRQIAPGQTGKIADYNYKLPDDFTGCVIAWNSNNLDSKVGGNYNYLYRLFRKSNLKPFERDISTEIYQAGSTPCNGVEGFNCYFPLQSYGFQPTNGVGYQPYRVVVLSFELLHAPATVCGPKKSTNLVKNKCVNFNFNGLTGTGVLTESNKKFLPFQQFGRDIADTTDAVRDPQTLEILDITPCSFGGVSVITPGTNTSNQVAVLYQDVNCTEVPVAIHADQLTPTWRVYSTGSNVFQTRAGCLIGAEHVNNSYECDIPIGAGICASYQTQTNSPSGAGSVASQSIIAYTMSLGAENSVAYSNNSIAIPTNFTISVTTEILPVSMTKTSVDCTMYICGDSTECSNLLLQYGSFCTQLNRALTGIAVEQDKNTQEVFAQVKQIYKTPPIKDFGGFNFSQILPDPSKPSKRSFIEDLLFNKVTLADAGFIKQYGDCLGDIAARDLICAQKFNGLTVLPPLLTDEMIAQYTSALLAGTITSGWTFGAGAALQIPFAMQMAYRFNGIGVTQNVLYENQKLIANQFNSAIGKIQDSLSSTASALGKLQDVVNQNAQALNTLVKQLSSNFGAISSVLNDILSRLDPPEAEVQIDRLITGRLQSLQTYVTQQLIRAAEIRASANLAATKMSECVLGQSKRVDFCGKGYHLMSFPQSAPHGVVFLHVTYVPAQEKNFTTAPAICHDGKAHFPREGVFVSNGTHWFVTQRNFYEPQIITTDNTFVSGNCDVVIGIVNNTVYDPLQPELDSFKEELDKYFKNHTSPDVDLGDISGINASVVNIQKEIDRLNEVAKNLNESLIDLQELGKYEQYIKGSGRENLYFQGGGGSGYIPEAPRDGQAYVRKDGEWVLLSTFLGHHHHHHHH

SEQ ID NO: 2126 - protein, 1281 aa, Artificial Sequence
  Description of Artificial Sequence: Synthetic polypeptide
MGILPSPGMPALLSLVSLLSVLLMGCVAETGTQCVNLTTRTQLPPAYTNSFTRGVYYPDKIFRSSVLHLTQDLFLPFFSNVTWFHAIHVSGTNGTKRFDNPVLPFNDGVYFAATEKSNIIRGWIFGTTLDSKTQSLLIVNNATNVVIKVCEFQFCNDPFLGVYYHKNNKSWMESEFRVYSSANNCTFEYVSQPFLMDLEGKQGNFKNLREFVFKNIDGYFKIYSKYTPINLVRDLPQGFSALKPLVKLPIGINITRFQTLLALHRSYLTPGDSSSGWTAGAAAYYVGYLQPRTFLLKYNENGTITDAVDCALDPLSETKCTLKSFTVEKGIYQTSNFRVQPTESIVRFPNITNLCPFGEVFNATRFASVYAWNRKRISNCVADYSVLYNSASFSTFKCYGVSPTKLNDLCFTNVYADSFVIRGDEVRQIAPGQTGKIADYNYKLPDDFTGCVIAWNSNNLDSKVGGNYNYLYRLFRKSNLKPFERDISTEIYQAGSTPCNGVEGFNCYFPLQSYGFQPTNGVGYQPYRVVVLSFELLHAPATVCGPKKSTNLVKNKCVNFNFNGLTGTGVLTESNKKFLPFQQFGRDISDTTDAVRDPQTLEILDITPCSFGGVSVITPGTNTSNQVAVLYQDVNCTDVPVAIHADQLTPTWRVYSTGSNVFQTQAGCLIGAEHVNNSYECDIPIGAGICASYQTQTNSPSGAGSVASKSIIAYTMSLGAENSVAYSNNSIAIPTNFTISVTTEILPVSMTKTSVDCTMYICGDSTECSNLLLQYGSFCTQLNRALTGIAVEQDKNTQEVFAQVKQIYKTPPIKDFGGFNFSQILPDPSKPSKRSFIEDLLFNKVTLADAGFIKQYGDCLGDIAARDLICAQKFNGLTVLPPLLTDEMIAAYTAALLAGTATAGWTFGAGAALQIPFAMQMAYRFNGIGVTQNVLYENQKLIANQFNSAIGKIQDSLSSTASALGKLQDVVNQNAQALNTLVKQLSSNFGAISSVLNDILSRLDPPEAEVQIDRLITGRLQSLQTYVTQQLIRAAEIRASANLAATKMSECVLGQSKRVDFCGKGYHLMSFPQSAPHGVVFLHVTYVPAQEKNFTTAPAICHDGKAHFPREGVFVSNGTHWFVTQRNFYEPQIITTDNTFVSGNCDVVIGIVNNTVYDPLQPELDSFKEELDKYFKNHTSPDVDLGDISGINASVVNIQKEIDRLNEVAKNLNESLIDLQELGKYEQYIKGSGRENLYFQGGGGSGYIPEAPRDGQAYVRKDGEWVLLSTFLGHHHHHHHH

SEQ ID NO: 2127 - protein, 1281 aa, Artificial Sequence
  Description of Artificial Sequence: Synthetic polypeptide
MGILPSPGMPALLSLVSLLSVLLMGCVAETGTQCVNLTTRTQLPPAYTNSFTRGVYYPDKVFRSSVLHSTQDLFLPFFSNVTWFHAIHVSGTNGTKRFDNPVLPFNDGVYFASTEKSNIIRGWIFGTTLDSKTQSLLIVNNATNVVIKVCEFQFCNDPFLGVYYHKNNKSWMESEFRVYSSANNCTFEYVSQPFLMDLEGKQGNFKNLREFVFKNIDGYFKIYSKHTPINLVRDLPQGFSALEPLVDLPIGINITRFQTLLALHRSYLTPGDSSSGWTAGAAAYYVGYLKPRTFLLKYNENGTITDAVDCALDPLSETKCTLKSFTVEKGIYQTSNFRVQPTESIVRFPNITNLCPFGEVFNATRFASVYAWNRKRISNCVADYSVLYNSASFSTFKCYGVSPTKLNDLCFTNVYADSFVIRGDEVRQIAPGQTGKIADYNYKLPDDFTGCVIAWNSNNLDSKVGGNYNYLYRLFRKSNLKPFERDISTEIYQAGSTPCNGVEGFNCYFPLQSYGFQPTNGVGYQPYRVVVLSFELLHAPATVCGPKKSTNLVKNKCVNFNFNGLTGTGVLTESNKKFLPFQQFGRDIADTTDAVRDPQTLEILDITPCSFGGVSVITPGTNTSNQVAVLYQDVNCTEVPVAIHADQLTPTWRVYSTGSNVFQTRAGCLIGAEHVNNSYECDIPIGAGICASYQTQTNSPSGAGSVASQSIIAYTMSLGAENSVAYSNNSIAIPTNFTISVTTEILPVSMTKTSVDCTMYICGDSTECSNLLLQYGSFCTQLNRALTGIAVEQDKNTQEVFAQVKQIYKTPPIKDFGGFNFSQILPDPSKPSKRSFIEDLLFNKVTLADAGFIKQYGDCLGDIAARDLICAQKFNGLTVLPPLLTDEMIAQYTSALLAGTITSGWTFGAGAALQIPFAMQMAYRFNGIGVTQNVLYENQKLIANQFNSAIGKIQDSLSSTASALGKLQDVVNQNAQALNTLVKQLSSNFGAISSVLNDILSRLDPPEAEVQIDRLITGRLQSLQTYVTQQLIRAAEIRASANLAATKMSECVLGQSKRVDFCGKGYHLMSFPQSAPHGVVFLHVTYVPAQEKNFTTAPAICHDGKAHFPREGVFVSNGTHWFVTQRNFYEPQIITTDNTFVSGNCDVVIGIVNNTVYDPLQPELDSFKEELDKYFKNHTSPDVDLGDISGINASVVNIQKEIDRLNEVAKNLNESLIDLQELGKYEQYIKGSGRENLYFQGGGGSGYIPEAPRDGQAYVRKDGEWVLLSTFLGHHHHHHHH

SEQ ID NO: 2128 - protein, 1281 aa, Artificial Sequence
  Description of Artificial Sequence: Synthetic polypeptide
MGILPSPGMPALLSLVSLLSVLLMGCVAETGTQCVNLTTRTQLPPAYTNSFTRGVYYPDKIFRSSVLHLTQDLFLPFFSNVTWFHAIHVSGTNGTKRFDNPVLPFNDGVYFAATEKSNIIRGWIFGTTLDSKTQSLLIVNNATNVVIKVCEFQFCNDPFLGVYYHKNNKSWMESEFRVYSSANNCTFEYVSQPFLMDLEGKQGNFKNLREFVFKNIDGYFKIYSKHTPINLVRDLPQGFSALEPLVKLPIGINITRFQTLLALHRSYLTPGDSSSGWTAGAAAYYVGYLQPRTFLLKYNENGTITDAVDCALDPLSETKCTLKSFTVEKGIYQTSNFRVQPTESIVRFPNITNLCPFGEVFNATRFASVYAWNRKRISNCVADYSVLYNSASFSTFKCYGVSPTKLNDLCFTNVYADSFVIRGDEVRQIAPGQTGKIADYNYKLPDDFTGCVIAWNSNNLDSKVGGNYNYLYRLFRKSNLKPFERDISTEIYQAGSTPCNGVEGFNCYFPLQSYGFQPTNGVGYQPYRVVVLSFELLHAPATVCGPKKSTNLVKNKCVNFNFNGLTGTGVLTESNKKFLPFQQFGRDISDTTDAVRDPQTLEILDITPCSFGGVSVITPGTNTSNQVAVLYQDVNCTDVPVAIHADQLTPTWRVYSTGSNVFQTQAGCLIGAEHVNNSYECDIPIGAGICASYQTQTNSPSGAGSVASKSIIAYTMSLGAENSVAYSNNSIAIPTNFTISVTTEILPVSMTKTSVDCTMYICGDSTECSNLLLQYGSFCTQLNRALTGIAVEQDKNTQEVFAQVKQIYKTPPIKDFGGFNFSQILPDPSKPSKRSFIEDLLFNKVTLADAGFIKQYGDCLGDIAARDLICAQKFNGLTVLPPLLTDEMIAAYTAALLAGTATAGWTFGAGAALQIPFAMQMAYRFNGIGVTQNVLYENQKLIANQFNSAIGKIQDSLSSTASALGKLQDVVNQNAQALNTLVKQLSSNFGAISSVLNDILSRLDPPEAEVQIDRLITGRLQSLQTYVTQQLIRAAEIRASANLAATKMSECVLGQSKRVDFCGKGYHLMSFPQSAPHGVVFLHVTYVPAQEKNFTTAPAICHDGKAHFPREGVFVSNGTHWFVTQRNFYEPQIITTDNTFVSGNCDVVIGIVNNTVYDPLQPELDSFKEELDKYFKNHTSPDVDLGDISGINASVVNIQKEIDRLNEVAKNLNESLIDLQELGKYEQYIKGSGRENLYFQGGGGSGYIPEAPRDGQAYVRKDGEWVLLSTFLGHHHHHHHH

SEQ ID NO: 2129 - protein, 1281 aa, Artificial Sequence
  Description of Artificial Sequence: Synthetic polypeptide
MGILPSPGMPALLSLVSLLSVLLMGCVAETGTQCVNLTTRTQLPPAYTNSFTRGVYYPDKVFRSSVLHSTQDLFLPFFSNVTWFHAIHVSGTNGTKRFDNPVLPFNDGVYFASTEKSNIIRGWIFGTTLDSKTQSLLIVNNATNVVIKVCEFQFCNDPFLGVYYHKNNKSWMESEFRVYSSANNCTFEYVSQPFLMDLEGKQGNFKNLREFVFKNIDGYFKIYSKHTPINLVRDLPQGFSALEPLVDLPIGINITRFQTLLALHRSYLTPGDSSSGWTAGAAAYYVGYLQPRTFLLKYNENGTITDAVDCALDPLSETKCTLKSFTVEKGIYQTSNFRVQPTESIVRFPNITNLCPFGEVFNATRFASVYAWNRKRISNCVADYSVLYNSASFSTFKCYGVSPTKLNDLCFTNVYADSFVIRGDEVRQIAPGQTGKIADYNYKLPDDFTGCVIAWNSNNLDSKVGGNYNYLYRLFRKSNLKPFERDISTEIYQAGSTPCNGVEGFNCYFPLQSYGFQPTNGVGYQPYRVVVLSFELLHAPATVCGPKKSTNLVKNKCVNFNFNGLTGTGVLTESNKKFLPFQQFGRDIADTTDAVRDPQTLEILDITPCSFGGVSVITPGTNTSNQVAVLYQDVNCTEVPVAIHADQLTPTWRVYSTGSNVFQTRAGCLIGAEHVNNSYECDIPIGAGICASYQTQTNSPSGAGSVASQSIIAYTMSLGAENSVAYSNNSIAIPTNFTISVTTEILPVSMTKTSVDCTMYICGDSTECSNLLLQYGSFCTQLNRALTGIAVEQDKNTQEVFAQVKQIYKTPPIKDFGGFNFSQILPDPSKPSKRSFIEDLLFNKVTLADAGFIKQYGDCLGDIAARDLICAQKFNGLTVLPPLLTDEMIAQYTSALLAGTITSGWTFGAGAALQIPFAMQMAYRFNGIGVTQNVLYENQKLIANQFNSAIGKIQDSLSSTASALGKLQDVVNQNAQALKTLVKQLSSNFGAISSVLNDILSRLDPPEAEVQIDRLITGRLQSLQTYVTQQLIRAAEIRASANLAATKMSECVLGQSKRVDFCGKGYHLMSFPQSAPHGVVFLHVTYVPAQEKNFTTAPAICHDGKAHFPREGVFVSNGTHWFVTQRNFYEPQIITTDNTFVSGNCDVVIGIVNNTVYDPLQPELDSFKEELDKYFKNHTSPDVDLGDISGINASVVNIQKEIDRLNEVAKNLNESLIDLQELGKYEQYIKGSGRENLYFQGGGGSGYIPEAPRDGQAYVRKDGEWVLLSTFLGHHHHHHHH

SEQ ID NO: 2130 - protein, 1281 aa, Artificial Sequence
  Description of Artificial Sequence: Synthetic polypeptide
MGILPSPGMPALLSLVSLLSVLLMGCVAETGTQCVNLTTRTQLPPAYTNSFTRGVYYPDKVFRSSVLHSTQDLFLPFFSNVTWFHAIHVSGTNGTKRFDNPVLPFNDGVYFAATEKSNIIRGWIFGTTLDSKTQSLLIVNNATNVVIKVCEFQFCNDPFLGVYYHKNNKSWMESEFRVYSSANNCTFEYVSQPFLYDLNGKQGNFKHLREFVFKNIDGYFKIYSKWTPINLVRDLPQGFSALEPLVDLPIGINITRFQTLLALHRSYLTPGDSSSGWTAGAAAYYVGYLQPRTFLLKYNENGTITDAVDCALDPLSETKCTLKSFTVEKGIYQTSNFRVQPTESIVRFPNITNLCPFGEVFNATRFASVYAWNRKRISNCVADYSVLYNSASFSTFKCYGVSPTKLNDLCFTNVYADSFVIRGDEVRQIAPGQTGKIADYNYKLPDDFTGCVIAWNSNNLDSKVGGNYNYLYRLFRKSNLKPFERDISTEIYQAGSTPCNGVEGFNCYFPLQSYGFQPTNGVGYQPYRVVVLSFELLHAPATVCGPKKSTNLVKNKCVNFNFNGLTGTGVLTESNKKFLPFQQFGRDIADTTDAVRDPQTLEILDITPCSFGGVSVITPGTNTSNQVAVLYQDVNCTEVPVAIHADQLTPTWRVYSTGSNVFQTRAGCLIGAEHVNNSYECDIPIGAGICASYQTQTNSPSGAGSVASQSIIAYTMSLGAENSVAYSNNSIAIPTNFTISVTTEILPVSMTKTSVDCTMYICGDSTECSNLLLQYGSFCTQLNRALTGIAVEQDKNTQEVFAQVKQIYKTPPIKDFGGFNFSQILPDPSKPSKRSFIEDLLFNKVTLADAGFIKQYGDCLGDIAARDLICAQKFNGLTVLPPLLTDEMIAQYTSALLAGTITSGWTFGAGAALQIPFAMQMAYRFNGIGVTQNVLYENQKLIANQFNSAIGKIQDSLSSTASALGKLQDVVNQNAQALNTLVKQLSSNFGAISSVLNDILSRLDPPEAEVQIDRLITGRLQSLQTYVTQQLIRAAEIRASANLAATKMSECVLGQSKRVDFCGKGYHLMSFPQSAPHGVVFLHVTYVPAQEKNFTTAPAICHDGKAHFPREGVFVSNGTHWFVTQRNFYEPQIITTDNTFVSGNCDVVIGIVNNTVYDPLQPELDSFKEELDKYFKNHTSPDVDLGDISGINASVVNIQKEIDRLNEVAKNLNESLIDLQELGKYEQYIKGSGRENLYFQGGGGSGYIPEAPRDGQAYVRKDGEWVLLSTFLGHHHHHHHH

SEQ ID NO: 2131 - protein, 1281 aa, Artificial Sequence
  Description of Artificial Sequence: Synthetic polypeptide
MGILPSPGMPALLSLVSLLSVLLMGCVAETGTQCVNLTTRTQLPPAYTNSFTRGVYYPDKVFRSSVLHSTQDLFLPFFSNVTWFHAIHVSGTNGTKRFDNPVLPFNDGVYFAATEKSNVIRGWIFGTTLDSKTQSLLIVNNATNVVIKVCEFQFCNDPFLGVYYHKNNKSWMESEFRVYSSANNCTFEYVSKPFQMDLSGKQGNFKHLREFVFKNIDGYFKIYSKHTPINLVRDLPQGFSALEPLVDLPIGINITRFQTLLALHRSYLTPGDSSSGWTAFAAAYFVGYLQPRTFLLKYNENGTITDAVDCALDPLSETKCTLKSFTVEKGIYQTSNFRVQPTESIVRFPNITNLCPFGEVFNATRFASVYAWNRKRISNCVADYSVLYNSASFSTFKCYGVSPTKLNDLCFTNVYADSFVIRGDEVRQIAPGQTGKIADYNYKLPDDFTGCVIAWNSNNLDSKVGGNYNYLYRLFRKSNLKPFERDISTEIYQAGSTPCNGVEGFNCYFPLQSYGFQPTNGVGYQPYRVVVLSFELLHAPATVCGPKKSTNLVKNKCVNFNFNGLTGTGVLTESNKKFLPFQQFGRDIADTTDAVRDPQTLEILDITPCSFGGVSVITPGTNTSNQVAVLYQDVNCTEVPVAIHADQLTPTWRVYSTGSNVFQTRAGCLIGAEHVNNSYECDIPIGAGICASYQTQTNSPSGAGSVASQSIIAYTMSLGAENSVAYSNNSIAIPTNFTISVTTEILPVSMTKTSVDCTMYICGDSTECSNLLLQYGSFCTQLNRALTGIAVEQDKNTQEVFAQVKQIYKTPPIKDFGGFNFSQILPDPSKPSKRSFIEDLLFNKVTLADAGFIKQYGDCLGDIAARDLICAQKFNGLTVLPPLLTDEMIAQYTSALLAGTITSGWTFGAGAALQIPFAMQMAYRFNGIGVTQNVLYENQKLIANQFNSAIGKIQDSLSSTASALGKLQDVVNQNAQALNTLVKQLSSNFGAISSVLNDILSRLDPPEAEVQIDRLITGRLQSLQTYVTQQLIRAAEIRASANLAATKMSECVLGQSKRVDFCGKGYHLMSFPQSAPHGVVFLHVTYVPAQEKNFTTAPAICHDGKAHFPREGVFVSNGTHWFVTQRNFYEPQIITTDNTFVSGNCDVVIGIVNNTVYDPLQPELDSFKEELDKYFKNHTSPDVDLGDISGINASVVNIQKEIDRLNEVAKNLNESLIDLQELGKYEQYIKGSGRENLYFQGGGGSGYIPEAPRDGQAYVRKDGEWVLLSTFLGHHHHHHHH

SEQ ID NO: 2132 - protein, 1281 aa, Artificial Sequence
  Description of Artificial Sequence: Synthetic polypeptide
MGILPSPGMPALLSLVSLLSVLLMGCVAETGTQCVNLTTRTQLPPAYTNSFTRGVYYPDKVFRSSVLHSTQDLFLPFFSNVTWFHAIHVSGTNGTKRFDNPVLPFNDGVYFASTEKSNIIRGWIFGTTLDSKTQSLLIVNNATNVVIKVCEFQFCNDPFLGVYYHKNNKSWMESEFRVYSSANNCTFEYVSQPFTMDLEGKQGNFKNLREFVFKNIDGYFKIYSKHTPINLVRDLPQGFSALEPLVDLPIGINITRFQTLLALHRSYLTPGDSSSGWTAGAAAYYVGYLQPRTFLLKYNENGTITDAVDCALDPLSETKCTLKSFTVEKGIYQTSNFRVQPTESIVRFPNITNLCPFGEVFNATRFASVYAWNRKRISNCVADYSVLYNSASFSTFKCYGVSPTKLNDLCFTNVYADSFVIRGDEVRQIAPGQTGKIADYNYKLPDDFTGCVIAWNSNNLDSKVGGNYNYLYRLFRKSNLKPFERDISTEIYQAGSTPCNGVEGFNCYFPLQSYGFQPTNGVGYQPYRVVVLSFELLHAPATVCGPKKSTNLVKNKCVNFNFNGLTGTGVLTESNKKFLPFQQFGRDIADTTDAVRDPQTLEILDITPCSFGGVSVITPGTNTSNQVAVLYQDVNCTEVPVAIHADQLTPTWRVYSTGSNVFQTRAGCLIGAEHVNNSYECDIPIGAGICASYQTQTNSPSGAGSVASQSIIAYTMSLGAENSVAYSNNSIAIPTNFTISVTTEILPVSMTKTSVDCTMYICGDSTECSNLLLQYGSFCTQLNRALTGIAVEQDKNTQEVFAQVKQIYKTPPIKDFGGFNFSQILPDPSKPSKRSFIEDLLFNKVTLADAGFIKQYGDCLGDIAARDLICAQKFNGLTVLPPLLTDEMIAQYTSALLAGTITSGWTFGAGAALQIPFAMQMAYRFNGIGVTQNVLYENQKLIANQFNSAIGKIQDSLSSTASALGKLQDVVNQNAQALNTLVKQLSSNFGAISSVLNDILSRLDPPEAEVQIDRLITGRLQSLQTYVTQQLIRAAEIRASANLAATKMSECVLGQSKRVDFCGKGYHLMSFPQSAPHGVVFLHVTYVPAQEKNFTTAPAICHDGKAHFPREGVFVSNGTHWFVTQRNFYEPQIITTDNTFVSGNCDVVIGIVNNTVYDPLQPELDSFKEELDKYFKNHTSPDVDLGDISGINASVVNIQKEIDRLNEVAKNLNESLIDLQELGKYEQYIKGSGRENLYFQGGGGSGYIPEAPRDGQAYVRKDGEWVLLSTFLGHHHHHHHH

SEQ ID NO: 2133 - protein, 1281 aa, Artificial Sequence
  Description of Artificial Sequence: Synthetic polypeptide
MGILPSPGMPALLSLVSLLSVLLMGCVAETGTQCVNLTTRTQLPPAYTNSFTRGVYYPDKVFRSSVLHSTQDLFLPFFSNVTWFHAIHVSGTNGTKRFDNPVLPFNDGVYFASTEKSNIIRGWIFGTTLDSKTQSLLIVNNATNVVIKVCEFQFCNDPFLGVYYHKNNKSWMESEFRVYSSANNCTFEYVSQPFLMDLEGKQGNFKNLREFVFKNIDGYFKIYSKHTPINLVRDLPQGFSALEPLVDLPIGINITRFQTLLALHRSYLTPGDSSSGWTAGAAAYYVGYLQPRTFLLKYNENGTITDAVDCALDPLSETKCTLKSFTVEKGIYQTSNFRVQPTESIVRFPNITNLCPFGEVFNATRFASVYAWNRKRISNCVADYSVLYNSASFSTFKCYGVSPTKLNDLCFTNVYADSFVIRGDEVRQIAPGQTGKIADYNYKLPDDFTGCVIAWNSNNLDSKVGGNYNYLYRLFRKSNLKPFERDISTEIYQAGSTPCNGVEGFNCYFPLQSYGFQPTNGVGYQPYRVVVLSFELLHAPATVCGPKKSTNLVKNKCVNFNFNGLTGTGVLTESNKKFLPFQQFGRDIADTTDAVRDPQTLEILDITPCSFGGVSVITPGTNTSNQVAVLYQDVNCTEVPVAIHADQLTPTWRVYSTGSNVFQTRAGCLIGAEHVNNSYECDIPIGAGICASYQTQTNSPSGAGSVASQSIIAYTMSLGAENSVAYSNNSIAIPTNFTISVTTEILPVSMTKTSVDCTMYICGDSTECSNLLLQYGSFCTQLNRALTGIAVEQDKNTQEVFAQVKQIYKTPPIKDFGGFNFSQILPDPSKPSKRSFIEDLLFNKVTLADAGFIKQYGDCLGDIAARDLICAQKFNGLTVLPPLLTDEMIAQYTSALLAGTITSGWTFGAGAALQIPFAMQMAYRFNGIGVTQNVLYENQKLIANQFNSAIGKIQDSLSSTASALGKLQDVVNQNAQALNTLVKQLSSNFGAISSVLNDILSRLDPPEAEVQIDRLITGRLQSLQTYVTQQLIRAAEIRASANLAATKMSECVLGQSKRVDFCGKGYHLMSFPQSAPHGVVFLHVTYVPAQEKNFTTAPAICHDGKAHFPREGVFVSNGTHWFVTQRNFYEPQPITTDNTFVSGNCDVVIGIVNNTVYDPLQPELDSFKEELDKYFKNHTSPDVDLGDISGINASVVNIQKEIDRLNEVAKNLNESLIDLQELGKYEQYIKGSGRENLYFQGGGGSGYIPEAPRDGQAYVRKDGEWVLLSTFLGHHHHHHHH

SEQ ID NO: 2134 - protein, 1281 aa, Artificial Sequence
  Description of Artificial Sequence: Synthetic polypeptide
MGILPSPGMPALLSLVSLLSVLLMGCVAETGTQCVNLTTRTQLPPAYTNSFTRGVYYPDKVFRSSVLHSTQDLFLPFFSNVTWFHAIHVSGTNGTKRFDNPVLPFNDGVYFASTEKSNIIRGWIFGTTLDSKTQSLLIVNNATNVVIKVCEFQFCNDPFLGVYYHKNNKSWMESEFRVYSSANNCTFEYVSQPFLMDLEGKQGNFKNLREFVFKNIDGYFKIYSKHTPINLVRDLPQGFSALEPLVDLPIGINITRFQTLLALHRSYLTPGDSSSGWTAGAAAYYVGYLQPRTFLLKYNENGTITDAVDCALDPLSETKCTLKSFTVEKGIYQTSNFRVQPTESIVRFPNITNLCPFGEVFNATRFASVYAWNRKRISNCVADYSVLYNSASFSTFKCYGVSPTKLNDLCFTNVYADSFVIRGDEVRQIAPGQTGKIADYNYKLPDDFTGCVIAWNSNNLDSKVGGNYNYLYRLFRKSNLKPFERDISTEIYQAGSTPCNGVEGFNCYFPLQSYGFQPTNGVGYQPYRVVVLSFELLHAPATVCGPKKSTNLVKNKCVNFNFNGLTGTGVLTESNKKFLPFQQFGRDIADTTDAVRDPTTLEILDITPCSFGGVSVITPGTNTSNQVAVLYQDVNCTEVPVAIHADQLTPTWRVYSTGSNVFQTRAGCLIGAEHVNNSYECDIPIGAGICASYQTQTNSPSGAGSVASQSIIAYTMSLGAENSVAYSNNSIAIPTNFTISVTTEILPVSMTKTSVDCTMYICGDSTECSNLLLQYGSFCTQLNRALTGIAVEQDKNTQEVFAQVKQIYKTPPIKDFGGFNFSQILPDPSKPSKRSFIEDLLFNKVTLADAGFIKQYGDCLGDIAARDLICAQKFNGLTVLPPLLTDEMIAQYTSALLAGTITSGWTFGAGAALQIPFAMQMAYRFNGIGVTQNVLYENQKLIANQFNSAIGKIQDSLSSTASALGKLQDVVNQNAQALNTLVKQLSSNFGAISSVLNDILSRLDPPEAEVQIDRLITGRLQSLQTYVTQQLIRAAEIRASANLAATKMSECVLGQSKRVDFCGKGYHLMSFPQSAPHGVVFLHVTYVPAQEKNFTTAPAICHDGKAHFPREGVFVSNGTHWFVTQRNFYEPQIITTDNTFVSGNCDVVIGIVNNTVYDPLQPELDSFKEELDKYFKNHTSPDVDLGDISGINASVVNIQKEIDRLNEVAKNLNESLIDLQELGKYEQYIKGSGRENLYFQGGGGSGYIPEAPRDGQAYVRKDGEWVLLSTFLGHHHHHHHH

SEQ ID NO: 2135 - protein, 1281 aa, Artificial Sequence
  Description of Artificial Sequence: Synthetic polypeptide
MGILPSPGMPALLSLVSLLSVLLMGCVAETGTQCVNLTTRTQLPPAYTNSFTRGVYYPDKIFRSSVLHLTQDLFLPFFSNVTWFHAIHVSGTNGTKRFDNPVLPFNDGVYFAATEKSNIIRGWIFGTTLDSKTQSLLIVNNATNVVIKVCEFQFCNDPFLGVYYHKNNKSWMESEFRVYSSANNCTFEYVSQPFLMDLEGKQGNFKNLREFVFKNIDGYFKIYSKYTPINLVRDLPQGFSALEPLVKLPIGINITRFQTLLALHRSYLTPGDSSSGWTAGAAAYYVGYLQPRTFLLKYNENGTITDAVDCALDPLSETKCTLKSFTVEKGIYQTSNFRVQPTESIVRFPNITNLCPFGEVFNATRFASVYAWNRKRISNCVADYSVLYNSASFSTFKCYGVSPTKLNDLCFTNVYADSFVIRGDEVRQIAPGQTGKIADYNYKLPDDFTGCVIAWNSNNLDSKVGGNYNYLYRLFRKSNLKPFERDISTEIYQAGSTPCNGVEGFNCYFPLQSYGFQPTNGVGYQPYRVVVLSFELLHAPATVCGPKKSTNLVKNKCVNFNFNGLTGTGVLTESNKKFLPFQQFGRDISDTTDAVRDPQTLEILDITPCSFGGVSVITPGTNTSNQVAVLYQDVNCTDVPVAIHADQLTPTWRVYSTGSNVFQTQAGCLIGAEHVNNSYECDIPIGAGICASYQTQTNSPSGAGSVASQSIIAYTMSLGAENSVAYSNNSIAIPTNFTISVTTEILPVSMTKTSVDCTMYICGDSTECSNLLLQYGSFCTQLNRALTGIAVEQDKNTQEVFAQVKQIYKTPPIKDFGGFNFSQILPDPSKPSKRSFIEDLLFNKVTLADAGFIKQYGDCLGDIAARDLICAQKFNGLTVLPPLLTDEMIAAYTAALLAGTITAGWTFGAGAALQIPFAMQMAYRFNGIGVTQNVLYENQKLIANQFNSAIGKIQDSLSSTASALGKLQDVVNQNAQALNTLVKQLSSNFGAISSVLNDILSRLDPPEAEVQIDRLITGRLQSLQTYVTQQLIRAAEIRASANLAATKMSECVLGQSKRVDFCGKGYHLMSFPQSAPHGVVFLHVTYVPAQEKNFTTAPAICHDGKAHFPREGVFVSNGTHWFVTQRNFYEPQIITTDNTFVSGNCDVVIGIVNNTVYDPLQPELDSFKEELDKYFKNHTSPDVDLGDISGINASVVNIQKEIDRLNEVAKNLNESLIDLQELGKYEQYIKGSGRENLYFQGGGGSGYIPEAPRDGQAYVRKDGEWVLLSTFLGHHHHHHHH

SEQ ID NO: 2136 - protein, 1281 aa, Artificial Sequence
  Description of Artificial Sequence: Synthetic polypeptide
MGILPSPGMPALLSLVSLLSVLLMGCVAETGTQCVNLTTRTQLPPAYTNSFTRGVYYPDKVFRSSVLHSTQDLFLPFFSNVTWFHAIHVSGTNGTKRFDNPVLPFNDGVYFASTEKSNIIRGWIFGTTLDSKTQSLLIVNNATNVVIKVCEFQFCNDPFLGVYYHKNNKSWMESEFRVYSSANNCTFEYVSKPFLMDLEGKQGNFKNLREFVFKNIDGYFKIYSKHTPINLVRDLPQGFSALEPLVDLPIGINITRFQTLLALHRSYLTPGDSSSGWTAGAAAYYVGYLQPRTFLLKYNENGTITDAVDCALDPLSETKCTLKSFTVEKGIYQTSNFRVQPTESIVRFPNITNLCPFGEVFNATRFASVYAWNRKRISNCVADYSVLYNSASFSTFKCYGVSPTKLNDLCFTNVYADSFVIRGDEVRQIAPGQTGKIADYNYKLPDDFTGCVIAWNSNNLDSKVGGNYNYLYRLFRKSNLKPFERDISTEIYQAGSTPCNGVEGFNCYFPLQSYGFQPTNGVGYQPYRVVVLSFELLHAPATVCGPKKSTNLVKNKCVNFNFNGLTGTGVLTESNKKFLPFQQFGRDIADTTDAVRDPQTLEILDITPCSFGGVSVITPGTNTSNQVAVLYQDVNCTEVPVAIHADQLTPTWRVYSTGSNVFQTRAGCLIGAEHVNNSYECDIPIGAGICASYQTQTNSPSGAGSVASQSIIAYTMSLGAENSVAYSNNSIAIPTNFTISVTTEILPVSMTKTSVDCTMYICGDSTECSNLLLQYGSFCTQLNRALTGIAVEQDKNTQEVFAQVKQIYKTPPIKDFGGFNFSQILPDPSKPSKRSFIEDLLFNKVTLADAGFIKQYGDCLGDIAARDLICAQKFNGLTVLPPLLTDEMIAQYTSALLAGTITSGWTFGAGAALQIPFAMQMAYRFNGIGVTQNVLYENQKLIANQFNSAIGKIQDSLSSTASALGKLQDVVNQNAQALNTLVKQLSSNFGAISSVLNDILSRLDPPEAEVQIDRLITGRLQSLQTYVTQQLIRAAEIRASANLAATKMSECVLGQSKRVDFCGKGYHLMSFPQSAPHGVVFLHVTYVPAQEKNFTTAPAICHDGKAHFPREGVFVSNGTHWFVTQRNFYEPQIITTDNTFVSGNCDVVIGIVNNTVYDPLQPELDSFKEELDKYFKNHTSPDVDLGDISGINASVVNIQKEIDRLNEVAKNLNESLIDLQELGKYEQYIKGSGRENLYFQGGGGSGYIPEAPRDGQAYVRKDGEWVLLSTFLGHHHHHHHH

SEQ ID NO: 2137 - protein, 1281 aa, Artificial Sequence
  Description of Artificial Sequence: Synthetic polypeptide
MGILPSPGMPALLSLVSLLSVLLMGCVAETGTQCVNLTTRTQLPPAYTNSFTRGVYYPDKVFRSSVLHSTQDLFLPFFSNVTWFHAIHVSGTNGTKRFDNPVLPFNDGVYFASTEKSNIIRGWIFGTTLDSKTQSLLIVNNATNVVIKVCEFQFCNDPFLGVYYHKNNKSWMESEFRVYSSANNCTFEYVSQPFLMDLEGKQGNFKNLREFVFKNIDGYFKIYSKHTPINLVRDLPQGFSALEPLVDLPIGINITRFQTLLALHRSYLTPGDSSSGWTAGAAAYYVGYLQPRTFLLKYNENGTITDAVDCALDPLSETKCTLKSFTVEKGIYQTSNFRVQPTESIVRFPNITNLCPFGEVFNATRFASVYAWNRKRISNCVADYSVLYNSASFSTFKCYGVSPTKLNDLCFTNVYADSFVIRGDEVRQIAPGQTGKIADYNYKLPDDFTGCVIAWNSNNLDSKVGGNYNYLYRLFRKSNLKPFERDISTEIYQAGSTPCNGVEGFNCYFPLQSYGFQPTNGVGYQPYRVVVLSFELLHAPATVCGPKKSTNLVKNKCVNFNFNGLTGTGVLTESNKKFLPFQQFGRDIADTTDAVRDPQTLEILDITPCSFGGVSVITPGTNTSNQVAVLYQDVNCTEVPVAIHADQLTPTWRVYSTGSNVFQTRAGCLIGAEHVNNSYECDIPIGAGICASYQTQTNSPSGAGSVASQSIIAYTMSLGAENSVAYSNNSIAIPTNFTISVTTEILPVSMTKTSVDCTMYICGDSTECSNLLLQYGSFCTQLNRALTGIAREQDKNTQEVFAQVKQIYKTPPIKDFGGFNFSQILPDPSKPSKRSFIEDLLFNKVTLADAGFIKQYGDCLGDIAARDLICAQKFNGLTVLPPLLTDEMIAQYTSALLAGTITSGWTFGAGAALQIPFAMQMAYRFNGIGVTQNVLYENQKLIANQFNSAIGKIQDSLSSTASALGKLQDVVNQNAQALNTLVKQLSSNFGAISSVLNDILSRLDPPEAEVQIDRLITGRLQSLQTYVTQQLIRAAEIRASANLAATKMSECVLGQSKRVDFCGKGYHLMSFPQSAPHGVVFLHVTYVPAQEKNFTTAPAICHDGKAHFPREGVFVSNGTHWFVTQRNFYEPQIITTDNTFVSGNCDVVIGIVNNTVYDPLQPELDSFKEELDKYFKNHTSPDVDLGDISGINASVVNIQKEIDRLNEVAKNLNESLIDLQELGKYEQYIKGSGRENLYFQGGGGSGYIPEAPRDGQAYVRKDGEWVLLSTFLGHHHHHHHH

SEQ ID NO: 2138 - protein, 1281 aa, Artificial Sequence
  Description of Artificial Sequence: Synthetic polypeptide
MGILPSPGMPALLSLVSLLSVLLMGCVAETGTQCVNLTTRTQLPPAYTNSFTRGVYYPDKVFRSSVLHSTQDLFLPFFSNVTWFHAIHVSGTNGTKRFDNPVLPFNDGVYFASTEKSNIIRGWIFGTTLDSKTQSLLIVNNATNVVIKVCEFQFCNDPFLGVYYHKNNKSWMESEFRVYSSANNCTFEYVSQPFLMDLEGKQGNFKNLREFVFKNIDGYFKIYSKHTPINLVRDLPQGFSALEPLVDLPIGINITRFQTLLALHRSYLTPGDSSSGWTAGAAAYYVGYLQPRTFLLKYNENGTITDAVDCALDPLSETKCTLKSFTVEKGIYQTSNFRVQPTESIVRFPNITNLCPFGEVFNATRFASVYAWNRKRISNCVADYSVLYNSASFSTFKCYGVSPTKLNDLCFTNVYADSFVIRGDEVRQIAPGQTGKIADYNYKLPDDFTGCVIAWNSNNLDSKVGGNYNYLYRLFRKSNLKPFERDISTEIYQAGSTPCNGVEGFNCYFPLQSYGFQPTNGVGYQPYRVVVLSFELLHAPATVCGPKKSTNLVKNKCVNFNFNGLTGTGVLTESNKKFLPFQQFGRDIADTTDAVRDPQTLEILDITPCSFGGVSVITPGTNTSNQVAVLYQDVNCTEVPVAIHADQLTPTWRVYSTGSNVFQTRAGCLIGAEHVNNSYECDIPIGAGICASYQTQTNSPSGAGSVASQSIIAYTMSLGAENSVAYSNNSIAIPTNFTISVTTEILPVSMTKTSVDCTMYICGDSTECSNLLLQYGSFCDQLNRALTGIAVEQDKNTQEVFAQVKQIYKTPPIKDFGGFNFSQILPDPSKPSKRSFIEDLLFNKVTLADAGFIKQYGDCLGDIAARDLICAQKFNGLTVLPPLLTDEMIAQYTSALLAGTITSGWTFGAGAALQIPFAMQMAYRFNGIGVTQNVLYENQKLIANQFNSAIGKIQDSLSSTASALGKLQDVVNQNAQALNTLVKQLSSNFGAISSVLNDILSRLDPPEAEVQIDRLITGRLQSLQTYVTQQLIRAAEIRASANLAATKMSECVLGQSKRVDFCGKGYHLMSFPQSAPHGVVFLHVTYVPAQEKNFTTAPAICHDGKAHFPREGVFVSNGTHWFVTQRNFYEPQIITTDNTFVSGNCDVVIGIVNNTVYDPLQPELDSFKEELDKYFKNHTSPDVDLGDISGINASVVNIQKEIDRLNEVAKNLNESLIDLQELGKYEQYIKGSGRENLYFQGGGGSGYIPEAPRDGQAYVRKDGEWVLLSTFLGHHHHHHHH

SEQ ID NO: 2139 - protein, 1281 aa, Artificial Sequence
  Description of Artificial Sequence: Synthetic polypeptide
MGILPSPGMPALLSLVSLLSVLLMGCVAETGTQCVNLTTRTQLPPAYTNSFTRGVYYPDKVFRSDVLHSTQDLFLPFFSNVTWFHAIHVSGTNGTKRFDNPVLPFNDGVYFASTEKSNIIRGWIFGTTLDSKTQSLLIVNNATNVVIKVCEFQFCDDPFLGVYYHKNNKSWMEKEFRVYSSANNCTFEYVSQPFLMDLGGKQGNFKWLREFVFKNIDGYFKIYSKHTPINLVRDLPQGFSALEPLMDLPIGINITRFQTLLALHRSYLTPGDSSSGWTAGAAAYYVGYLQPRTFLLKYNENGTITDAVDCALDPLSETKCTLKSFTVEKGIYQTSNFRVQPTESIVRFPNITNLCPFGEVFNATRFASVYAWNRKRISNCVADYSVLYNSASFSTFKCYGVSPTKLNDLCFTNVYADSFVIRGDEVRQIAPGQTGKIADYNYKLPDDFTGCVIAWNSNNLDSKVGGNYNYLYRLFRKSNLKPFERDISTEIYQAGSTPCNGVEGFNCYFPLQSYGFQPTNGVGYQPYRVVVLSFELLHAPATVCGPKKSTNLVKNKCVNFNFNGLTGTGVLTESNKKFLPFQQFGRDIADNTDAVRDPQTLEILDITPCSFGGVSVITPGTNTSNQVAVLYQDVNCTEVPNAIHADQLTPTWRVYSTGSNVFQTRAGCLIGAEHVNNSYECDIPIGAGICASYQTQTNSPSGAGSVASQSIIAYTMSLGAENSVAYSNNSIAIPTNFTISVTTEILPVSMTKTSVDCTMYICGDSTECSNLLLQYGSFCTQLNRALQGIAREQDKNTQEVFAQVKQIYKTPPIKDFGGFNFSQILPDPSKPSKRSFIEDLLFNKVTLADAGFIKQYGDCLGDIAARDLICAQKFNGLTVLPPLLTDEMIAQYTSALLAGTITSGWTFGAGAALQIPFAMQMAYRFNGIGVTQNVLYENQKLIANQFNKAIGKIQDSLSSTASALGKLQDVVNQNAQALNTLVKQLSSNFGAISSVLNDILSRLDPPEAEVQIDRLITGRLQSLQTYVTQQLIRAAEIRASANLAATKMSECVLGQSKRVDFCGKGYHLMSFPQSAPHGVVFLHVTYVPAQEKNFTTAPAICHDGKAFFPREGVFVSNGTQWFVTQRNFYEPQIITTDNTFVSGNCDVVIGIVNNTVYDPLQPELDSFKEELDKYFKNHTSPDVDLGDISGINASVVNIQKEIDRLNEVAKNLNESLIDLQELGKYEQYIKGSGRENLYFQGGGGSGYIPEAPRDGQAYVRKDGEWVLLSTFLGHHHHHHHH

SEQ ID NO: 2140 - protein, 1281 aa, Artificial Sequence
  Description of Artificial Sequence: Synthetic polypeptide
MGILPSPGMPALLSLVSLLSVLLMGCVAETGTQCVNLTTRTQLPPAYTNSFTRGVYYPDKVFRSSVLHSTQDLFLPFFSNVTWFHAIHVSGTNGTKRFDNPVLPFNDGVYFASTEKSNIIRGWIFGTTLDSKTQSLLIVNNATNVVIKVCEFQFCNDPFLGVYYHKNNKSWMESEFRVYSSANNCTFEYVSQPFLMDLEGKQGNFKNLREFVFKNIDGYFKIYSKHTPINLVRDLPQGFSALEPLVDLPIGINITRFQTLLALHRSYLTPGDSSSGWTAGAAAYYVGYLQPRTFLLKYNENGTITDAVDCALDPLSETKCTLKSFTVEKGIYQTSNFRVQPTESIVRFPNITNLCPFGEVFNATRFASVYAWNRKRISNCVADYSVLYNSASFSTFKCYGVSPTKLNDLCFTNVYADSFVIRGDEVRQIAPGQTGKIADYNYKLPDDFTGCVIAWNSNNLDSKVGGNYNYLYRLFRKSNLKPFERDISTEIYQAGSTPCNGVEGFNCYFPLQSYGFQPTNGVGYQPYRVVVLSFELLHAPATVCGPKKSTNLVKNKCVNFNFNGLKGTGVLTESNKKFLPFQQFGRDIADTTDAVRDPQTLEILDITPCSFGGVSVITPGTNTSNQVAVLYQDVNCTEVPVAIHADQLTPTWRVYSTGSNVFQTRAGCLIGAEHVNNSYECDIPIGAGICASYQTQTNSPSGAGSVASQSIIAYTMSLGAENSVAYSNNSIAIPTNFTISVTTEILPVSMTKTSVDCTMYICGDSTECSNLLLQYGSFCTQLNRALTGIAVEQDKNTQEVFAQVKQIYKTPPIKDFGGFNFSQILPDPSKPSKRSFIEDLLFNKVTLADAGFIKQYGDCLGDIAARDLICAQKFNGLTVLPPLLTDEMIAQYTSALLAGTITSGWTFGAGAALQIPFAMQMAYRFNGIGVTQNVLYENQKLIANQFNSAIGKIQDSLSSTASALGKLQDVVNQNAQALNTLVKQLSSNFGAISSVLNDILSRLDPPEAEVQIDRLITGRLQSLQTYVTQQLIRAAEIRASANLAATKMSECVLGQSKRVDFCGKGYHLMSFPQSAPHGVVFLHVTYVPAQEKNFTTAPAICHDGKAHFPREGVFVSNGTHWFVTQRNFYEPQIITTDNTFVSGNCDVVIGIVNNTVYDPLQPELDSFKEELDKYFKNHTSPDVDLGDISGINASVVNIQKEIDRLNEVAKNLNESLIDLQELGKYEQYIKGSGRENLYFQGGGGSGYIPEAPRDGQAYVRKDGEWVLLSTFLGHHHHHHHH

SEQ ID NO: 2141 - protein, 1281 aa, Artificial Sequence
  Description of Artificial Sequence: Synthetic polypeptide
MGILPSPGMPALLSLVSLLSVLLMGCVAETGTQCVNLTTRTQLPPAYTNSFTRGVYYPDKVFRSSVLHSTQDLFLPFFSNVTWFHAIHVSGTNGTKRFDNPVLPFNDGVYFASTEKSNIIRGWIFGTTLDSKTQSLLIVNNATNVVIKVCEFQFCNDPFLGVYYHKNNKSWMESEFRVYSSANNCTFEYVSQPFLMDLEGKQGNFKNLREFVFKNIDGYFKIYSKHTPINLVRDLPQGFSALEPLVDLPIGINITRFQTLLALHRSYLTPGDSSSGWTAGAAAYYVGYLQPRTFLLKYNENGTITDAVDCALDPLSETKCTLKSFTVEKGIYQTSNFRVQPTESIVRFPNITNLCPFGEVFNATRFASVYAWNRKRISNCVADYSVLYNSASFSTFKCYGVSPTKLNDLCFTNVYADSFVIRGDEVRQIAPGQTGKIADYNYKLPDDFTGCVIAWNSNNLDSKVGGNYNYLYRLFRKSNLKPFERDISTEIYQAGSTPCNGVEGFNCYFPLQSYGFQPTNGVGYQPYRVVVLSFELLHAPATVCGPKKSTNLVKNKCVNFNFNGLTGTGVLTESNKKFLPFQQFGRDIADTTDAVRDPQTLEILDITPCSFGGVSVITPGTNTSNQVAVLYQDVNCTEVPVAIHADQLTPTWRVYSTGSNVFQTRAGCLIGAEHVNNSYECDIPIGAGICASYQTQTNSPSGAGSVASQSIIAYTMSLGAENSVAYSNNSIAIPTNFTISVTTEILPVSMTKTSVDCTMYICGDSTECSNLLLQYGSFCTQLNRALTGIAVEQDKNTQEVFAQVKQIYKTPPIKDFGGFNFSQILPDPSKPSKRSFIEDLLFNKVTLADAGFIKQYGDCLGDIAARDLICAQKFNGLTVLPPLLTDEMIAQYTSSLLAGTITSGWTFGAGAALQIPFAMQMAYRFNGIGVTQNVLYENQKLIANQFNSAIGKIQDSLSSTASALGKLQDVVNQNAQALNTLVKQLSSNFGAISSVLNDILSRLDPPEAEVQIDRLITGRLQSLQTYVTQQLIRAAEIRASANLAATKMSECVLGQSKRVDFCGKGYHLMSFPQSAPHGVVFLHVTYVPAQEKNFTTAPAICHDGKAHFPREGVFVSNGTHWFVTQRNFYEPQIITTDNTFVSGNCDVVIGIVNNTVYDPLQPELDSFKEELDKYFKNHTSPDVDLGDISGINASVVNIQKEIDRLNEVAKNLNESLIDLQELGKYEQYIKGSGRENLYFQGGGGSGYIPEAPRDGQAYVRKDGEWVLLSTFLGHHHHHHHH

SEQ ID NO: 2142 - protein, 1281 aa, Artificial Sequence
  Description of Artificial Sequence: Synthetic polypeptide
MGILPSPGMPALLSLVSLLSVLLMGCVAETGTQCVNLTTRTQLPPAYTNSFTRGVYYPDKVFRSSVLHSTQDLFLPFFSNVTWFHAIHVSGTNGTKRFDNPVLPFNDGVYFASTEKSNIIRGWIFGTTLDSKTQSLLIVNNATNVVIKVCEFQFCNDPFLGVYYHKNNKSWMESEFRVYSSANNCTFEYVSQPFLMDLEGKQGNFKNLREFVFKNIDGYFKIYSKHTPINLVRDLPQGFSALEPLVDLPIGINITRFQTLLALHRSYLTPGDSSSGWTAGAAAYYVGYLQPRTFLLKYNENGTITDAVDCALDPLSETKCTLKSFTVEKGIYQTSNFRVQPTESIVRFPNITNLCPFGEVFNATRFASVYAWNRKRISNCVADYSVLYNSASFSTFKCYGVSPTKLNDLCFTNVYADSFVIRGDEVRQIAPGQTGKIADYNYKLPDDFTGCVIAWNSNNLDSKVGGNYNYLYRLFRKSNLKPFERDISTEIYQAGSTPCNGVEGFNCYFPLQSYGFQPTNGVGYQPYRVVVLSFELLHAPATVCGPKKSTNLVKNKCVNFNFNGLTGTGVLTESNKKFLPFQQFGRDIADTTDAVRDPQTLEILDITPCSFGGVSVITPGTNTSNQVAVLYQDVNCTEVPSAIHADQLTPTWRVYSTGSNVFQTRAGCLIGAEHVNNSYECDIPIGAGICASYQTQTNSPSGAGSVASQSIIAYTMSLGAENSVAYSNNSIAIPTNFTISVTTEILPVSMTKTSVDCTMYICGDSTECSNLLLQYGSFCTQLNRALTGIAVEQDKNTQEVFAQVKQIYKTPPIKDFGGFNFSQILPDPSKPSKRSFIEDLLFNKVTLADAGFIKQYGDCLGDIAARDLICAQKFNGLTVLPPLLTDEMIAQYTSALLAGTITSGWTFGAGAALQIPFAMQMAYRFNGIGVTQNVLYENQKLIANQFNSAIGKIQDSLSSTASALGKLQDVVNQNAQALNTLVKQLSSNFGAISSVLNDILSRLDPPEAEVQIDRLITGRLQSLQTYVTQQLIRAAEIRASANLAATKMSECVLGQSKRVDFCGKGYHLMSFPQSAPHGVVFLHVTYVPAQEKNFTTAPAICHDGKAHFPREGVFVSNGTHWFVTQRNFYEPQIITTDNTFVSGNCDVVIGIVNNTVYDPLQPELDSFKEELDKYFKNHTSPDVDLGDISGINASVVNIQKEIDRLNEVAKNLNESLIDLQELGKYEQYIKGSGRENLYFQGGGGSGYIPEAPRDGQAYVRKDGEWVLLSTFLGHHHHHHHH

SEQ ID NO: 2143 - protein, 1281 aa, Artificial Sequence
  Description of Artificial Sequence: Synthetic polypeptide
MGILPSPGMPALLSLVSLLSVLLMGCVAETGTQCVNLTTRTQLPPAYTNSFTRGVYYPDKVFRSSVLHSTQDLFLPFFSNVTWFHAIHVSGTNGTKRFDNPVLPFNDGVYFAAIEKSNIIRGWIFGTTLDSKTQSLLIVNNATNVVIKVCEFQFCNDPFLGVYYHKNNKSWMESEFRVYSSANNCTFEYVSQPFLMDLEGKQGNFKNLREFVFKNIDGYFKIYSKHTPINLVRDLPQGFSALEPLVDLPIGINITRFQTLLALHRSYLTPGDSSSGWTAGAAAYYVGYLQPRTFLLKYNENGTITDAVDCALDPLSETKCTLKSFTVEKGIYQTSNFRVQPTESIVRFPNITNLCPFGEVFNATRFASVYAWNRKRISNCVADYSVLYNSASFSTFKCYGVSPTKLNDLCFTNVYADSFVIRGDEVRQIAPGQTGKIADYNYKLPDDFTGCVIAWNSNNLDSKVGGNYNYLYRLFRKSNLKPFERDISTEIYQAGSTPCNGVEGFNCYFPLQSYGFQPTNGVGYQPYRVVVLSFELLHAPATVCGPKKSTNLVKNKCVNFNFNGLTGTGVLTESNKKFLPFQQFGRDISDTTDAVRDPQTLEILDITPCSFGGVSVVTPGTNTSNQVAVLYQDVNCTEVPVAIHADQLTPTWRVYSTGSNVFQTRAGCLIGAEHVNNSYECDIPIGAGICASYQTQTNSPSGAGSVASQSIIAYTMSLGAENSVAYSNNSISIPTNFTISVTTEILPVSMTKTSVDCTMYICGDSTECSNLLLQYGSFCTQLNRALTGIAVEEDKNTQEVFAQVKQIYKTPPIKDFGGFNFSQILPDPSKPSKRSFIEDLLFNKVTLADAGFIKQYGDCLGDIAARDLICAQKFNGLTVLPPLLTDEMIAQYTSSLLAGTITAGWTFGAGAALQIPFAMQMAYRFNGIGVTQNVLYENQKLIANQFNSAIGKIQDSLSSTASALGKLQDVVNQNAQALNTLVKQLSSNFGAISSVLNDILSRLDPPEAEVQIDRLITGRLQSLQTYVTQQLIRAAEIRASANLAATKMSECVKGQSKRVDFCGKGYHLMSFPQSAPHGIVFLHVTYVPAQEKNFTTAPAICHDGKAHFPREGVFVSNGTHWFVTQRNFYEPQIITTDNTFVSGNCDVVIGIVNNTVYDPLQPELDSFKEELDKYFKNHTSPDVDLGDISGINASVVNIQKEIDRLNEVAKNLNESLIDLQELGKYEQYIKGSGRENLYFQGGGGSGYIPEAPRDGQAYVRKDGEWVLLSTFLGHHHHHHHH

SEQ ID NO: 2144 - protein, 1281 aa, Artificial Sequence
  Description of Artificial Sequence: Synthetic polypeptide
MGILPSPGMPALLSLVSLLSVLLMGCVAETGTQCVNLTTRTQLPPAYTNSFTRGVYYPDKVFRSSVLHSTQDLFLPFFSNVTWFHAIHVSGTNGTKRFDNPVLPFNDGVYFASTEKSNIIRGWIFGTTLDSKTQSLLIVNNATNVVIKVCEFQFCNDPFLGVYYHKNNKSWMESEFRVYSSANNCTFEYVSQPFLMDLEGKQGNFKNLREFVFKNIDGYFKIYSKHTPINLVRDLPQGFSALEPLVDLPIGINITRFQTLLALHRSYLTPGDSSSGWTAGAAAYYVGYLQPRTFLLKYNENGTITDAVDCALDPLSETKCTLKSFTVEKGIYQTSNFRVQPTESIVRFPNITNLCPFGEVFNATRFASVYAWNRKRISNCVADYSVLYNSASFSTFKCYGVSPTKLNDLCFTNVYADSFVIRGDEVRQIAPGQTGKIADYNYKLPDDFTGCVIAWNSNNLDSKVGGNYNYLYRLFRKSNLKPFERDISTEIYQAGSTPCNGVEGFNCYFPLQSYGFQPTNGVGYQPYRVVVLSFELLHAPATVCGPKKSTNLVKNKCVNFNFNGLTGTGVLTESNKKFLPFQQFGRDIADTTDAVRDPQTLEILDITPCSFGGVSVITPGTNTSNQVAVLYQDVNCTEVPVAIHADQLTPTWRVYSTGSNVFQTRAGCLIGAEHVNNSYECDIPIGAGICASYQTQTNSPSGAGSVASQSIIAYTMSLGAENSVAYSNNSIAIPTNFTISVTTEILPVSMTKTSVDCTMYICGDSTECSNLLSQYGSFCTQLNRALTGIAVEQDKNTQEVFAQVKQIYKTPPIKDFGGFNFSQILPDPSKPSKRSFIEDLLFNKVTLADAGFIKQYGDCLGDIAARDLICAQKFNGLTVLPPLLTDEMIAQYTSALLAGTITSGWTFGAGAALQIPFAMQMAYRFNGIGVTQNVLYENQKLIANQFNSAIGKIQDSLSSTASALGKLQDVVNQNAQALNTLVKQLSSNFGAISSVLNDILSRLDPPEAEVQIDRLITGRLQSLQTYVTQQLIRAAEIRASANLAATKMSECVLGQSKRVDFCGKGYHLMSFPQSAPHGVVFLHVTYVPAQEKNFTTAPAICHDGKAHFPREGVFVSNGTHWFVTQRNFYEPQIITTDNTFVSGNCDVVIGIVNNTVYDPLQPELDSFKEELDKYFKNHTSPDVDLGDISGINASVVNIQKEIDRLNEVAKNLNESLIDLQELGKYEQYIKGSGRENLYFQGGGGSGYIPEAPRDGQAYVRKDGEWVLLSTFLGHHHHHHHH

SEQ ID NO: 2145 - protein, 1281 aa, Artificial Sequence
  Description of Artificial Sequence: Synthetic polypeptide
MGILPSPGMPALLSLVSLLSVLLMGCVAETGTQCVNLTTRTQLPPAYTNSFTRGVYYPDKVFRSSVLHSTQDLFLPFFSNVTWFHAIHVSGTNGTKRFDNPVLPFNDGVYFASTEKSNIIRGWIFGTTLDSKTQSLLIVNNATNVVIKVCEFQFCNDPFLGVYYHKNNKSWMESEFRVYSSANNCTFEYVSQPFLMDLEGKQGNFKNLREFVFKNIDGYFKIYSKHTPINLVRDLPQGFSALEPLVDLPIGINITRFQTLLALHRSYLTPGDSSSGWTAGAAAYYVGYLQPRTFLLKYNENGTITDAVDCALDPLSETKCTLKSFTVEKGIYQTSNFRVQPTESIVRFPNITNLCPFGEVFNATRFASVYAWNRKRISNCVADYSVLYNSASFSTFKCYGVSPTKLNDLCFTNVYADSFVIRGDEVRQIAPGQTGKIADYNYKLPDDFTGCVIAWNSNNLDSKVGGNYNYLYRLFRKSNLKPFERDISTEIYQAGSTPCNGVEGFNCYFPLQSYGFQPTNGVGYQPYRVVVLSFELLHAPATVCGPKKSTNLVKNKCVNFNFNGLTGTGVLTESNKKFLPFQQFGRDIADTTDAVRDPQTLEILDITPCSFGGVSVITPGTNTSNQVAVLYQDVNCTEVPVAIHADQLTPTWRVYSTGSNVFQTRAGCLIGAEHVNNSYECDIPIGAGICASYQTQTNSPSGAGSVASQSIIAYTMSLGAENSVAYSNNSIAIPTNFTISVTTEILPVSMTKTSVDCTMYICGDSTECSNLLLQYGSFCTQLNRALSGIAVEQDKNTQEVFAQVKQIYKTPPIKDFGGFNFSQILPDPSKPSKRSFIEDLLFNKVTLADAGFIKQYGDCLGDIAARDLICAQKFNGLTVLPPLLTDEMIAQYTSALLAGTITSGWTFGAGAALQIPFAMQMAYRFNGIGVTQNVLYENQKLIANQFNSAIGKIQDSLSSTASALGKLQDVVNQNAQALNTLVKQLSSNFGAISSVLNDILSRLDPPEAEVQIDRLITGRLQSLQTYVTQQLIRAAEIRASANLAATKMSECVLGQSKRVDFCGKGYHLMSFPQSAPHGVVFLHVTYVPAQEKNFTTAPAICHDGKAHFPREGVFVSNGTHWFVTQRNFYEPQIITTDNTFVSGNCDVVIGIVNNTVYDPLQPELDSFKEELDKYFKNHTSPDVDLGDISGINASVVNIQKEIDRLNEVAKNLNESLIDLQELGKYEQYIKGSGRENLYFQGGGGSGYIPEAPRDGQAYVRKDGEWVLLSTFLGHHHHHHHH

SEQ ID NO: 2146 - protein, 1281 aa, Artificial Sequence
  Description of Artificial Sequence: Synthetic polypeptide
MGILPSPGMPALLSLVSLLSVLLMGCVAETGTQCVNLTTRTQLPPAYTNSFTRGVYYPDKIFRSSVLHLTQDLFLPFFSNVTWFHAIHVSGTNGTKRFDNPVLPFNDGVYFAATEKSNIIRGWIFGTTLDSKTQSLLIVNNATNVVIKVCNFQFCNDPFLGVYYHKNNKSWMESEFRVYSSANNCTFEYVSQPFLMDLEGKQGNFKNLREFVFKNIDGYFKIYSKYTPINLVRDLPQGFSALEPLVKLPIGINITRFQTLLALHRSYLTPGDSSSGWTAGAAAYYVGYLQPRTFLLKYNENGTITDAVDCALDPLSETKCTLKSFTVEKGIYQTSNFRVQPTESIVRFPNITNLCPFGEVFNATRFASVYAWNRKRISNCVADYSVLYNSASFSTFKCYGVSPTKLNDLCFTNVYADSFVIRGDEVRQIAPGQTGKIADYNYKLPDDFTGCVIAWNSNNLDSKVGGNYNYLYRLFRKSNLKPFERDISTEIYQAGSTPCNGVEGFNCYFPLQSYGFQPTNGVGYQPYRVVVLSFELLHAPATVCGPKKSTNLVKNKCVNFNFNGLTGTGVLTESNKKFLPFQQFGRDISDTTDAVRDPQTLEILDITPCSFGGVSVITPGTNTSNQVAVLYQDVNCTDVPVAIHADQLTPTWRVYSTGSNVFQTQAGCLIGAEHVNNSYECDIPIGAGICASYQTQTNSPSGAGSVASQSIVAYTMSLGAENSVAYSNNSIAIPTNFTISVTTEILPVSMTKTSVDCTMYICGDSTECSNLLLQYGSFCTQLNRALTGIAVEQDKNTQEVFAQVKQIYKTPPIKDFGGFNFSQILPDPSKPSKRSFIEDLLFNKVTLADAGFIKQYGDCLGDIAARDLICAQKFNGLTVLPPLLTDEMIAQYTAALLAGTATAGWTFGAGAALQIPFAMQMAYRFNGIGVTQNVLYENQKLIANQFNSAIGKIQDSLSSTASALGKLQDVVNQNAQALNTLVKQLSSNFGAISSVLNDILSRLDPPEAEVQIDRLITGRLQSLQTYVTQQLIRAAEIRASANLAATKMSECVLGQSKRVDFCGKGYHLMSFPQSAPHGVVFLHVTYVPAQEKNFTTAPAICHDGKAHFPREGVFVSNGTHWFVTQRNFYEPQIITTDNTFVSGNCDVVIGIVNNTVYDPLQPELDSFKEELDKYFKNHTSPDVDLGDISGINASVVNIQKEIDRLNEVAKNLNESLIDLQELGKYEQYIKGSGRENLYFQGGGGSGYIPEAPRDGQAYVRKDGEWVLLSTFLGHHHHHHHH

SEQ ID NO: 2147 - protein, 1281 aa, Artificial Sequence
  Description of Artificial Sequence: Synthetic polypeptide
MGILPSPGMPALLSLVSLLSVLLMGCVAETGTQCVNLTTRTQLPPAYTNSFTRGVYYPDKVFRSSVLHSTQDLFLPFFSNVTWFHAIHVSGTNGTKRFDNPVLPFNDGVYFASTEKSNIIRGWIFGTTLDSKTQSLLIVNNATNVVIKVCEFQFCNDPFLGVYYHKNNKSWMESEFRVYSSANNCTFEYVSQPFLMDLEGKQGNFKNLREFVFKNIDGYFKIYSKHTPINLVRDLPQGFSALEPLVDLPIGINITRFQTLLALHRSYLTPGDSSSGWTAGAAAYYVGYLQPRTFLLKYNENGTITDAVDCALDPLSETKCTLKSFTVEKGIYQTSNFRVQPTESIVRFPNITNLCPFGEVFNATRFASVYAWNRKRISNCVADYSVLYNSASFSTFKCYGVSPTKLNDLCFTNVYADSFVIRGDEVRQIAPGQTGKIADYNYKLPDDFTGCVIAWNSNNLDSKVGGNYNYLYRLFRKSNLKPFERDISTEIYQAGSTPCNGVEGFNCYFPLQSYGFQPTNGVGYQPYRVVVLSFELLHAPATVCGPKKSTNLVKNKCVNFNFNGLTGTGVLTESNKKFLPFQQFGRDIADMTDAVRDPQTLEILDITPCSFGGVSVITPGTNTSNQVAVLYQDVNCTEVPVAIHADQLTPTWRVYSTGSNVFQTRAGCLIGAEHVNNSYECDIPIGAGICASYQTQTNSPSGAGSVASQSIIAYTMSLGAENSVAYSNNSIAIPTNFTISVTTEILPVSMTKTSVDCTMYICGDSTECSNLLLQYGSFCTQLNRALTGIAVEQDKNTQEVFAQVKQIYKTPPIKDFGGFNFSQILPDPSKPSKRSFIEDLLFNKVTLADAGFIKQYGDCLGDIAARDLICAQKFNGLTVLPPLLTDEMIAQYTSALLAGTITSGWTFGAGAALQIPFAMQMAYRFNGIGVTQNVLYENQKLIANQFNSAIGKIQDSLSSTASALGKLQDVVNQNAQALNTLVKQLSSNFGAISSVLNDILSRLDPPEAEVQIDRLITGRLQSLQTYVTQQLIRAAEIRASANLAATKMSECVLGQSKRVDFCGKGYHLMSFPQSAPHGVVFLHVTYVPAQEKNFTTAPAICHDGKAHFPREGVFVSNGTHWFVTQRNFYEPQIITTDNTFVSGNCDVVIGIVNNTVYDPLQPELDSFKEELDKYFKNHTSPDVDLGDISGINASVVNIQKEIDRLNEVAKNLNESLIDLQELGKYEQYIKGSGRENLYFQGGGGSGYIPEAPRDGQAYVRKDGEWVLLSTFLGHHHHHHHH

SEQ ID NO: 2148 - protein, 1281 aa, Artificial Sequence
  Description of Artificial Sequence: Synthetic polypeptide
MGILPSPGMPALLSLVSLLSVLLMGCVAETGTQCVNLTTRTQLPPAYTNSFTRGVYYPDKVFRSSVLHSTQDLFLPFFSNVTWFHAIHVSGTNGTKRFDNPVLPFNDGVYFASTEKSNIIRGWIFGTTLDSKTQSLLIVNNATNVVIKVCEFQFCNDPFLGVYYHKNNKSWMESEFRVYSSANNCTFEYVSQPFLMDLEGKQGNFKNLREFVFKNIDGYFKIYSKHTPINLVRDLPQGFSALEPLVDLPIGINITRFQTLLALHRSYLTPGDSSSGWTAGAAAYYVGYLQPRTFLLKYNENGTITDAVDCALDPLSETKCTLKSFTVEKGIYQTSNFRVQPTESIVRFPNITNLCPFGEVFNATRFASVYAWNRKRISNCVADYSVLYNSASFSTFKCYGVSPTKLNDLCFTNVYADSFVIRGDEVRQIAPGQTGKIADYNYKLPDDFTGCVIAWNSNNLDSKVGGNYNYLYRLFRKSNLKPFERDISTEIYQAGSTPCNGVEGFNCYFPLQSYGFQPTNGVGYQPYRVVVLSFELLHAPATVCGPKKSTNLVKNKCVNFNFNGLTGTGVLTPSNKKFLPFQQFGRDIADTTDAVRDPQTLEILDITPCSFGGVSVITPGTNTSNQVAVLYQDVNCTEVPVAIHADQLTPTWRVYSTGSNVFQTRAGCLIGAEHVNNSYECDIPIGAGICASYQTQTNSPSGAGSVASQSIIAYTMSLGAENSVAYSNNSIAIPTNFTISVTTEILPVSMTKTSVDCTMYICGDSTECSNLLLQYGSFCTQLNRALTGIAVEQDKNTQEVFAQVKQIYKTPPIKDFGGFNFSQILPDPSKPSKRSFIEDLLFNKVTLADAGFIKQYGDCLGDIAARDLICAQKFNGLTVLPPLLTDEMIAQYTSALLAGTITSGWTFGAGAALQIPFAMQMAYRFNGIGVTQNVLYENQKLIANQFNSAIGKIQDSLSSTASALGKLQDVVNQNAQALNTLVKQLSSNFGAISSVLNDILSRLDPPEAEVQIDRLITGRLQSLQTYVTQQLIRAAEIRASANLAATKMSECVLGQSKRVDFCGKGYHLMSFPQSAPHGVVFLHVTYVPAQEKNFTTAPAICHDGKAHFPREGVFVSNGTHWFVTQRNFYEPQIITTDNTFVSGNCDVVIGIVNNTVYDPLQPELDSFKEELDKYFKNHTSPDVDLGDISGINASVVNIQKEIDRLNEVAKNLNESLIDLQELGKYEQYIKGSGRENLYFQGGGGSGYIPEAPRDGQAYVRKDGEWVLLSTFLGHHHHHHHH

SEQ ID NO: 2149 - protein, 1281 aa, Artificial Sequence
  Description of Artificial Sequence: Synthetic polypeptide
MGILPSPGMPALLSLVSLLSVLLMGCVAETGTQCVNLTTRTQLPPAYTNSFTRGVYYPDKVFRSSVLHSTQDLFLPFFSNVTWFHAIHVSGTNGTKRFDNPVLPFNDGVYFASTEKSNIIRGWIFGTTLDSKTQSLLIVNNATNVVIKVCEFQFCNDPFLGVYYHKNNKSWMESEFRVYSSANNCTFEYVSQPFLMDLEGKQGNFKNLREFVFKNIDGYFKIYSKHTPINLVRDLPQGFSALEPLVDLPIGINITRFQTLLALHRSYLTPGDSSSGWTAGAAAYYVGYLQPRTFLLKYNENGTITDAVDCALDPLSETKCTLKSFTVEKGIYQTSNFRVQPTESIVRFPNITNLCPFGEVFNATRFASVYAWNRKRISNCVADYSVLYNSASFSTFKCYGVSPTKLNDLCFTNVYADSFVIRGDEVRQIAPGQTGKIADYNYKLPDDFTGCVIAWNSNNLDSKVGGNYNYLYRLFRKSNLKPFERDISTEIYQAGSTPCNGVEGFNCYFPLQSYGFQPTNGVGYQPYRVVVLSFELLHAPATVCGPKKSTNLVKNKCVNFNFNGLTGTGVLTESNKKFLPFQQFGRDIADTTDAVRDPQTLEILDITPCSFGGVSVITPGTNTSNQVAVLYQDVNCTEVPVAIHADQLTPTWRVYSTGSNVFQTRAGCLIGAEHVNNSYECDIPIGAGICASYQTQTNSPSGAGSVASQSIVAYTMSLGAENSVAYSNNSIAIPTNFTISVTTEILPVSMTKTSVDCTMYICGDSTECSNLLLQYGSFCTQLNRALTGIAVEQDKNTQEVFAQVKQIYKTPPIKDFGGFNFSQILPDPSKPSKRSFIEDLLFNKVTLADAGFIKQYGDCLGDIAARDLICAQKFNGLTVLPPLLTDEMIAQYTSALLAGTITSGWTFGAGAALQIPFAMQMAYRFNGIGVTQNVLYENQKLIANQFNSAIGKIQDSLSSTASALGKLQDVVNQNAQALNTLVKQLSSNFGAISSVLNDILSRLDPPEAEVQIDRLITGRLQSLQTYVTQQLIRAAEIRASANLAATKMSECVLGQSKRVDFCGKGYHLMSFPQSAPHGVVFLHVTYVPAQEKNFTTAPAICHDGKAHFPREGVFVSNGTHWFVTQRNFYEPQIITTDNTFVSGNCDVVIGIVNNTVYDPLQPELDSFKEELDKYFKNHTSPDVDLGDISGINASVVNIQKEIDRLNEVAKNLNESLIDLQELGKYEQYIKGSGRENLYFQGGGGSGYIPEAPRDGQAYVRKDGEWVLLSTFLGHHHHHHHH

SEQ ID NO: 2150 - protein, 1281 aa, Artificial Sequence
  Description of Artificial Sequence: Synthetic polypeptide
MGILPSPGMPALLSLVSLLSVLLMGCVAETGTQCVNLTTRTQLPPAYTNSFTRGVYYPDKVFRSSVLHSTQDLFLPFFSNVTWFHAIHVSGTNGTKRFDNPVLPFNDGVYFASTEKSNIIRGWIFGTTLDSKTQSLLIVNNATNVVIKVCEFQFCNDPFLGVYYHKNNKSWMESEFRVYSSANNCTFEYVSQPFLMDLGGKQGNFKNLREFVFKNIDGYFKIYSKHTPINLVRDLPQGFSALEPLVDLPIGINITRFQTLLALHRSYLTPGDSSSGWTAGAAAYYVGYLQPRTFLLKYNENGTITDAVDCALDPLSETKCTLKSFTVEKGIYQTSNFRVQPTESIVRFPNITNLCPFGEVFNATRFASVYAWNRKRISNCVADYSVLYNSASFSTFKCYGVSPTKLNDLCFTNVYADSFVIRGDEVRQIAPGQTGKIADYNYKLPDDFTGCVIAWNSNNLDSKVGGNYNYLYRLFRKSNLKPFERDISTEIYQAGSTPCNGVEGFNCYFPLQSYGFQPTNGVGYQPYRVVVLSFELLHAPATVCGPKKSTNLVKNKCVNFNFNGLTGTGVLTESNKKFLPFQQFGRDIADTTDAVRDPQTLEILDITPCSFGGVSVITPGTNTSNQVAVLYQDVNCTEVPVAIHADQLTPTWRVYSTGSNVFQTRAGCLIGAEHVNNSYECDIPIGAGICASYQTQTNSPSGAGSVASQSIIAYTMSLGAENSVAYSNNSIAIPTNFTISVTTEILPVSMTKTSVDCTMYICGDSTECSNLLLQYGSFCTQLNRALTGIAVEQDKNTQEVFAQVKQIYKTPPIKDFGGFNFSQILPDPSKPSKRSFIEDLLFNKVTLADAGFIKQYGDCLGDIAARDLICAQKFNGLTVLPPLLTDEMIAQYTSALLAGTITSGWTFGAGAALQIPFAMQMAYRFNGIGVTQNVLYENQKLIANQFNSAIGKIQDSLSSTASALGKLQDVVNQNAQALNTLVKQLSSNFGAISSVLNDILSRLDPPEAEVQIDRLITGRLQSLQTYVTQQLIRAAEIRASANLAATKMSECVLGQSKRVDFCGKGYHLMSFPQSAPHGVVFLHVTYVPAQEKNFTTAPAICHDGKAHFPREGVFVSNGTHWFVTQRNFYEPQIITTDNTFVSGNCDVVIGIVNNTVYDPLQPELDSFKEELDKYFKNHTSPDVDLGDISGINASVVNIQKEIDRLNEVAKNLNESLIDLQELGKYEQYIKGSGRENLYFQGGGGSGYIPEAPRDGQAYVRKDGEWVLLSTFLGHHHHHHHH

SEQ ID NO: 2151 - protein, 1281 aa, Artificial Sequence
  Description of Artificial Sequence: Synthetic polypeptide
MGILPSPGMPALLSLVSLLSVLLMGCVAETGTQCVNLTTRTQLPPAYTNSFTRGVYYPDKVFRSSVLHSTQDLFLPFFSNVTWFHAIHVSGTNGTKRFDNPVLPFNDGVYFASTEKSNIIRGWIFGTTLDSKTQSLLIVNNATNVVIKVCEFQFCNDPFLGVYYHKNNKSWMESEFRVYSSANNCTFEYVSQPFLMDLEGKQGNFKNLREFVFKNIDGYFKIYSKHTPINLVRDLPQGFSALEPLVDLPIGINITRFQTLLALHRSYLTPGDSSSGWTAGAAAYYVGYLQPRTFLLKYNENGTITDAVDCALDPLSETKCTLKSFTVEKGIYQTSNFRVQPTESIVRFPNITNLCPFGEVFNATRFASVYAWNRKRISNCVADYSVLYNSASFSTFKCYGVSPTKLNDLCFTNVYADSFVIRGDEVRQIAPGQTGKIADYNYKLPDDFTGCVIAWNSNNLDSKVGGNYNYLYRLFRKSNLKPFERDISTEIYQAGSTPCNGVEGFNCYFPLQSYGFQPTNGVGYQPYRVVVLSFELLHAPATVCGPKKSTNLVKNKCVNFNFNGLTGTGVLTESNKKFLPFQQFGRDIADTTDAVRDPQTLEILDITPCSFGGVSVITPGTNTSNQVAVLYQDVNCTEVPVAIHADQLTPTWRVYSTGSNVFQTRAGCLIGAEHVNNSYECDIPIGAGICASYQTQTNSPSGAGSVASQSIIAYTMSLGAENSVAYSNNSIAIPTNFTISVTTEILPVSMTKTSVDCTMYICGDSTECSNLLLQYGSFCTQLNRALTGIAVEQDKNTQEVFAQVKQIYKTPPIKDFGGFNFSQILPDPSKPSKRSFIEDLLFNKVTLADAGFIKQYGDCLGDIAARDLICAQKFNGLMVLPPLLTDEMIAQYTSALLAGTITSGWTFGAGAALQIPFAMQMAYRFNGIGVTQNVLYENQKLIANQFNSAIGKIQDSLSSTASALGKLQDVVNQNAQALNTLVKQLSSNFGAISSVLNDILSRLDPPEAEVQIDRLITGRLQSLQTYVTQQLIRAAEIRASANLAATKMSECVLGQSKRVDFCGKGYHLMSFPQSAPHGVVFLHVTYVPAQEKNFTTAPAICHDGKAHFPREGVFVSNGTHWFVTQRNFYEPQIITTDNTFVSGNCDVVIGIVNNTVYDPLQPELDSFKEELDKYFKNHTSPDVDLGDISGINASVVNIQKEIDRLNEVAKNLNESLIDLQELGKYEQYIKGSGRENLYFQGGGGSGYIPEAPRDGQAYVRKDGEWVLLSTFLGHHHHHHHH

SEQ ID NO: 2152 - protein, 1281 aa, Artificial Sequence
  Description of Artificial Sequence: Synthetic polypeptide
MGILPSPGMPALLSLVSLLSVLLMGCVAETGTQCVNLTTRTQLPPAYTNSFTRGVYYPDKVFRSSVLHSTQDLFLPFFSNVTWFHAIHVSGTNGTKRFDNPVLPFNDGVYFASTEKSNIIRGWIFGTTLDSKTQSLLIVNNATNVVIKVCEFQFCNDPFLGVYYHKNNKSWMESEFRVYSSANNCTFEYVSQPFLMDLEGKQGNFKNLREFVFKNIDGYFKIYSKHTPINLVRDLPQGFSALEPLVDLPIGINITRFQTLLALHRSYLTPGDSSSGWTAGAAAYYVGYLQPRTFLLKYNENGTITDAVDCALDPLSETKCTLKSFTVEKGIYQTSNFRVQPTESIVRFPNITNLCPFGEVFNATRFASVYAWNRKRISNCVADYSVLYNSASFSTFKCYGVSPTKLNDLCFTNVYADSFVIRGDEVRQIAPGQTGKIADYNYKLPDDFTGCVIAWNSNNLDSKVGGNYNYLYRLFRKSNLKPFERDISTEIYQAGSTPCNGVEGFNCYFPLQSYGFQPTNGVGYQPYRVVVLSFELLHAPATVCGPKKSTNLVKNKCVNFNFNGLTGTGVLTESNKKFLPFQQFGRDIADTTDAVRDPQTLEILDITPCSFGGVSVITPGTNTSNQVAVLYQDVNCTEVPVAIHADQLTPTWRVYSTGSNVFQTRAGCLIGAEHVNNSYECDIPIGAGICASYQTQTNSPSGAGSVASQSIIAYTMSLGAENSVAYSNNSIAIPTNFTISVTTEILPVSMTKTSVDCTMYICGDSTECSNLLLQYGSFCTQLNRALTGIAVEQDKNTQEVFAQVKQIYKTPPIKDFGGFNFSQILPDPSKPSKRSFIEDLLFNKVTLADAGFIKQYGDCLGDIAARDLICAQKFNGLTVLPPLLTDEMIAQYTSALLAGTITSGWTFGAGAALQIPFAMQMAYRFNGIGVTQNVLYENQKLIANQFNSAIGKIQDSLSSTASALGKLQDVVNQNAQALHTLVKQLSSNFGAISSVLNDILSRLDPPEAEVQIDRLITGRLQSLQTYVTQQLIRAAEIRASANLAATKMSECVLGQSKRVDFCGKGYHLMSFPQSAPHGVVFLHVTYVPAQEKNFTTAPAICHDGKAHFPREGVFVSNGTHWFVTQRNFYEPQIITTDNTFVSGNCDVVIGIVNNTVYDPLQPELDSFKEELDKYFKNHTSPDVDLGDISGINASVVNIQKEIDRLNEVAKNLNESLIDLQELGKYEQYIKGSGRENLYFQGGGGSGYIPEAPRDGQAYVRKDGEWVLLSTFLGHHHHHHHH

SEQ ID NO: 2153 - protein, 1281 aa, Artificial Sequence
  Description of Artificial Sequence: Synthetic polypeptide
MGILPSPGMPALLSLVSLLSVLLMGCVAETGTQCVNLTTRTQLPPAYTNSFTRGVYYPDKIFRSSVLHSTQDLFLPFFSNVTWFHAIHVSGTNGTKRFDNPVLPFNDGVYFASTEKSNIIRGWIFGTTLDSKTQSLLIVNNATNVVIKVCEFQFCNDPFLGVYYHKNNKSWMESEFRVYSSANNCTFEYVSQPFLMDLEGKQGNFKNLREFVFKNIDGYFKIYSKHTPINLVRDLPQGFSALEPLVDLPIGINITRFQTLLALHRSYLTPGDSSSGWTAGAAAYYVGYLQPRTFLLKYNENGTITDAVDCALDPLSETKCTLKSFTVEKGIYQTSNFRVQPTESIVRFPNITNLCPFGEVFNATRFASVYAWNRKRISNCVADYSVLYNSASFSTFKCYGVSPTKLNDLCFTNVYADSFVIRGDEVRQIAPGQTGKIADYNYKLPDDFTGCVIAWNSNNLDSKVGGNYNYLYRLFRKSNLKPFERDISTEIYQAGSTPCNGVEGFNCYFPLQSYGFQPTNGVGYQPYRVVVLSFELLHAPATVCGPKKSTNLVKNKCVNFNFNGLTGTGVLTESNKKFLPFQQFGRDIADTTDAVRDPQTLEILDITPCSFGGVSVITPGTNTSNQVAVLYQDVNCTEVPVAIHADQLTPTWRVYSTGSNVFQTRAGCLIGAEHVNNSYECDIPIGAGICASYQTQTNSPSGAGSVASQSIIAYTMSLGAENSVAYSNNSIAIPTNFTISVTTEILPVSMTKTSVDCTMYICGDSTECSNLLLQYGSFCTQLNRALTGIAVEQDKNTQEVFAQVKQIYKTPPIKDFGGFNFSQILPDPSKPSKRSFIEDLLFNKVTLADAGFIKQYGDCLGDIAARDLICAQKFNGLTVLPPLLTDEMIAQYTSALLAGTITSGWTFGAGAALQIPFAMQMAYRFNGIGVTQNVLYENQKLIANQFNSAIGKIQDSLSSTASALGKLQDVVNQNAQALNTLVKQLSSNFGAISSVLNDILSRLDPPEAEVQIDRLITGRLQSLQTYVTQQLIRAAEIRASANLAATKMSECVLGQSKRVDFCGKGYHLMSFPQSAPHGVVFLHVTYVPAQEKNFTTAPAICHDGKAHFPREGVFVSNGTHWFVTQRNFYEPQIITTDNTFVSGNCDVVIGIVNNTVYDPLQPELDSFKEELDKYFKNHTSPDVDLGDISGINASVVNIQKEIDRLNEVAKNLNESLIDLQELGKYEQYIKGSGRENLYFQGGGGSGYIPEAPRDGQAYVRKDGEWVLLSTFLGHHHHHHHH

SEQ ID NO: 2154 - protein, 1281 aa, Artificial Sequence
  Description of Artificial Sequence: Synthetic polypeptide
MGILPSPGMPALLSLVSLLSVLLMGCVAETGTQCVNLTTRTQLPPAYTNSFTRGVYYPDKVFRSSVLHSTQDLFLPFFSNVTWFHAIHVSGTNGTKRFDNPVLPFNDGVYFATTEKSNIIRGWIFGTTLDSKTQSLLIVNNATNVVIKVCEFQFCNDPFLGVYYHKNNKSWMESEFRVYSSANNCTFEYVSQPFLMDLEGKQGNFKNLREFVFKNIDGYFKIYSKHTPINLVRDLPQGFSALEPLVDLPIGINITRFQTLLALHRSYLTPGDSSSGWTAGAAAYYVGYLQPRTFLLKYNENGTITDAVDCALDPLSETKCTLKSFTVEKGIYQTSNFRVQPTESIVRFPNITNLCPFGEVFNATRFASVYAWNRKRISNCVADYSVLYNSASFSTFKCYGVSPTKLNDLCFTNVYADSFVIRGDEVRQIAPGQTGKIADYNYKLPDDFTGCVIAWNSNNLDSKVGGNYNYLYRLFRKSNLKPFERDISTEIYQAGSTPCNGVEGFNCYFPLQSYGFQPTNGVGYQPYRVVVLSFELLHAPATVCGPKKSTNLVKNKCVNFNFNGLTGTGVLTESNKKFLPFQQFGRDIADTTDAVRDPQTLEILDITPCSFGGVSVITPGTNTSNQVAVLYQDVNCTEVPVAIHADQLTPTWRVYSTGSNVFQTRAGCLIGAEHVNNSYECDIPIGAGICASYQTQTNSPSGAGSVASQSIIAYTMSLGAENSVAYSNNSIAIPTNFTISVTTEILPVSMTKTSVDCTMYICGDSTECSNLLLQYGSFCTQLNRALTGIAVEQDKNTQEVFAQVKQIYKTPPIKDFGGFNFSQILPDPSKPSKRSFIEDLLFNKVTLADAGFIKQYGDCLGDIAARDLICAQKFNGLTVLPPLLTDEMIAQYTSALLAGTITSGWTFGAGAALQIPFAMQMAYRFNGIGVTQNVLYENQKLIANQFNSAIGKIQDSLSSTASALGKLQDVVNQNAQALNTLVKQLSSNFGAISSVLNDILSRLDPPEAEVQIDRLITGRLQSLQTYVTQQLIRAAEIRASANLAATKMSECVLGQSKRVDFCGKGYHLMSFPQSAPHGVVFLHVTYVPAQEKNFTTAPAICHDGKAHFPREGVFVSNGTHWFVTQRNFYEPQIITTDNTFVSGNCDVVIGIVNNTVYDPLQPELDSFKEELDKYFKNHTSPDVDLGDISGINASVVNIQKEIDRLNEVAKNLNESLIDLQELGKYEQYIKGSGRENLYFQGGGGSGYIPEAPRDGQAYVRKDGEWVLLSTFLGHHHHHHHH

SEQ ID NO: 2155 - protein, 1281 aa, Artificial Sequence
  Description of Artificial Sequence: Synthetic polypeptide
MGILPSPGMPALLSLVSLLSVLLMGCVAETGTQCVNLTTRTQLPPAYTNSFTRGVYYPDKVFRSSVLHSTQDLFLPFFSNVTWFHAIHVSGTNGTKRFDNPVLPFNDGVYFASTEKSNIIRGWIFGTTLDSKTQSLLIVNNATNVVIKVCEFQFCNDPFLGVYYHKNNKSWMESEFRVYSSANNCTFEYVSQPFLMDLEGKQGNFKNLREFVFKNIDGYFKIYSKHTPINLVRDLPQGFSALEPLVDLPIGINITRFQTLLALHRSYLTPGDSSSGWTAGAAAYYVGYLQPRTFLLKYNENGTITDAVDCALDPLSETKCTLKSFTVEKGIYQTSNFRVQPTESIVRFPNITNLCPFGEVFNATRFASVYAWNRKRISNCVADYSVLYNSASFSTFKCYGVSPTKLNDLCFTNVYADSFVIRGDEVRQIAPGQTGKIADYNYKLPDDFTGCVIAWNSNNLDSKVGGNYNYLYRLFRKSNLKPFERDISTEIYQAGSTPCNGVEGFNCYFPLQSYGFQPTNGVGYQPYRVVVLSFELLHAPATVCGPKKSTNLVKNKCVNFNFNGLTGTGVLTESNKKFLPFQQFGRDIADTTDAVRDPQTLEILDITPCSFGGVSVITPGTNTSNQVAVLYQDVNCTEVPVAIHADQLTPTWRVYSTGSNVFQTRAGCLIGAEHVNNSYECDIPIGAGICASYQTQTNSPSGAGSVASQSIIAYTMSLGAENSVAYSNNSIAIPTNFTISVTTEILPVSMTKTSVDCTMYICGDSTECSNLLLQYGSFCTQLNRALTGIAVEQDKNTQEVFAQVKQIYKTPPIKDFGGFNFSQILPDPSKPSKRSFIEDLLFNKVTLADAGFIKQYGDCLGDIAARDLICAQKFNGLTVLPPLLTDEMIAQYTSALVAGTITSGWTFGAGAALQIPFAMQMAYRFNGIGVTQNVLYENQKLIANQFNSAIGKIQDSLSSTASALGKLQDVVNQNAQALNTLVKQLSSNFGAISSVLNDILSRLDPPEAEVQIDRLITGRLQSLQTYVTQQLIRAAEIRASANLAATKMSECVLGQSKRVDFCGKGYHLMSFPQSAPHGVVFLHVTYVPAQEKNFTTAPAICHDGKAHFPREGVFVSNGTHWFVTQRNFYEPQIITTDNTFVSGNCDVVIGIVNNTVYDPLQPELDSFKEELDKYFKNHTSPDVDLGDISGINASVVNIQKEIDRLNEVAKNLNESLIDLQELGKYEQYIKGSGRENLYFQGGGGSGYIPEAPRDGQAYVRKDGEWVLLSTFLGHHHHHHHH

SEQ ID NO: 2156 - protein, 1281 aa, Artificial Sequence
  Description of Artificial Sequence: Synthetic polypeptide
MGILPSPGMPALLSLVSLLSVLLMGCVAETGTQCVNLTTRTQLPPAYTNSFTRGVYYPDKVFRSDVLHSTQDLFLPFFSNVTWFHAIHVSGTNGTKRFDNPVLPFNDGVYFASTEKSNIIRGWIFGTTLDSKTQSLLIVNNATNVVIKVCEFQFCENPFLGVYYHKNNKSWMEKEFRVYSSANNCTFEYVSQPFLMDLGGKQGNFKWLREFVFKNIDGYFKIYSKHTPINLVRDLPQGFSALEPLMDLPIGINITRFQTLLALHRSYLTPGDSSSGWTAGAAAYYVGYLQPRTFLLKYNENGTITDAVDCALDPLSETKCTLKSFTVEKGIYQTSNFRVQPTESIVRFPNITNLCPFGEVFNATRFASVYAWNRKRISNCVADYSVLYNSASFSTFKCYGVSPTKLNDLCFTNVYADSFVIRGDEVRQIAPGQTGKIADYNYKLPDDFTGCVIAWNSNNLDSKVGGNYNYLYRLFRKSNLKPFERDISTEIYQAGSTPCNGVEGFNCYFPLQSYGFQPTNGVGYQPYRVVVLSFELLHAPATVCGPKKSTNLVKNKCVNFNFNGLTGTGVLTESNKKFLPFQQFGRDIADNTDAVRDPQTLEILDITPCSFGGVSVITPGTNTSNQVAVLYQDVNCTEVPNAIHADQLTPTWRVYSTGSNVFQTRAGCLIGAEHVNNSYECDIPIGAGICASYQTQTNSPSGAGSVASQSIIAYTMSLGAENSVAYSNNSIAIPTNFTISVTTEILPVSMTKTSVDCTMYICGDSTECSNLLLQYGSFCTQLNRALQGIAQEQDKNTQEVFAQVKQIYKTPPIKDFGGFNFSQILPDPSKPSKRSFIEDLLFNKVTLADAGFIKQYGDCLGDIAARDLICAQKFNGLTVLPPLLTDEMIAQYTSALLAGTITSGWTFGAGAALQIPFAMQMAYRFNGIGVTQNVLYENQKLIANQFNKAIGKIQDSLSSTASALGKLQDVVNQNAQALNTLVKQLSSNFGAISSVLNDILSRLDPPEAEVQIDRLITGRLQSLQTYVTQQLIRAAEIRASANLAATKMSECVLGQSKRVDFCGKGYHLMSFPQSAPHGVVFLHVTYVPAQEKNFTTAPAICHDGKAFFPREGVFVSNGTQWFVTQRNFYEPQIITTDNTFVSGNCDVVIGIVNNTVYDPLQPELDSFKEELDKYFKNHTSPDVDLGDISGINASVVNIQKEIDRLNEVAKNLNESLIDLQELGKYEQYIKGSGRENLYFQGGGGSGYIPEAPRDGQAYVRKDGEWVLLSTFLGHHHHHHHH

SEQ ID NO: 2157 - protein, 1281 aa, Artificial Sequence
  Description of Artificial Sequence: Synthetic polypeptide
MGILPSPGMPALLSLVSLLSVLLMGCVAETGTQCVNLTTRTQLPPAYTNSFTRGVYYPDKVFRSSVLHSTQDLFLPFFSNVTWFHAIHVSGTNGTKRFDNPVLPFNDGVYFASTEKSNIIRGWIFGTTLDSKTQSLLIVNNATNVVIKVCEFQFCNDPFLGVYYHKNNKSWMESEFRVYSSANNCTFEYVSQPFLMDLEGKQGNFKNLREFVFKNIDGYFKIYSKHEPINLVRDLPQGFSALEPLVDLPIGINITRFQTLLALHRSYLTPGDSSSGWTAGAAAYYVGYLQPRTFLLKYNENGTITDAVDCALDPLSETKCTLKSFTVEKGIYQTSNFRVQPTESIVRFPNITNLCPFGEVFNATRFASVYAWNRKRISNCVADYSVLYNSASFSTFKCYGVSPTKLNDLCFTNVYADSFVIRGDEVRQIAPGQTGKIADYNYKLPDDFTGCVIAWNSNNLDSKVGGNYNYLYRLFRKSNLKPFERDISTEIYQAGSTPCNGVEGFNCYFPLQSYGFQPTNGVGYQPYRVVVLSFELLHAPATVCGPKKSTNLVKNKCVNFNFNGLTGTGVLTESNKKFLPFQQFGRDIADTTDAVRDPQTLEILDITPCSFGGVSVITPGTNTSNQVAVLYQDVNCTEVPVAIHADQLTPTWRVYSTGSNVFQTRAGCLIGAEHVNNSYECDIPIGAGICASYQTQTNSPSGAGSVASQSIIAYTMSLGAENSVAYSNNSIAIPTNFTISVTTEILPVSMTKTSVDCTMYICGDSTECSNLLLQYGSFCTQLNRALTGIAVEQDKNTQEVFAQVKQIYKTPPIKDFGGFNFSQILPDPSKPSKRSFIEDLLFNKVTLADAGFIKQYGDCLGDIAARDLICAQKFNGLTVLPPLLTDEMIAQYTSALLAGTITSGWTFGAGAALQIPFAMQMAYRFNGIGVTQNVLYENQKLIANQFNSAIGKIQDSLSSTASALGKLQDVVNQNAQALNTLVKQLSSNFGAISSVLNDILSRLDPPEAEVQIDRLITGRLQSLQTYVTQQLIRAAEIRASANLAATKMSECVLGQSKRVDFCGKGYHLMSFPQSAPHGVVFLHVTYVPAQEKNFTTAPAICHDGKAHFPREGVFVSNGTHWFVTQRNFYEPQIITTDNTFVSGNCDVVIGIVNNTVYDPLQPELDSFKEELDKYFKNHTSPDVDLGDISGINASVVNIQKEIDRLNEVAKNLNESLIDLQELGKYEQYIKGSGRENLYFQGGGGSGYIPEAPRDGQAYVRKDGEWVLLSTFLGHHHHHHHH

SEQ ID NO: 2158 - protein, 1281 aa, Artificial Sequence
  Description of Artificial Sequence: Synthetic polypeptide
MGILPSPGMPALLSLVSLLSVLLMGCVAETGTQCVNLTTRTQLPPAYTNSFTRGVYYPDKVFRSDVLHSTQDLFLPFFSNVTWFHAIHVSGTNGTKRFDNPVLPFNDGVYFASTEKSNIIRGWIFGTTLDSKTQSLLIVNNATNVVIKVCEFQFCDNPFLGVYYHKNNKSWMEKEFRVYSSANNCTFEYVSQPFLMDLGGKQGNFKNLREFVFKNIDGYFKIYSKHTPINLVRDLPQGFSALEPLWDLPIGINITRFQTLLALHRSYLTPGDSSSGWTAGAAAYYVGYLQPRTFLLKYNENGTITDAVDCALDPLSETKCTLKSFTVEKGIYQTSNFRVQPTESIVRFPNITNLCPFGEVFNATRFASVYAWNRKRISNCVADYSVLYNSASFSTFKCYGVSPTKLNDLCFTNVYADSFVIRGDEVRQIAPGQTGKIADYNYKLPDDFTGCVIAWNSNNLDSKVGGNYNYLYRLFRKSNLKPFERDISTEIYQAGSTPCNGVEGFNCYFPLQSYGFQPTNGVGYQPYRVVVLSFELLHAPATVCGPKKSTNLVKNKCVNFNFNGLTGTGVLTESNKKFLPFQQFGRDIADNTDAVRDPQTLEILDITPCSFGGVSVITPGTNTSNQVAVLYQDVNCTEVPNAIHADQLTPTWRVYSTGSNVFQTRAGCLIGAEHVNNSYECDIPIGAGICASYQTQTNSPSGAGSVASQSIIAYTMSLGAENSVAYSNNSIAIPTNFTISVTTEILPVSMTKTSVDCTMYICGDSTECSNLLLQYGSFCTQLNRALQGIAQEQDKNTQEVFAQVKQIYKTPPIKDFGGFNFSQILPDPSKPSKRSFIEDLLFNKVTLADAGFIKQYGDCLGDIAARDLICAQKFNGLTVLPPLLTDEMIAQYTSALLAGTITSGWTFGAGAALQIPFAMQMAYRFNGIGVTQNVLYENQKLIANQFNKAIGKIQDSLSSTASALGKLQDVVNQNAQALNTLVKQLSSNFGAISSVLNDILSRLDPPEAEVQIDRLITGRLQSLQTYVTQQLIRAAEIRASANLAATKMSECVLGQSKRVDFCGKGYHLMSFPQSAPHGVVFLHVTYVPAQEKNFTTAPAICHDGKAFFPREGVFVSNGTQWFVTQRNFYEPQIITTDNTFVSGNCDVVIGIVNNTVYDPLQPELDSFKEELDKYFKNHTSPDVDLGDISGINASVVNIQKEIDRLNEVAKNLNESLIDLQELGKYEQYIKGSGRENLYFQGGGGSGYIPEAPRDGQAYVRKDGEWVLLSTFLGHHHHHHHH

SEQ ID NO: 2159 - protein, 1281 aa, Artificial Sequence
  Description of Artificial Sequence: Synthetic polypeptide
MGILPSPGMPALLSLVSLLSVLLMGCVAETGTQCVNLTTRTQLPPAYTNSFTRGVYYPDKVFRSSVLHSTQDLFLPFFSNVTWFHAIHVSGTNGTKRFDNPVLPFNDGVYFASTEKSNIIRGWIFGTTLDSKTQSLLIVNNATNVVIKVCEFQFCNDPFLGVYYHKNNKSWMESEFRVYSSANNCTFEYNSQPFLMDLEGKQGNFKNLREFVFKNIDGYFKIYSKHTPINLVRDLPQGFSALEPLVDLPIGINITRFQTLLALHRSYLTPGDSSSGWTAGAAAYYVGYLQPRTFLLKYNENGTITDAVDCALDPLSETKCTLKSFTVEKGIYQTSNFRVQPTESIVRFPNITNLCPFGEVFNATRFASVYAWNRKRISNCVADYSVLYNSASFSTFKCYGVSPTKLNDLCFTNVYADSFVIRGDEVRQIAPGQTGKIADYNYKLPDDFTGCVIAWNSNNLDSKVGGNYNYLYRLFRKSNLKPFERDISTEIYQAGSTPCNGVEGFNCYFPLQSYGFQPTNGVGYQPYRVVVLSFELLHAPATVCGPKKSTNLVKNKCVNFNFNGLTGTGVLTESNKKFLPFQQFGRDIADTTDAVRDPQTLEILDITPCSFGGVSVITPGTNTSNQVAVLYQDVNCTEVPVAIHADQLTPTWRVYSTGSNVFQTRAGCLIGAEHVNNSYECDIPIGAGICASYQTQTNSPSGAGSVASQSIIAYTMSLGAENSVAYSNNSIAIPTNFTISVTTEILPVSMTKTSVDCTMYICGDSTECSNLLLQYGSFCTQLNRALTGIAVEQDKNTQEVFAQVKQIYKTPPIKDFGGFNFSQILPDPSKPSKRSFIEDLLFNKVTLADAGFIKQYGDCLGDIAARDLICAQKFNGLTVLPPLLTDEMIAQYTSALLAGTITSGWTFGAGAALQIPFAMQMAYRFNGIGVTQNVLYENQKLIANQFNSAIGKIQDSLSSTASALGKLQDVVNQNAQALNTLVKQLSSNFGAISSVLNDILSRLDPPEAEVQIDRLITGRLQSLQTYVTQQLIRAAEIRASANLAATKMSECVLGQSKRVDFCGKGYHLMSFPQSAPHGVVFLHVTYVPAQEKNFTTAPAICHDGKAHFPREGVFVSNGTHWFVTQRNFYEPQIITTDNTFVSGNCDVVIGIVNNTVYDPLQPELDSFKEELDKYFKNHTSPDVDLGDISGINASVVNIQKEIDRLNEVAKNLNESLIDLQELGKYEQYIKGSGRENLYFQGGGGSGYIPEAPRDGQAYVRKDGEWVLLSTFLGHHHHHHHH

SEQ ID NO: 2160 - protein, 1281 aa, Artificial Sequence
  Description of Artificial Sequence: Synthetic polypeptide
MGILPSPGMPALLSLVSLLSVLLMGCVAETGTQCVNLTTRTQLPPAYTNSFTRGVYYPDKVFRSSVLHSTQDLFLPFFSNVTWFHAIHVSGTNGTKRFDNPVLPFNDGVYFASTEKSNIIRGWIFGTTLDSKTQSLLIVNNATNVVIKVCEFQFCNDPFLGVYYHKNNKSWMESEFRVYSSANNCTFEYVSQPFLMDLEGKQGNFKNLREFVFKNIDGYFKIYSKHTPINLVRDLPQGFSALEPLVDLPIGINITRFQTLLALHRSYLTPGDSSSGWTAGAAAYYVGYLQPRTFLLKYNENGTITDAVDCALDPLSETKCTLKSFTVEKGIYQTSNFRVQPTESIVRFPNITNLCPFGEVFNATRFASVYAWNRKRISNCVADYSVLYNSASFSTFKCYGVSPTKLNDLCFTNVYADSFVIRGDEVRQIAPGQTGKIADYNYKLPDDFTGCVIAWNSNNLDSKVGGNYNYLYRLFRKSNLKPFERDISTEIYQAGSTPCNGVEGFNCYFPLQSYGFQPTNGVGYQPYRVVVLSFELLHAPATVCGPKKSTNLVKNKCVNFNFNGLTGTGVLTESNKKFLPFQQFGRDIADITDAVRDPQTLEILDITPCSFGGVSVITPGTNTSNQVAVLYQDVNCTEVPVAIHADQLTPTWRVYSTGSNVFQTRAGCLIGAEHVNNSYECDIPIGAGICASYQTQTNSPSGAGSVASQSIIAYTMSLGAENSVAYSNNSIAIPTNFTISVTTEILPVSMTKTSVDCTMYICGDSTECSNLLLQYGSFCTQLNRALTGIAVEQDKNTQEVFAQVKQIYKTPPIKDFGGFNFSQILPDPSKPSKRSFIEDLLFNKVTLADAGFIKQYGDCLGDIAARDLICAQKFNGLTVLPPLLTDEMIAQYTSALLAGTITSGWTFGAGAALQIPFAMQMAYRFNGIGVTQNVLYENQKLIANQFNSAIGKIQDSLSSTASALGKLQDVVNQNAQALNTLVKQLSSNFGAISSVLNDILSRLDPPEAEVQIDRLITGRLQSLQTYVTQQLIRAAEIRASANLAATKMSECVLGQSKRVDFCGKGYHLMSFPQSAPHGVVFLHVTYVPAQEKNFTTAPAICHDGKAHFPREGVFVSNGTHWFVTQRNFYEPQIITTDNTFVSGNCDVVIGIVNNTVYDPLQPELDSFKEELDKYFKNHTSPDVDLGDISGINASVVNIQKEIDRLNEVAKNLNESLIDLQELGKYEQYIKGSGRENLYFQGGGGSGYIPEAPRDGQAYVRKDGEWVLLSTFLGHHHHHHHH

SEQ ID NO: 2161 - protein, 1281 aa, Artificial Sequence
  Description of Artificial Sequence: Synthetic polypeptide
MGILPSPGMPALLSLVSLLSVLLMGCVAETGTQCVNLTTRTQLPPAYTNSFTRGVYYPDKVFRSSVLHSTQDLFLPFFSNVTWFHAIHVSGTNGTKRFDNPVLPFNDGVYFASTEKSNIIRGWIFGTTLDSKTQSLLIVNNATNVVIKVCEFQFCNDPFLGVYYHKNNKSWMESEFRVYSSANNCTFEYVSQPFLMDLEGKQGNFKNLREFVFKNIDGYFKIYSKHTPINLVRDLPQGFSALEPLVDLPIGINITRFQTLLALHRSYLTPGDSSSGWTAGAAAYYVGYLQPRTFLLKYNENGTITDAVDCALDPLSETKCTLKSFTVEKGIYQTSNFRVQPTESIVRFPNITNLCPFGEVFNATRFASVYAWNRKRISNCVADYSVLYNSASFSTFKCYGVSPTKLNDLCFTNVYADSFVIRGDEVRQIAPGQTGKIADYNYKLPDDFTGCVIAWNSNNLDSKVGGNYNYLYRLFRKSNLKPFERDISTEIYQAGSTPCNGVEGFNCYFPLQSYGFQPTNGVGYQPYRVVVLSFELLHAPATVCGPKKSTNLVKNKCVNFNFNGLTGTGVLTDSNKKFLPFQQFGRDIADTTDAVRDPQTLEILDITPCSFGGVSVITPGTNTSNQVAVLYQDVNCTEVPVAIHADQLTPTWRVYSTGSNVFQTRAGCLIGAEHVNNSYECDIPIGAGICASYQTQTNSPSGAGSVASQSIIAYTMSLGAENSVAYSNNSIAIPTNFTISVTTEILPVSMTKTSVDCTMYICGDSTECSNLLLQYGSFCTQLNRALTGIAVEQDKNTQEVFAQVKQIYKTPPIKDFGGFNFSQILPDPSKPSKRSFIEDLLFNKVTLADAGFIKQYGDCLGDIAARDLICAQKFNGLTVLPPLLTDEMIAQYTSALLAGTITSGWTFGAGAALQIPFAMQMAYRFNGIGVTQNVLYENQKLIANQFNSAIGKIQDSLSSTASALGKLQDVVNQNAQALNTLVKQLSSNFGAISSVLNDILSRLDPPEAEVQIDRLITGRLQSLQTYVTQQLIRAAEIRASANLAATKMSECVLGQSKRVDFCGKGYHLMSFPQSAPHGVVFLHVTYVPAQEKNFTTAPAICHDGKAHFPREGVFVSNGTHWFVTQRNFYEPQIITTDNTFVSGNCDVVIGIVNNTVYDPLQPELDSFKEELDKYFKNHTSPDVDLGDISGINASVVNIQKEIDRLNEVAKNLNESLIDLQELGKYEQYIKGSGRENLYFQGGGGSGYIPEAPRDGQAYVRKDGEWVLLSTFLGHHHHHHHH

SEQ ID NO: 2162 - protein, 1281 aa, Artificial Sequence
  Description of Artificial Sequence: Synthetic polypeptide
MGILPSPGMPALLSLVSLLSVLLMGCVAETGTQCVNLTTRTQLPPAYTNSFTRGVYYPDKVFRSSVLHSTQDLFLPFFSNVTWFHAIHVSGTNGTKRFDNPVLPFNDGVYFASTEKSNIIRGWIFGTTLDSKTQSLLIVNNATNVVIKVCEFQFCNDPFLGVYYHKNNKSWMESEFRVYSSANNCTFEYVSQPFLMDLEGKQGNFKNLREFVFKNIDGYFKIYSKHTPINLVRDLPQGFSALEPLVDLPIGINITRFQTLLALHRSYLTPGDSSSGWTAGAAAYYVGYLQPRTFLLKYNENGTITDAVDCALDPLSETKCTLKSFTVEKGIYQTSNFRVQPTESIVRFPNITNLCPFGEVFNATRFASVYAWNRKRISNCVADYSVLYNSASFSTFKCYGVSPTKLNDLCFTNVYADSFVIRGDEVRQIAPGQTGKIADYNYKLPDDFTGCVIAWNSNNLDSKVGGNYNYLYRLFRKSNLKPFERDISTEIYQAGSTPCNGVEGFNCYFPLQSYGFQPTNGVGYQPYRVVVLSFELLHAPATVCGPKKSTNLVKNKCVNFNFNGLTGTGVLTESNKKFLPFQQFGRDIADTTDAVRDPQTLEILDITPCSFGGVSVITPGTNTSNQVAVLYQDVNCTEVPVAIHADQLTPTWRVYSTGSNVFQTRAGCLIGAEHVNNSYECDIPIGAGICASYQTQTNSPSGAGSVASQSIIAYTMSLGAENSVAYSNNSIAIPTNFTISVTTEIIPVSMTKTSVDCTMYICGDSTECSNLLLQYGSFCTQLNRALTGIAVEQDKNTQEVFAQVKQIYKTPPIKDFGGFNFSQILPDPSKPSKRSFIEDLLFNKVTLADAGFIKQYGDCLGDIAARDLICAQKFNGLTVLPPLLTDEMIAQYTSALLAGTITSGWTFGAGAALQIPFAMQMAYRFNGIGVTQNVLYENQKLIANQFNSAIGKIQDSLSSTASALGKLQDVVNQNAQALNTLVKQLSSNFGAISSVLNDILSRLDPPEAEVQIDRLITGRLQSLQTYVTQQLIRAAEIRASANLAATKMSECVLGQSKRVDFCGKGYHLMSFPQSAPHGVVFLHVTYVPAQEKNFTTAPAICHDGKAHFPREGVFVSNGTHWFVTQRNFYEPQIITTDNTFVSGNCDVVIGIVNNTVYDPLQPELDSFKEELDKYFKNHTSPDVDLGDISGINASVVNIQKEIDRLNEVAKNLNESLIDLQELGKYEQYIKGSGRENLYFQGGGGSGYIPEAPRDGQAYVRKDGEWVLLSTFLGHHHHHHHH

SEQ ID NO: 2163 - protein, 1281 aa, Artificial Sequence
  Description of Artificial Sequence: Synthetic polypeptide
MGILPSPGMPALLSLVSLLSVLLMGCVAETGTQCVNLTTRTQLPPAYTNSFTRGVYYPDKVFRSSVLHSTQDLFLPFFSNVTWFHAIHVSGTNGTKRFDNPVLPFNDGVYFASTEKSNIIRGWIFGTTLDSKTQSLLIVNNATNVVIKVCEFQFCNDPFLGVYYHKNNKSWMESEFRVYSSANNCTFEYVSQPFLMDLEGKQGNFKNLREFVFKNIDGYFKIYSKHTPINLVRDLPQGFSALEPLVDLPIGINITRFQTLLALHRSYLTPGDSSSGWTAGAAAYYVGYLQPRTFLLKYNENGTITDAVDCAQDPLSETKCTLKSFTVEKGIYQTSNFRVQPTESIVRFPNITNLCPFGEVFNATRFASVYAWNRKRISNCVADYSVLYNSASFSTFKCYGVSPTKLNDLCFTNVYADSFVIRGDEVRQIAPGQTGKIADYNYKLPDDFTGCVIAWNSNNLDSKVGGNYNYLYRLFRKSNLKPFERDISTEIYQAGSTPCNGVEGFNCYFPLQSYGFQPTNGVGYQPYRVVVLSFELLHAPATVCGPKKSTNLVKNKCVNFNFNGLTGTGVLTESNKKFLPFQQFGRDIADTTDAVRDPQTLEILDITPCSFGGVSVITPGTNTSNQVAVLYQDVNCTEVPVAIHADQLTPTWRVYSTGSNVFQTRAGCLIGAEHVNNSYECDIPIGAGICASYQTQTNSPSGAGSVASQSIIAYTMSLGAENSVAYSNNSIAIPTNFTISVTTEILPVSMTKTSVDCTMYICGDSTECSNLLLQYGSFCTQLNRALTGIAVEQDKNTQEVFAQVKQIYKTPPIKDFGGFNFSQILPDPSKPSKRSFIEDLLFNKVTLADAGFIKQYGDCLGDIAARDLICAQKFNGLTVLPPLLTDEMIAQYTSALLAGTITSGWTFGAGAALQIPFAMQMAYRFNGIGVTQNVLYENQKLIANQFNSAIGKIQDSLSSTASALGKLQDVVNQNAQALNTLVKQLSSNFGAISSVLNDILSRLDPPEAEVQIDRLITGRLQSLQTYVTQQLIRAAEIRASANLAATKMSECVLGQSKRVDFCGKGYHLMSFPQSAPHGVVFLHVTYVPAQEKNFTTAPAICHDGKAHFPREGVFVSNGTHWFVTQRNFYEPQIITTDNTFVSGNCDVVIGIVNNTVYDPLQPELDSFKEELDKYFKNHTSPDVDLGDISGINASVVNIQKEIDRLNEVAKNLNESLIDLQELGKYEQYIKGSGRENLYFQGGGGSGYIPEAPRDGQAYVRKDGEWVLLSTFLGHHHHHHHH

SEQ ID NO: 2164 - protein, 1281 aa, Artificial Sequence
  Description of Artificial Sequence: Synthetic polypeptide
MGILPSPGMPALLSLVSLLSVLLMGCVAETGTQCVNLTTRTQLPPAYTNSFTRGVYYPDKVFRSSVLHSTQDLFLPFFSNVTWFHAIHVSGTNGTKRFDNPVLPFNDGVYFASTEKSNIIRGWIFGTTLDSKTQSLLIVNNATNVVIKVCEFQFCNDPFLGVYYHKNNKSWMESEFRVYSSANNCTFEYVSQPFLMDLEGKQGNFKNLREFVFKNIDGYFKIYSKYTPINLVRDLPQGFSALEPLVDLPIGINITRFQTLLALHRSYLTPGDSSSGWTAGAAAYYVGYLQPRTFLLKYNENGTITDAVDCALDPLSETKCTLKSFTVEKGIYQTSNFRVQPTESIVRFPNITNLCPFGEVFNATRFASVYAWNRKRISNCVADYSVLYNSASFSTFKCYGVSPTKLNDLCFTNVYADSFVIRGDEVRQIAPGQTGKIADYNYKLPDDFTGCVIAWNSNNLDSKVGGNYNYLYRLFRKSNLKPFERDISTEIYQAGSTPCNGVEGFNCYFPLQSYGFQPTNGVGYQPYRVVVLSFELLHAPATVCGPKKSTNLVKNKCVNFNFNGLTGTGVLTESNKKFLPFQQFGRDIADTTDAVRDPQTLEILDITPCSFGGVSVITPGTNTSNQVAVLYQDVNCTEVPVAIHADQLTPTWRVYSTGSNVFQTRAGCLIGAEHVNNSYECDIPIGAGICASYQTQTNSPSGAGSVASQSIIAYTMSLGAENSVAYSNNSIAIPTNFTISVTTEILPVSMTKTSVDCTMYICGDSTECSNLLLQYGSFCTQLNRALTGIAVEQDKNTQEVFAQVKQIYKTPPIKDFGGFNFSQILPDPSKPSKRSFIEDLLFNKVTLADAGFIKQYGDCLGDIAARDLICAQKFNGLTVLPPLLTDEMIAQYTSALLAGTITSGWTFGAGAALQIPFAMQMAYRFNGIGVTQNVLYENQKLIANQFNSAIGKIQDSLSSTASALGKLQDVVNQNAQALNTLVKQLSSNFGAISSVLNDILSRLDPPEAEVQIDRLITGRLQSLQTYVTQQLIRAAEIRASANLAATKMSECVLGQSKRVDFCGKGYHLMSFPQSAPHGVVFLHVTYVPAQEKNFTTAPAICHDGKAHFPREGVFVSNGTHWFVTQRNFYEPQIITTDNTFVSGNCDVVIGIVNNTVYDPLQPELDSFKEELDKYFKNHTSPDVDLGDISGINASVVNIQKEIDRLNEVAKNLNESLIDLQELGKYEQYIKGSGRENLYFQGGGGSGYIPEAPRDGQAYVRKDGEWVLLSTFLGHHHHHHHH

SEQ ID NO: 2165 - protein, 1281 aa, Artificial Sequence
  Description of Artificial Sequence: Synthetic polypeptide
MGILPSPGMPALLSLVSLLSVLLMGCVAETGTQCVNLTTRTQLPPAYTNSFTRGVYYPDKIFRSNVLHSTQDLFLPFFSNVTWFHAIHVSGTNGTKRFDNPVLPFNDGVYFASTEKSNIIRGWIFGTTLDSKTQSLLIVNNATNVVIKVCEFQFCNDPFLGVYYHKNNKSWMESEFRVYSSANNCTFEYVSQPFLMDLEGKQGNFKNLREFVFKNIDGYFKIYSKHTPINLVRDLPQGFSALEPLMKLPIGINITRFQTLLALHRSYLTPGDSSSGWTAGAAAYYVGYLQPRTFLLKYNENGTITDAVDCALDPLSETKCTLKSFTVEKGIYQTSNFRVQPTESIVRFPNITNLCPFGEVFNATRFASVYAWNRKRISNCVADYSVLYNSASFSTFKCYGVSPTKLNDLCFTNVYADSFVIRGDEVRQIAPGQTGKIADYNYKLPDDFTGCVIAWNSNNLDSKVGGNYNYLYRLFRKSNLKPFERDISTEIYQAGSTPCNGVEGFNCYFPLQSYGFQPTNGVGYQPYRVVVLSFELLHAPATVCGPKKSTNLVKNKCVNFNFNGLTGTGVLTESNKKFLPFQQFGRDIADTTDAVRDPQTLEILDITPCSFGGVSVITPGTNTSNQVAVLYQDVNCTEVPVAIHADQLTPTWRVYSTGSNVFQTRAGCLIGAEHVNNSYECDIPIGAGICASYQTQTNSPSGAGSVASQSIIAYTMSLGAENSVAYSNNSIAIPTNFTISVTTEILPVSMTKTSVDCTMYICGDSTECSNLLLQYGSFCTQLNRALTGIAVEQDKNTQEVFAQVKQIYKTPPIKDFGGFNFSQILPDPSKPSKRSFIEDLLFNKVTLADAGFIKQYGDCLGDIAARDLICAQKFNGLTVLPPLLTDEMIAQYTSALLAGTITSGWTFGAGAALQIPFAMQMAYRFNGIGVTQNVLYENQKLIANQFNSAIGKIQDSLSSTASALGKLQDVVNQNAQALNTLVKQLSSNFGAISSVLNDILSRLDPPEAEVQIDRLITGRLQSLQTYVTQQLIRAAEIRASANLAATKMSECVLGQSKRVDFCGKGYHLMSFPQSAPHGVVFLHVTYVPAQEKNFTTAPAICHDGKAHFPREGVFVSNGTHWFVTQRNFYEPQIITTDNTFVSGNCDVVIGIVNNTVYDPLQPELDSFKEELDKYFKNHTSPDVDLGDISGINASVVNIQKEIDRLNEVAKNLNESLIDLQELGKYEQYIKGSGRENLYFQGGGGSGYIPEAPRDGQAYVRKDGEWVLLSTFLGHHHHHHHH

SEQ ID NO: 2166 - protein, 1281 aa, Artificial Sequence
  Description of Artificial Sequence: Synthetic polypeptide
MGILPSPGMPALLSLVSLLSVLLMGCVAETGTQCVNLTTRTQLPPAYTNSFTRGVYYPDKVFRSDVLHSTQDLFLPFFSNVTWFHAIHVSGTNGTKRFDNPVLPFNDGVYFASTEKSNIIRGWIFGTTLDSKTQSLLIVNNATNVVIKVCEFQFCDDPFLGVYYHKNNKSWMEKEFRVYSSANNCTFEYVSQPFLMDLGGKQGNFKNLREFVFKNIDGYFKIYSKHTPINLVRDLPQGFSALEPLMDLPIGINITRFQTLLALHRSYLTPGDSSSGWTAGAAAYYVGYLQPRTFLLKYNENGTITDAVDCALDPLSETKCTLKSFTVEKGIYQTSNFRVQPTESIVRFPNITNLCPFGEVFNATRFASVYAWNRKRISNCVADYSVLYNSASFSTFKCYGVSPTKLNDLCFTNVYADSFVIRGDEVRQIAPGQTGKIADYNYKLPDDFTGCVIAWNSNNLDSKVGGNYNYLYRLFRKSNLKPFERDISTEIYQAGSTPCNGVEGFNCYFPLQSYGFQPTNGVGYQPYRVVVLSFELLHAPATVCGPKKSTNLVKNKCVNFNFNGLTGTGVLTESNKKFLPFQQFGRDIADNTDAVRDPQTLEILDITPCSFGGVSVITPGTNTSNQVAVLYQDVNCTEVPNAIHADQLTPTWRVYSTGSNVFQTRAGCLIGAEHVNNSYECDIPIGAGICASYQTQTNSPSGAGSVASQSIIAYTMSLGAENSVAYSNNSIAIPTNFTISVTTEILPVSMTKTSVDCTMYICGDSTECSNLLLQYGSFCTQLNRALQGIAREQDKNTQEVFAQVKQIYKTPPIKDFGGFNFSQILPDPSKPSKRSFIEDLLFNKVTLADAGFIKQYGDCLGDIAARDLICAQKFNGLTVLPPLLTDEMIAQYTSALLAGTITSGWTFGAGAALQIPFAMQMAYRFNGIGVTQNVLYENQKLIANQFNKAIGKIQDSLSSTASALGKLQDVVNQNAQALNTLVKQLSSNFGAISSVLNDILSRLDPPEAEVQIDRLITGRLQSLQTYVTQQLIRAAEIRASANLAATKMSECVLGQSKRVDFCGKGYHLMSFPQSAPHGVVFLHVTYVPAQEKNFTTAPAICHDGKAFFPREGVFVSNGTQWFVTQRNFYEPQIITTDNTFVSGNCDVVIGIVNNTVYDPLQPELDSFKEELDKYFKNHTSPDVDLGDISGINASVVNIQKEIDRLNEVAKNLNESLIDLQELGKYEQYIKGSGRENLYFQGGGGSGYIPEAPRDGQAYVRKDGEWVLLSTFLGHHHHHHHH

SEQ ID NO: 2167 - protein, 1281 aa, Artificial Sequence
  Description of Artificial Sequence: Synthetic polypeptide
MGILPSPGMPALLSLVSLLSVLLMGCVAETGTQCVNLTTRTQLPPAYTNSFTRGVYYPDKVFRSSVLHSTQDLFLPFFSNVTWFHAIHVSGTNGTKRFDNPVLPFNDGVYFASTEKSNIIRGWIFGTTLDSKTQSLLIVNNATNVVIKVCEFQFCNDPFLGVYYHKNNKSWMESEFRVYSSANNCTFEYVSQPFLMDLEGKQGNFKNLREFVFKNIDGYFKIYSKHTPINLVRDLPQGFSALEPLVDLPIGINITRFQTLLALHRSYLTPGDSSSGWTAGAAAYYVGYLQPRTFLLKYNENGTITDAVDCALDPLSETKCTLKSFTVEKGIYQTSNFRVQPTESIVRFPNITNLCPFGEVFNATRFASVYAWNRKRISNCVADYSVLYNSASFSTFKCYGVSPTKLNDLCFTNVYADSFVIRGDEVRQIAPGQTGKIADYNYKLPDDFTGCVIAWNSNNLDSKVGGNYNYLYRLFRKSNLKPFERDISTEIYQAGSTPCNGVEGFNCYFPLQSYGFQPTNGVGYQPYRVVVLSFELLHAPATVCGPKKSTNLVKNKCVNFNFNGLTGTGVLTESNKKFLPFQQFGRDIADTTDAVRDPQTLEILDITPCSFGGVSVITPGTNTSNQVAVLYQDVNCTEVPVAIHADQLTPTWRVYSTGSNVFQTRAGCLIGAEHVNNSYECDIPIGAGICASYQTQTNSPSGAGSVASQSIIAYTMSLGAENSVAYSNNSIAIPTNFTISVTTEIIPVSMPKTSVDCTMYICGDSTECSNLLLQYGSFCTQLNRALNGIAREQDKNTQEVFAQVKQIYKTPPIKDFGGFNFSQILPDPSKPSKRSFIEDLLFNKVTLADAGFIKQYGDCLGDIAARDLICAQKFNGLTVLPPLLTDEMIAQYTSALLAGTITSGWTFGAGAALQIPFAMQMAYRFNGIGVTQNVLYENQKLIANQFNSAIGKIQDSLSSTASALGKLQDVVNQNAQALNTLVKQLSSNFGAISSVLNDILSRLDPPEAEVQIDRLITGRLQSLQTYVTQQLIRAAEIRASANLAATKMSECVLGQSKRVDFCGKGYHLMSFPQSAPHGVVFLHVTYVPAQEKNFTTAPAICHDGKAHFPREGVFVSNGTHWFVTQRNFYEPQIITTDNTFVSGNCDVVIGIVNNTVYDPLQPELDSFKEELDKYFKNHTSPDVDLGDISGINASVVNIQKEIDRLNEVAKNLNESLIDLQELGKYEQYIKGSGRENLYFQGGGGSGYIPEAPRDGQAYVRKDGEWVLLSTFLGHHHHHHHH

SEQ ID NO: 2168 - protein, 1281 aa, Artificial Sequence
  Description of Artificial Sequence: Synthetic polypeptide
MGILPSPGMPALLSLVSLLSVLLMGCVAETGTQCVNLTTRTQLPPAYTNSFTRGVYYPDKVFRSSVLHSTQDLFLPFFSNVTWFHAIHVSGTNGTKRFDNPVLPFNDGVYFASTEKSNIIRGWIFGTTLDSKTQSLLIVNNATNVVIKVCEFQFCNDPFLGVYYHKNNKSWMESEFRVYSSANNCTFEYVSQPFLMDLEGKQGNFKNLREFVFKNIDGYFKIYSKHTPINLVRDLPQGFSALEPLVDLPIGINITRFQTLLALHRSYLTPGDSSSGWTAGAAAYYVGYLQPRTFLLKYNENGTITDAVDCALDPLSETKCTLKSFTVEKGIYQTSNFRVQPTESIVRFPNITNLCPFGEVFNATRFASVYAWNRKRISNCVADYSVLYNSASFSTFKCYGVSPTKLNDLCFTNVYADSFVIRGDEVRQIAPGQTGKIADYNYKLPDDFTGCVIAWNSNNLDSKVGGNYNYLYRLFRKSNLKPFERDISTEIYQAGSTPCNGVEGFNCYFPLQSYGFQPTNGVGYQPYRVVVLSFELLHAPATVCGPKKSTNLVKNKCVNFNFNGLTGTGVLTESNKKFLPFQQFGRDIADTTDAVRDPQTLEILDITPCSFGGVSVITPGTNTSNQVAVLYQDVNCTEVPVAIHADQLTPTWRVYSTGSNVFQTRAGCLIGAEHVNNSYECDIPIGAGICASYQTQTNSPSGAGSVASQSIIAYTMSLGAENSVAYSNNSIAIPTNFKISVTTEILPVSMTKTSVDCTMYICGDSTECSNLLLQYGSFCTQLNRALTGIAVEQDKNTQEVFAQVKQIYKTPPIKDFGGFNFSQILPDPSKPSKRSFIEDLLFNKVTLADAGFIKQYGDCLGDIAARDLICAQKFNGLTVLPPLLTDEMIAQYTSALLAGTITSGWTFGAGAALQIPFAMQMAYRFNGIGVTQNVLYENQKLIANQFNSAIGKIQDSLSSTASALGKLQDVVNQNAQALNTLVKQLSSNFGAISSVLNDILSRLDPPEAEVQIDRLITGRLQSLQTYVTQQLIRAAEIRASANLAATKMSECVLGQSKRVDFCGKGYHLMSFPQSAPHGVVFLHVTYVPAQEKNFTTAPAICHDGKAHFPREGVFVSNGTHWFVTQRNFYEPQIITTDNTFVSGNCDVVIGIVNNTVYDPLQPELDSFKEELDKYFKNHTSPDVDLGDISGINASVVNIQKEIDRLNEVAKNLNESLIDLQELGKYEQYIKGSGRENLYFQGGGGSGYIPEAPRDGQAYVRKDGEWVLLSTFLGHHHHHHHH

SEQ ID NO: 2169 - protein, 1281 aa, Artificial Sequence
  Description of Artificial Sequence: Synthetic polypeptide
MGILPSPGMPALLSLVSLLSVLLMGCVAETGTQCVNLTTRTQLPPAYTNSFTRGVYYPDKVFRSSVLHSTQDLFLPFFSNVTWFHAIHVSGTNGTKRFDNPVLPFNDGVYFASTEKSNIIRGWIFGTTLDSKTQSLLIVNNATNVVIKVCEFQFCNDPFLGVYYHKNNKSWMESEFRVYSSANNCTFEYVSQPFLMDLEGKQGNFKNLREFVFKNIDGYFKIYSKHTPINLVRDLPQGFSALEPLVDLPIGINITRFQTLLALHRSYLTPGDSSSGWTAGAAAYYVGYLQPRTFLLKYNENGTITDAVDCALDPLSETKCTLKSFTVEKGIYQTSNFRVQPTESIVRFPNITNLCPFGEVFNATRFASVYAWNRKRISNCVADYSVLYNSASFSTFKCYGVSPTKLNDLCFTNVYADSFVIRGDEVRQIAPGQTGKIADYNYKLPDDFTGCVIAWNSNNLDSKVGGNYNYLYRLFRKSNLKPFERDISTEIYQAGSTPCNGVEGFNCYFPLQSYGFQPTNGVGYQPYRVVVLSFELLHAPATVCGPKKSTNLVKNKCVNFNFNGLTGTGVLTESNKKFLPFQQFGRDIADTTDAVRDPQTLEILDITPCSFGGVSVITPGTNTSNQVAVLYQDVNCTEVPVAIHADQLTPTWRVYSTGSNVFQTRAGCLIGAEHVNNSYECDIPIGAGICASYQTQTNSPSGAGSVASQSIIAYTMSLGAENSVAYSNNSIAIPTNFTISVTTEILPVSMTKTSVDCTMYICGDSTECSNLLLQYGSFCTQLNRALTGIAVEQDKNTQEVFAQVKQIYKTPPIKDFGGFNFSQILPDPSKPSKRSFIEDLLFNKVTLADAGFIKQYGDCLGDIAARDLICAQKFNGLTVLPPLLTDEMIAQYTSALLAGTITSGWTFGAGAALQIPFAMQMAYRFNGIGVTQNVLYENQKLIANQFNSAIGKIQDGLSSTASALGKLQDVVNQNAQALNTLVKQLSSNFGAISSVLNDILSRLDPPEAEVQIDRLITGRLQSLQTYVTQQLIRAAEIRASANLAATKMSECVLGQSKRVDFCGKGYHLMSFPQSAPHGVVFLHVTYVPAQEKNFTTAPAICHDGKAHFPREGVFVSNGTHWFVTQRNFYEPQIITTDNTFVSGNCDVVIGIVNNTVYDPLQPELDSFKEELDKYFKNHTSPDVDLGDISGINASVVNIQKEIDRLNEVAKNLNESLIDLQELGKYEQYIKGSGRENLYFQGGGGSGYIPEAPRDGQAYVRKDGEWVLLSTFLGHHHHHHHH

SEQ ID NO: 2170 - protein, 1281 aa, Artificial Sequence
  Description of Artificial Sequence: Synthetic polypeptide
MGILPSPGMPALLSLVSLLSVLLMGCVAETGTQCVNLTTRTQLPPAYTNSFTRGVYYPDKVFRSSVLHSTQDLFLPFFSNVTWFHAIHVSGTNGTKRFDNPVLPFNDGVYFASTEKSNIIRGWIFGTTLDSKTQSLLIVNNATNVVIKVCEFQFCNDPFLGVYYHKNNKSWMESEFRVYSSANNCTFEYVSQPFLMDLEGKQGNFKNLREFVFKNIDGYFKIYSKFTPINLVRDLPQGFSALEPLVDLPIGINITRFQTLLALHRSYLTPGDSSSGWTAGAAAYYVGYLQPRTFLLKYNENGTITDAVDCALDPLSETKCTLKSFTVEKGIYQTSNFRVQPTESIVRFPNITNLCPFGEVFNATRFASVYAWNRKRISNCVADYSVLYNSASFSTFKCYGVSPTKLNDLCFTNVYADSFVIRGDEVRQIAPGQTGKIADYNYKLPDDFTGCVIAWNSNNLDSKVGGNYNYLYRLFRKSNLKPFERDISTEIYQAGSTPCNGVEGFNCYFPLQSYGFQPTNGVGYQPYRVVVLSFELLHAPATVCGPKKSTNLVKNKCVNFNFNGLTGTGVLTESNKKFLPFQQFGRDIADTTDAVRDPQTLEILDITPCSFGGVSVITPGTNTSNQVAVLYQDVNCTEVPVAIHADQLTPTWRVYSTGSNVFQTRAGCLIGAEHVNNSYECDIPIGAGICASYQTQTNSPSGAGSVASQSIIAYTMSLGAENSVAYSNNSIAIPTNFTISVTTEILPVSMTKTSVDCTMYICGDSTECSNLLLQYGSFCTQLNRALTGIAVEQDKNTQEVFAQVKQIYKTPPIKDFGGFNFSQILPDPSKPSKRSFIEDLLFNKVTLADAGFIKQYGDCLGDIAARDLICAQKFNGLTVLPPLLTDEMIAQYTSALLAGTITSGWTFGAGAALQIPFAMQMAYRFNGIGVTQNVLYENQKLIANQFNSAIGKIQDSLSSTASALGKLQDVVNQNAQALNTLVKQLSSNFGAISSVLNDILSRLDPPEAEVQIDRLITGRLQSLQTYVTQQLIRAAEIRASANLAATKMSECVLGQSKRVDFCGKGYHLMSFPQSAPHGVVFLHVTYVPAQEKNFTTAPAICHDGKAHFPREGVFVSNGTHWFVTQRNFYEPQIITTDNTFVSGNCDVVIGIVNNTVYDPLQPELDSFKEELDKYFKNHTSPDVDLGDISGINASVVNIQKEIDRLNEVAKNLNESLIDLQELGKYEQYIKGSGRENLYFQGGGGSGYIPEAPRDGQAYVRKDGEWVLLSTFLGHHHHHHHH

SEQ ID NO: 2171 - protein, 1281 aa, Artificial Sequence
  Description of Artificial Sequence: Synthetic polypeptide
MGILPSPGMPALLSLVSLLSVLLMGCVAETGTQCVNLTTRTQLPPAYTNSFTRGVYYPDKVFRSDVLHSTQDLFLPFFSNVTWFHAIHVSGTNGTKRFDNPVLPFNDGVYFASTEKSNIIRGWIFGTTLDSKTQSLLIVNNATNVVIKVCEFQFCENPFLGVYYHKNNKSWMEKEFRVYSSANNCTFEYVSQPFLMDLGGKQGNFKWLREFVFKNIDGYFKIYSKHTPINLVRDLPQGFSALEPLMDLPIGINITRFQTLLALHRSYLTPGDSSSGWTAGAAAYYVGYLQPRTFLLKYNENGTITDAVDCAYDPLSETKCTLKSFTVEKGIYQTSNFRVQPTESIVRFPNITNLCPFGEVFNATRFASVYAWNRKRISNCVADYSVLYNSASFSTFKCYGVSPTKLNDLCFTNVYADSFVIRGDEVRQIAPGQTGKIADYNYKLPDDFTGCVIAWNSNNLDSKVGGNYNYLYRLFRKSNLKPFERDISTEIYQAGSTPCNGVEGFNCYFPLQSYGFQPTNGVGYQPYRVVVLSFELLHAPATVCGPKKSTNLVKNKCVNFNFNGLTGTGVLTESNKKFLPFQQFGRDIADNTDAVRDPQTLEILDITPCSFGGVSVITPGTNTSNQVAVLYQDVNCTEVPNAIHADQLTPTWRVYSTGSNVFQTRAGCLIGAEHVNNSYECDIPIGAGICASYQTQTNSPSGAGSVASQSIIAYTMSLGAENSVAYSNNSIAIPTNFTISVTTEILPVSMTKTSVDCTMYICGDSTECSNLLLQYGSFCTQLNRALQGIAQEQDKNTQEVFAQVKQIYKTPPIKDFGGFNFSQILPDPSKPSKRSFIEDLLFNKVTLADAGFIKQYGDCLGDIAARDLICAQKFNGLTVLPPLLTDEMIAQYTSALLAGTITSGWTFGAGAALQIPFAMQMAYRFNGIGVTQNVLYENQKLIANQFNKAIGKIQDSLSSTASALGKLQDVVNQNAQALNTLVKQLSSNFGAISSVLNDILSRLDPPEAEVQIDRLITGRLQSLQTYVTQQLIRAAEIRASANLAATKMSECVLGQSKRVDFCGKGYHLMSFPQSAPHGVVFLHVTYVPAQEKNFTTAPAICHDGKAFFPREGVFVSNGTQWFVTQRNFYEPQIITTDNTFVSGNCDVVIGIVNNTVYDPLQPELDSFKEELDKYFKNHTSPDVDLGDISGINASVVNIQKEIDRLNEVAKNLNESLIDLQELGKYEQYIKGSGRENLYFQGGGGSGYIPEAPRDGQAYVRKDGEWVLLSTFLGHHHHHHHH

SEQ ID NO: 2172 - protein, 1281 aa, Artificial Sequence
  Description of Artificial Sequence: Synthetic polypeptide
MGILPSPGMPALLSLVSLLSVLLMGCVAETGTQCVNLTTRTQLPPAYTNSFTRGVYYPDKVFRSSVLHSTQDLFLPFFSNVTWFHAIHVSGTNGTKRFDNPVLPFNDGVYFASTEKSNIIRGWIFGTTLDSKTQSLLIVNNATNVVIKVCEFQFCNDPFLGVYYHKNNKSWMESEFRVYSSANNCTFEYVSQPFLMDLEGKQGNFKNLREFVFKNIDGYFKIYSKHTPINLVRDLPQGFSALEPLVDLPIGINITRFQTLLALHRSYLTPGDSSSGWTAGAAAYYVGYLQPRTFLLKYNENGTITDAVDCAYDPLSETKCTLKSFTVEKGIYQTSNFRVQPTESIVRFPNITNLCPFGEVFNATRFASVYAWNRKRISNCVADYSVLYNSASFSTFKCYGVSPTKLNDLCFTNVYADSFVIRGDEVRQIAPGQTGKIADYNYKLPDDFTGCVIAWNSNNLDSKVGGNYNYLYRLFRKSNLKPFERDISTEIYQAGSTPCNGVEGFNCYFPLQSYGFQPTNGVGYQPYRVVVLSFELLHAPATVCGPKKSTNLVKNKCVNFNFNGLTGTGVLTESNKKFLPFQQFGRDIADTTDAVRDPQTLEILDITPCSFGGVSVITPGTNTSNQVAVLYQDVNCTEVPVAIHADQLTPTWRVYSTGSNVFQTRAGCLIGAEHVNNSYECDIPIGAGICASYQTQTNSPSGAGSVASQSIIAYTMSLGAENSVAYSNNSIAIPTNFTISVTTEILPVSMTKTSVDCTMYICGDSTECSNLLLQYGSFCTQLNRALTGIAVEQDKNTQEVFAQVKQIYKTPPIKDFGGFNFSQILPDPSKPSKRSFIEDLLFNKVTLADAGFIKQYGDCLGDIAARDLICAQKFNGLTVLPPLLTDEMIAQYTSALLAGTITSGWTFGAGAALQIPFAMQMAYRFNGIGVTQNVLYENQKLIANQFNSAIGKIQDSLSSTASALGKLQDVVNQNAQALNTLVKQLSSNFGAISSVLNDILSRLDPPEAEVQIDRLITGRLQSLQTYVTQQLIRAAEIRASANLAATKMSECVLGQSKRVDFCGKGYHLMSFPQSAPHGVVFLHVTYVPAQEKNFTTAPAICHDGKAHFPREGVFVSNGTHWFVTQRNFYEPQIITTDNTFVSGNCDVVIGIVNNTVYDPLQPELDSFKEELDKYFKNHTSPDVDLGDISGINASVVNIQKEIDRLNEVAKNLNESLIDLQELGKYEQYIKGSGRENLYFQGGGGSGYIPEAPRDGQAYVRKDGEWVLLSTFLGHHHHHHHH

SEQ ID NO: 2173 - protein, 1281 aa, Artificial Sequence
  Description of Artificial Sequence: Synthetic polypeptide
MGILPSPGMPALLSLVSLLSVLLMGCVAETGTQCVNLTTRTQLPPAYTNSFTRGVYYPDKVFRSSVLHSTQDLFLPFFSNVTWFHAIHVSGTNGTKRFDNPVLPFNDGVYFASTEKSNIIRGWIFGTTLDSKTQSLLIVNNATNVVIKVCEFQFCNDPFLGVYYHKNNKSWMESEFRVYSSANNCTFEYVSQPFMMDLEGKQGNFKNLREFVFKNIDGYFKIYSKHTPINLVRDLPQGFSALEPLVDLPIGINITRFQTLLALHRSYLTPGDSSSGWTAGAAAYYVGYLQPRTFLLKYNENGTITDAVDCALDPLSETKCTLKSFTVEKGIYQTSNFRVQPTESIVRFPNITNLCPFGEVFNATRFASVYAWNRKRISNCVADYSVLYNSASFSTFKCYGVSPTKLNDLCFTNVYADSFVIRGDEVRQIAPGQTGKIADYNYKLPDDFTGCVIAWNSNNLDSKVGGNYNYLYRLFRKSNLKPFERDISTEIYQAGSTPCNGVEGFNCYFPLQSYGFQPTNGVGYQPYRVVVLSFELLHAPATVCGPKKSTNLVKNKCVNFNFNGLTGTGVLTESNKKFLPFQQFGRDIADTTDAVRDPQTLEILDITPCSFGGVSVITPGTNTSNQVAVLYQDVNCTEVPVAIHADQLTPTWRVYSTGSNVFQTRAGCLIGAEHVNNSYECDIPIGAGICASYQTQTNSPSGAGSVASQSIIAYTMSLGAENSVAYSNNSIAIPTNFTISVTTEILPVSMTKTSVDCTMYICGDSTECSNLLLQYGSFCTQLNRALTGIAVEQDKNTQEVFAQVKQIYKTPPIKDFGGFNFSQILPDPSKPSKRSFIEDLLFNKVTLADAGFIKQYGDCLGDIAARDLICAQKFNGLTVLPPLLTDEMIAQYTSALLAGTITSGWTFGAGAALQIPFAMQMAYRFNGIGVTQNVLYENQKLIANQFNSAIGKIQDSLSSTASALGKLQDVVNQNAQALNTLVKQLSSNFGAISSVLNDILSRLDPPEAEVQIDRLITGRLQSLQTYVTQQLIRAAEIRASANLAATKMSECVLGQSKRVDFCGKGYHLMSFPQSAPHGVVFLHVTYVPAQEKNFTTAPAICHDGKAHFPREGVFVSNGTHWFVTQRNFYEPQIITTDNTFVSGNCDVVIGIVNNTVYDPLQPELDSFKEELDKYFKNHTSPDVDLGDISGINASVVNIQKEIDRLNEVAKNLNESLIDLQELGKYEQYIKGSGRENLYFQGGGGSGYIPEAPRDGQAYVRKDGEWVLLSTFLGHHHHHHHH

SEQ ID NO: 2174 - protein, 1281 aa, Artificial Sequence
  Description of Artificial Sequence: Synthetic polypeptide
MGILPSPGMPALLSLVSLLSVLLMGCVAETGTQCVNLTTRTQLPPAYTNSFTRGVYYPDKVFRSSVLHSTQDLFLPFFSNVTWFHAIHVSGTNGTKRFDNPVLPFNDGVYFASTEKSNIIRGWIFGTTLDSKTQSLLIVNNATNVVIKVCEFQFCNDPFLTVYYHKNNKSWMESEFRVYSSANNCTFEYVSQPFLMDLEGKQGNFKNLREFVFKNIDGYFKIYSKHTPINLVRDLPQGFSALEPLVDLPIGINITRFQTLLALHRSYLTPGDSSSGWTAGAAAYYVGYLQPRTFLLKYNENGTITDAVDCALDPLSETKCTLKSFTVEKGIYQTSNFRVQPTESIVRFPNITNLCPFGEVFNATRFASVYAWNRKRISNCVADYSVLYNSASFSTFKCYGVSPTKLNDLCFTNVYADSFVIRGDEVRQIAPGQTGKIADYNYKLPDDFTGCVIAWNSNNLDSKVGGNYNYLYRLFRKSNLKPFERDISTEIYQAGSTPCNGVEGFNCYFPLQSYGFQPTNGVGYQPYRVVVLSFELLHAPATVCGPKKSTNLVKNKCVNFNFNGLTGTGVLTESNKKFLPFQQFGRDIADTTDAVRDPQTLEILDITPCSFGGVSVITPGTNTSNQVAVLYQDVNCTEVPVAIHADQLTPTWRVYSTGSNVFQTRAGCLIGAEHVNNSYECDIPIGAGICASYQTQTNSPSGAGSVASQSIIAYTMSLGAENSVAYSNNSIAIPTNFTISVTTEILPVSMTKTSVDCTMYICGDSTECSNLLLQYGSFCTQLNRALTGIAVEQDKNTQEVFAQVKQIYKTPPIKDFGGFNFSQILPDPSKPSKRSFIEDLLFNKVTLADAGFIKQYGDCLGDIAARDLICAQKFNGLTVLPPLLTDEMIAQYTSALLAGTITSGWTFGAGAALQIPFAMQMAYRFNGIGVTQNVLYENQKLIANQFNSAIGKIQDSLSSTASALGKLQDVVNQNAQALNTLVKQLSSNFGAISSVLNDILSRLDPPEAEVQIDRLITGRLQSLQTYVTQQLIRAAEIRASANLAATKMSECVLGQSKRVDFCGKGYHLMSFPQSAPHGVVFLHVTYVPAQEKNFTTAPAICHDGKAHFPREGVFVSNGTHWFVTQRNFYEPQIITTDNTFVSGNCDVVIGIVNNTVYDPLQPELDSFKEELDKYFKNHTSPDVDLGDISGINASVVNIQKEIDRLNEVAKNLNESLIDLQELGKYEQYIKGSGRENLYFQGGGGSGYIPEAPRDGQAYVRKDGEWVLLSTFLGHHHHHHHH

SEQ ID NO: 2175 - protein, 1281 aa, Artificial Sequence
  Description of Artificial Sequence: Synthetic polypeptide
MGILPSPGMPALLSLVSLLSVLLMGCVAETGTQCVNLTTRTQLPPAYTNSFTRGVYYPDKIFRSSVLHLTQDLFLPFFSNVTWFHAIHVSGTNGTKRFDNPVLPFNDGVYFAATEKSNIIRGWIFGTTLDSKTQSLLIVNNATNVVIKVCEFQFCNDPFLGVYYHKNNKSWMESEFRVYSSANNCTFEYVSQPFLMDLEGKQGNFKNLREFVFKNIDGYFKIYSKYTPINLVRDLPQGFSALKPLVKLPIGINITRFQTLLALHRSYLTPGDSSSGWTAGAAAYYVGYLQPRTFLLKYNENGTITDAVDCALDPLSETKCTLKSFTVEKGIYQTSNFRVQPTESIVRFPNITNLCPFGEVFNATRFASVYAWNRKRISNCVADYSVLYNSASFSTFKCYGVSPTKLNDLCFTNVYADSFVIRGDEVRQIAPGQTGKIADYNYKLPDDFTGCVIAWNSNNLDSKVGGNYNYLYRLFRKSNLKPFERDISTEIYQAGSTPCNGVEGFNCYFPLQSYGFQPTNGVGYQPYRVVVLSFELLHAPATVCGPKKSTNLVKNKCVNFNFNGLTGTGVLTESNKKFLPFQQFGRDISDTTDAVRDPQTLEILDITPCSFGGVSVITPGTNTSNQVAVLYQDVNCTDVPVAIHADQLTPTWRVYSTGSNVFQTQAGCLIGAEHVNNSYECDIPIGAGICASYQTQTNSPSGAGSVASQSIIAYTMSLGAENSVAYSNNSIAIPTNFTISVTTEILPVSMTKTSVDCTMYICGDSTECSNLLLQYGSFCTQLNRALTGIAVEQDKNTQEVFAQVKQIYKTPPIKDFGGFNFSQILPDPSKPSKRSFIEDLLFNKVTLADAGFIKQYGDCLGDIAARDLICAQKFNGLTVLPPLLTDEMIAAYTAALLAGTATAGWTFGAGAALQIPFAMQMAYRFNGIGVTQNVLYENQKLIANQFNSAIGKIQDSLSSTASALGKLQDVVNQNAQALNTLVKQLSSNFGAISSVLNDILSRLDPPEAEVQIDRLITGRLQSLQTYVTQQLIRAAEIRASANLAATKMSECVLGQSKRVDFCGKGYHLMSFPQSAPHGVVFLHVTYVPAQEKNFTTAPAICHDGKAHFPREGVFVSNGTHWFVTQRNFYEPQIITTDNTFVSGNCDVVIGIVNNTVYDPLQPELDSFKEELDKYFKNHTSPDVDLGDISGINASVVNIQKEIDRLNEVAKNLNESLIDLQELGKYEQYIKGSGRENLYFQGGGGSGYIPEAPRDGQAYVRKDGEWVLLSTFLGHHHHHHHH

SEQ ID NO: 2176 - protein, 1281 aa, Artificial Sequence
  Description of Artificial Sequence: Synthetic polypeptide
MGILPSPGMPALLSLVSLLSVLLMGCVAETGTQCVNLTTRTQLPPAYTNSFTRGVYYPDKVFRSSVLHSTQDLFLPFFSNVTWFHAIHVSGTNGTKRFDNPVLPFNDGVYFASTEKSNIIRGWIFGTTLDSKTQSLLIVNNATNVVIKVCEFQFCNDPFLGVYYHKNNKSWMEKEFRVYSSANNCTFEYVSQPFLMDLEGKQGNFKNLREFVFKNIDGYFKIYSKHTPINLVRDLPQGFSALEPLVDLPIGINITRFQTLLALHRSYLTPGDSSSGWTAGAAAYYVGYLQPRTFLLKYNENGTITDAVDCALDPLSETKCTLKSFTVEKGIYQTSNFRVQPTESIVRFPNITNLCPFGEVFNATRFASVYAWNRKRISNCVADYSVLYNSASFSTFKCYGVSPTKLNDLCFTNVYADSFVIRGDEVRQIAPGQTGKIADYNYKLPDDFTGCVIAWNSNNLDSKVGGNYNYLYRLFRKSNLKPFERDISTEIYQAGSTPCNGVEGFNCYFPLQSYGFQPTNGVGYQPYRVVVLSFELLHAPATVCGPKKSTNLVKNKCVNFNFNGLTGTGVLTESNKKFLPFQQFGRDIADTTDAVRDPQTLEILDITPCSFGGVSVITPGTNTSNQVAVLYQDVNCTEVPVAIHADQLTPTWRVYSTGSNVFQTRAGCLIGAEHVNNSYECDIPIGAGICASYQTQTNSPSGAGSVASQSIIAYTMSLGAENSVAYSNNSIAIPTNFTISVTTEILPVSMTKTSVDCTMYICGDSTECSNLLLQYGSFCTQLNRALTGIAVEQDKNTQEVFAQVKQIYKTPPIKDFGGFNFSQILPDPSKPSKRSFIEDLLFNKVTLADAGFIKQYGDCLGDIAARDLICAQKFNGLTVLPPLLTDEMIAQYTSALLAGTITSGWTFGAGAALQIPFAMQMAYRFNGIGVTQNVLYENQKLIANQFNSAIGKIQDSLSSTASALGKLQDVVNQNAQALNTLVKQLSSNFGAISSVLNDILSRLDPPEAEVQIDRLITGRLQSLQTYVTQQLIRAAEIRASANLAATKMSECVLGQSKRVDFCGKGYHLMSFPQSAPHGVVFLHVTYVPAQEKNFTTAPAICHDGKAHFPREGVFVSNGTHWFVTQRNFYEPQIITTDNTFVSGNCDVVIGIVNNTVYDPLQPELDSFKEELDKYFKNHTSPDVDLGDISGINASVVNIQKEIDRLNEVAKNLNESLIDLQELGKYEQYIKGSGRENLYFQGGGGSGYIPEAPRDGQAYVRKDGEWVLLSTFLGHHHHHHHH

SEQ ID NO: 2177 - protein, 1281 aa, Artificial Sequence
  Description of Artificial Sequence: Synthetic polypeptide
MGILPSPGMPALLSLVSLLSVLLMGCVAETGTQCVNLTTRTQLPPAYTNSFTRGVYYPDKVFRSSVLHSTQDLFLPFFSNVTWFHAIHVSGTNGTKRFDNPVLPFNDGVYFASTEKSNIIRGWIFGTTLDSKTQSLLIVNNATNVVIKVCEFQFCNDPFLGVYYHKNNKSWMESEFRVYSSANNCTFEYVSQPFLMDLEGKQGNFKNLREFVFKNIDGYFKIYSKHTPINLVRDLPQGFSALEPLVDLPIGINITRFQTLLALHRSYLTPGDSSSGWTAGAAAYYVGYLQPRTFLLKYNENGTITDAVDCALDPLSETKCTLKSFTVEKGIYQTSNFRVQPTESIVRFPNITNLCPFGEVFNATRFASVYAWNRKRISNCVADYSVLYNSASFSTFKCYGVSPTKLNDLCFTNVYADSFVIRGDEVRQIAPGQTGKIADYNYKLPDDFTGCVIAWNSNNLDSKVGGNYNYLYRLFRKSNLKPFERDISTEIYQAGSTPCNGVEGFNCYFPLQSYGFQPTNGVGYQPYRVVVLSFELLHAPATVCGPKKSTNLVKNKCVNFNFNGLTGTGVLTESNKKFLPFQQFGRDIADTTDAVRDPQTLEILDITPCSFGGVSVITPGTNTSNQVAVLYQDVNCTEVPVAIHADQLTPTWRVYSTGSNVFQTRAGCLIGAEHVNNSYECDIPIGAGICASYQTQTNSPSGAGSVASQSIIAYTMSLGAENSVAYSNNSIAIPTNFYISVTTEILPVSMTKTSVDCTMYICGDSTECSNLLLQYGSFCTQLNRALTGIAVEQDKNTQEVFAQVKQIYKTPPIKDFGGFNFSQILPDPSKPSKRSFIEDLLFNKVTLADAGFIKQYGDCLGDIAARDLICAQKFNGLTVLPPLLTDEMIAQYTSALLAGTITSGWTFGAGAALQIPFAMQMAYRFNGIGVTQNVLYENQKLIANQFNSAIGKIQDSLSSTASALGKLQDVVNQNAQALNTLVKQLSSNFGAISSVLNDILSRLDPPEAEVQIDRLITGRLQSLQTYVTQQLIRAAEIRASANLAATKMSECVLGQSKRVDFCGKGYHLMSFPQSAPHGVVFLHVTYVPAQEKNFTTAPAICHDGKAHFPREGVFVSNGTHWFVTQRNFYEPQIITTDNTFVSGNCDVVIGIVNNTVYDPLQPELDSFKEELDKYFKNHTSPDVDLGDISGINASVVNIQKEIDRLNEVAKNLNESLIDLQELGKYEQYIKGSGRENLYFQGGGGSGYIPEAPRDGQAYVRKDGEWVLLSTFLGHHHHHHHH

SEQ ID NO: 2178 - protein, 1281 aa, Artificial Sequence
  Description of Artificial Sequence: Synthetic polypeptide
MGILPSPGMPALLSLVSLLSVLLMGCVAETGTQCVNLTTRTQLPPAYTNSFTRGVYYPDKVFRSSVLHSTQDLFLPFFSNVTWFHAIHVSGTNGTKRFDNPVLPFNDGVYFASIEKSNIIRGWIFGTTLDSKTQSLLIVNNATNVVIKVCEFQFCNDPFLGVYYHKNNKSWMESEFRVYSSANNCTFEYVSQPFLMDLEGKQGNFKNLREFVFKNIDGYFKIYSKHTPINLVRDLPQGFSALEPLVDLPIGINITRFQTLLALHRSYLTPGDSSSGWTAGAAAYYVGYLQPRTFLLKYNENGTITDAVDCALDPLSETKCTLKSFTVEKGIYQTSNFRVQPTESIVRFPNITNLCPFGEVFNATRFASVYAWNRKRISNCVADYSVLYNSASFSTFKCYGVSPTKLNDLCFTNVYADSFVIRGDEVRQIAPGQTGKIADYNYKLPDDFTGCVIAWNSNNLDSKVGGNYNYLYRLFRKSNLKPFERDISTEIYQAGSTPCNGVEGFNCYFPLQSYGFQPTNGVGYQPYRVVVLSFELLHAPATVCGPKKSTNLVKNKCVNFNFNGLTGTGVLTESNKKFLPFQQFGRDIADTTDAVRDPQTLEILDITPCSFGGVSVITPGTNTSNQVAVLYQDVNCTEVPVAIHADQLTPTWRVYSTGSNVFQTRAGCLIGAEHVNNSYECDIPIGAGICASYQTQTNSPSGAGSVASQSIIAYTMSLGAENSVAYSNNSIAIPTNFTISVTTEILPVSMTKTSVDCTMYICGDSTECSNLLLQYGSFCTQLNRALTGIAVEQDKNTQEVFAQVKQIYKTPPIKDFGGFNFSQILPDPSKPSKRSFIEDLLFNKVTLADAGFIKQYGDCLGDIAARDLICAQKFNGLTVLPPLLTDEMIAQYTSALLAGTITSGWTFGAGAALQIPFAMQMAYRFNGIGVTQNVLYENQKLIANQFNSAIGKIQDSLSSTASALGKLQDVVNQNAQALNTLVKQLSSNFGAISSVLNDILSRLDPPEAEVQIDRLITGRLQSLQTYVTQQLIRAAEIRASANLAATKMSECVLGQSKRVDFCGKGYHLMSFPQSAPHGVVFLHVTYVPAQEKNFTTAPAICHDGKAHFPREGVFVSNGTHWFVTQRNFYEPQIITTDNTFVSGNCDVVIGIVNNTVYDPLQPELDSFKEELDKYFKNHTSPDVDLGDISGINASVVNIQKEIDRLNEVAKNLNESLIDLQELGKYEQYIKGSGRENLYFQGGGGSGYIPEAPRDGQAYVRKDGEWVLLSTFLGHHHHHHHH

SEQ ID NO: 2179 - protein, 1281 aa, Artificial Sequence
  Description of Artificial Sequence: Synthetic polypeptide
MGILPSPGMPALLSLVSLLSVLLMGCVAETGTQCVNLTTRTQLPPAYTNSFTRGVYYPDKVFRSSVLHSTQDLFLPFFSNVTWFHAIHVSGTNGTKRFDNPVLPFRDGVYFASTEKSNIIRGWIFGTTLDSKTQSLLIVNNATNVVIKVCEFQFCNDPFLGVYYHKNNKSWMESEFRVYSSANNCTFEYVSQPFLMDLEGKQGNFKNLREFVFKNIDGYFKIYSKHTPINLVRDLPQGFSALEPLVDLPIGINITRFQTLLALHRSYLTPGDSSSGWTAGAAAYYVGYLQPRTFLLKYNENGTITDAVDCALDPLSETKCTLKSFTVEKGIYQTSNFRVQPTESIVRFPNITNLCPFGEVFNATRFASVYAWNRKRISNCVADYSVLYNSASFSTFKCYGVSPTKLNDLCFTNVYADSFVIRGDEVRQIAPGQTGKIADYNYKLPDDFTGCVIAWNSNNLDSKVGGNYNYLYRLFRKSNLKPFERDISTEIYQAGSTPCNGVEGFNCYFPLQSYGFQPTNGVGYQPYRVVVLSFELLHAPATVCGPKKSTNLVKNKCVNFNFNGLTGTGVLTESNKKFLPFQQFGRDIADTTDAVRDPQTLEILDITPCSFGGVSVITPGTNTSNQVAVLYQDVNCTEVPVAIHADQLTPTWRVYSTGSNVFQTRAGCLIGAEHVNNSYECDIPIGAGICASYQTQTNSPSGAGSVASQSIIAYTMSLGAENSVAYSNNSIAIPTNFTISVTTEILPVSMTKTSVDCTMYICGDSTECSNLLLQYGSFCTQLNRALTGIAVEQDKNTQEVFAQVKQIYKTPPIKDFGGFNFSQILPDPSKPSKRSFIEDLLFNKVTLADAGFIKQYGDCLGDIAARDLICAQKFNGLTVLPPLLTDEMIAQYTSALLAGTITSGWTFGAGAALQIPFAMQMAYRFNGIGVTQNVLYENQKLIANQFNSAIGKIQDSLSSTASALGKLQDVVNQNAQALNTLVKQLSSNFGAISSVLNDILSRLDPPEAEVQIDRLITGRLQSLQTYVTQQLIRAAEIRASANLAATKMSECVLGQSKRVDFCGKGYHLMSFPQSAPHGVVFLHVTYVPAQEKNFTTAPAICHDGKAHFPREGVFVSNGTHWFVTQRNFYEPQIITTDNTFVSGNCDVVIGIVNNTVYDPLQPELDSFKEELDKYFKNHTSPDVDLGDISGINASVVNIQKEIDRLNEVAKNLNESLIDLQELGKYEQYIKGSGRENLYFQGGGGSGYIPEAPRDGQAYVRKDGEWVLLSTFLGHHHHHHHH

SEQ ID NO: 2180 - protein, 1281 aa, Artificial Sequence
  Description of Artificial Sequence: Synthetic polypeptide
MGILPSPGMPALLSLVSLLSVLLMGCVAETGTQCVNLTTRTQLPPAYTNSFTRGVYYPDKVFRSSVLHSTQDLFLPFFSNVTWFHAIHVSGTNGTKRFDNPVLPFNDGVYFASTEKSNIIRGWIFGTTLDSKTQSLLIVNNATNVVIKVCEFQFCNDPFLGVYYHKNNKSWMESEFRVYSSANNCTFEYVKQPFLMDLEGKQGNFKNLREFVFKNIDGYFKIYSKHTPINLVRDLPQGFSALEPLVDLPIGINITRFQTLLALHRSYLTPGDSSSGWTAGAAAYYVGYLQPRTFLLKYNENGTITDAVDCALDPLSETKCTLKSFTVEKGIYQTSNFRVQPTESIVRFPNITNLCPFGEVFNATRFASVYAWNRKRISNCVADYSVLYNSASFSTFKCYGVSPTKLNDLCFTNVYADSFVIRGDEVRQIAPGQTGKIADYNYKLPDDFTGCVIAWNSNNLDSKVGGNYNYLYRLFRKSNLKPFERDISTEIYQAGSTPCNGVEGFNCYFPLQSYGFQPTNGVGYQPYRVVVLSFELLHAPATVCGPKKSTNLVKNKCVNFNFNGLTGTGVLTESNKKFLPFQQFGRDIADTTDAVRDPQTLEILDITPCSFGGVSVITPGTNTSNQVAVLYQDVNCTEVPVAIHADQLTPTWRVYSTGSNVFQTRAGCLIGAEHVNNSYECDIPIGAGICASYQTQTNSPSGAGSVASQSIIAYTMSLGAENSVAYSNNSIAIPTNFTISVTTEILPVSMTKTSVDCTMYICGDSTECSNLLLQYGSFCTQLNRALTGIAVEQDKNTQEVFAQVKQIYKTPPIKDFGGFNFSQILPDPSKPSKRSFIEDLLFNKVTLADAGFIKQYGDCLGDIAARDLICAQKFNGLTVLPPLLTDEMIAQYTSALLAGTITSGWTFGAGAALQIPFAMQMAYRFNGIGVTQNVLYENQKLIANQFNSAIGKIQDSLSSTASALGKLQDVVNQNAQALNTLVKQLSSNFGAISSVLNDILSRLDPPEAEVQIDRLITGRLQSLQTYVTQQLIRAAEIRASANLAATKMSECVLGQSKRVDFCGKGYHLMSFPQSAPHGVVFLHVTYVPAQEKNFTTAPAICHDGKAHFPREGVFVSNGTHWFVTQRNFYEPQIITTDNTFVSGNCDVVIGIVNNTVYDPLQPELDSFKEELDKYFKNHTSPDVDLGDISGINASVVNIQKEIDRLNEVAKNLNESLIDLQELGKYEQYIKGSGRENLYFQGGGGSGYIPEAPRDGQAYVRKDGEWVLLSTFLGHHHHHHHH

SEQ ID NO: 2181 - protein, 1281 aa, Artificial Sequence
  Description of Artificial Sequence: Synthetic polypeptide
MGILPSPGMPALLSLVSLLSVLLMGCVAETGTQCVNLTTRTQLPPAYTNSFTRGVYYPDKVFRSDVLHSTQDLFLPFFSNVTWFHAIHVSGTNGTKRFDNPVLPFNDGVYFASTEKSNIIRGWIFGTTLDSKTQSLLIVNNATNVVIKVCEFQFCENPFLGVYYHKNNKSWMEKEFRVYSSANNCTFEYVSQPFLMDLGGKQGNFKNLREFVFKNIDGYFKIYSKHTPINLVRDLPQGFSALEPLMDLPIGINITRFQTLLALHRSYLTPGDSSSGWTAGAAAYYVGYLQPRTFLLKYNENGTITDAVDCAYDPLSETKCTLKSFTVEKGIYQTSNFRVQPTESIVRFPNITNLCPFGEVFNATRFASVYAWNRKRISNCVADYSVLYNSASFSTFKCYGVSPTKLNDLCFTNVYADSFVIRGDEVRQIAPGQTGKIADYNYKLPDDFTGCVIAWNSNNLDSKVGGNYNYLYRLFRKSNLKPFERDISTEIYQAGSTPCNGVEGFNCYFPLQSYGFQPTNGVGYQPYRVVVLSFELLHAPATVCGPKKSTNLVKNKCVNFNFNGLTGTGVLTESNKKFLPFQQFGRDIADNTDAVRDPQTLEILDITPCSFGGVSVITPGTNTSNQVAVLYQDVNCTEVPNAIHADQLTPTWRVYSTGSNVFQTRAGCLIGAEHVNNSYECDIPIGAGICASYQTQTNSPSGAGSVASQSIIAYTMSLGAENSVAYSNNSIAIPTNFTISVTTEILPVSMTKTSVDCTMYICGDSTECSNLLLQYGSFCTQLNRALQGIAREQDKNTQEVFAQVKQIYKTPPIKDFGGFNFSQILPDPSKPSKRSFIEDLLFNKVTLADAGFIKQYGDCLGDIAARDLICAQKFNGLTVLPPLLTDEMIAQYTSALLAGTITSGWTFGAGAALQIPFAMQMAYRFNGIGVTQNVLYENQKLIANQFNKAIGKIQDSLSSTASALGKLQDVVNQNAQALNTLVKQLSSNFGAISSVLNDILSRLDPPEAEVQIDRLITGRLQSLQTYVTQQLIRAAEIRASANLAATKMSECVLGQSKRVDFCGKGYHLMSFPQSAPHGVVFLHVTYVPAQEKNFTTAPAICHDGKAFFPREGVFVSNGTQWFVTQRNFYEPQIITTDNTFVSGNCDVVIGIVNNTVYDPLQPELDSFKEELDKYFKNHTSPDVDLGDISGINASVVNIQKEIDRLNEVAKNLNESLIDLQELGKYEQYIKGSGRENLYFQGGGGSGYIPEAPRDGQAYVRKDGEWVLLSTFLGHHHHHHHH

SEQ ID NO: 2182 - protein, 1281 aa, Artificial Sequence
  Description of Artificial Sequence: Synthetic polypeptide
MGILPSPGMPALLSLVSLLSVLLMGCVAETGTQCVNLTTRTQLPPAYTNSFTRGVYYPDKVFRSSVLHSTQDLFLPFFSNVTWFHAIHVSGTNGTKRFDNPVLPFNDGVYFASTEKSNIIRGWIFGTTLDSKTQSLLIVNNATNVVIKVCEFQFCDDPFLGVYYHKNNKSWMESEFRVYSSANNCTFEYVSQPFLMDLEGKQGNFKNLREFVFKNIDGYFKIYSKHTPINLVRDLPQGFSALEPLVDLPIGINITRFQTLLALHRSYLTPGDSSSGWTAGAAAYYVGYLQPRTFLLKYNENGTITDAVDCALDPLSETKCTLKSFTVEKGIYQTSNFRVQPTESIVRFPNITNLCPFGEVFNATRFASVYAWNRKRISNCVADYSVLYNSASFSTFKCYGVSPTKLNDLCFTNVYADSFVIRGDEVRQIAPGQTGKIADYNYKLPDDFTGCVIAWNSNNLDSKVGGNYNYLYRLFRKSNLKPFERDISTEIYQAGSTPCNGVEGFNCYFPLQSYGFQPTNGVGYQPYRVVVLSFELLHAPATVCGPKKSTNLVKNKCVNFNFNGLTGTGVLTESNKKFLPFQQFGRDIADTTDAVRDPQTLEILDITPCSFGGVSVITPGTNTSNQVAVLYQDVNCTEVPVAIHADQLTPTWRVYSTGSNVFQTRAGCLIGAEHVNNSYECDIPIGAGICASYQTQTNSPSGAGSVASQSIIAYTMSLGAENSVAYSNNSIAIPTNFTISVTTEILPVSMTKTSVDCTMYICGDSTECSNLLLQYGSFCTQLNRALTGIAVEQDKNTQEVFAQVKQIYKTPPIKDFGGFNFSQILPDPSKPSKRSFIEDLLFNKVTLADAGFIKQYGDCLGDIAARDLICAQKFNGLTVLPPLLTDEMIAQYTSALLAGTITSGWTFGAGAALQIPFAMQMAYRFNGIGVTQNVLYENQKLIANQFNSAIGKIQDSLSSTASALGKLQDVVNQNAQALNTLVKQLSSNFGAISSVLNDILSRLDPPEAEVQIDRLITGRLQSLQTYVTQQLIRAAEIRASANLAATKMSECVLGQSKRVDFCGKGYHLMSFPQSAPHGVVFLHVTYVPAQEKNFTTAPAICHDGKAHFPREGVFVSNGTHWFVTQRNFYEPQIITTDNTFVSGNCDVVIGIVNNTVYDPLQPELDSFKEELDKYFKNHTSPDVDLGDISGINASVVNIQKEIDRLNEVAKNLNESLIDLQELGKYEQYIKGSGRENLYFQGGGGSGYIPEAPRDGQAYVRKDGEWVLLSTFLGHHHHHHHH

SEQ ID NO: 2183 - protein, 1281 aa, Artificial Sequence
  Description of Artificial Sequence: Synthetic polypeptide
MGILPSPGMPALLSLVSLLSVLLMGCVAETGTQCVNLTTRTQLPPAYTNSFTRGVYYPDKVFRSSVLHSTQDLFLPFFSNVTWFHAIHVSGTNGTKRFDNPVLPFNDGVYFASTEKSNIIRGWIFGTTLDSKTQSLLIVNNATNVVIKVCEFQFCNDPFLGVYYHKNNKSWMESEFRVYSSANNCTFEYVSQPFLMDLEEKQGNFKNLREFVFKNIDGYFKIYSKHTPINLVRDLPQGFSALEPLVDLPIGINITRFQTLLALHRSYLTPGDSSSGWTAGAAAYYVGYLQPRTFLLKYNENGTITDAVDCALDPLSETKCTLKSFTVEKGIYQTSNFRVQPTESIVRFPNITNLCPFGEVFNATRFASVYAWNRKRISNCVADYSVLYNSASFSTFKCYGVSPTKLNDLCFTNVYADSFVIRGDEVRQIAPGQTGKIADYNYKLPDDFTGCVIAWNSNNLDSKVGGNYNYLYRLFRKSNLKPFERDISTEIYQAGSTPCNGVEGFNCYFPLQSYGFQPTNGVGYQPYRVVVLSFELLHAPATVCGPKKSTNLVKNKCVNFNFNGLTGTGVLTESNKKFLPFQQFGRDIADTTDAVRDPQTLEILDITPCSFGGVSVITPGTNTSNQVAVLYQDVNCTEVPVAIHADQLTPTWRVYSTGSNVFQTRAGCLIGAEHVNNSYECDIPIGAGICASYQTQTNSPSGAGSVASQSIIAYTMSLGAENSVAYSNNSIAIPTNFTISVTTEILPVSMTKTSVDCTMYICGDSTECSNLLLQYGSFCTQLNRALTGIAVEQDKNTQEVFAQVKQIYKTPPIKDFGGFNFSQILPDPSKPSKRSFIEDLLFNKVTLADAGFIKQYGDCLGDIAARDLICAQKFNGLTVLPPLLTDEMIAQYTSALLAGTITSGWTFGAGAALQIPFAMQMAYRFNGIGVTQNVLYENQKLIANQFNSAIGKIQDSLSSTASALGKLQDVVNQNAQALNTLVKQLSSNFGAISSVLNDILSRLDPPEAEVQIDRLITGRLQSLQTYVTQQLIRAAEIRASANLAATKMSECVLGQSKRVDFCGKGYHLMSFPQSAPHGVVFLHVTYVPAQEKNFTTAPAICHDGKAHFPREGVFVSNGTHWFVTQRNFYEPQIITTDNTFVSGNCDVVIGIVNNTVYDPLQPELDSFKEELDKYFKNHTSPDVDLGDISGINASVVNIQKEIDRLNEVAKNLNESLIDLQELGKYEQYIKGSGRENLYFQGGGGSGYIPEAPRDGQAYVRKDGEWVLLSTFLGHHHHHHHH

SEQ ID NO: 2184 - protein, 1281 aa, Artificial Sequence
  Description of Artificial Sequence: Synthetic polypeptide
MGILPSPGMPALLSLVSLLSVLLMGCVAETGTQCVNLTTRTQLPPAYTNSFTRGVYYPDKVFRSSVLHSTQDLFLPFFSNVTWFHAIHVSGTNGTKRFDNPVLPFNDGVYFASTEKSNIIRGWIFGTTLDSKTQSLLIVNNATNVVIKVCEFQFCNDPFLGVYYHKNNKSWMESEFRVYSSANNCTFEYVSQPFLMDLEGKQGNFKNLREFVFKNIDGYFKIYSKHTPINLVRDLPQGFSALEPLVDLPIGINITRFQTLLALHRSYLTPGDSSSGWTAGAAAYYVGYLQPRTFLLKYNENGTITDAVDCALDPLSETKCTLKSFTVEKGIYQTSNFRVQPTESIVRFPNITNLCPFGEVFNATRFASVYAWNRKRISNCVADYSVLYNSASFSTFKCYGVSPTKLNDLCFTNVYADSFVIRGDEVRQIAPGQTGKIADYNYKLPDDFTGCVIAWNSNNLDSKVGGNYNYLYRLFRKSNLKPFERDISTEIYQAGSTPCNGVEGFNCYFPLQSYGFQPTNGVGYQPYRVVVLSFELLHAPATVCGPKKSTNLVKNKCVNFNFNGLTGTGVLTESNKKFLPFQQFGRDIADTTDAVRDPQTLEILDITPCSFGGVSVITPGTNTSNQVAVLYQDVNCTEVPVAIHADQLTPTWRVYSTGSNVFQTRAGCLIGAEHVNNSYECDIPIGAGICASYQTQTNSPSGAGSVASQSIIAYTMSLGAENSVAYSNNSIAIPTNFTISVTTEYLPVSMTKTSVDCTMYICGDSTECSNLLLQYGSFCTQLNRALTGIAVEQDKNTQEVFAQVKQIYKTPPIKDFGGFNFSQILPDPSKPSKRSFIEDLLFNKVTLADAGFIKQYGDCLGDIAARDLICAQKFNGLTVLPPLLTDEMIAQYTSALLAGTITSGWTFGAGAALQIPFAMQMAYRFNGIGVTQNVLYENQKLIANQFNSAIGKIQDSLSSTASALGKLQDVVNQNAQALNTLVKQLSSNFGAISSVLNDILSRLDPPEAEVQIDRLITGRLQSLQTYVTQQLIRAAEIRASANLAATKMSECVLGQSKRVDFCGKGYHLMSFPQSAPHGVVFLHVTYVPAQEKNFTTAPAICHDGKAHFPREGVFVSNGTHWFVTQRNFYEPQIITTDNTFVSGNCDVVIGIVNNTVYDPLQPELDSFKEELDKYFKNHTSPDVDLGDISGINASVVNIQKEIDRLNEVAKNLNESLIDLQELGKYEQYIKGSGRENLYFQGGGGSGYIPEAPRDGQAYVRKDGEWVLLSTFLGHHHHHHHH

SEQ ID NO: 2185 - protein, 1281 aa, Artificial Sequence
  Description of Artificial Sequence: Synthetic polypeptide
MGILPSPGMPALLSLVSLLSVLLMGCVAETGTQCVNLTTRTQLPPAYTNSFTRGVYYPDKVFRSSVLHSTQDLFLPFFSNVTWFHAIHVSGTNGTKRFDNPVLPFNDGVYFASTEKSNIIRGWIFGTTLDSKTQSLLIVNNATNVVIKVCEFQFCNDPFLGVYYHKNNKSWMESEFRVYSSANNCTFEYVPQPFLMDLEGKQGNFKNLREFVFKNIDGYFKIYSKHTPINLVRDLPQGFSALEPLVDLPIGINITRFQTLLALHRSYLTPGDSSSGWTAGAAAYYVGYLQPRTFLLKYNENGTITDAVDCALDPLSETKCTLKSFTVEKGIYQTSNFRVQPTESIVRFPNITNLCPFGEVFNATRFASVYAWNRKRISNCVADYSVLYNSASFSTFKCYGVSPTKLNDLCFTNVYADSFVIRGDEVRQIAPGQTGKIADYNYKLPDDFTGCVIAWNSNNLDSKVGGNYNYLYRLFRKSNLKPFERDISTEIYQAGSTPCNGVEGFNCYFPLQSYGFQPTNGVGYQPYRVVVLSFELLHAPATVCGPKKSTNLVKNKCVNFNFNGLTGTGVLTESNKKFLPFQQFGRDIADTTDAVRDPQTLEILDITPCSFGGVSVITPGTNTSNQVAVLYQDVNCTEVPVAIHADQLTPTWRVYSTGSNVFQTRAGCLIGAEHVNNSYECDIPIGAGICASYQTQTNSPSGAGSVASQSIIAYTMSLGAENSVAYSNNSIAIPTNFTISVTTEILPVSMTKTSVDCTMYICGDSTECSNLLLQYGSFCTQLNRALTGIAVEQDKNTQEVFAQVKQIYKTPPIKDFGGFNFSQILPDPSKPSKRSFIEDLLFNKVTLADAGFIKQYGDCLGDIAARDLICAQKFNGLTVLPPLLTDEMIAQYTSALLAGTITSGWTFGAGAALQIPFAMQMAYRFNGIGVTQNVLYENQKLIANQFNSAIGKIQDSLSSTASALGKLQDVVNQNAQALNTLVKQLSSNFGAISSVLNDILSRLDPPEAEVQIDRLITGRLQSLQTYVTQQLIRAAEIRASANLAATKMSECVLGQSKRVDFCGKGYHLMSFPQSAPHGVVFLHVTYVPAQEKNFTTAPAICHDGKAHFPREGVFVSNGTHWFVTQRNFYEPQIITTDNTFVSGNCDVVIGIVNNTVYDPLQPELDSFKEELDKYFKNHTSPDVDLGDISGINASVVNIQKEIDRLNEVAKNLNESLIDLQELGKYEQYIKGSGRENLYFQGGGGSGYIPEAPRDGQAYVRKDGEWVLLSTFLGHHHHHHHH

SEQ ID NO: 2186 - protein, 1281 aa, Artificial Sequence
  Description of Artificial Sequence: Synthetic polypeptide
MGILPSPGMPALLSLVSLLSVLLMGCVAETGTQCVNLTTRTQLPPAYTNSFTRGVYYPDKVFRSSVLHSTQDLFLPFFSNVTWFHAIHVSGTNGTKRFDNPVLPFNDGVYFASTEKSNIIRGWIFGTTLDSKTQSLLIVNNATNVVIKVCEFQFCNDPFLGVYYHKNNKSWMESEFRVYSSANNCTFEYVSQPFLMDLEGKQGNFKNLREFVFKNIDGYFKIYSKHTPINLVRDLPQGFSALEPLVDLPIGINITRFQTLLALHRSYLTPGDSSSGWTAGAAAYYVGYLQPRTFLLKYNENGTITDAVDCALDPLSETKCTLKSFTVEKGIYQTSNFRVQPTESIVRFPNITNLCPFGEVFNATRFASVYAWNRKRISNCVADYSVLYNSASFSTFKCYGVSPTKLNDLCFTNVYADSFVIRGDEVRQIAPGQTGKIADYNYKLPDDFTGCVIAWNSNNLDSKVGGNYNYLYRLFRKSNLKPFERDISTEIYQAGSTPCNGVEGFNCYFPLQSYGFQPTNGVGYQPYRVVVLSFELLHAPATVCGPKKSTNLVKNKCVNFNFNGLTGTGVLTESNKKFLPFQQFGRDTADTTDAVRDPQTLEILDITPCSFGGVSVITPGTNTSNQVAVLYQDVNCTEVPVAIHADQLTPTWRVYSTGSNVFQTRAGCLIGAEHVNNSYECDIPIGAGICASYQTQTNSPSGAGSVASQSIIAYTMSLGAENSVAYSNNSIAIPTNFTISVTTEILPVSMTKTSVDCTMYICGDSTECSNLLLQYGSFCTQLNRALTGIAVEQDKNTQEVFAQVKQIYKTPPIKDFGGFNFSQILPDPSKPSKRSFIEDLLFNKVTLADAGFIKQYGDCLGDIAARDLICAQKFNGLTVLPPLLTDEMIAQYTSALLAGTITSGWTFGAGAALQIPFAMQMAYRFNGIGVTQNVLYENQKLIANQFNSAIGKIQDSLSSTASALGKLQDVVNQNAQALNTLVKQLSSNFGAISSVLNDILSRLDPPEAEVQIDRLITGRLQSLQTYVTQQLIRAAEIRASANLAATKMSECVLGQSKRVDFCGKGYHLMSFPQSAPHGVVFLHVTYVPAQEKNFTTAPAICHDGKAHFPREGVFVSNGTHWFVTQRNFYEPQIITTDNTFVSGNCDVVIGIVNNTVYDPLQPELDSFKEELDKYFKNHTSPDVDLGDISGINASVVNIQKEIDRLNEVAKNLNESLIDLQELGKYEQYIKGSGRENLYFQGGGGSGYIPEAPRDGQAYVRKDGEWVLLSTFLGHHHHHHHH

SEQ ID NO: 2187 - protein, 1281 aa, Artificial Sequence
  Description of Artificial Sequence: Synthetic polypeptide
MGILPSPGMPALLSLVSLLSVLLMGCVAETGTQCVNLTTRTQLPPAYTNSFTRGVYYPDKVFRSSVLHSTQDLFLPFFSNVTWFHAIHVSGTNGTKRFDNPVLPFNDGVYFASTEKSNIIRGWIFGTTLDSKTQSLLIVNNATNVVIKVCEFQFCNDPFLGVYYHKNNKSWMELEFRVYSSANNCTFEYVSQPFLMDLEGKQGNFKNLREFVFKNIDGYFKIYSKHTPINLVRDLPQGFSALEPLVDLPIGINITRFQTLLALHRSYLTPGDSSSGWTAGAAAYYVGYLQPRTFLLKYNENGTITDAVDCALDPLSETKCTLKSFTVEKGIYQTSNFRVQPTESIVRFPNITNLCPFGEVFNATRFASVYAWNRKRISNCVADYSVLYNSASFSTFKCYGVSPTKLNDLCFTNVYADSFVIRGDEVRQIAPGQTGKIADYNYKLPDDFTGCVIAWNSNNLDSKVGGNYNYLYRLFRKSNLKPFERDISTEIYQAGSTPCNGVEGFNCYFPLQSYGFQPTNGVGYQPYRVVVLSFELLHAPATVCGPKKSTNLVKNKCVNFNFNGLTGTGVLTESNKKFLPFQQFGRDIADTTDAVRDPQTLEILDITPCSFGGVSVITPGTNTSNQVAVLYQDVNCTEVPVAIHADQLTPTWRVYSTGSNVFQTRAGCLIGAEHVNNSYECDIPIGAGICASYQTQTNSPSGAGSVASQSIIAYTMSLGAENSVAYSNNSIAIPTNFTISVTTEILPVSMTKTSVDCTMYICGDSTECSNLLLQYGSFCTQLNRALTGIAVEQDKNTQEVFAQVKQIYKTPPIKDFGGFNFSQILPDPSKPSKRSFIEDLLFNKVTLADAGFIKQYGDCLGDIAARDLICAQKFNGLTVLPPLLTDEMIAQYTSALLAGTITSGWTFGAGAALQIPFAMQMAYRFNGIGVTQNVLYENQKLIANQFNSAIGKIQDSLSSTASALGKLQDVVNQNAQALNTLVKQLSSNFGAISSVLNDILSRLDPPEAEVQIDRLITGRLQSLQTYVTQQLIRAAEIRASANLAATKMSECVLGQSKRVDFCGKGYHLMSFPQSAPHGVVFLHVTYVPAQEKNFTTAPAICHDGKAHFPREGVFVSNGTHWFVTQRNFYEPQIITTDNTFVSGNCDVVIGIVNNTVYDPLQPELDSFKEELDKYFKNHTSPDVDLGDISGINASVVNIQKEIDRLNEVAKNLNESLIDLQELGKYEQYIKGSGRENLYFQGGGGSGYIPEAPRDGQAYVRKDGEWVLLSTFLGHHHHHHHH

SEQ ID NO: 2188 - protein, 1281 aa, Artificial Sequence
  Description of Artificial Sequence: Synthetic polypeptide
MGILPSPGMPALLSLVSLLSVLLMGCVAETGTQCVNLTTRTQLPPAYTNSFTRGVYYPDKVFRSSVLHSTQDLFLPFFSNVTWFHAIHVSGTNGTKRFDNPVLPFNDGVYFASTEKSNIIRGWIFGTTLDSKTQSLLIVNNATNVVIKVCEFQFCNDPFLGVYYHKNNKSWMESEFRVYSSANNCTFEYVSQPFLMDLEGKQGNFKNLREFVFKNIDGYFKIYSKHTPINLVRDLPQGFSALEPLVDLPIGINITRFQTLLALHRSYLTPGDSSSGWTAGAAAYYVGYLQPRTFLLKYNENGTITDAVDCALDPLSETKCTLKSFTVEKGIYQTSNFRVQPTESIVRFPNITNLCPFGEVFNATRFASVYAWNRKRISNCVADYSVLYNSASFSTFKCYGVSPTKLNDLCFTNVYADSFVIRGDEVRQIAPGQTGKIADYNYKLPDDFTGCVIAWNSNNLDSKVGGNYNYLYRLFRKSNLKPFERDISTEIYQAGSTPCNGVEGFNCYFPLQSYGFQPTNGVGYQPYRVVVLSFELLHAPATVCGPKKSTNLVKNKCVNFNFNGLTGTGVLTESNKKFLPFQQFGRDIADTTDAVRDPQTLEILDITPCSFGGVSVITPGTNTSNQVAVLYQDVNCTEVPGAIHADQLTPTWRVYSTGSNVFQTRAGCLIGAEHVNNSYECDIPIGAGICASYQTQTNSPSGAGSVASQSIIAYTMSLGAENSVAYSNNSIAIPTNFTISVTTEILPVSMTKTSVDCTMYICGDSTECSNLLLQYGSFCTQLNRALTGIAVEQDKNTQEVFAQVKQIYKTPPIKDFGGFNFSQILPDPSKPSKRSFIEDLLFNKVTLADAGFIKQYGDCLGDIAARDLICAQKFNGLTVLPPLLTDEMIAQYTSALLAGTITSGWTFGAGAALQIPFAMQMAYRFNGIGVTQNVLYENQKLIANQFNSAIGKIQDSLSSTASALGKLQDVVNQNAQALNTLVKQLSSNFGAISSVLNDILSRLDPPEAEVQIDRLITGRLQSLQTYVTQQLIRAAEIRASANLAATKMSECVLGQSKRVDFCGKGYHLMSFPQSAPHGVVFLHVTYVPAQEKNFTTAPAICHDGKAHFPREGVFVSNGTHWFVTQRNFYEPQIITTDNTFVSGNCDVVIGIVNNTVYDPLQPELDSFKEELDKYFKNHTSPDVDLGDISGINASVVNIQKEIDRLNEVAKNLNESLIDLQELGKYEQYIKGSGRENLYFQGGGGSGYIPEAPRDGQAYVRKDGEWVLLSTFLGHHHHHHHH

SEQ ID NO: 2189 - protein, 1281 aa, Artificial Sequence
  Description of Artificial Sequence: Synthetic polypeptide
MGILPSPGMPALLSLVSLLSVLLMGCVAETGTQCVNLTTRTQLPPAYTNSFTRGVYYPDKVFRSSVLHSTQDLFLPFFSNVTWFHAIHVSGTNGTKRFDNPVLPFNDGVYFASTEKSNIIRGWIFGTTLDSKTQSLLIVNNATNVVIKVCEFQFCNDPFLGVYYHKNNKSWMESEFRVYSSANNCTFEYVSQPFLMDLEGKQGNFKNLREFVFKNIDGYFKIYSKHTPINLVRDLPQGFSALEPLVDLPIGINITRFQTLLALHRSYLTPGDSSSGWTAGAAAYYVGYLQPRTFLLKYNENGTITDAVDCALDPLSETKCKLKSFTVEKGIYQTSNFRVQPTESIVRFPNITNLCPFGEVFNATRFASVYAWNRKRISNCVADYSVLYNSASFSTFKCYGVSPTKLNDLCFTNVYADSFVIRGDEVRQIAPGQTGKIADYNYKLPDDFTGCVIAWNSNNLDSKVGGNYNYLYRLFRKSNLKPFERDISTEIYQAGSTPCNGVEGFNCYFPLQSYGFQPTNGVGYQPYRVVVLSFELLHAPATVCGPKKSTNLVKNKCVNFNFNGLTGTGVLTESNKKFLPFQQFGRDIADTTDAVRDPQTLEILDITPCSFGGVSVITPGTNTSNQVAVLYQDVNCTEVPVAIHADQLTPTWRVYSTGSNVFQTRAGCLIGAEHVNNSYECDIPIGAGICASYQTQTNSPSGAGSVASQSIIAYTMSLGAENSVAYSNNSIAIPTNFTISVTTEILPVSMPKVSVDCTMYICGDSTECSNLLLQYGSFCTQLNRALTGIAREQDKNLLNVFAQVKQIYKTPPIKDFGGFNFSQILPDPSKPSKRSFIEDLLFNKVTLADLGFVKQYKDCLGDQAARDLICAQKYNGIMVLPPLLTDEMIAQYTSALLAGTITSGWTFGAGAALQIPFAMQMAYRFNGIGVTQNVLYENQKLIANQFNSAIGKIQDGLSTTASALSKLQDVVNQQAQALNELVKQLSSNFGAISSVLNDILSRLDPPEAEVQIDRLITGRLQSLQTYVTQQLIRATEIRASAQLAAEKMSECVLGQSKRVDFCGKGYHLMSFPQSAPHGVVFLHVTYVPAQEKNFTTAPAICHDGKAHFPREGVFVSNGTHWFVTQRNFYEPQIITTDNTFVSGNCDVVIGIVNNTVYDPLQPELDSFKEELDKYFKNHTSPDVDLGDISGINASVVNIQKEIDRLNEVAKNLNESLIDLQELGKYEQYIKGSGRENLYFQGGGGSGYIPEAPRDGQAYVRKDGEWVLLSTFLGHHHHHHHH

SEQ ID NO: 2190 - protein, 1281 aa, Artificial Sequence
  Description of Artificial Sequence: Synthetic polypeptide
MGILPSPGMPALLSLVSLLSVLLMGCVAETGTQCVNLTTRTQLPPAYTNSFTRGVYYPDKVFRSSVLHSTQDLFLPFFSNVTWFHAIHVSGTNGTKRFDNPVLPFNDGVYFASTEKSNIIRGWIFGTTLDSKTQSLLIVNNATNVVIKVCEFQFCNDPFLGVYYHKNNKSWMESEFRVYSSANNCTFEYVSQPFLMDLEGKQGNFKNLREFVFKNIDGYFKIYSKHTPINLVRDLPQGFSALEPLVDLPIGINITRFQTLLALHRSYLTPGDSSSGWTAGAAAYYVGYLQPRTFLLKYNENGTITDAVDCALDPLSEVKCTLKSFTVEKGIYQTSNFRVQPTESIVRFPNITNLCPFGEVFNATRFASVYAWNRKRISNCVADYSVLYNSASFSTFKCYGVSPTKLNDLCFTNVYADSFVIRGDEVRQIAPGQTGKIADYNYKLPDDFTGCVIAWNSNNLDSKVGGNYNYLYRLFRKSNLKPFERDISTEIYQAGSTPCNGVEGFNCYFPLQSYGFQPTNGVGYQPYRVVVLSFELLHAPATVCGPKKSTNLVKNKCVNFNFNGLTGTGVLTESNKKFLPFQQFGRDIADTTDAVRDPQTLEILDITPCSFGGVSVITPGTNTSNQVAVLYQDVNCTEVPVAIHADQLTPTWRVYSTGSNVFQTRAGCLIGAEHVNNSYECDIPIGAGICASYQTQTNSPSGAGSVASQSIIAYTMSLGAENSVAYSNNSIAIPTNFTISVTTEILPVSMTKTSVDCTMYICGDSTECSNLLLQYGSFCTQLNRALTGIAVEQDKNTQEVFAQVKQIYKTPPIKDFGGFNFSQILPDPSKPSKRSFIEDLLFNKVTLADAGFIKQYGDCLGDIAARDLICAQKFNGLTVLPPLLTDEMIAQYTSALLAGTITSGWTFGAGAALQIPFAMQMAYRFNGIGVTQNVLYENQKLIANQFNSAIGKIQDSLSSTASALGKLQDVVNQNAQALNTLVKQLSSNFGAISSVLNDILSRLDPPEAEVQIDRLITGRLQSLQTYVTQQLIRAAEIRASANLAATKMSECVLGQSKRVDFCGKGYHLMSFPQSAPHGVVFLHVTYVPAQEKNFTTAPAICHDGKAHFPREGVFVSNGTHWFVTQRNFYEPQIITTDNTFVSGNCDVVIGIVNNTVYDPLQPELDSFKEELDKYFKNHTSPDVDLGDISGINASVVNIQKEIDRLNEVAKNLNESLIDLQELGKYEQYIKGSGRENLYFQGGGGSGYIPEAPRDGQAYVRKDGEWVLLSTFLGHHHHHHHH

SEQ ID NO: 2191 - protein, 1281 aa, Artificial Sequence
  Description of Artificial Sequence: Synthetic polypeptide
MGILPSPGMPALLSLVSLLSVLLMGCVAETGTQCVNLTTRTQLPPAYTNSFTRGVYYPDKVFRSDVLHSTQDLFLPFFSNVTWFHAIHVSGTNGTKRFDNPVLPFNDGVYFASTEKSNIIRGWIFGTTLDSKTQSLLIVNNATNVVIKVCEFQFCDNPFLGVYYHKNNKSWMEKEFRVYSSANNCTFEYVSQPFLMDLGGKQGNFKNLREFVFKNIDGYFKIYSKHTPINLVRDLPQGFSALEPLMDLPIGINITRFQTLLALHRSYLTPGDSSSGWTAGAAAYYVGYLQPRTFLLKYNENGTITDAVDCALDPLSETKCTLKSFTVEKGIYQTSNFRVQPTESIVRFPNITNLCPFGEVFNATRFASVYAWNRKRISNCVADYSVLYNSASFSTFKCYGVSPTKLNDLCFTNVYADSFVIRGDEVRQIAPGQTGKIADYNYKLPDDFTGCVIAWNSNNLDSKVGGNYNYLYRLFRKSNLKPFERDISTEIYQAGSTPCNGVEGFNCYFPLQSYGFQPTNGVGYQPYRVVVLSFELLHAPATVCGPKKSTNLVKNKCVNFNFNGLTGTGVLTESNKKFLPFQQFGRDIADNTDAVRDPQTLEILDITPCSFGGVSVITPGTNTSNQVAVLYQDVNCTEVPNAIHADQLTPTWRVYSTGSNVFQTRAGCLIGAEHVNNSYECDIPIGAGICASYQTQTNSPSGAGSVASQSIIAYTMSLGAENSVAYSNNSIAIPTNFTISVTTEILPVSMTKTSVDCTMYICGDSTECSNLLLQYGSFCTQLNRALQGIAREQDKNTQEVFAQVKQIYKTPPIKDFGGFNFSQILPDPSKPSKRSFIEDLLFNKVTLADAGFIKQYGDCLGDIAARDLICAQKFNGLTVLPPLLTDEMIAQYTSALLAGTITSGWTFGAGAALQIPFAMQMAYRFNGIGVTQNVLYENQKLIANQFNKAIGKIQDSLSSTASALGKLQDVVNQNAQALNTLVKQLSSNFGAISSVLNDILSRLDPPEAEVQIDRLITGRLQSLQTYVTQQLIRAAEIRASANLAATKMSECVLGQSKRVDFCGKGYHLMSFPQSAPHGVVFLHVTYVPAQEKNFTTAPAICHDGKAFFPREGVFVSNGTQWFVTQRNFYEPQIITTDNTFVSGNCDVVIGIVNNTVYDPLQPELDSFKEELDKYFKNHTSPDVDLGDISGINASVVNIQKEIDRLNEVAKNLNESLIDLQELGKYEQYIKGSGRENLYFQGGGGSGYIPEAPRDGQAYVRKDGEWVLLSTFLGHHHHHHHH

SEQ ID NO: 2192 - protein, 1281 aa, Artificial Sequence
  Description of Artificial Sequence: Synthetic polypeptide
MGILPSPGMPALLSLVSLLSVLLMGCVAETGTQCVNLTTRTQLPPAYTNSFTRGVYYPDKVFRSSVLHSTQDLFLPFFSNVTWFHAIHVSGTNGTKRFDNPVLPFNDGVYFASTEKSNIIRGWIFGTTLDNKTQSLLIVNNATNVVIKVCEFQFCNDPFLGVYYHKNNKSWMESEFRVYSSANNCTFEYVSQPFLMDLEGKQGNFKNLREFVFKNIDGYFKIYSKHTPINLVRDLPQGFSALEPLVDLPIGINITRFQTLLALHRSYLTPGDSSSGWTAGAAAYYVGYLQPRTFLLKYNENGTITDAVDCALDPLSETKCTLKSFTVEKGIYQTSNFRVQPTESIVRFPNITNLCPFGEVFNATRFASVYAWNRKRISNCVADYSVLYNSASFSTFKCYGVSPTKLNDLCFTNVYADSFVIRGDEVRQIAPGQTGKIADYNYKLPDDFTGCVIAWNSNNLDSKVGGNYNYLYRLFRKSNLKPFERDISTEIYQAGSTPCNGVEGFNCYFPLQSYGFQPTNGVGYQPYRVVVLSFELLHAPATVCGPKKSTNLVKNKCVNFNFNGLTGTGVLTESNKKFLPFQQFGRDIADTTDAVRDPQTLEILDITPCSFGGVSVITPGTNTSNQVAVLYQDVNCTEVPVAIHADQLTPTWRVYSTGSNVFQTRAGCLIGAEHVNNSYECDIPIGAGICASYQTQTNSPSGAGSVASQSIIAYTMSLGAENSVAYSNNSIAIPTNFTISVTTEILPVSMTKTSVDCTMYICGDSTECSNLLLQYGSFCTQLNRALTGIAVEQDKNTQEVFAQVKQIYKTPPIKDFGGFNFSQILPDPSKPSKRSFIEDLLFNKVTLADAGFIKQYGDCLGDIAARDLICAQKFNGLTVLPPLLTDEMIAQYTSALLAGTITSGWTFGAGAALQIPFAMQMAYRFNGIGVTQNVLYENQKLIANQFNSAIGKIQDSLSSTASALGKLQDVVNQNAQALNTLVKQLSSNFGAISSVLNDILSRLDPPEAEVQIDRLITGRLQSLQTYVTQQLIRAAEIRASANLAATKMSECVLGQSKRVDFCGKGYHLMSFPQSAPHGVVFLHVTYVPAQEKNFTTAPAICHDGKAHFPREGVFVSNGTHWFVTQRNFYEPQIITTDNTFVSGNCDVVIGIVNNTVYDPLQPELDSFKEELDKYFKNHTSPDVDLGDISGINASVVNIQKEIDRLNEVAKNLNESLIDLQELGKYEQYIKGSGRENLYFQGGGGSGYIPEAPRDGQAYVRKDGEWVLLSTFLGHHHHHHHH

SEQ ID NO: 2193 - protein, 1281 aa, Artificial Sequence
  Description of Artificial Sequence: Synthetic polypeptide
MGILPSPGMPALLSLVSLLSVLLMGCVAETGTQCVNLTTRTQLPPAYTNSFTRGVYYPDKVFRSSVLHSTQDLFLPFFSNVTWFHAIHVSGTNGTKRFDNPVLPFNDGVYFASTEKSNIIRGWIFGTTLDSKTQSLLIVNNATNVVIKVCEFQFCNDPFLGVYYHKNNKSWMESEFRVYSSANNCTFEYVSQPFLMDLEGKQGNFKNLREFVFKNIDGYFKIYSKHTPINLVRDLPQGFSALEPLVDLPIGINITRFQTLLALHRSYLTPGDSSSGWTAGAAAYYVGYLQPRTFLLKYNENGTITDAVDCALDPLSETKCTLKSFTVEKGIYQTSNFRVQPTESIVRFPNITNLCPFGEVFNATRFASVYAWNRKRISNCVADYSVLYNSASFSTFKCYGVSPTKLNDLCFTNVYADSFVIRGDEVRQIAPGQTGKIADYNYKLPDDFTGCVIAWNSNNLDSKVGGNYNYLYRLFRKSNLKPFERDISTEIYQAGSTPCNGVEGFNCYFPLQSYGFQPTNGVGYQPYRVVVLSFELLHAPATVCGPKKSTNLVKNKCVNFNFNGLTGTGVLTESNKKFLPFQQFGRDIADTTDAVRDPQTLEILDITPCSFGGVSVITPGTNTSNQVAVLYQDVNCTEVPNAIHADQLTPTWRVYSTGSNVFQTRAGCLIGAEHVNNSYECDIPIGAGICASYQTQTNSPSGAGSVASQSIIAYTMSLGAENSVAYSNNSIAIPTNFTISVTTEILPVSMTKTSVDCTMYICGDSTECSNLLLQYGSFCTQLNRALTGIAVEQDKNTQEVFAQVKQIYKTPPIKDFGGFNFSQILPDPSKPSKRSFIEDLLFNKVTLADAGFIKQYGDCLGDIAARDLICAQKFNGLTVLPPLLTDEMIAQYTSALLAGTITSGWTFGAGAALQIPFAMQMAYRFNGIGVTQNVLYENQKLIANQFNSAIGKIQDSLSSTASALGKLQDVVNQNAQALNTLVKQLSSNFGAISSVLNDILSRLDPPEAEVQIDRLITGRLQSLQTYVTQQLIRAAEIRASANLAATKMSECVLGQSKRVDFCGKGYHLMSFPQSAPHGVVFLHVTYVPAQEKNFTTAPAICHDGKAHFPREGVFVSNGTHWFVTQRNFYEPQIITTDNTFVSGNCDVVIGIVNNTVYDPLQPELDSFKEELDKYFKNHTSPDVDLGDISGINASVVNIQKEIDRLNEVAKNLNESLIDLQELGKYEQYIKGSGRENLYFQGGGGSGYIPEAPRDGQAYVRKDGEWVLLSTFLGHHHHHHHH

SEQ ID NO: 2194 - protein, 1281 aa, Artificial Sequence
  Description of Artificial Sequence: Synthetic polypeptide
MGILPSPGMPALLSLVSLLSVLLMGCVAETGTQCVNLTTRTQLPPAYTNSFTRGVYYPDKVFRSSVLHSTQDLFLPFFSNVTWFHAIHVSGTNGTKRFDNPVLPFNDGVYFASTEKSNIIRGWIFGTTLDSKTQSLLIVNNATNVVIKVCEFQFCNDPFLGVYYHKNNKSWMESEFRVYSSANNCTFEYVSQPFLMDLEGKQGNFKNLREFVFKNIDGYFKIYSKHTPINLVRDLPQGFSALEPIVDLPIGINITRFQTLLALHRSYLTPGDSSSGWTAGAAAYYVGYLQPRTFLLKYNENGTITDAVDCALDPLSETKCTLKSFTVEKGIYQTSNFRVQPTESIVRFPNITNLCPFGEVFNATRFASVYAWNRKRISNCVADYSVLYNSASFSTFKCYGVSPTKLNDLCFTNVYADSFVIRGDEVRQIAPGQTGKIADYNYKLPDDFTGCVIAWNSNNLDSKVGGNYNYLYRLFRKSNLKPFERDISTEIYQAGSTPCNGVEGFNCYFPLQSYGFQPTNGVGYQPYRVVVLSFELLHAPATVCGPKKSTNLVKNKCVNFNFNGLTGTGVLTESNKKFLPFQQFGRDIADTTDAVRDPQTLEILDITPCSFGGVSVITPGTNTSNQVAVLYQDVNCTEVPVAIHADQLTPTWRVYSTGSNVFQTRAGCLIGAEHVNNSYECDIPIGAGICASYQTQTNSPSGAGSVASQSIIAYTMSLGAENSVAYSNNSIAIPTNFTISVTTEILPVSMTKTSVDCTMYICGDSTECSNLLLQYGSFCTQLNRALTGIAVEQDKNTQEVFAQVKQIYKTPPIKDFGGFNFSQILPDPSKPSKRSFIEDLLFNKVTLADAGFIKQYGDCLGDIAARDLICAQKFNGLTVLPPLLTDEMIAQYTSALLAGTITSGWTFGAGAALQIPFAMQMAYRFNGIGVTQNVLYENQKLIANQFNSAIGKIQDSLSSTASALGKLQDVVNQNAQALNTLVKQLSSNFGAISSVLNDILSRLDPPEAEVQIDRLITGRLQSLQTYVTQQLIRAAEIRASANLAATKMSECVLGQSKRVDFCGKGYHLMSFPQSAPHGVVFLHVTYVPAQEKNFTTAPAICHDGKAHFPREGVFVSNGTHWFVTQRNFYEPQIITTDNTFVSGNCDVVIGIVNNTVYDPLQPELDSFKEELDKYFKNHTSPDVDLGDISGINASVVNIQKEIDRLNEVAKNLNESLIDLQELGKYEQYIKGSGRENLYFQGGGGSGYIPEAPRDGQAYVRKDGEWVLLSTFLGHHHHHHHH

SEQ ID NO: 2195 - protein, 1281 aa, Artificial Sequence
  Description of Artificial Sequence: Synthetic polypeptide
MGILPSPGMPALLSLVSLLSVLLMGCVAETGTQCVNLTTRTQLPPAYTNSFTRGVYYPDKVFRSSVLHSTQDLFLPFFSNVTWFHAIHVSGTNGTKRFDNPVLPFNDGVYFASTEKSNIIRGWIFGTTLDSKTQSLLIVNNATNVVIKVCEFQFCNDPFLGVYYHKNNKSWMESEFRVYSSANNCTFEYASQPFLMDLEGKQGNFKNLREFVFKNIDGYFKIYSKHTPINLVRDLPQGFSALEPLVDLPIGINITRFQTLLALHRSYLTPGDSSSGWTAGAAAYYVGYLQPRTFLLKYNENGTITDAVDCALDPLSETKCTLKSFTVEKGIYQTSNFRVQPTESIVRFPNITNLCPFGEVFNATRFASVYAWNRKRISNCVADYSVLYNSASFSTFKCYGVSPTKLNDLCFTNVYADSFVIRGDEVRQIAPGQTGKIADYNYKLPDDFTGCVIAWNSNNLDSKVGGNYNYLYRLFRKSNLKPFERDISTEIYQAGSTPCNGVEGFNCYFPLQSYGFQPTNGVGYQPYRVVVLSFELLHAPATVCGPKKSTNLVKNKCVNFNFNGLTGTGVLTESNKKFLPFQQFGRDIADTTDAVRDPQTLEILDITPCSFGGVSVITPGTNTSNQVAVLYQDVNCTEVPVAIHADQLTPTWRVYSTGSNVFQTRAGCLIGAEHVNNSYECDIPIGAGICASYQTQTNSPSGAGSVASQSIIAYTMSLGAENSVAYSNNSIAIPTNFTISVTTEILPVSMTKTSVDCTMYICGDSTECSNLLLQYGSFCTQLNRALTGIAVEQDKNTQEVFAQVKQIYKTPPIKDFGGFNFSQILPDPSKPSKRSFIEDLLFNKVTLADAGFIKQYGDCLGDIAARDLICAQKFNGLTVLPPLLTDEMIAQYTSALLAGTITSGWTFGAGAALQIPFAMQMAYRFNGIGVTQNVLYENQKLIANQFNSAIGKIQDSLSSTASALGKLQDVVNQNAQALNTLVKQLSSNFGAISSVLNDILSRLDPPEAEVQIDRLITGRLQSLQTYVTQQLIRAAEIRASANLAATKMSECVLGQSKRVDFCGKGYHLMSFPQSAPHGVVFLHVTYVPAQEKNFTTAPAICHDGKAHFPREGVFVSNGTHWFVTQRNFYEPQIITTDNTFVSGNCDVVIGIVNNTVYDPLQPELDSFKEELDKYFKNHTSPDVDLGDISGINASVVNIQKEIDRLNEVAKNLNESLIDLQELGKYEQYIKGSGRENLYFQGGGGSGYIPEAPRDGQAYVRKDGEWVLLSTFLGHHHHHHHH

SEQ ID NO: 2196 - protein, 1281 aa, Artificial Sequence
  Description of Artificial Sequence: Synthetic polypeptide
MGILPSPGMPALLSLVSLLSVLLMGCVAETGTQCVNLTTRTQLPPAYTNSFTRGVYYPDKVFRSSVLHSTQDLFLPFFSNVTWFHAIHVSGTNGTKRFDNPVLPFNDGVYFASTEKSNIIRGWIFGTTLDSKTQSLLIVNNATNVVIKVCEFQFCNDPFLGVYYHKNNKSWMESEFRVYSSANNCTFEYVSQPNLMDLEGKQGNFKNLREFVFKNIDGYFKIYSKHTPINLVRDLPQGFSALEPLVDLPIGINITRFQTLLALHRSYLTPGDSSSGWTAGAAAYYVGYLQPRTFLLKYNENGTITDAVDCALDPLSETKCTLKSFTVEKGIYQTSNFRVQPTESIVRFPNITNLCPFGEVFNATRFASVYAWNRKRISNCVADYSVLYNSASFSTFKCYGVSPTKLNDLCFTNVYADSFVIRGDEVRQIAPGQTGKIADYNYKLPDDFTGCVIAWNSNNLDSKVGGNYNYLYRLFRKSNLKPFERDISTEIYQAGSTPCNGVEGFNCYFPLQSYGFQPTNGVGYQPYRVVVLSFELLHAPATVCGPKKSTNLVKNKCVNFNFNGLTGTGVLTESNKKFLPFQQFGRDIADTTDAVRDPQTLEILDITPCSFGGVSVITPGTNTSNQVAVLYQDVNCTEVPVAIHADQLTPTWRVYSTGSNVFQTRAGCLIGAEHVNNSYECDIPIGAGICASYQTQTNSPSGAGSVASQSIIAYTMSLGAENSVAYSNNSIAIPTNFTISVTTEILPVSMTKTSVDCTMYICGDSTECSNLLLQYGSFCTQLNRALTGIAVEQDKNTQEVFAQVKQIYKTPPIKDFGGFNFSQILPDPSKPSKRSFIEDLLFNKVTLADAGFIKQYGDCLGDIAARDLICAQKFNGLTVLPPLLTDEMIAQYTSALLAGTITSGWTFGAGAALQIPFAMQMAYRFNGIGVTQNVLYENQKLIANQFNSAIGKIQDSLSSTASALGKLQDVVNQNAQALNTLVKQLSSNFGAISSVLNDILSRLDPPEAEVQIDRLITGRLQSLQTYVTQQLIRAAEIRASANLAATKMSECVLGQSKRVDFCGKGYHLMSFPQSAPHGVVFLHVTYVPAQEKNFTTAPAICHDGKAHFPREGVFVSNGTHWFVTQRNFYEPQIITTDNTFVSGNCDVVIGIVNNTVYDPLQPELDSFKEELDKYFKNHTSPDVDLGDISGINASVVNIQKEIDRLNEVAKNLNESLIDLQELGKYEQYIKGSGRENLYFQGGGGSGYIPEAPRDGQAYVRKDGEWVLLSTFLGHHHHHHHH

SEQ ID NO: 2197 - protein, 1281 aa, Artificial Sequence
  Description of Artificial Sequence: Synthetic polypeptide
MGILPSPGMPALLSLVSLLSVLLMGCVAETGTQCVNLTTRTQLPPAYTNSFTRGVYYPDKVFRSSVLHSTQDLFLPFFSNVTWFHAIHVSGTNGTKRFDNPVLPFNDGVYFASTEKSNIIRGWIFGTTLDSKTQSLLIVNNATNVVIKVCEFQFCNDPFLGVYYHKNNKSWMESEFRVYSSANNCTFEYVSQPFLMDLEGKQGNFKNLREFVFKNIDGYFKIYSKHTPINLVRDLPQGFSALEPLVDLPIGINITRFQTLLALHRSYLTPGDSSSGWTAGAAAYYVGYLQPRTFLLKYNENGTITDAVDCALDPLSETKCTLKSFTVEKGIYQTSNFRVQPTESIVRFPNITNLCPFGEVFNATRFASVYAWNRKRISNCVADYSVLYNSASFSTFKCYGVSPTKLNDLCFTNVYADSFVIRGDEVRQIAPGQTGKIADYNYKLPDDFTGCVIAWNSNNLDSKVGGNYNYLYRLFRKSNLKPFERDISTEIYQAGSTPCNGVEGFNCYFPLQSYGFQPTNGVGYQPYRVVVLSFELLHAPATVCGPKKSTNLVKNKCVNFNFNGLTGTGVLTESNKKFLPFQQFGRDIADTTDAVRDPQTLEILDITPCSFGGVSVITPGTNTSNQVAVLYQDVNCTEVPVAIHADQLTPTWRVYSTGSNVFQTRAGCLIGAEHVNNSYECDIPIGAGICASYQTQTNSPSGAGSVASQSIIAYTMSLGAENSVAYSNNSIAIPTNFTISVTTEIMPVSMTKTSVDCTMYICGDSTECSNLLLQYGSFCTQLNRALTGIAVEQDKNTQEVFAQVKQIYKTPPIKDFGGFNFSQILPDPSKPSKRSFIEDLLFNKVTLADAGFIKQYGDCLGDIAARDLICAQKFNGLTVLPPLLTDEMIAQYTSALLAGTITSGWTFGAGAALQIPFAMQMAYRFNGIGVTQNVLYENQKLIANQFNSAIGKIQDSLSSTASALGKLQDVVNQNAQALNTLVKQLSSNFGAISSVLNDILSRLDPPEAEVQIDRLITGRLQSLQTYVTQQLIRAAEIRASANLAATKMSECVLGQSKRVDFCGKGYHLMSFPQSAPHGVVFLHVTYVPAQEKNFTTAPAICHDGKAHFPREGVFVSNGTHWFVTQRNFYEPQIITTDNTFVSGNCDVVIGIVNNTVYDPLQPELDSFKEELDKYFKNHTSPDVDLGDISGINASVVNIQKEIDRLNEVAKNLNESLIDLQELGKYEQYIKGSGRENLYFQGGGGSGYIPEAPRDGQAYVRKDGEWVLLSTFLGHHHHHHHH

SEQ ID NO: 2198 - protein, 1281 aa, Artificial Sequence
  Description of Artificial Sequence: Synthetic polypeptide
MGILPSPGMPALLSLVSLLSVLLMGCVAETGTQCVNLTTRTQLPPAYTNSFTRGVYYPDKVFRSSVLHSTQDLFLPFFSNVTWFHAIHVSGTNGTKRFDNPVLPFNDGVYFASTEKSNIIRGWIFGTTLDSKTQSLLIVNNATNVVIKVCEFQFCNDPFLGVYYHKNNKSWMESEFRVYSSANNCTFEYVSQPFLMDLEGKQGNFKNLREFVFKNIDGYFKIYSKHTPINLVRDLPQGFSALEPLVDLPIGINITRFQTLLALHRSYLTPGDSSSGWTAGAAAYYVGYLQPRTFLLKYNENGTITDAVDCALDPLSETKCTLKSFTVEKGIYQTSNFRVQPTESIVRFPNITNLCPFGEVFNATRFASVYAWNRKRISNCVADYSVLYNSASFSTFKCYGVSPTKLNDLCFTNVYADSFVIRGDEVRQIAPGQTGKIADYNYKLPDDFTGCVIAWNSNNLDSKVGGNYNYLYRLFRKSNLKPFERDISTEIYQAGSTPCNGVEGFNCYFPLQSYGFQPTNGVGYQPYRVVVLSFELLHAPATVCGPKKSTNLVKNKCVNFNFNGLTGTGVLTESNKKFLPFQQFGRDIADTTDAVRDPQTLEILDITPCSFGGVSVITPGTNTSNQVAVLYQDVNCTEVPVAIHADQLTPTWRVYSTGSNVFQTRAGCLIGAEHVNNSYECDIPIGAGICASYQTQTNSPSGAGSVASQSIIAYTMSLGAENSVAYSNNSIAIPTNFTISVTTEILPVSMTKTSVDCTMYICGDSTECSNLLLQYGSFCTQLNRALTGIAVEQDKNTQEVFAQVKQIYKTPPIKDFGGFNFSQILPDPSKPSKRSFIEDLLFNKVTLADAGFIKQYGDCLGDIAARDLICAQKFNGLTVLPPLLTDEMIAQYTSALLAGTITSGWTFGAGAALQIPFAMQMAYRFNGIGVTQNVLYENQKLIANQFNAAIGKIQDSLSSTASALGKLQDVVNQNAQALNTLVKQLSSNFGAISSVLNDILSRLDPPEAEVQIDRLITGRLQSLQTYVTQQLIRAAEIRASANLAATKMSECVLGQSKRVDFCGKGYHLMSFPQSAPHGVVFLHVTYVPAQEKNFTTAPAICHDGKAHFPREGVFVSNGTHWFVTQRNFYEPQIITTDNTFVSGNCDVVIGIVNNTVYDPLQPELDSFKEELDKYFKNHTSPDVDLGDISGINASVVNIQKEIDRLNEVAKNLNESLIDLQELGKYEQYIKGSGRENLYFQGGGGSGYIPEAPRDGQAYVRKDGEWVLLSTFLGHHHHHHHH

SEQ ID NO: 2199 - protein, 1281 aa, Artificial Sequence
  Description of Artificial Sequence: Synthetic polypeptide
MGILPSPGMPALLSLVSLLSVLLMGCVAETGTQCVNLTTRTQLPPAYTNSFTRGVYYPDKVFRSSVLHSTQDLFLPFFSNVTWFHAIHVSGTNGTKRFDNPVLPFNDGVYFASTEKSNIIRGWIFGTTLDSKTQSLLIVNNATNVVIKVCEFQFCNDPFLGVYYHKNNKSWMESEFRVYSSANNCTFEYVSQPFLMDLEGKQGNFKNLREFVFKNIDGYFKIYSKHTPINLVRDLPQGFSALEPLVDLPIGINITRFQTLLALHRSYLTPGDSSSGWTAGAAAYYVGYLQPRTFLLKYNENGTITDAVDCALDPLSETKCTLKSFTVEKGIYQTSNFRVQPTESIVRFPNITNLCPFGEVFNATRFASVYAWNRKRISNCVADYSVLYNSASFSTFKCYGVSPTKLNDLCFTNVYADSFVIRGDEVRQIAPGQTGKIADYNYKLPDDFTGCVIAWNSNNLDSKVGGNYNYLYRLFRKSNLKPFERDISTEIYQAGSTPCNGVEGFNCYFPLQSYGFQPTNGVGYQPYRVVVLSFELLHAPATVCGPKKSTNLVKNKCVNFNFNGLTGTGVLTESNKKFLPFQQFGRDIADTTDAVRDPQTLEILDITPCSFGGVSVITPGTNTSNQVAVLYQDVNCTEVPVAIHADQLTPTWRVYSTGSNVFQTRAGCLIGAEHVNNSYECDIPIGAGICASYQTQTNSPSGAGSVASQSIIAYTMSLGAENSVAYSNNSIAIPTNFTISVTTEILPVSMTKTSVDCTMYICGDSTECSNLLLQYGSFCTQLNRALTGIAVEQDKNTQEVFAQVKQIYKTPPIKDFGGFNFSQILPDPSKPSKRSFIEDLLFNKETLADAGFIKQYGDCLGDIAARDLICAQKFNGLTVLPPLLTDEMIAQYTSALLAGTITSGWTFGAGAALQIPFAMQMAYRFNGIGVTQNVLYENQKLIANQFNSAIGKIQDSLSSTASALGKLQDVVNQNAQALNTLVKQLSSNFGAISSVLNDILSRLDPPEAEVQIDRLITGRLQSLQTYVTQQLIRAAEIRASANLAATKMSECVLGQSKRVDFCGKGYHLMSFPQSAPHGVVFLHVTYVPAQEKNFTTAPAICHDGKAHFPREGVFVSNGTHWFVTQRNFYEPQIITTDNTFVSGNCDVVIGIVNNTVYDPLQPELDSFKEELDKYFKNHTSPDVDLGDISGINASVVNIQKEIDRLNEVAKNLNESLIDLQELGKYEQYIKGSGRENLYFQGGGGSGYIPEAPRDGQAYVRKDGEWVLLSTFLGHHHHHHHH

SEQ ID NO: 2200 - protein, 1281 aa, Artificial Sequence
  Description of Artificial Sequence: Synthetic polypeptide
MGILPSPGMPALLSLVSLLSVLLMGCVAETGTQCVNLTTRTQLPPAYTNSFTRGVYYPDKVFRSSVLHSTQDLFLPFFSNVTWFHAIHVSGTNGTKRFDNPVLPFNDGVYFASTEKSNIIRGWIFGTTLDSKTQSLLIVNNATNVVIKVCEFQFCNDPFLGVYYHKNNKSWMESEFRVYSSANNCTFEYVSQPFLMDLEGKQGNFKNLREFVFKNIDGYFKIYSKHTPINLVRDLPQGFSALEPLVDLPIGINITRFQTLLALHRSYLTPGDSSSGWTAGAAAYYVGYLQPRTFLLKYNENGTITDAVDCALDPLSETKCTLKSFTVEKGIYQTSNFRVQPTESIVRFPNITNLCPFGEVFNATRFASVYAWNRKRISNCVADYSVLYNSASFSTFKCYGVSPTKLNDLCFTNVYADSFVIRGDEVRQIAPGQTGKIADYNYKLPDDFTGCVIAWNSNNLDSKVGGNYNYLYRLFRKSNLKPFERDISTEIYQAGSTPCNGVEGFNCYFPLQSYGFQPTNGVGYQPYRVVVLSFELLHAPATVCGPKKSTNLVKNKCVNFNFNGLTGTGVLTESNKKFLPFQQFGRDIADTTDAVRDPQTLEILDITPCSFGGVSVITPGTNTSNQVAVLYQDVNCTEVPAAIHADQLTPTWRVYSTGSNVFQTRAGCLIGAEHVNNSYECDIPIGAGICASYQTQTNSPSGAGSVASQSIIAYTMSLGAENSVAYSNNSIAIPTNFTISVTTEILPVSMTKTSVDCTMYICGDSTECSNLLLQYGSFCTQLNRALTGIAVEQDKNTQEVFAQVKQIYKTPPIKDFGGFNFSQILPDPSKPSKRSFIEDLLFNKVTLADAGFIKQYGDCLGDIAARDLICAQKFNGLTVLPPLLTDEMIAQYTSALLAGTITSGWTFGAGAALQIPFAMQMAYRFNGIGVTQNVLYENQKLIANQFNSAIGKIQDSLSSTASALGKLQDVVNQNAQALNTLVKQLSSNFGAISSVLNDILSRLDPPEAEVQIDRLITGRLQSLQTYVTQQLIRAAEIRASANLAATKMSECVLGQSKRVDFCGKGYHLMSFPQSAPHGVVFLHVTYVPAQEKNFTTAPAICHDGKAHFPREGVFVSNGTHWFVTQRNFYEPQIITTDNTFVSGNCDVVIGIVNNTVYDPLQPELDSFKEELDKYFKNHTSPDVDLGDISGINASVVNIQKEIDRLNEVAKNLNESLIDLQELGKYEQYIKGSGRENLYFQGGGGSGYIPEAPRDGQAYVRKDGEWVLLSTFLGHHHHHHHH

SEQ ID NO: 2201 - protein, 1281 aa, Artificial Sequence
  Description of Artificial Sequence: Synthetic polypeptide
MGILPSPGMPALLSLVSLLSVLLMGCVAETGTQCVNLTTRTQLPPAYTNSFTRGVYYPDKVFRSSVLHSTQDLFLPFFSNVTWFHAIHVSGTNGTKRFDNPVLPFNDGVYFASTEKSNIIRGWIFGTTLDSKTQSLLIVNNATNVVIKVCEFQFCNDPFLGVYYHKNNKSWMESEFRVYSSANNCTFEYVSQPFLMDLEGKQGNFKNLREFVFKNIDGYFKIYSKHTPINLVRDLPQGFSALEPLVDLPIGINITRFQTLLALHRSYLTPGDSSSGWTAGAAAYYVGYLQPRTFLLKYNENGTITDAVDCALDPLSETKCTLKSFTVEKGIYQTSNFRVQPTESIVRFPNITNLCPFGEVFNATRFASVYAWNRKRISNCVADYSVLYNSASFSTFKCYGVSPTKLNDLCFTNVYADSFVIRGDEVRQIAPGQTGKIADYNYKLPDDFTGCVIAWNSNNLDSKVGGNYNYLYRLFRKSNLKPFERDISTEIYQAGSTPCNGVEGFNCYFPLQSYGFQPTNGVGYQPYRVVVLSFELLHAPATVCGPKDSTNLVKNKCVNFNFNGLTGTGVLTESNKKFLPFQQFGRDIADTTDAVRDPQTLEILDITPCSFGGVSVITPGTNTSNQVAVLYQDVNCTEVPVAIHADQLTPTWRVYSTGSNVFQTRAGCLIGAEHVNNSYECDIPIGAGICASYQTQTNSPSGAGSVASQSIIAYTMSLGAENSVAYSNNSIAIPTNFTISVTTEILPVSMTKTSVDCTMYICGDSTECSNLLLQYGSFCTQLNRALTGIAVEQDKNTQEVFAQVKQIYKTPPIKDFGGFNFSQILPDPSKPSKRSFIEDLLFNKVTLADAGFIKQYGDCLGDIAARDLICAQKFNGLTVLPPLLTDEMIAQYTSALLAGTITSGWTFGAGAALQIPFAMQMAYRFNGIGVTQNVLYENQKLIANQFNSAIGKIQDSLSSTASALGKLQDVVNQNAQALNTLVKQLSSNFGAISSVLNDILSRLDPPEAEVQIDRLITGRLQSLQTYVTQQLIRAAEIRASANLAATKMSECVLGQSKRVDFCGKGYHLMSFPQSAPHGVVFLHVTYVPAQEKNFTTAPAICHDGKAHFPREGVFVSNGTHWFVTQRNFYEPQIITTDNTFVSGNCDVVIGIVNNTVYDPLQPELDSFKEELDKYFKNHTSPDVDLGDISGINASVVNIQKEIDRLNEVAKNLNESLIDLQELGKYEQYIKGSGRENLYFQGGGGSGYIPEAPRDGQAYVRKDGEWVLLSTFLGHHHHHHHH

SEQ ID NO: 2202 - protein, 1281 aa, Artificial Sequence
  Description of Artificial Sequence: Synthetic polypeptide
MGILPSPGMPALLSLVSLLSVLLMGCVAETGTQCVNLTTRTQLPPAYTNSFTRGVYYPDKVFRSSVLHSTQDLFLPFFSNVTWFHAIHVSGTNGTKRFDNPVLPFNDGVYFASTEKSNIIRGWIFGTTLDSKTQSLLIVNNATNVVIKVCEFQFCNDPFLGVYYHKNNKSWMESEFRVYSSANNCTFEYVSQPFLMDLEGKQGNFKNLREFVFKNIDGYFKIYSKHTPINLVRDLPQGFSALEPLVDLPIGINITRFQTLLALHRSYLTPGDSSSGWTAGAAAYYVGYLQPRTFLLKYNENGTITDAVDCALDPLSETKCTLKSFTVEKGIYQTSNFRVQPTESIVRFPNITNLCPFGEVFNATRFASVYAWNRKRISNCVADYSVLYNSASFSTFKCYGVSPTKLNDLCFTNVYADSFVIRGDEVRQIAPGQTGKIADYNYKLPDDFTGCVIAWNSNNLDSKVGGNYNYLYRLFRKSNLKPFERDISTEIYQAGSTPCNGVEGFNCYFPLQSYGFQPTNGVGYQPYRVVVLSFELLHAPATVCGPKKSTNLVKNKCVNFNFNGLTGTGVLTESNKKFLPFQQFGRDIADTTDAVRDPQTLEILDITPCSFGGVSVITPGTNTSNQVAVLYQDVNCTEVPVAIHADQLTPTWRVYSTGSNVFQTRAGCLIGAEHVNNSYECDIPIGAGICASYQTQTNSPSGAGSVASQSIIAYTMSLGAENSVAYSNNSIAIPTNFTISVTTEILPVSMTKTSVDCTMYICGDSTECSNLLLQYGSFCTQLNRALTGIAVEQDKNTQEVFAQVKQIYKTPPIKDFGGFNFSQILPDPSKPSKRSFIEDLLFNKVTLADAGFIKQYGDCLGDIAARDLICAQKFNGLTVLPPLLTDEMIAQYTSALLAGTITSGWTFGAGAALQIPFAMQMAYRFNGIGVTQNVLYENQKLIANQFNSAIGHIQDSLSSTASALGKLQDVVNQNAQALNTLVKQLSSNFGAISSVLNDILSRLDPPEAEVQIDRLITGRLQSLQTYVTQQLIRAAEIRASANLAATKMSECVLGQSKRVDFCGKGYHLMSFPQSAPHGVVFLHVTYVPAQEKNFTTAPAICHDGKAHFPREGVFVSNGTHWFVTQRNFYEPQIITTDNTFVSGNCDVVIGIVNNTVYDPLQPELDSFKEELDKYFKNHTSPDVDLGDISGINASVVNIQKEIDRLNEVAKNLNESLIDLQELGKYEQYIKGSGRENLYFQGGGGSGYIPEAPRDGQAYVRKDGEWVLLSTFLGHHHHHHHH

SEQ ID NO: 2203 - protein, 1281 aa, Artificial Sequence
  Description of Artificial Sequence: Synthetic polypeptide
MGILPSPGMPALLSLVSLLSVLLMGCVAETGTQCVNLTTRTQLPPAYTNSFTRGVYYPDKVFRSSVLHSTQDLFLPFFSNVTWFHAIHVSGTNGTKRFDNPVLPFNDGVYFASTEKSNIIRGWIFGTTLDSKTQSLLIVNNATNVVIKVCEFQFCNDPFLGVYYHKNNKSWMESEFRVYSSANNCTFEYVSQPFLMDLEGKQGNFKNLREFVFKNIDGYFKIYSKHTPINLVRDLPQGFSALEPLVDLPIGINITRFQTLLALHRSYLTPGDSSSGWTAGAAAYYVGYLQPRTFLLKYNENGTITDAVDCALDPLSETKCTLKSFTVEKGIYQTSNFRVQPTESIVRFPNITNLCPFGEVFNATRFASVYAWNRKRISNCVADYSVLYNSASFSTFKCYGVSPTKLNDLCFTNVYADSFVIRGDEVRQIAPGQTGKIADYNYKLPDDFTGCVIAWNSNNLDSKVGGNYNYLYRLFRKSNLKPFERDISTEIYQAGSTPCNGVEGFNCYFPLQSYGFQPTNGVGYQPYRVVVLSFELLHAPATVCGPKKSTNLVKNKCVNFNFNGLTGTGVLTESNKKFLPFQQFGRDIADNTDAVRDPQTLEILDITPCSFGGVSVITPGTNTSNQVAVLYQDVNCTEVPVAIHADQLTPTWRVYSTGSNVFQTRAGCLIGAEHVNNSYECDIPIGAGICASYQTQTNSPSGAGSVASQSIIAYTMSLGAENSVAYSNNSIAIPTNFTISVTTEILPVSMTKTSVDCTMYICGDSTECSNLLLQYGSFCTQLNRALTGIAVEQDKNTQEVFAQVKQIYKTPPIKDFGGFNFSQILPDPSKPSKRSFIEDLLFNKVTLADAGFIKQYGDCLGDIAARDLICAQKFNGLTVLPPLLTDEMIAQYTSALLAGTITSGWTFGAGAALQIPFAMQMAYRFNGIGVTQNVLYENQKLIANQFNSAIGKIQDSLSSTASALGKLQDVVNQNAQALNTLVKQLSSNFGAISSVLNDILSRLDPPEAEVQIDRLITGRLQSLQTYVTQQLIRAAEIRASANLAATKMSECVLGQSKRVDFCGKGYHLMSFPQSAPHGVVFLHVTYVPAQEKNFTTAPAICHDGKAHFPREGVFVSNGTHWFVTQRNFYEPQIITTDNTFVSGNCDVVIGIVNNTVYDPLQPELDSFKEELDKYFKNHTSPDVDLGDISGINASVVNIQKEIDRLNEVAKNLNESLIDLQELGKYEQYIKGSGRENLYFQGGGGSGYIPEAPRDGQAYVRKDGEWVLLSTFLGHHHHHHHH

SEQ ID NO: 2204 - protein, 1281 aa, Artificial Sequence
  Description of Artificial Sequence: Synthetic polypeptide
MGILPSPGMPALLSLVSLLSVLLMGCVAETGTQCVNLTTRTQLPPAYTNSFTRGVYYPDKVFRSSVLHSTQDLFLPFFSNVTWFHAIHVSGTNGTKRFDNPVLPFNDGVYFASTEKSNIIRGWIFGTTLDSKSQSLLIVNNATNVVIKVCEFQFCNDPFLGVYYHKNNKSWMESEFRVYSSANNCTFEYVSQPFLMDLEGKQGNFKNLREFVFKNIDGYFKIYSKHTPINLVRDLPQGFSALEPLVDLPIGINITRFQTLLALHRSYLTPGDSSSGWTAGAAAYYVGYLQPRTFLLKYNENGTITDAVDCALDPLSETKCTLKSFTVEKGIYQTSNFRVQPTESIVRFPNITNLCPFGEVFNATRFASVYAWNRKRISNCVADYSVLYNSASFSTFKCYGVSPTKLNDLCFTNVYADSFVIRGDEVRQIAPGQTGKIADYNYKLPDDFTGCVIAWNSNNLDSKVGGNYNYLYRLFRKSNLKPFERDISTEIYQAGSTPCNGVEGFNCYFPLQSYGFQPTNGVGYQPYRVVVLSFELLHAPATVCGPKKSTNLVKNKCVNFNFNGLTGTGVLTESNKKFLPFQQFGRDIADTTDAVRDPQTLEILDITPCSFGGVSVITPGTNTSNQVAVLYQDVNCTEVPVAIHADQLTPTWRVYSTGSNVFQTRAGCLIGAEHVNNSYECDIPIGAGICASYQTQTNSPSGAGSVASQSIIAYTMSLGAENSVAYSNNSIAIPTNFTISVTTEILPVSMTKTSVDCTMYICGDSTECSNLLLQYGSFCTQLNRALTGIAVEQDKNTQEVFAQVKQIYKTPPIKDFGGFNFSQILPDPSKPSKRSFIEDLLFNKVTLADAGFIKQYGDCLGDIAARDLICAQKFNGLTVLPPLLTDEMIAQYTSALLAGTITSGWTFGAGAALQIPFAMQMAYRFNGIGVTQNVLYENQKLIANQFNSAIGKIQDSLSSTASALGKLQDVVNQNAQALNTLVKQLSSNFGAISSVLNDILSRLDPPEAEVQIDRLITGRLQSLQTYVTQQLIRAAEIRASANLAATKMSECVLGQSKRVDFCGKGYHLMSFPQSAPHGVVFLHVTYVPAQEKNFTTAPAICHDGKAHFPREGVFVSNGTHWFVTQRNFYEPQIITTDNTFVSGNCDVVIGIVNNTVYDPLQPELDSFKEELDKYFKNHTSPDVDLGDISGINASVVNIQKEIDRLNEVAKNLNESLIDLQELGKYEQYIKGSGRENLYFQGGGGSGYIPEAPRDGQAYVRKDGEWVLLSTFLGHHHHHHHH

SEQ ID NO: 2205 - protein, 1281 aa, Artificial Sequence
  Description of Artificial Sequence: Synthetic polypeptide
MGILPSPGMPALLSLVSLLSVLLMGCVAETGTQCVNLTTRTQLPPAYTNSFTRGVYYPDKVFRSSVLHSTQDLFLPFFSNVTWFHAIHVSGTNGTKRFDNPVLPFNDGVYFASTEKSNIIRGWIFGTTLDSKTQSLLIVNNATNVVIKVCEFQFCNDPFLGVYYHKNNKSWMESEFRVYSSANNCTFEYVSQPFPMDLEGKQGNFKNLREFVFKNIDGYFKIYSKHTPINLVRDLPQGFSALEPLVDLPIGINITRFQTLLALHRSYLTPGDSSSGWTAGAAAYYVGYLQPRTFLLKYNENGTITDAVDCALDPLSETKCTLKSFTVEKGIYQTSNFRVQPTESIVRFPNITNLCPFGEVFNATRFASVYAWNRKRISNCVADYSVLYNSASFSTFKCYGVSPTKLNDLCFTNVYADSFVIRGDEVRQIAPGQTGKIADYNYKLPDDFTGCVIAWNSNNLDSKVGGNYNYLYRLFRKSNLKPFERDISTEIYQAGSTPCNGVEGFNCYFPLQSYGFQPTNGVGYQPYRVVVLSFELLHAPATVCGPKKSTNLVKNKCVNFNFNGLTGTGVLTESNKKFLPFQQFGRDIADTTDAVRDPQTLEILDITPCSFGGVSVITPGTNTSNQVAVLYQDVNCTEVPVAIHADQLTPTWRVYSTGSNVFQTRAGCLIGAEHVNNSYECDIPIGAGICASYQTQTNSPSGAGSVASQSIIAYTMSLGAENSVAYSNNSIAIPTNFTISVTTEILPVSMTKTSVDCTMYICGDSTECSNLLLQYGSFCTQLNRALTGIAVEQDKNTQEVFAQVKQIYKTPPIKDFGGFNFSQILPDPSKPSKRSFIEDLLFNKVTLADAGFIKQYGDCLGDIAARDLICAQKFNGLTVLPPLLTDEMIAQYTSALLAGTITSGWTFGAGAALQIPFAMQMAYRFNGIGVTQNVLYENQKLIANQFNSAIGKIQDSLSSTASALGKLQDVVNQNAQALNTLVKQLSSNFGAISSVLNDILSRLDPPEAEVQIDRLITGRLQSLQTYVTQQLIRAAEIRASANLAATKMSECVLGQSKRVDFCGKGYHLMSFPQSAPHGVVFLHVTYVPAQEKNFTTAPAICHDGKAHFPREGVFVSNGTHWFVTQRNFYEPQIITTDNTFVSGNCDVVIGIVNNTVYDPLQPELDSFKEELDKYFKNHTSPDVDLGDISGINASVVNIQKEIDRLNEVAKNLNESLIDLQELGKYEQYIKGSGRENLYFQGGGGSGYIPEAPRDGQAYVRKDGEWVLLSTFLGHHHHHHHH

SEQ ID NO: 2206 - protein, 1281 aa, Artificial Sequence
  Description of Artificial Sequence: Synthetic polypeptide
MGILPSPGMPALLSLVSLLSVLLMGCVAETGTQCVNLTTRTQLPPAYTNSFTRGVYYPDKVFRSSVLHSTQDLFLPFFSNVTWFHAIHVSGTNGTKNFDNPVLPFNDGVYFASTEKSNIIRGWIFGTTLDSKTQSLLIVNNATNVVIKVCEFQFCNDPFLGVYYHKNNKSWMESEFRVYSSANNCTFEYVSQPFLMDLEGKQGNFKNLREFVFKNIDGYFKIYSKHTPINLVRDLPQGFSALEPLVDLPIGINITRFQTLLALHRSYLTPGDSSSGWTAGAAAYYVGYLQPRTFLLKYNENGTITDAVDCALDPLSETKCTLKSFTVEKGIYQTSNFRVQPTESIVRFPNITNLCPFGEVFNATRFASVYAWNRKRISNCVADYSVLYNSASFSTFKCYGVSPTKLNDLCFTNVYADSFVIRGDEVRQIAPGQTGKIADYNYKLPDDFTGCVIAWNSNNLDSKVGGNYNYLYRLFRKSNLKPFERDISTEIYQAGSTPCNGVEGFNCYFPLQSYGFQPTNGVGYQPYRVVVLSFELLHAPATVCGPKKSTNLVKNKCVNFNFNGLTGTGVLTESNKKFLPFQQFGRDIADTTDAVRDPQTLEILDITPCSFGGVSVITPGTNTSNQVAVLYQDVNCTEVPVAIHADQLTPTWRVYSTGSNVFQTRAGCLIGAEHVNNSYECDIPIGAGICASYQTQTNSPSGAGSVASQSIIAYTMSLGAENSVAYSNNSIAIPTNFTISVTTEILPVSMTKTSVDCTMYICGDSTECSNLLLQYGSFCTQLNRALTGIAVEQDKNTQEVFAQVKQIYKTPPIKDFGGFNFSQILPDPSKPSKRSFIEDLLFNKVTLADAGFIKQYGDCLGDIAARDLICAQKFNGLTVLPPLLTDEMIAQYTSALLAGTITSGWTFGAGAALQIPFAMQMAYRFNGIGVTQNVLYENQKLIANQFNSAIGKIQDSLSSTASALGKLQDVVNQNAQALNTLVKQLSSNFGAISSVLNDILSRLDPPEAEVQIDRLITGRLQSLQTYVTQQLIRAAEIRASANLAATKMSECVLGQSKRVDFCGKGYHLMSFPQSAPHGVVFLHVTYVPAQEKNFTTAPAICHDGKAHFPREGVFVSNGTHWFVTQRNFYEPQIITTDNTFVSGNCDVVIGIVNNTVYDPLQPELDSFKEELDKYFKNHTSPDVDLGDISGINASVVNIQKEIDRLNEVAKNLNESLIDLQELGKYEQYIKGSGRENLYFQGGGGSGYIPEAPRDGQAYVRKDGEWVLLSTFLGHHHHHHHH

SEQ ID NO: 2207 - protein, 1281 aa, Artificial Sequence
  Description of Artificial Sequence: Synthetic polypeptide
MGILPSPGMPALLSLVSLLSVLLMGCVAETGTQCVNLTTRTQLPPAYTNSFTRGVYYPDKVFRSSVLHSTQDLFLPFFSNVTWFHAIHVSGTNGTKRFDNPVLPFNDGVYFASTEKSNIIRGWIFGTTLDSKTQSLLIVNNATNVVIKVCEFQFCNDPFLGVYYHKNNKSWMESEFRVYSSANNCTFEYVSQPFLMDLEGKQGNFKNLREFVFKNIDGYFKIYSKHTPINLVRDLPQGFSALEPLVDLPIGINITRFQTLLALHRSYLTPGDSSSGWTAGAAAYYVGYLQPRTFLLKYNENGTITDAVDCALDPLSETKCTLKSFTVEKGIYQTSNFRVQPTESIVRFPNITNLCPFGEVFNATRFASVYAWNRKRISNCVADYSVLYNSASFSTFKCYGVSPTKLNDLCFTNVYADSFVIRGDEVRQIAPGQTGKIADYNYKLPDDFTGCVIAWNSNNLDSKVGGNYNYLYRLFRKSNLKPFERDISTEIYQAGSTPCNGVEGFNCYFPLQSYGFQPTNGVGYQPYRVVVLSFELLHAPATVCGPKKSTNLVKNKCVNFNFNGLTGTGVLTESNKKFLPFQQFGRDIADTTDAVRDPQTLEILDITPCSFGGVSVITPGTNTSNQVAVLYQDVNCTEVPVAIHADQLTPTWRVYSTGSNVFQTRAGCLIGAEHVNNSYECDIPIGAGICASYQTQTNSPSGAGSVASQSIIAYTMSLGAENSVAYSNNSIAIPTNFTISVTTEILPVSMTKTSVDCTMYICGDSTECSNLLLQYGSFCTQLNRALTGIAVEQDKNTQEVFAQVKQIYKTPPIKDFGGFNFSQILPDPSKPSKRSFIEDLLFNKVTLADAGFIKQYGDCLGDIAARDLICAQKFNGLTVLPPLLTDEMIAQYTSALLAGTITSGWTFGAGAALQIPFAMQMAYRFNGIGVTQNVLYENQKLIANQFNSAIGKIQDSLRSTASALGKLQDVVNQNAQALNTLVKQLSSNFGAISSVLNDILSRLDPPEAEVQIDRLITGRLQSLQTYVTQQLIRAAEIRASANLAATKMSECVLGQSKRVDFCGKGYHLMSFPQSAPHGVVFLHVTYVPAQEKNFTTAPAICHDGKAHFPREGVFVSNGTHWFVTQRNFYEPQIITTDNTFVSGNCDVVIGIVNNTVYDPLQPELDSFKEELDKYFKNHTSPDVDLGDISGINASVVNIQKEIDRLNEVAKNLNESLIDLQELGKYEQYIKGSGRENLYFQGGGGSGYIPEAPRDGQAYVRKDGEWVLLSTFLGHHHHHHHH

SEQ ID NO: 2208 - protein, 1281 aa, Artificial Sequence
  Description of Artificial Sequence: Synthetic polypeptide
MGILPSPGMPALLSLVSLLSVLLMGCVAETGTQCVNLTTRTQLPPAYTNSFTRGVYYPDKVFRSSVLHSTQDLFLPFFSNVTWFHAIHVSGTNGTKRFDNPVLPFNDGVYFASTEKSNIIRGWIFGTTLDSKTQSLLIVNNATNVVIKVCEFQFCNDPFLGVYYHKNNKSWMESEFRVYSSANNCTFEYVSQPFLMDLEGKQGNFKNLREFVFKNIDGYFKIYSKHTPINLVRDLPQGFSALEPLVDLPIGINITRFQTLLALHRSYLTPGDSSSGWTAGAAAYYVGYLQPRTFLLKYNENGTITDAVDCALDPLSETKCTLKSFTVEKGIYQTSNFRVQPTESIVRFPNITNLCPFGEVFNATRFASVYAWNRKRISNCVADYSVLYNSASFSTFKCYGVSPTKLNDLCFTNVYADSFVIRGDEVRQIAPGQTGKIADYNYKLPDDFTGCVIAWNSNNLDSKVGGNYNYLYRLFRKSNLKPFERDISTEIYQAGSTPCNGVEGFNCYFPLQSYGFQPTNGVGYQPYRVVVLSFELLHAPATVCGPKKSTNLVKNKCVNFNFNGLTGTGVLTESNKKFLPFQQFGRDIADTTDAVRDPQTLEILDITPCSFGGVSVITPGTNTSNQVAVLYQDVNCTEVPVAIHADQLTPTWRVYSTGSNVFQTRAGCLIGAEHVNNSYECDIPIGAGICASYQTQTNSPSGAGSVASQSIIAYTMSLGAENSVAYSNNSIAIPTNFTISVTTEILPVSMTKTSVDCSMYICGDSTECSNLLLQYGSFCTQLNRALTGIAVEQDKNTQEVFAQVKQIYKTPPIKDFGGFNFSQILPDPSKPSKRSFIEDLLFNKVTLADAGFIKQYGDCLGDIAARDLICAQKFNGLTVLPPLLTDEMIAQYTSALLAGTITSGWTFGAGAALQIPFAMQMAYRFNGIGVTQNVLYENQKLIANQFNSAIGKIQDSLSSTASALGKLQDVVNQNAQALNTLVKQLSSNFGAISSVLNDILSRLDPPEAEVQIDRLITGRLQSLQTYVTQQLIRAAEIRASANLAATKMSECVLGQSKRVDFCGKGYHLMSFPQSAPHGVVFLHVTYVPAQEKNFTTAPAICHDGKAHFPREGVFVSNGTHWFVTQRNFYEPQIITTDNTFVSGNCDVVIGIVNNTVYDPLQPELDSFKEELDKYFKNHTSPDVDLGDISGINASVVNIQKEIDRLNEVAKNLNESLIDLQELGKYEQYIKGSGRENLYFQGGGGSGYIPEAPRDGQAYVRKDGEWVLLSTFLGHHHHHHHH

SEQ ID NO: 2209 - protein, 1281 aa, Artificial Sequence
  Description of Artificial Sequence: Synthetic polypeptide
MGILPSPGMPALLSLVSLLSVLLMGCVAETGTQCVNLTTRTQLPPAYTNSFTRGVYYPDKVFRSSVLHSTQDLFLPFFSNVTWFHAIHVSGTNGTKRFDNPVLPFNDGVYFASTEKSNIIRGWIFGTTLDSKTQSLLIVNNATNVVIKVCEFQFCNDPFLGVYYHKNNKSWMESEFRVYSSANNCTFEYVSQPFLMDLEGKQGNFKNLREFVFKNIDGYFKIYSKHTPINLVRDLPQGFSALEPLVDLPIGINITRFQTLLALHRSYLTPGDSSSGWTAGAAAYYVGYLQPRTFLLKYNENGTITDAVDCALDPLSETKCTLKSFTVEKGIYQTSNFRVQPTESIVRFPNITNLCPFGEVFNATRFASVYAWNRKRISNCVADYSVLYNSASFSTFKCYGVSPTKLNDLCFTNVYADSFVIRGDEVRQIAPGQTGKIADYNYKLPDDFTGCVIAWNSNNLDSKVGGNYNYLYRLFRKSNLKPFERDISTEIYQAGSTPCNGVEGFNCYFPLQSYGFQPTNGVGYQPYRVVVLSFELLHAPATVCGPKKSTNLVKNKCVNFNFNGLTGTGVLTESNKKFLPFQQFGRDIADTTDAVRDPQTLEILDITPCSFGGVSVITPGTNTSNQVAVLYQDVNCTEVPVAIHADQLTPTWRVYSTGSNVFQTRAGCLIGAEHVNNSYECDIPIGAGICASYQTQTNSPSGAGSVASQSIIAYTMSLGAENSVAYSNNSIAIPTNFTISVTTEILPVSMTKTSVDCTMYICGDSTECSNLLLQYGSFCTQLNRALTGIAVEQDKNTQEVFAQVKQIYKTPPIKDFGGFNFSQILPDPSKPSKRSFIEDLLFNKVTLADAGFIKQYGDCLGDIAARDLICAQKFNGLTVLPPLLTDEMIAQYTSALLAGTITGGWTFGAGAALQIPFAMQMAYRFNGIGVTQNVLYENQKLIANQFNSAIGKIQDSLSSTASALGKLQDVVNQNAQALNTLVKQLSSNFGAISSVLNDILSRLDPPEAEVQIDRLITGRLQSLQTYVTQQLIRAAEIRASANLAATKMSECVLGQSKRVDFCGKGYHLMSFPQSAPHGVVFLHVTYVPAQEKNFTTAPAICHDGKAHFPREGVFVSNGTHWFVTQRNFYEPQIITTDNTFVSGNCDVVIGIVNNTVYDPLQPELDSFKEELDKYFKNHTSPDVDLGDISGINASVVNIQKEIDRLNEVAKNLNESLIDLQELGKYEQYIKGSGRENLYFQGGGGSGYIPEAPRDGQAYVRKDGEWVLLSTFLGHHHHHHHH

SEQ ID NO: 2210 - protein, 1281 aa, Artificial Sequence
  Description of Artificial Sequence: Synthetic polypeptide
MGILPSPGMPALLSLVSLLSVLLMGCVAETGTQCVNLTTRTQLPPAYTNSFTRGVYYPDKVFRSSVLHSTQDLFLPFFSNVTWFHAIHVSGTNGTKRFDNPVLPFNDGVYFASTEKSNIIRGWIFGTTLDSKTQSLLIVNNATNVVIKVCEFQFCNDPFLGVYYHKNNKSWMESEFRVYSSANNCTFEYVSQPFLMDLAGKQGNFKNLREFVFKNIDGYFKIYSKHTPINLVRDLPQGFSALEPLVDLPIGINITRFQTLLALHRSYLTPGDSSSGWTAGAAAYYVGYLQPRTFLLKYNENGTITDAVDCALDPLSETKCTLKSFTVEKGIYQTSNFRVQPTESIVRFPNITNLCPFGEVFNATRFASVYAWNRKRISNCVADYSVLYNSASFSTFKCYGVSPTKLNDLCFTNVYADSFVIRGDEVRQIAPGQTGKIADYNYKLPDDFTGCVIAWNSNNLDSKVGGNYNYLYRLFRKSNLKPFERDISTEIYQAGSTPCNGVEGFNCYFPLQSYGFQPTNGVGYQPYRVVVLSFELLHAPATVCGPKKSTNLVKNKCVNFNFNGLTGTGVLTESNKKFLPFQQFGRDIADTTDAVRDPQTLEILDITPCSFGGVSVITPGTNTSNQVAVLYQDVNCTEVPVAIHADQLTPTWRVYSTGSNVFQTRAGCLIGAEHVNNSYECDIPIGAGICASYQTQTNSPSGAGSVASQSIIAYTMSLGAENSVAYSNNSIAIPTNFTISVTTEILPVSMTKTSVDCTMYICGDSTECSNLLLQYGSFCTQLNRALTGIAVEQDKNTQEVFAQVKQIYKTPPIKDFGGFNFSQILPDPSKPSKRSFIEDLLFNKVTLADAGFIKQYGDCLGDIAARDLICAQKFNGLTVLPPLLTDEMIAQYTSALLAGTITSGWTFGAGAALQIPFAMQMAYRFNGIGVTQNVLYENQKLIANQFNSAIGKIQDSLSSTASALGKLQDVVNQNAQALNTLVKQLSSNFGAISSVLNDILSRLDPPEAEVQIDRLITGRLQSLQTYVTQQLIRAAEIRASANLAATKMSECVLGQSKRVDFCGKGYHLMSFPQSAPHGVVFLHVTYVPAQEKNFTTAPAICHDGKAHFPREGVFVSNGTHWFVTQRNFYEPQIITTDNTFVSGNCDVVIGIVNNTVYDPLQPELDSFKEELDKYFKNHTSPDVDLGDISGINASVVNIQKEIDRLNEVAKNLNESLIDLQELGKYEQYIKGSGRENLYFQGGGGSGYIPEAPRDGQAYVRKDGEWVLLSTFLGHHHHHHHH

SEQ ID NO: 2211 - protein, 1281 aa, Artificial Sequence
  Description of Artificial Sequence: Synthetic polypeptide
MGILPSPGMPALLSLVSLLSVLLMGCVAETGTQCVNLTTRTQLPPAYTNSFTRGVYYPDKVFRSDVLHSTQDLFLPFFSNVTWFHAIHVSGTNGTKRFDNPVLPFNDGVYFASTEKSNIIRGWIFGTTLDSKTQSLLIVNNATNVVIKVCEFQFCEDPFLGVYYHKNNKSWMEKEFRVYSSANNCTFEYVSQPFLMDLGGKQGNFKWLREFVFKNIDGYFKIYSKHTPINLVRDLPQGFSALEPLMDLPIGINITRFQTLLALHRSYLTPGDSSSGWTAGAAAYYVGYLQPRTFLLKYNENGTITDAVDCALDPLSETKCTLKSFTVEKGIYQTSNFRVQPTESIVRFPNITNLCPFGEVFNATRFASVYAWNRKRISNCVADYSVLYNSASFSTFKCYGVSPTKLNDLCFTNVYADSFVIRGDEVRQIAPGQTGKIADYNYKLPDDFTGCVIAWNSNNLDSKVGGNYNYLYRLFRKSNLKPFERDISTEIYQAGSTPCNGVEGFNCYFPLQSYGFQPTNGVGYQPYRVVVLSFELLHAPATVCGPKKSTNLVKNKCVNFNFNGLTGTGVLTESNKKFLPFQQFGRDIADNTDAVRDPQTLEILDITPCSFGGVSVITPGTNTSNQVAVLYQDVNCTEVPNAIHADQLTPTWRVYSTGSNVFQTRAGCLIGAEHVNNSYECDIPIGAGICASYQTQTNSPSGAGSVASQSIIAYTMSLGAENSVAYSNNSIAIPTNFTISVTTEILPVSMTKTSVDCTMYICGDSTECSNLLLQYGSFCTQLNRALQGIAREQDKNTQEVFAQVKQIYKTPPIKDFGGFNFSQILPDPSKPSKRSFIEDLLFNKVTLADAGFIKQYGDCLGDIAARDLICAQKFNGLTVLPPLLTDEMIAQYTSALLAGTITSGWTFGAGAALQIPFAMQMAYRFNGIGVTQNVLYENQKLIANQFNKAIGKIQDSLSSTASALGKLQDVVNQNAQALNTLVKQLSSNFGAISSVLNDILSRLDPPEAEVQIDRLITGRLQSLQTYVTQQLIRAAEIRASANLAATKMSECVLGQSKRVDFCGKGYHLMSFPQSAPHGVVFLHVTYVPAQEKNFTTAPAICHDGKAFFPREGVFVSNGTQWFVTQRNFYEPQIITTDNTFVSGNCDVVIGIVNNTVYDPLQPELDSFKEELDKYFKNHTSPDVDLGDISGINASVVNIQKEIDRLNEVAKNLNESLIDLQELGKYEQYIKGSGRENLYFQGGGGSGYIPEAPRDGQAYVRKDGEWVLLSTFLGHHHHHHHH

SEQ ID NO: 2212 - protein, 1281 aa, Artificial Sequence
  Description of Artificial Sequence: Synthetic polypeptide
MGILPSPGMPALLSLVSLLSVLLMGCVAETGTQCVNLTTRTQLPPAYTNSFTRGVYYPDKVFRSSVLHSTQDLFLPFFSNVTWFHAIHVSGTNGTKRFDNPVLPFNDGVYFASTEKSNIIRGWIFGTTLDSKTQSLLIVNNATNVVIKVCEFQFCNDPFLGVYYHKNNKSWMESEFRVYSSANNCTFEYVSQPFLMDLEGKQGNFKNLREFVFKNIDGYFKIYSKHTPINLVRDLPQGFSALEPLVDLPIGINITRFQTLLALHRSYLTPGDSSSGWTAGAAAYYVGYLQPRTFLLKYNENGTITDAVDCALDPLAETKCTLKSFTVEKGIYQTSNFRVQPTESIVRFPNITNLCPFGEVFNATRFASVYAWNRKRISNCVADYSVLYNSASFSTFKCYGVSPTKLNDLCFTNVYADSFVIRGDEVRQIAPGQTGKIADYNYKLPDDFTGCVIAWNSNNLDSKVGGNYNYLYRLFRKSNLKPFERDISTEIYQAGSTPCNGVEGFNCYFPLQSYGFQPTNGVGYQPYRVVVLSFELLHAPATVCGPKKSTNLVKNKCVNFNFNGLTGTGVLTESNKKFLPFQQFGRDIADTTDAVRDPQTLEILDITPCSFGGVSVITPGTNTSNQVAVLYQDVNCTEVPVAIHADQLTPTWRVYSTGSNVFQTRAGCLIGAEHVNNSYECDIPIGAGICASYQTQTNSPSGAGSVASQSIIAYTMSLGAENSVAYSNNSIAIPTNFTISVTTEILPVSMTKTSVDCTMYICGDSTECSNLLLQYGSFCTQLNRALTGIAVEQDKNTQEVFAQVKQIYKTPPIKDFGGFNFSQILPDPSKPSKRSFIEDLLFNKVTLADAGFIKQYGDCLGDIAARDLICAQKFNGLTVLPPLLTDEMIAQYTSALLAGTITSGWTFGAGAALQIPFAMQMAYRFNGIGVTQNVLYENQKLIANQFNSAIGKIQDSLSSTASALGKLQDVVNQNAQALNTLVKQLSSNFGAISSVLNDILSRLDPPEAEVQIDRLITGRLQSLQTYVTQQLIRAAEIRASANLAATKMSECVLGQSKRVDFCGKGYHLMSFPQSAPHGVVFLHVTYVPAQEKNFTTAPAICHDGKAHFPREGVFVSNGTHWFVTQRNFYEPQIITTDNTFVSGNCDVVIGIVNNTVYDPLQPELDSFKEELDKYFKNHTSPDVDLGDISGINASVVNIQKEIDRLNEVAKNLNESLIDLQELGKYEQYIKGSGRENLYFQGGGGSGYIPEAPRDGQAYVRKDGEWVLLSTFLGHHHHHHHH

SEQ ID NO: 2213 - protein, 1281 aa, Artificial Sequence
  Description of Artificial Sequence: Synthetic polypeptide
MGILPSPGMPALLSLVSLLSVLLMGCVAETGTQCVNLTTRTQLPPAYTNSFKRGVYYPDKVFRSSVLHSTQDLFLPFFSNVTWFHAIHVSGTNGTKRFDNPVLPFNDGVYFASTEKSNIIRGWIFGTTLDSKTQSLLIVNNATNVVIKVCEFQFCNDPFLGVYYHKNNKSWMESEFRVYSSANNCTFEYVSQPFLMDLEGKQGNFKNLREFVFKNIDGYFKIYSKHTPINLVRDLPQGFSALEPLVDLPIGINITRFQTLLALHRSYLTPGDSSSGWTAGAAAYYVGYLQPRTFLLKYNENGTITDAVDCALDPLSETKCTLKSFTVEKGIYQTSNFRVQPTESIVRFPNITNLCPFGEVFNATRFASVYAWNRKRISNCVADYSVLYNSASFSTFKCYGVSPTKLNDLCFTNVYADSFVIRGDEVRQIAPGQTGKIADYNYKLPDDFTGCVIAWNSNNLDSKVGGNYNYLYRLFRKSNLKPFERDISTEIYQAGSTPCNGVEGFNCYFPLQSYGFQPTNGVGYQPYRVVVLSFELLHAPATVCGPKKSTNLVKNKCVNFNFNGLTGTGVLTESNKKFLPFQQFGRDIADTTDAVRDPQTLEILDITPCSFGGVSVITPGTNTSNQVAVLYQDVNCTEVPVAIHADQLTPTWRVYSTGSNVFQTRAGCLIGAEHVNNSYECDIPIGAGICASYQTQTNSPSGAGSVASQSIIAYTMSLGAENSVAYSNNSIAIPTNFTISVTTEILPVSMTKTSVDCTMYICGDSTECSNLLLQYGSFCTQLNRALTGIAVEQDKNTQEVFAQVKQIYKTPPIKDFGGFNFSQILPDPSKPSKRSFIEDLLFNKVTLADAGFIKQYGDCLGDIAARDLICAQKFNGLTVLPPLLTDEMIAQYTSALLAGTITSGWTFGAGAALQIPFAMQMAYRFNGIGVTQNVLYENQKLIANQFNSAIGKIQDSLSSTASALGKLQDVVNQNAQALNTLVKQLSSNFGAISSVLNDILSRLDPPEAEVQIDRLITGRLQSLQTYVTQQLIRAAEIRASANLAATKMSECVLGQSKRVDFCGKGYHLMSFPQSAPHGVVFLHVTYVPAQEKNFTTAPAICHDGKAHFPREGVFVSNGTHWFVTQRNFYEPQIITTDNTFVSGNCDVVIGIVNNTVYDPLQPELDSFKEELDKYFKNHTSPDVDLGDISGINASVVNIQKEIDRLNEVAKNLNESLIDLQELGKYEQYIKGSGRENLYFQGGGGSGYIPEAPRDGQAYVRKDGEWVLLSTFLGHHHHHHHH

SEQ ID NO: 2214 - protein, 1281 aa, Artificial Sequence
  Description of Artificial Sequence: Synthetic polypeptide
MGILPSPGMPALLSLVSLLSVLLMGCVAETGTQCVNLTTRTQLPPAYTNSFTRGVYYPDKVFRSSVLHSTQDLFLPFFSNVTWFHAIHVSGTNGTKRFDNPVLPFNDGVYFASTEKSNIIRGWIFGTTLDSKTQSLLIVNNATNVVIKVCEFQFCNDPFLGVYYHKNNKSWMESEFRVYSSANNCTFEYVSQPFLMDLEGKQGNFKNLREFVFKNIDGYFKIYSKHTPINLVRDLPQGFSALEPLVDLPIGINITRFQTLLALHRSYLTPGDSSSGWTAGAAAYYVGYLQPRTFLLKYNENGTITDAVDCALDPLSETKCTLKSFTVEKGIYQTSNFRVQPTESIVRFPNITNLCPFGEVFNATRFASVYAWNRKRISNCVADYSVLYNSASFSTFKCYGVSPTKLNDLCFTNVYADSFVIRGDEVRQIAPGQTGKIADYNYKLPDDFTGCVIAWNSNNLDSKVGGNYNYLYRLFRKSNLKPFERDISTEIYQAGSTPCNGVEGFNCYFPLQSYGFQPTNGVGYQPYRVVVLSFELLHAPATVCGPKKSTNLVKNRCVNFNFNGLTGTGVLTESNKKFLPFQQFGRDIADTTDAVRDPQTLEILDITPCSFGGVSVITPGTNTSNQVAVLYQDVNCTEVPVAIHADQLTPTWRVYSTGSNVFQTRAGCLIGAEHVNNSYECDIPIGAGICASYQTQTNSPSGAGSVASQSIIAYTMSLGAENSVAYSNNSIAIPTNFTISVTTEILPVSMTKTSVDCTMYICGDSTECSNLLLQYGSFCTQLNRALTGIAVEQDKNTQEVFAQVKQIYKTPPIKDFGGFNFSQILPDPSKPSKRSFIEDLLFNKVTLADAGFIKQYGDCLGDIAARDLICAQKFNGLTVLPPLLTDEMIAQYTSALLAGTITSGWTFGAGAALQIPFAMQMAYRFNGIGVTQNVLYENQKLIANQFNSAIGKIQDSLSSTASALGKLQDVVNQNAQALNTLVKQLSSNFGAISSVLNDILSRLDPPEAEVQIDRLITGRLQSLQTYVTQQLIRAAEIRASANLAATKMSECVLGQSKRVDFCGKGYHLMSFPQSAPHGVVFLHVTYVPAQEKNFTTAPAICHDGKAHFPREGVFVSNGTHWFVTQRNFYEPQIITTDNTFVSGNCDVVIGIVNNTVYDPLQPELDSFKEELDKYFKNHTSPDVDLGDISGINASVVNIQKEIDRLNEVAKNLNESLIDLQELGKYEQYIKGSGRENLYFQGGGGSGYIPEAPRDGQAYVRKDGEWVLLSTFLGHHHHHHHH

SEQ ID NO: 2215 - protein, 1281 aa, Artificial Sequence
  Description of Artificial Sequence: Synthetic polypeptide
MGILPSPGMPALLSLVSLLSVLLMGCVAETGTQCVNLTTRTQLPPAYTNSFTRGVYYPDKVFRSSVLHSTQDLFLPFFSNVTWFHAIHVSGTNGTKRFDNPVLPFNDGVYFASTEKSNIIRGWIFGTTLDSKTQSLLIVNNATNVVIKVCEFQFCNDPFLGVYYHKNNKSWMESEFRVYSSANNCTFEYVSQPFLMDLEGKQGNFKNLREFVFKNIDGYFKIYSKHTPINLVRDLPQGFSALEPLVDLPIGINITRFQTLLALHRSYLTPGDSSSGWTAGAAAYYVGYLQPRTFLLKYNENGTITDAVDCALDPLSETKCTLKSFTVEKGIYQTSNFRVQPTESIVRFPNITNLCPFGEVFNATRFASVYAWNRKRISNCVADYSVLYNSASFSTFKCYGVSPTKLNDLCFTNVYADSFVIRGDEVRQIAPGQTGKIADYNYKLPDDFTGCVIAWNSNNLDSKVGGNYNYLYRLFRKSNLKPFERDISTEIYQAGSTPCNGVEGFNCYFPLQSYGFQPTNGVGYQPYRVVVLSFELLHAPATVCGPKKSTNLVKNKCVNFNFNGLTGTGVLTESNKKFLPFQQFGRDIADTTDAVRDPQTLEILDITPCSFGGVSVITPGTNTSNQVAVLYQDVNCTEVPVAIHADQLTPTWRVYSTGSNVFQTRAGCLIGAEHVNNSYECDIPIGAGICASYQTQTNSPSGAGSVASQSIIAYTMSLGAENPVPYSNNNIAIPTNFTISVTTEILPVSMTKTSVDCTMYICGDSTECSNLLLQYGSFCTQLNRALTGIAVEQDKNTQEVFAQVKQIYKTPPIKDFGGFNFSQILPDPSKPSKRSFIEDLLFNKVTLADAGFIKQYGDCLGDIAARDLICAQKFNGLTVLPPLLTDEMIAQYTSALLAGTITSGWTFGAGAALQIPFAMQMAYRFNGIGVTQNVLYENQKLIANQFNSAIGKIQDSLSSTASALGKLQDVVNQNAQALNTLVKQLSSNFGAISSVLNDILSRLDPPEAEVQIDRLITGRLQSLQTYVTQQLIRAAEIRASANLAATKMSECVLGQSKRVDFCGKGYHLMSFPQSAPHGVVFLHVTYVPAQEKNFTTAPGICHDGKAYFPREGVFVSNGTEWYITQRNFYEPRPITTDNTFVSGNCDVVIGIVNNTVYDPLQPELDSFKEELDKYFKNHTSPDVDLGDISGINASVVNIQKEIDRLNEVAKNLNESLIDLQELGKYEQYIKGSGRENLYFQGGGGSGYIPEAPRDGQAYVRKDGEWVLLSTFLGHHHHHHHH

SEQ ID NO: 2216 - protein, 1281 aa, Artificial Sequence
  Description of Artificial Sequence: Synthetic polypeptide
MGILPSPGMPALLSLVSLLSVLLMGCVAETGTQCVNLTTRTQLPPAYTNSFTRGVYYPDKVFRSDVLHSTQDLFLPFFSNVTWFHAIHVSGTNGTKRFDNPVLPFNDGVYFASTEKSNIIRGWIFGTTLDSKTQSLLIVNNATNVVIKVCEFQFCENPFLGVYYHKNNKSWMEKEFRVYSSANNCTFEYVSQPFLMDLGGKQGNFKNLREFVFKNIDGYFKIYSKHTPINLVRDLPQGFSALEPLMDLPIGINITRFQTLLALHRSYLTPGDSSSGWTAGAAAYYVGYLQPRTFLLKYNENGTITDAVDCALDPLSETKCTLKSFTVEKGIYQTSNFRVQPTESIVRFPNITNLCPFGEVFNATRFASVYAWNRKRISNCVADYSVLYNSASFSTFKCYGVSPTKLNDLCFTNVYADSFVIRGDEVRQIAPGQTGKIADYNYKLPDDFTGCVIAWNSNNLDSKVGGNYNYLYRLFRKSNLKPFERDISTEIYQAGSTPCNGVEGFNCYFPLQSYGFQPTNGVGYQPYRVVVLSFELLHAPATVCGPKKSTNLVKNKCVNFNFNGLTGTGVLTESNKKFLPFQQFGRDIADNTDAVRDPQTLEILDITPCSFGGVSVITPGTNTSNQVAVLYQDVNCTEVPNAIHADQLTPTWRVYSTGSNVFQTRAGCLIGAEHVNNSYECDIPIGAGICASYQTQTNSPSGAGSVASQSIIAYTMSLGAENSVAYSNNSIAIPTNFTISVTTEILPVSMTKTSVDCTMYICGDSTECSNLLLQYGSFCTQLNRALQGIAREQDKNTQEVFAQVKQIYKTPPIKDFGGFNFSQILPDPSKPSKRSFIEDLLFNKVTLADAGFIKQYGDCLGDIAARDLICAQKFNGLTVLPPLLTDEMIAQYTSALLAGTITSGWTFGAGAALQIPFAMQMAYRFNGIGVTQNVLYENQKLIANQFNKAIGKIQDSLSSTASALGKLQDVVNQNAQALNTLVKQLSSNFGAISSVLNDILSRLDPPEAEVQIDRLITGRLQSLQTYVTQQLIRAAEIRASANLAATKMSECVLGQSKRVDFCGKGYHLMSFPQSAPHGVVFLHVTYVPAQEKNFTTAPAICHDGKAFFPREGVFVSNGTQWFVTQRNFYEPQIITTDNTFVSGNCDVVIGIVNNTVYDPLQPELDSFKEELDKYFKNHTSPDVDLGDISGINASVVNIQKEIDRLNEVAKNLNESLIDLQELGKYEQYIKGSGRENLYFQGGGGSGYIPEAPRDGQAYVRKDGEWVLLSTFLGHHHHHHHH

SEQ ID NO: 2217 - protein, 1281 aa, Artificial Sequence
  Description of Artificial Sequence: Synthetic polypeptide
MGILPSPGMPALLSLVSLLSVLLMGCVAETGTQCVNLTTRTQLPPAYTNSFTRGVYYPDKVFRSSVLHSTQDLFLPFFSNVTWFHAIHVSGTNGTKRFDNPVLPFNDGVYFASTEKSNIIRGWIFGTTLDSKTQSLLIVNNATNVVIKVCEFQFCNDPFLGVYYHKNNKSWMEEEFRVYSSANNCTFEYVSQPFLMDLEGKQGNFKNLREFVFKNIDGYFKIYSKHTPINLVRDLPQGFSALEPLVDLPIGINITRFQTLLALHRSYLTPGDSSSGWTAGAAAYYVGYLQPRTFLLKYNENGTITDAVDCALDPLSETKCTLKSFTVEKGIYQTSNFRVQPTESIVRFPNITNLCPFGEVFNATRFASVYAWNRKRISNCVADYSVLYNSASFSTFKCYGVSPTKLNDLCFTNVYADSFVIRGDEVRQIAPGQTGKIADYNYKLPDDFTGCVIAWNSNNLDSKVGGNYNYLYRLFRKSNLKPFERDISTEIYQAGSTPCNGVEGFNCYFPLQSYGFQPTNGVGYQPYRVVVLSFELLHAPATVCGPKKSTNLVKNKCVNFNFNGLTGTGVLTESNKKFLPFQQFGRDIADTTDAVRDPQTLEILDITPCSFGGVSVITPGTNTSNQVAVLYQDVNCTEVPVAIHADQLTPTWRVYSTGSNVFQTRAGCLIGAEHVNNSYECDIPIGAGICASYQTQTNSPSGAGSVASQSIIAYTMSLGAENSVAYSNNSIAIPTNFTISVTTEILPVSMTKTSVDCTMYICGDSTECSNLLLQYGSFCTQLNRALTGIAVEQDKNTQEVFAQVKQIYKTPPIKDFGGFNFSQILPDPSKPSKRSFIEDLLFNKVTLADAGFIKQYGDCLGDIAARDLICAQKFNGLTVLPPLLTDEMIAQYTSALLAGTITSGWTFGAGAALQIPFAMQMAYRFNGIGVTQNVLYENQKLIANQFNSAIGKIQDSLSSTASALGKLQDVVNQNAQALNTLVKQLSSNFGAISSVLNDILSRLDPPEAEVQIDRLITGRLQSLQTYVTQQLIRAAEIRASANLAATKMSECVLGQSKRVDFCGKGYHLMSFPQSAPHGVVFLHVTYVPAQEKNFTTAPAICHDGKAHFPREGVFVSNGTHWFVTQRNFYEPQIITTDNTFVSGNCDVVIGIVNNTVYDPLQPELDSFKEELDKYFKNHTSPDVDLGDISGINASVVNIQKEIDRLNEVAKNLNESLIDLQELGKYEQYIKGSGRENLYFQGGGGSGYIPEAPRDGQAYVRKDGEWVLLSTFLGHHHHHHHH

SEQ ID NO: 2218 - protein, 1281 aa, Artificial Sequence
  Description of Artificial Sequence: Synthetic polypeptide
MGILPSPGMPALLSLVSLLSVLLMGCVAETGTQCVNLTTRTQLPPAYTNSFTRGVYYPDKIFRSSVLHLTQDLFLPFFSNVTWFHAIHVSGTNGTKRFDNPVLPFNDGVYFAATEKSNIIRGWIFGTTLDSKTQSLLIVNNATNVVIKVCEFQFCNDPFLGVYYHKNNKSWMESEFRVYSSANNCTFEYVSQPFLMDLEGKQGNFKNLREFVFKNIDGYFKIYSKHTPINLVRDLPQGFSALKPLVKLPIGINITRFQTLLALHRSYLTPGDSSSGWTAGAAAYYVGYLQPRTFLLKYNENGTITDAVDCALDPLSETKCTLKSFTVEKGIYQTSNFRVQPTESIVRFPNITNLCPFGEVFNATRFASVYAWNRKRISNCVADYSVLYNSASFSTFKCYGVSPTKLNDLCFTNVYADSFVIRGDEVRQIAPGQTGKIADYNYKLPDDFTGCVIAWNSNNLDSKVGGNYNYLYRLFRKSNLKPFERDISTEIYQAGSTPCNGVEGFNCYFPLQSYGFQPTNGVGYQPYRVVVLSFELLHAPATVCGPKKSTNLVKNKCVNFNFNGLTGTGVLTESNKKFLPFQQFGRDISDTTDAVRDPQTLEILDITPCSFGGVSVITPGTNTSNQVAVLYQDVNCTDVPVAIHADQLTPTWRVYSTGSNVFQTQAGCLIGAEHVNNSYECDIPIGAGICASYQTQTNSPSGAGSVASQSIIAYTMSLGAENSVAYSNNSIAIPTNFTISVTTEILPVSMTKTSVDCTMYICGDSTECSNLLLQYGSFCTQLNRALTGIAVEQDKNTQEVFAQVKQIYKTPPIKDFGGFNFSQILPDPSKPSKRSFIEDLLFNKVTLADAGFIKQYGDCLGDIAARDLICAQKFNGLTVLPPLLTDEMIAQYTAALLAGTATAGWTFGAGAALQIPFAMQMAYRFNGIGVTQNVLYENQKLIANQFNSAIGKIQDSLSSTASALGKLQDVVNQNAQALNTLVKQLSSNFGAISSVLNDILSRLDPPEAEVQIDRLITGRLQSLQTYVTQQLIRAAEIRASANLAATKMSECVLGQSKRVDFCGKGYHLMSFPQSAPHGVVFLHVTYVPAQEKNFTTAPAICHDGKAHFPREGVFVSNGTHWFVTQRNFYEPQIITTDNTFVSGNCDVVIGIVNNTVYDPLQPELDSFKEELDKYFKNHTSPDVDLGDISGINASVVNIQKEIDRLNEVAKNLNESLIDLQELGKYEQYIKGSGRENLYFQGGGGSGYIPEAPRDGQAYVRKDGEWVLLSTFLGHHHHHHHH

SEQ ID NO: 2219 - protein, 1281 aa, Artificial Sequence
  Description of Artificial Sequence: Synthetic polypeptide
MGILPSPGMPALLSLVSLLSVLLMGCVAETGTQCVNLTTRTQLPPAYTNSFTRGVYYPDKVFRSSVLHSTQDLFLPFFSNVTWFHAIHVSGTNGTKRFDNPVLPFNDGVYFASTEKSNIIRGWIFGTTLDSKTQSLLIVNNATNVVIKVCEFQFCNDPFLGVYYHKNNKSWMESEFRVYSSANNCTFEYVSQPFLMDLEGKQGNFKNLREFVFKNIDGYFKIYSKHTPINLVRDLPQGFSALEPLVDLPIGINITRFQTLLALHRSYLTPGDSSSGWTAGAAAYYVGYLQPRTFLLKYNENGTITDAVDCALDPLSETKCTLKSFTVEKGIYQTSNFRVQPTESIVRFPNITNLCPFGEVFNATRFASVYAWNRKRISNCVADYSVLYNSASFSTFKCYGVSPTKLNDLCFTNVYADSFVIRGDEVRQIAPGQTGKIADYNYKLPDDFTGCVIAWNSNNLDSKVGGNYNYLYRLFRKSNLKPFERDISTEIYQAGSTPCNGVEGFNCYFPLQSYGFQPTNGVGYQPYRVVVLSFELLHAPATVCGPKKSTNLVKNKCVNFNFNGLTGTGVLTESNKKFLPFQQFGRDIADTTDAVRDPQTLEILDITPCSFGGVSVITPGTNTSNQVAVLYQDVNCTEVPVAIHADQLTPTWRVYSTGSNVFQTRAGCLIGAEHVNNSYECDIPIGAGICASYQTQTNSPSGAGSVASQSIIAYTMSLGAENSVAYSNNSIAIPTNFTISVTTEILPVSMTKVSVDCTMYICGDSTRCLNLLSQYGSFCSQLERALNGIAVEQDKNTQEVFAQVKQIYKTPPIKDFGGFNFSQILPDPSKPSKRSFIEDLLFNKVTLADAGFIKQYGDCLGDIAARDLICAQKYNGIMVLPPLLTDEMIAQYTSALLAGTITSGWTFGAGAALQIPFAMQMAYRFNGIGVTQNVLYENQKLIANQFNSAIGKIQDSLSSTASALGKLQDVVNQQAQALNELVKQLSSNFGAISSVINDIYNRLDPPEAEAQIDRLITGRLQSLQTYVTQQLIRAAEIRASANLAATKMSECVLGQSKRVDFCGKGYHLMSFPQSAPHGVVFLHVTYVPAQEKNFTTAPAICHDGKAHFPREGVFVSNGTHWFVTQRNFYEPQIITTDNTFVSGNCDVVIGIVNNTVYDPLQPELDSFKEELDKYFKNHTSPDVDLGDISGINASVVNIQKEIDRLNEVAKNLNESLIDLQELGKYEQYIKGSGRENLYFQGGGGSGYIPEAPRDGQAYVRKDGEWVLLSTFLGHHHHHHHH

SEQ ID NO: 2220 - protein, 1281 aa, Artificial Sequence
  Description of Artificial Sequence: Synthetic polypeptide
MGILPSPGMPALLSLVSLLSVLLMGCVAETGTQCVNLTTRTQLPPAYTNSFTRGVYYPDKVFRSDVLHSTQDLFLPFFSNVTWFHAIHVSGTNGTKRFDNPVLPFNDGVYFASTEKSNIIRGWIFGTTLDSKTQSLLIVNNATNVVIKVCEFQFCENPFLGVYYHKNNKSWMEKEFRVYSSANNCTFEYVSQPFLMDLGGKQGNFKWLREFVFKNIDGYFKIYSKHTPINLVRDLPQGFSALEPLMDLPIGINITRFQTLLALHRSYLTPGDSSSGWTAGAAAYYVGYLQPRTFLLKYNENGTITDAVDCAYDPLSETKCTLKSFTVEKGIYQTSNFRVQPTESIVRFPNITNLCPFGEVFNATRFASVYAWNRKRISNCVADYSVLYNSASFSTFKCYGVSPTKLNDLCFTNVYADSFVIRGDEVRQIAPGQTGKIADYNYKLPDDFTGCVIAWNSNNLDSKVGGNYNYLYRLFRKSNLKPFERDISTEIYQAGSTPCNGVEGFNCYFPLQSYGFQPTNGVGYQPYRVVVLSFELLHAPATVCGPKKSTNLVKNKCVNFNFNGLTGTGVLTESNKKFLPFQQFGRDIADNTDAVRDPQTLEILDITPCSFGGVSVITPGTNTSNQVAVLYQDVNCTEVPNAIHADQLTPTWRVYSTGSNVFQTRAGCLIGAEHVNNSYECDIPIGAGICASYQTQTNSPSGAGSVASQSIIAYTMSLGAENSVAYSNNSIAIPTNFTISVTTEILPVSMTKTSVDCTMYICGDSTECSNLLLQYGSFCTQLNRALQGIAREQDKNTQEVFAQVKQIYKTPPIKDFGGFNFSQILPDPSKPSKRSFIEDLLFNKVTLADAGFIKQYGDCLGDIAARDLICAQKFNGLTVLPPLLTDEMIAQYTSALLAGTITSGWTFGAGAALQIPFAMQMAYRFNGIGVTQNVLYENQKLIANQFNKAIGKIQDSLSSTASALGKLQDVVNQNAQALNTLVKQLSSNFGAISSVLNDILSRLDPPEAEVQIDRLITGRLQSLQTYVTQQLIRAAEIRASANLAATKMSECVLGQSKRVDFCGKGYHLMSFPQSAPHGVVFLHVTYVPAQEKNFTTAPAICHDGKAFFPREGVFVSNGTQWFVTQRNFYEPQIITTDNTFVSGNCDVVIGIVNNTVYDPLQPELDSFKEELDKYFKNHTSPDVDLGDISGINASVVNIQKEIDRLNEVAKNLNESLIDLQELGKYEQYIKGSGRENLYFQGGGGSGYIPEAPRDGQAYVRKDGEWVLLSTFLGHHHHHHHH

SEQ ID NO: 2221 - protein, 1281 aa, Artificial Sequence
  Description of Artificial Sequence: Synthetic polypeptide
MGILPSPGMPALLSLVSLLSVLLMGCVAETGTQCVNLTTRTQLPPAYTNSFTRGVYYPDKVFRSSVLHSTQDLFLPFFSNVTWFHAIHVSGTNGTKRFDNPVLPFNDGVYFASTEKSNIIRGWIFGTTLDSKTQSLLIVNNATNVVIKVCEFNFCNDPFLGVYYHKNNKSWMESEFRVYSSANNCTFEYVSQPFLMDLEGKQGNFKNLREFVFKNIDGYFKIYSKHTPINLVRDLPQGFSALEPLVDLPIGINITRFQTLLALHRSYLTPGDSSSGWTAGAAAYYVGYLQPRTFLLKYNENGTITDAVDCALDPLSETKCTLKSFTVEKGIYQTSNFRVQPTESIVRFPNITNLCPFGEVFNATRFASVYAWNRKRISNCVADYSVLYNSASFSTFKCYGVSPTKLNDLCFTNVYADSFVIRGDEVRQIAPGQTGKIADYNYKLPDDFTGCVIAWNSNNLDSKVGGNYNYLYRLFRKSNLKPFERDISTEIYQAGSTPCNGVEGFNCYFPLQSYGFQPTNGVGYQPYRVVVLSFELLHAPATVCGPKKSTNLVKNKCVNFNFNGLTGTGVLTESNKKFLPFQQFGRDIADTTDAVRDPQTLEILDITPCSFGGVSVITPGTNTSNQVAVLYQDVNCTEVPVAIHADQLTPTWRVYSTGSNVFQTRAGCLIGAEHVNNSYECDIPIGAGICASYQTQTNSPSGAGSVASQSIIAYTMSLGAENSVAYSNNSIAIPTNFTISVTTEILPVSMTKTSVDCTMYICGDSTECSNLLLQYGSFCTQLNRALTGIAVEQDKNTQEVFAQVKQIYKTPPIKDFGGFNFSQILPDPSKPSKRSFIEDLLFNKVTLADAGFIKQYGDCLGDIAARDLICAQKFNGLTVLPPLLTDEMIAQYTSALLAGTITSGWTFGAGAALQIPFAMQMAYRFNGIGVTQNVLYENQKLIANQFNSAIGKIQDSLSSTASALGKLQDVVNQNAQALNTLVKQLSSNFGAISSVLNDILSRLDPPEAEVQIDRLITGRLQSLQTYVTQQLIRAAEIRASANLAATKMSECVLGQSKRVDFCGKGYHLMSFPQSAPHGVVFLHVTYVPAQEKNFTTAPAICHDGKAHFPREGVFVSNGTHWFVTQRNFYEPQIITTDNTFVSGNCDVVIGIVNNTVYDPLQPELDSFKEELDKYFKNHTSPDVDLGDISGINASVVNIQKEIDRLNEVAKNLNESLIDLQELGKYEQYIKGSGRENLYFQGGGGSGYIPEAPRDGQAYVRKDGEWVLLSTFLGHHHHHHHH

SEQ ID NO: 2222 - protein, 1281 aa, Artificial Sequence
  Description of Artificial Sequence: Synthetic polypeptide
MGILPSPGMPALLSLVSLLSVLLMGCVAETGTQCVNLTTRTQLPPAYTNSFTRGVYYPDKVFRSSVLHSTQDLFLPFFSNVTWFHAIHVSGTNGTKRFDNPVLPFNDGVYFASTEKSNIIRGWIFGTTLDSKTQSLLIVNNATNVVIKVCEFQFCNDPFLGVYYHKNNKSWMESEFRVYSSANNCTFEYVSQPFLMDLEGKQGNFKNLREFVFKNIDGYFKIYSKHTPINLVRDLPQGFSALEPLVDLPIGINITRFQTLLALHRSYLTPGDSSSGWTAGAAAYYVGYLQPRTFLLKYNENGTITDAVDCALDPLSETKCTLKSFTVEKGIYQTSNFRVQPTESIVRFPNITNLCPFGEVFNATRFASVYAWNRKRISNCVADYSVLYNSASFSTFKCYGVSPTKLNDLCFTNVYADSFVIRGDEVRQIAPGQTGKIADYNYKLPDDFTGCVIAWNSNNLDSKVGGNYNYLYRLFRKSNLKPFERDISTEIYQAGSTPCNGVEGFNCYFPLQSYGFQPTNGVGYQPYRVVVLSFELLHAPATVCGPKKSTNLVKNKCVNFNFNGLTGTGVLTESNKKFLPFQQFGRDIADTTDAVRDPQTLEILDITPCSFGGVSVITPGTNTSNQVAVLYQDVNCTEVPVAIHADQLTPTWRVYSTGSNVFQTRAGCLIGAEHVNNSYECDIPIGAGICASYQTQTNSPSGAGSVASQSIIAYTMSLGAENSVAYSNNSIAIPTNFTISVTTEILPVSMTKTSVDCTMYICGDSTECSNLLLQYGSFCTQLNRALTGIAVEQDKNTQEVFAQVKQIYKTPPIKDFGGFNFSQILPDPSKPSKRSFIEDLLFNKVTLADAGFIKQYGDCLGDIAARDLICAQKYNGLTVLPPLLTDEMIAQYTSALLAGTITSGWTFGAGAALQIPFAMQMAYRFNGIGVTQNVLYENQKLIANQFNSAIGKIQDSLSSTASALGKLQDVVNQNAQALNTLVKQLSSNFGAISSVLNDILSRLDPPEAEVQIDRLITGRLQSLQTYVTQQLIRAAEIRASANLAATKMSECVLGQSKRVDFCGKGYHLMSFPQSAPHGVVFLHVTYVPAQEKNFTTAPAICHDGKAHFPREGVFVSNGTHWFVTQRNFYEPQIITTDNTFVSGNCDVVIGIVNNTVYDPLQPELDSFKEELDKYFKNHTSPDVDLGDISGINASVVNIQKEIDRLNEVAKNLNESLIDLQELGKYEQYIKGSGRENLYFQGGGGSGYIPEAPRDGQAYVRKDGEWVLLSTFLGHHHHHHHH

SEQ ID NO: 2223 - protein, 1281 aa, Artificial Sequence
  Description of Artificial Sequence: Synthetic polypeptide
MGILPSPGMPALLSLVSLLSVLLMGCVAETGTQCVNLTTRTQLPPAYTNSFTRGVYYPDKVFRSSVLHSTQDLFLPFFSNVTWFHAIHVSGTNGTKRFDNPVLPFNDGVYFASTEKSNIIRGWIFGTTLDSKTQSLLIVNNATNVVIKVCEFQFCNDPFLGVYYHKNNKSWMESEFRVYSSANNCTFEYVSQPFLMDLEGKQGNFKNLREFVFKNIDGYFKIYSKHTPINLVRDLPQGFSALEPLVDLPIGINITRFQTLLALHRSYLTPGDSSSGWTAGAAAYYVGYLQPRTFLLKYNENGTITDAVDCALDPLSETKCTLKSFTVEKGIYQTSNFRVQPTESIVRFPNITNLCPFGEVFNATRFASVYAWNRKRISNCVADYSVLYNSASFSTFKCYGVSPTKLNDLCFTNVYADSFVIRGDEVRQIAPGQTGKIADYNYKLPDDFTGCVIAWNSNNLDSKVGGNYNYLYRLFRKSNLKPFERDISTEIYQAGSTPCNGVEGFNCYFPLQSYGFQPTNGVGYQPYRVVVLSFELLHAPATVCGPKKSTNLVKNKCVNFNFNGLTGTGVLTESNKKFLPFQQFGRDIADTTDAVRDPQTLEILDITPCSFGGVSVITPGTNTSNQVAVLYQDVNCTEVPVAIHADQLTPTWRVYSTGSNVFQTRAGCLIGAEHVNNSYECDIPIGAGICASYQTQTNSPSGAGSVASQSIIAYTMSLGAENSVAYSNNSIAIPTNFTISVTTEILPVSMTKTSVDCTMYICGDSTECSNLLLQYGSFCTQLNRALTGIAVEQDKNTQEVFAQVKQIYKTPPIKDFGGFNFSQILPDPSKPSKRSFIEDLLFNKVTLADAGFIKQYGDCLGDIAARDLICAQKFNGLTVLPPLLTDEMIAQYTSALLAGTITSGWTFGAGAALQIPFAMQMAYRFNGIGVTQNVLYENQKLIANQFNQAIGKIQDSLSSTASALGKLQDVVNQNAQALNTLVKQLSSNFGAISSVLNDILSRLDPPEAEVQIDRLITGRLQSLQTYVTQQLIRAAEIRASANLAATKMSECVLGQSKRVDFCGKGYHLMSFPQSAPHGVVFLHVTYVPAQEKNFTTAPAICHDGKAHFPREGVFVSNGTHWFVTQRNFYEPQIITTDNTFVSGNCDVVIGIVNNTVYDPLQPELDSFKEELDKYFKNHTSPDVDLGDISGINASVVNIQKEIDRLNEVAKNLNESLIDLQELGKYEQYIKGSGRENLYFQGGGGSGYIPEAPRDGQAYVRKDGEWVLLSTFLGHHHHHHHH

SEQ ID NO: 2224 - protein, 1281 aa, Artificial Sequence
  Description of Artificial Sequence: Synthetic polypeptide
MGILPSPGMPALLSLVSLLSVLLMGCVAETGTQCVNLTTRTQLPPAYTNSFTRGVYYPDKVFRSSVLHSTQDLFLPFFSNVTWFHAIHVSGTNGTKRFDNPVLPFNDGVYFASTEKSNIIRGWIFGTTLDSKTQSLLIVNNATNVVIKVCEFQFCNDPFLGVYYHKNNKSWMESEFRVYSSANNCTFEYVSQPFLMDLEGKQGNFKNLREFVFKNIDGYFKIYSKHTPINLVRDLPQGFSALEPLVDLPIGINITRFQTLLALHRSYLTPGDSSSGWTAGAAAYYVGYLQPRTFLLKYNENGTITDAVDCALDPLSETKCTLKSFTVEKGIYQTSNFRVQPTESIVRFPNITNLCPFGEVFNATRFASVYAWNRKRISNCVADYSVLYNSASFSTFKCYGVSPTKLNDLCFTNVYADSFVIRGDEVRQIAPGQTGKIADYNYKLPDDFTGCVIAWNSNNLDSKVGGNYNYLYRLFRKSNLKPFERDISTEIYQAGSTPCNGVEGFNCYFPLQSYGFQPTNGVGYQPYRVVVLSFELLHAPATVCGPKKSTNLVKNKCVNFNFNGLTGTGVLTESNKKFLPFQQFGRDIADTTDAVRDPQTLEILDITPCSFGGVSVITPGTNTSNQVAVLYQDVNCTEVPVAIHADQLTPTWRVYSTGSNVFQTRAGCLIGAEHVNNSYECDIPIGAGICASYQTQTNSPSGAGSVASQSIIAYTMSLGAENSVAYSNNSIAIPTNFTISVTTEILPVSMTKTSVDCEMYICGDSTECSNLLLQYGSFCTQLNRALTGIAVEQDKNTQEVFAQVKQIYKTPPIKDFGGFNFSQILPDPSKPSKRSFIEDLLFNKVTLADAGFIKQYGDCLGDIAARDLICAQKFNGLTVLPPLLTDEMIAQYTSALLAGTITSGWTFGAGAALQIPFAMQMAYRFNGIGVTQNVLYENQKLIANQFNSAIGKIQDSLSSTASALGKLQDVVNQNAQALNTLVKQLSSNFGAISSVLNDILSRLDPPEAEVQIDRLITGRLQSLQTYVTQQLIRAAEIRASANLAATKMSECVLGQSKRVDFCGKGYHLMSFPQSAPHGVVFLHVTYVPAQEKNFTTAPAICHDGKAHFPREGVFVSNGTHWFVTQRNFYEPQIITTDNTFVSGNCDVVIGIVNNTVYDPLQPELDSFKEELDKYFKNHTSPDVDLGDISGINASVVNIQKEIDRLNEVAKNLNESLIDLQELGKYEQYIKGSGRENLYFQGGGGSGYIPEAPRDGQAYVRKDGEWVLLSTFLGHHHHHHHH

SEQ ID NO: 2225 - protein, 1281 aa, Artificial Sequence
  Description of Artificial Sequence: Synthetic polypeptide
MGILPSPGMPALLSLVSLLSVLLMGCVAETGTQCVNLTTRTQLPPAYTNSFTRGVYYPDKVFRSSVLHSTQDLFLPFFSNVTWFHAIHVSGTNGTKRFDNPVLPFNDGVYFASTEKSNIIRGWIFGTTLDSKTQSLLIVNNATNVVIKVCEFQFCNDPFLGVYYHKNNKSWMESEFRVYSSANNCTFEYVSQPFLMDLEGKQGNFKNLREFVFKNIDGYFKIYSKHTPINLVRDLPQGFSALEPLVDLPIGINITRFQTLLALHRSYLTPGDSSSGWTAGAAAYYVGYLQPRTFLLKYNENGTITDAVDCALDPLSETKCTLKSFTVEKGIYQTSNFRVQPTESIVRFPNITNLCPFGEVFNATRFASVYAWNRKRISNCVADYSVLYNSASFSTFKCYGVSPTKLNDLCFTNVYADSFVIRGDEVRQIAPGQTGKIADYNYKLPDDFTGCVIAWNSNNLDSKVGGNYNYLYRLFRKSNLKPFERDISTEIYQAGSTPCNGVEGFNCYFPLQSYGFQPTNGVGYQPYRVVVLSFELLHAPATVCGPKKSTNLVKNKCVNFNFNGLTGTGVLTESNKKFLPFQQFGRDIADTTDAVRDPQTLEILDITPCSFGGVSVITPGTNTSNQVAVLYQDVNCTEVPVAIHADQLTPTWRVYSTGSNVFQTRAGCLIGAEHVNNSYECDIPIGAGICASYQTQTNSPSGAGSVASQSIIAYTMSLGAENSVAYSNNSIAIPTNFTISVTTEILPVSMTKTSVDCTMYICGDSTECSNLLLQYGSFCTQLNRALTGIAVEQDKNTQEVFAQVKQIYKTPPIKDFGGFNFSQILPDPSKPSKRSFIEDLLFNKVTLADAGFIKQYGDCLGDIAARDLICAQKFNGLTVLPPLLTDEMIAMYTSALLAGTITSGWTFGAGAALQIPFAMQMAYRFNGIGVTQNVLYENQKLIANQFNSAIGKIQDSLSSTASALGKLQDVVNQNAQALNTLVKQLSSNFGAISSVLNDILSRLDPPEAEVQIDRLITGRLQSLQTYVTQQLIRAAEIRASANLAATKMSECVLGQSKRVDFCGKGYHLMSFPQSAPHGVVFLHVTYVPAQEKNFTTAPAICHDGKAHFPREGVFVSNGTHWFVTQRNFYEPQIITTDNTFVSGNCDVVIGIVNNTVYDPLQPELDSFKEELDKYFKNHTSPDVDLGDISGINASVVNIQKEIDRLNEVAKNLNESLIDLQELGKYEQYIKGSGRENLYFQGGGGSGYIPEAPRDGQAYVRKDGEWVLLSTFLGHHHHHHHH

SEQ ID NO: 2226 - protein, 1281 aa, Artificial Sequence
  Description of Artificial Sequence: Synthetic polypeptide
MGILPSPGMPALLSLVSLLSVLLMGCVAETGTQCVNLTTRTQLPPAYTNSFTRGVYYPDKVFRSSVLHSTQDLFLPFFSNVTWFHAIHVSGTNGTKRFDNPVLPFNDGVYFASTEKSNIIRGWIFGTTLDSKTQSLLIVNNATNVVIKVCEFQFCNDPFLGVYYHKNNKSWMESEFRVYSSANNCTFEYVSQPFLMDLEGKQGNFKNLREFVFKNIDGYFKIYSKHTPINLVRDLPQGFSALEPLVDLPIGINITRFQTLLALHRSYLTPGDSSSGWTAGAAAYYVGYLQPRTFLLKYNENGTITDAVDCALDPLSETKCTLKSFTVEKGIYQTSNFRVQPTESIVRFPNITNLCPFGEVFNATRFASVYAWNRKRISNCVADYSVLYNSASFSTFKCYGVSPTKLNDLCFTNVYADSFVIRGDEVRQIAPGQTGKIADYNYKLPDDFTGCVIAWNSNNLDSKVGGNYNYLYRLFRKSNLKPFERDISTEIYQAGSTPCNGVEGFNCYFPLQSYGFQPTNGVGYQPYRVVVLSFELLHAPATVCGPKKSTNLVKNKCVNFNFNGLTGTGVLTESNKKFLPFQQFGRDIADTTDAVRDPQTLEILDITPCSFGGVSVITPGTNTSNQVAVLYQDVNCTEVPVAIHADQLTPTWRVYSTGSNVFQTRAGCLIGAEHVNNSYECDIPIGAGICASYQTQTNSPSGAGSVASQSIIAYTMSLGAENSVAYSNNSIAIPTNFTISVTTEILPVSMTKTSVDCTMYICGDSTECSNLLLQYGSFCTQLNRALTGIAVEQDKNTQEVFAQVKQIYKTPPIKDFGGFNFSQILPDPSKPSKRSFIEDLLFNKVTLADAGFIKQYGDCLGDIAARDLICAQKFNGLTVLPPLLTDEMIAQYTSALLAGTITSGWTFGAGAALQIPFAMQMAYRFNGIGVTQNVLYENQKLIANQFNSAIGKIQDSLSSTASALGKLQDVVNQNAQALNTLVKQLSSNFGAISSVLNDILSRLDPPEAEVQIDRLITGRLQSLQTYVTQQLIRAAEIRASANLAATKMSECVLGQSKRVDFCGKGYHLMSFPQSAPHGVVFLHVTYVPAQEKNFTTAPAICHDGKAHFPREGVFVSNGTHWFVTQRNFYEPQLITTDNTFVSGNCDVVIGIVNNTVYDPLQPELDSFKEELDKYFKNHTSPDVDLGDISGINASVVNIQKEIDRLNEVAKNLNESLIDLQELGKYEQYIKGSGRENLYFQGGGGSGYIPEAPRDGQAYVRKDGEWVLLSTFLGHHHHHHHH

SEQ ID NO: 2227 - protein, 1281 aa, Artificial Sequence
  Description of Artificial Sequence: Synthetic polypeptide
MGILPSPGMPALLSLVSLLSVLLMGCVAETGTQCVNLTTRTQLPPAYTNSFTRGVYYPDKVFRSSVLHSTQDLFLPFFSNVTWFHAIHVSGTNGTKRFDNPVLPFNDGVYFASTEKSNIIRGWIFGTTLDSKTQSLLIVNNATNVVIKVCEFQFCNDPFLGVYYHKNNKSWMESEFRVYSSANNCTFEYVSQPFLMDLEGKQGNFKNLREFVFKNIDGYFKIYSKHTPINLVRDLPQGFSALEPLVDLPIGINITRFQTLLALHRSYLTPGDSSSGWTAGAAAYYVGYLQPRTFLLKYNENGTITDAVDCALDPLSETKCTLKSFTVEKGIYQTSNFRVQPTESIVRFPNITNLCPFGEVFNATRFASVYAWNRKRISNCVADYSVLYNSASFSTFKCYGVSPTKLNDLCFTNVYADSFVIRGDEVRQIAPGQTGKIADYNYKLPDDFTGCVIAWNSNNLDSKVGGNYNYLYRLFRKSNLKPFERDISTEIYQAGSTPCNGVEGFNCYFPLQSYGFQPTNGVGYQPYRVVVLSFELLHAPATVCGPKKSTNLVKNKCVNFNFNGLTGTGVLTESNKKFLPFQQFGRDIADTTDAVRDPQTGEILDITPCSFGGVSVITPGTNTSNQVAVLYQDVNCTEVPVAIHADQLTPTWRVYSTGSNVFQTRAGCLIGAEHVNNSYECDIPIGAGICASYQTQTNSPSGAGSVASQSIIAYTMSLGAENSVAYSNNSIAIPTNFTISVTTEILPVSMTKTSVDCTMYICGDSTECSNLLLQYGSFCTQLNRALTGIAVEQDKNTQEVFAQVKQIYKTPPIKDFGGFNFSQILPDPSKPSKRSFIEDLLFNKVTLADAGFIKQYGDCLGDIAARDLICAQKFNGLTVLPPLLTDEMIAQYTSALLAGTITSGWTFGAGAALQIPFAMQMAYRFNGIGVTQNVLYENQKLIANQFNSAIGKIQDSLSSTASALGKLQDVVNQNAQALNTLVKQLSSNFGAISSVLNDILSRLDPPEAEVQIDRLITGRLQSLQTYVTQQLIRAAEIRASANLAATKMSECVLGQSKRVDFCGKGYHLMSFPQSAPHGVVFLHVTYVPAQEKNFTTAPAICHDGKAHFPREGVFVSNGTHWFVTQRNFYEPQIITTDNTFVSGNCDVVIGIVNNTVYDPLQPELDSFKEELDKYFKNHTSPDVDLGDISGINASVVNIQKEIDRLNEVAKNLNESLIDLQELGKYEQYIKGSGRENLYFQGGGGSGYIPEAPRDGQAYVRKDGEWVLLSTFLGHHHHHHHH

SEQ ID NO: 2228 - protein, 1281 aa, Artificial Sequence
  Description of Artificial Sequence: Synthetic polypeptide
MGILPSPGMPALLSLVSLLSVLLMGCVAETGTQCVNLTTRTQLPPAYTNSFTRGVYYPDKVFRSSVLHSTQDLFLPFFSNVTWFHAIHVSGTNGTKRFDNPVLPFNDGVYFASTEKSNIIRGWIFGTTLDSTTQSLLIVNNATNVVIKVCEFQFCNDPFLGVYYHKNNKSWMESEFRVYSSANNCTFEYVSQPFLMDLEGKQGNFKNLREFVFKNIDGYFKIYSKHTPINLVRDLPQGFSALEPLVDLPIGINITRFQTLLALHRSYLTPGDSSSGWTAGAAAYYVGYLQPRTFLLKYNENGTITDAVDCALDPLSETKCTLKSFTVEKGIYQTSNFRVQPTESIVRFPNITNLCPFGEVFNATRFASVYAWNRKRISNCVADYSVLYNSASFSTFKCYGVSPTKLNDLCFTNVYADSFVIRGDEVRQIAPGQTGKIADYNYKLPDDFTGCVIAWNSNNLDSKVGGNYNYLYRLFRKSNLKPFERDISTEIYQAGSTPCNGVEGFNCYFPLQSYGFQPTNGVGYQPYRVVVLSFELLHAPATVCGPKKSTNLVKNKCVNFNFNGLTGTGVLTESNKKFLPFQQFGRDIADTTDAVRDPQTLEILDITPCSFGGVSVITPGTNTSNQVAVLYQDVNCTEVPVAIHADQLTPTWRVYSTGSNVFQTRAGCLIGAEHVNNSYECDIPIGAGICASYQTQTNSPSGAGSVASQSIIAYTMSLGAENSVAYSNNSIAIPTNFTISVTTEILPVSMTKTSVDCTMYICGDSTECSNLLLQYGSFCTQLNRALTGIAVEQDKNTQEVFAQVKQIYKTPPIKDFGGFNFSQILPDPSKPSKRSFIEDLLFNKVTLADAGFIKQYGDCLGDIAARDLICAQKFNGLTVLPPLLTDEMIAQYTSALLAGTITSGWTFGAGAALQIPFAMQMAYRFNGIGVTQNVLYENQKLIANQFNSAIGKIQDSLSSTASALGKLQDVVNQNAQALNTLVKQLSSNFGAISSVLNDILSRLDPPEAEVQIDRLITGRLQSLQTYVTQQLIRAAEIRASANLAATKMSECVLGQSKRVDFCGKGYHLMSFPQSAPHGVVFLHVTYVPAQEKNFTTAPAICHDGKAHFPREGVFVSNGTHWFVTQRNFYEPQIITTDNTFVSGNCDVVIGIVNNTVYDPLQPELDSFKEELDKYFKNHTSPDVDLGDISGINASVVNIQKEIDRLNEVAKNLNESLIDLQELGKYEQYIKGSGRENLYFQGGGGSGYIPEAPRDGQAYVRKDGEWVLLSTFLGHHHHHHHH

SEQ ID NO: 2229 - protein, 1281 aa, Artificial Sequence
  Description of Artificial Sequence: Synthetic polypeptide
MGILPSPGMPALLSLVSLLSVLLMGCVAETGTQCVNLTTRTQLPPAYTNSFTRGVYYPDKVFRSSVLHSTQDLFLPFFSNVTWFHAIHVSGTNGTKAFDNPVLPFNDGVYFASTEKSNIIRGWIFGTTLDSKTQSLLIVNNATNVVIKVCEFQFCNDPFLGVYYHKNNKSWMESEFRVYSSANNCTFEYVSQPFLMDLEGKQGNFKNLREFVFKNIDGYFKIYSKHTPINLVRDLPQGFSALEPLVDLPIGINITRFQTLLALHRSYLTPGDSSSGWTAGAAAYYVGYLQPRTFLLKYNENGTITDAVDCALDPLSETKCTLKSFTVEKGIYQTSNFRVQPTESIVRFPNITNLCPFGEVFNATRFASVYAWNRKRISNCVADYSVLYNSASFSTFKCYGVSPTKLNDLCFTNVYADSFVIRGDEVRQIAPGQTGKIADYNYKLPDDFTGCVIAWNSNNLDSKVGGNYNYLYRLFRKSNLKPFERDISTEIYQAGSTPCNGVEGFNCYFPLQSYGFQPTNGVGYQPYRVVVLSFELLHAPATVCGPKKSTNLVKNKCVNFNFNGLTGTGVLTESNKKFLPFQQFGRDIADTTDAVRDPQTLEILDITPCSFGGVSVITPGTNTSNQVAVLYQDVNCTEVPVAIHADQLTPTWRVYSTGSNVFQTRAGCLIGAEHVNNSYECDIPIGAGICASYQTQTNSPSGAGSVASQSIIAYTMSLGAENSVAYSNNSIAIPTNFTISVTTEILPVSMTKTSVDCTMYICGDSTECSNLLLQYGSFCTQLNRALTGIAVEQDKNTQEVFAQVKQIYKTPPIKDFGGFNFSQILPDPSKPSKRSFIEDLLFNKVTLADAGFIKQYGDCLGDIAARDLICAQKFNGLTVLPPLLTDEMIAQYTSALLAGTITSGWTFGAGAALQIPFAMQMAYRFNGIGVTQNVLYENQKLIANQFNSAIGKIQDSLSSTASALGKLQDVVNQNAQALNTLVKQLSSNFGAISSVLNDILSRLDPPEAEVQIDRLITGRLQSLQTYVTQQLIRAAEIRASANLAATKMSECVLGQSKRVDFCGKGYHLMSFPQSAPHGVVFLHVTYVPAQEKNFTTAPAICHDGKAHFPREGVFVSNGTHWFVTQRNFYEPQIITTDNTFVSGNCDVVIGIVNNTVYDPLQPELDSFKEELDKYFKNHTSPDVDLGDISGINASVVNIQKEIDRLNEVAKNLNESLIDLQELGKYEQYIKGSGRENLYFQGGGGSGYIPEAPRDGQAYVRKDGEWVLLSTFLGHHHHHHHH

SEQ ID NO: 2230 - protein, 1281 aa, Artificial Sequence
  Description of Artificial Sequence: Synthetic polypeptide
MGILPSPGMPALLSLVSLLSVLLMGCVAETGTQCVNLTTRTQLPPAYTNSFTRGVYYPDKVFRSSVLHSTQDLFLPFFSNVTWFHAIHVSGTNGTKRFDNPVLPFKDGVYFASTEKSNIIRGWIFGTTLDSKTQSLLIVNNATNVVIKVCEFQFCNDPFLGVYYHKNNKSWMESEFRVYSSANNCTFEYVSQPFLMDLEGKQGNFKNLREFVFKNIDGYFKIYSKHTPINLVRDLPQGFSALEPLVDLPIGINITRFQTLLALHRSYLTPGDSSSGWTAGAAAYYVGYLQPRTFLLKYNENGTITDAVDCALDPLSETKCTLKSFTVEKGIYQTSNFRVQPTESIVRFPNITNLCPFGEVFNATRFASVYAWNRKRISNCVADYSVLYNSASFSTFKCYGVSPTKLNDLCFTNVYADSFVIRGDEVRQIAPGQTGKIADYNYKLPDDFTGCVIAWNSNNLDSKVGGNYNYLYRLFRKSNLKPFERDISTEIYQAGSTPCNGVEGFNCYFPLQSYGFQPTNGVGYQPYRVVVLSFELLHAPATVCGPKKSTNLVKNKCVNFNFNGLTGTGVLTESNKKFLPFQQFGRDIADTTDAVRDPQTLEILDITPCSFGGVSVITPGTNTSNQVAVLYQDVNCTEVPVAIHADQLTPTWRVYSTGSNVFQTRAGCLIGAEHVNNSYECDIPIGAGICASYQTQTNSPSGAGSVASQSIIAYTMSLGAENSVAYSNNSIAIPTNFTISVTTEILPVSMTKTSVDCTMYICGDSTECSNLLLQYGSFCTQLNRALTGIAVEQDKNTQEVFAQVKQIYKTPPIKDFGGFNFSQILPDPSKPSKRSFIEDLLFNKVTLADAGFIKQYGDCLGDIAARDLICAQKFNGLTVLPPLLTDEMIAQYTSALLAGTITSGWTFGAGAALQIPFAMQMAYRFNGIGVTQNVLYENQKLIANQFNSAIGKIQDSLSSTASALGKLQDVVNQNAQALNTLVKQLSSNFGAISSVLNDILSRLDPPEAEVQIDRLITGRLQSLQTYVTQQLIRAAEIRASANLAATKMSECVLGQSKRVDFCGKGYHLMSFPQSAPHGVVFLHVTYVPAQEKNFTTAPAICHDGKAHFPREGVFVSNGTHWFVTQRNFYEPQIITTDNTFVSGNCDVVIGIVNNTVYDPLQPELDSFKEELDKYFKNHTSPDVDLGDISGINASVVNIQKEIDRLNEVAKNLNESLIDLQELGKYEQYIKGSGRENLYFQGGGGSGYIPEAPRDGQAYVRKDGEWVLLSTFLGHHHHHHHH

SEQ ID NO: 2231 - protein, 1281 aa, Artificial Sequence
  Description of Artificial Sequence: Synthetic polypeptide
MGILPSPGMPALLSLVSLLSVLLMGCVAETGTQCVNLTTRTQLPPAYTNSFTRGVYYPDKVFRSSVLHSTQDLFLPFFSNVTWFHAIHVSGTNGTKRFDNPVLPFNDGVYFASTEKSNIIRGWIFGTTLDSKTQSLLIVNNATNVVIKVCEFQFCNDPFLGVYYHKNNKSWMESEFRVYSSANNCTFEYVSQPFHMDLEGKQGNFKNLREFVFKNIDGYFKIYSKHTPINLVRDLPQGFSALEPLVDLPIGINITRFQTLLALHRSYLTPGDSSSGWTAGAAAYYVGYLQPRTFLLKYNENGTITDAVDCALDPLSETKCTLKSFTVEKGIYQTSNFRVQPTESIVRFPNITNLCPFGEVFNATRFASVYAWNRKRISNCVADYSVLYNSASFSTFKCYGVSPTKLNDLCFTNVYADSFVIRGDEVRQIAPGQTGKIADYNYKLPDDFTGCVIAWNSNNLDSKVGGNYNYLYRLFRKSNLKPFERDISTEIYQAGSTPCNGVEGFNCYFPLQSYGFQPTNGVGYQPYRVVVLSFELLHAPATVCGPKKSTNLVKNKCVNFNFNGLTGTGVLTESNKKFLPFQQFGRDIADTTDAVRDPQTLEILDITPCSFGGVSVITPGTNTSNQVAVLYQDVNCTEVPVAIHADQLTPTWRVYSTGSNVFQTRAGCLIGAEHVNNSYECDIPIGAGICASYQTQTNSPSGAGSVASQSIIAYTMSLGAENSVAYSNNSIAIPTNFTISVTTEILPVSMTKTSVDCTMYICGDSTECSNLLLQYGSFCTQLNRALTGIAVEQDKNTQEVFAQVKQIYKTPPIKDFGGFNFSQILPDPSKPSKRSFIEDLLFNKVTLADAGFIKQYGDCLGDIAARDLICAQKFNGLTVLPPLLTDEMIAQYTSALLAGTITSGWTFGAGAALQIPFAMQMAYRFNGIGVTQNVLYENQKLIANQFNSAIGKIQDSLSSTASALGKLQDVVNQNAQALNTLVKQLSSNFGAISSVLNDILSRLDPPEAEVQIDRLITGRLQSLQTYVTQQLIRAAEIRASANLAATKMSECVLGQSKRVDFCGKGYHLMSFPQSAPHGVVFLHVTYVPAQEKNFTTAPAICHDGKAHFPREGVFVSNGTHWFVTQRNFYEPQIITTDNTFVSGNCDVVIGIVNNTVYDPLQPELDSFKEELDKYFKNHTSPDVDLGDISGINASVVNIQKEIDRLNEVAKNLNESLIDLQELGKYEQYIKGSGRENLYFQGGGGSGYIPEAPRDGQAYVRKDGEWVLLSTFLGHHHHHHHH

SEQ ID NO: 2232 - protein, 1281 aa, Artificial Sequence
  Description of Artificial Sequence: Synthetic polypeptide
MGILPSPGMPALLSLVSLLSVLLMGCVAETGTQCVNLTTRTQLPPAYTNSFTRGVYYPDKVFRSSVLHSTQDLFLPFFSNVTWFHAIHVSGTNGTKRFDNPVLPFNDGVYFASTEKSNIIRGWIFGTTLDSKTQSLLIVNNATNVVIKVCEFQFCNDPFLGVYYHKNNKSWMESEFRVYSSANNCTFEYVSQPFLMDLEPKQGNFKNLREFVFKNIDGYFKIYSKHTPINLVRDLPQGFSALEPLVDLPIGINITRFQTLLALHRSYLTPGDSSSGWTAGAAAYYVGYLQPRTFLLKYNENGTITDAVDCALDPLSETKCTLKSFTVEKGIYQTSNFRVQPTESIVRFPNITNLCPFGEVFNATRFASVYAWNRKRISNCVADYSVLYNSASFSTFKCYGVSPTKLNDLCFTNVYADSFVIRGDEVRQIAPGQTGKIADYNYKLPDDFTGCVIAWNSNNLDSKVGGNYNYLYRLFRKSNLKPFERDISTEIYQAGSTPCNGVEGFNCYFPLQSYGFQPTNGVGYQPYRVVVLSFELLHAPATVCGPKKSTNLVKNKCVNFNFNGLTGTGVLTESNKKFLPFQQFGRDIADTTDAVRDPQTLEILDITPCSFGGVSVITPGTNTSNQVAVLYQDVNCTEVPVAIHADQLTPTWRVYSTGSNVFQTRAGCLIGAEHVNNSYECDIPIGAGICASYQTQTNSPSGAGSVASQSIIAYTMSLGAENSVAYSNNSIAIPTNFTISVTTEILPVSMTKTSVDCTMYICGDSTECSNLLLQYGSFCTQLNRALTGIAVEQDKNTQEVFAQVKQIYKTPPIKDFGGFNFSQILPDPSKPSKRSFIEDLLFNKVTLADAGFIKQYGDCLGDIAARDLICAQKFNGLTVLPPLLTDEMIAQYTSALLAGTITSGWTFGAGAALQIPFAMQMAYRFNGIGVTQNVLYENQKLIANQFNSAIGKIQDSLSSTASALGKLQDVVNQNAQALNTLVKQLSSNFGAISSVLNDILSRLDPPEAEVQIDRLITGRLQSLQTYVTQQLIRAAEIRASANLAATKMSECVLGQSKRVDFCGKGYHLMSFPQSAPHGVVFLHVTYVPAQEKNFTTAPAICHDGKAHFPREGVFVSNGTHWFVTQRNFYEPQIITTDNTFVSGNCDVVIGIVNNTVYDPLQPELDSFKEELDKYFKNHTSPDVDLGDISGINASVVNIQKEIDRLNEVAKNLNESLIDLQELGKYEQYIKGSGRENLYFQGGGGSGYIPEAPRDGQAYVRKDGEWVLLSTFLGHHHHHHHH

SEQ ID NO: 2233 - protein, 1281 aa, Artificial Sequence
  Description of Artificial Sequence: Synthetic polypeptide
MGILPSPGMPALLSLVSLLSVLLMGCVAETGTQCVNLTTRTQLPPAYTNSFTRGVYYPDKVFRSSVLHSTQDLFLPFFSNVTWFHAIHVSGTNGTKRFDNPVLPFNDGVYFASTEKSNIIRGWIFGTTLDSKTQSLLIVNNATNVVIKVCEFQFCNDPFLAVYYHKNNKSWMESEFRVYSSANNCTFEYVSQPFLMDLEGKQGNFKNLREFVFKNIDGYFKIYSKHTPINLVRDLPQGFSALEPLVDLPIGINITRFQTLLALHRSYLTPGDSSSGWTAGAAAYYVGYLQPRTFLLKYNENGTITDAVDCALDPLSETKCTLKSFTVEKGIYQTSNFRVQPTESIVRFPNITNLCPFGEVFNATRFASVYAWNRKRISNCVADYSVLYNSASFSTFKCYGVSPTKLNDLCFTNVYADSFVIRGDEVRQIAPGQTGKIADYNYKLPDDFTGCVIAWNSNNLDSKVGGNYNYLYRLFRKSNLKPFERDISTEIYQAGSTPCNGVEGFNCYFPLQSYGFQPTNGVGYQPYRVVVLSFELLHAPATVCGPKKSTNLVKNKCVNFNFNGLTGTGVLTESNKKFLPFQQFGRDIADTTDAVRDPQTLEILDITPCSFGGVSVITPGTNTSNQVAVLYQDVNCTEVPVAIHADQLTPTWRVYSTGSNVFQTRAGCLIGAEHVNNSYECDIPIGAGICASYQTQTNSPSGAGSVASQSIIAYTMSLGAENSVAYSNNSIAIPTNFTISVTTEILPVSMTKTSVDCTMYICGDSTECSNLLLQYGSFCTQLNRALTGIAVEQDKNTQEVFAQVKQIYKTPPIKDFGGFNFSQILPDPSKPSKRSFIEDLLFNKVTLADAGFIKQYGDCLGDIAARDLICAQKFNGLTVLPPLLTDEMIAQYTSALLAGTITSGWTFGAGAALQIPFAMQMAYRFNGIGVTQNVLYENQKLIANQFNSAIGKIQDSLSSTASALGKLQDVVNQNAQALNTLVKQLSSNFGAISSVLNDILSRLDPPEAEVQIDRLITGRLQSLQTYVTQQLIRAAEIRASANLAATKMSECVLGQSKRVDFCGKGYHLMSFPQSAPHGVVFLHVTYVPAQEKNFTTAPAICHDGKAHFPREGVFVSNGTHWFVTQRNFYEPQIITTDNTFVSGNCDVVIGIVNNTVYDPLQPELDSFKEELDKYFKNHTSPDVDLGDISGINASVVNIQKEIDRLNEVAKNLNESLIDLQELGKYEQYIKGSGRENLYFQGGGGSGYIPEAPRDGQAYVRKDGEWVLLSTFLGHHHHHHHH

SEQ ID NO: 2234 - protein, 1281 aa, Artificial Sequence
  Description of Artificial Sequence: Synthetic polypeptide
MGILPSPGMPALLSLVSLLSVLLMGCVAETGTQCVNLTTRTQLPPAYTNSFTRGVYYPDKVFRSSVLHSTQDLFLPFFSNVTWFHAIHVSGTNGTKRFDNPVLPFNDGVYFASTEKSNIIRGWIFGTTLDSKTQSLLIVNNATNVVIKVCEFQFCNDPFLGVYYHKNNKSWMESEFRVYSSANNCTFEYVSQPFLMDLEGKQGNFKNLREFVFKNIDGYFKIYSKHTPINLVRDLPQGFSALEPLVDLPIGINITRFQTLLALHRSYLTPGDSSSGWTAGAAAYYVGYLQPRTFLLKYNENGTITDAVDCALDPLSETKCTLKSFTVEKGIYQTSNFRVQPTESIVRFPNITNLCPFGEVFNATRFASVYAWNRKRISNCVADYSVLYNSASFSTFKCYGVSPTKLNDLCFTNVYADSFVIRGDEVRQIAPGQTGKIADYNYKLPDDFTGCVIAWNSNNLDSKVGGNYNYLYRLFRKSNLKPFERDISTEIYQAGSTPCNGVEGFNCYFPLQSYGFQPTNGVGYQPYRVVVLSFELLHAPATVCGPKKSTNLVKNKCVNFNFNGLTGTGVLTESNKKFLPFQQFGRDIADTTDAVRDPQTLEILDITPCSFGGVSVITPGTNTSNQVAVLYQDVNCTEVPVAIHADQLTPTWRVYSTGSNVFQTRAGCLIGAEHVNNSYECDIPIGAGICASYQTQTNSPSGAGSVASQSIIAYTMSLGAENSVAYSNNEIAIPTNFTISVTTEILPVSMTKTSVDCTMYICGDSTECSNLLLQYGSFCTQLNRALTGIAVEQDKNTQEVFAQVKQIYKTPPIKDFGGFNFSQILPDPSKPSKRSFIEDLLFNKVTLADAGFIKQYGDCLGDIAARDLICAQKFNGLTVLPPLLTDEMIAQYTSALLAGTITSGWTFGAGAALQIPFAMQMAYRFNGIGVTQNVLYENQKLIANQFNSAIGKIQDSLSSTASALGKLQDVVNQNAQALNTLVKQLSSNFGAISSVLNDILSRLDPPEAEVQIDRLITGRLQSLQTYVTQQLIRAAEIRASANLAATKMSECVLGQSKRVDFCGKGYHLMSFPQSAPHGVVFLHVTYVPAQEKNFTTAPAICHDGKAHFPREGVFVSNGTHWFVTQRNFYEPQIITTDNTFVSGNCDVVIGIVNNTVYDPLQPELDSFKEELDKYFKNHTSPDVDLGDISGINASVVNIQKEIDRLNEVAKNLNESLIDLQELGKYEQYIKGSGRENLYFQGGGGSGYIPEAPRDGQAYVRKDGEWVLLSTFLGHHHHHHHH

SEQ ID NO: 2235 - protein, 1281 aa, Artificial Sequence
  Description of Artificial Sequence: Synthetic polypeptide
MGILPSPGMPALLSLVSLLSVLLMGCVAETGTQCVNLTTRTQLPPAYTNSFTRGVYYPDKVFRSSVLHSTQDLFLPFFSNVTWFHAIHVSGTNGTKRFDNPVLPFNDGVYFASTEKSNIIRGWIFGTTLDSKTQSLLIVNNATNVVIKVCEFQFCNDPFLGVYYHKNNKSWMESEFRVYSSANNCTFEYVSQPFLMDLEGKQGNFKNLREFVFKNIDGYFKIYSKHTPINLVRDLPQGFSALEPLVDLPIGINITRFQTLLALHRSYLTPGDSSSGWTAGAAAYYVGYLQPRTFLLKYNENGTITDAVDCALDPLSETKCTLKSFTVEKGIYQTSNFRVQPTESIVRFPNITNLCPFGEVFNATRFASVYAWNRKRISNCVADYSVLYNSASFSTFKCYGVSPTKLNDLCFTNVYADSFVIRGDEVRQIAPGQTGKIADYNYKLPDDFTGCVIAWNSNNLDSKVGGNYNYLYRLFRKSNLKPFERDISTEIYQAGSTPCNGVEGFNCYFPLQSYGFQPTNGVGYQPYRVVVLSFELLHAPATVCGPKKSTNLVKNKCVNFNFNGLTGTGVLTESNKKFLPFQQFGRDIADTTDAVRDPQTLEILDITPCSFGGVSVITPGTNTSNQVAVLYQDVNCTEVPVAIHADQLTPTWRVYSTGSNVFQTRAGCLIGAEHVNNSYECDIPIGAGICASYQTQTNSPSGAGSVASQSIIAYTMSLGAENSVAYSNNSIAIPTNFMISVTTEILPVSMTKTSVDCTMYICGDSTECSNLLLQYGSFCTQLNRALTGIAVEQDKNTQEVFAQVKQIYKTPPIKDFGGFNFSQILPDPSKPSKRSFIEDLLFNKVTLADAGFIKQYGDCLGDIAARDLICAQKFNGLTVLPPLLTDEMIAQYTSALLAGTITSGWTFGAGAALQIPFAMQMAYRFNGIGVTQNVLYENQKLIANQFNSAIGKIQDSLSSTASALGKLQDVVNQNAQALNTLVKQLSSNFGAISSVLNDILSRLDPPEAEVQIDRLITGRLQSLQTYVTQQLIRAAEIRASANLAATKMSECVLGQSKRVDFCGKGYHLMSFPQSAPHGVVFLHVTYVPAQEKNFTTAPAICHDGKAHFPREGVFVSNGTHWFVTQRNFYEPQIITTDNTFVSGNCDVVIGIVNNTVYDPLQPELDSFKEELDKYFKNHTSPDVDLGDISGINASVVNIQKEIDRLNEVAKNLNESLIDLQELGKYEQYIKGSGRENLYFQGGGGSGYIPEAPRDGQAYVRKDGEWVLLSTFLGHHHHHHHH

SEQ ID NO: 2236 - protein, 1281 aa, Artificial Sequence
  Description of Artificial Sequence: Synthetic polypeptide
MGILPSPGMPALLSLVSLLSVLLMGCVAETGTQCVNLTTRTQLPPAYTNSFTRGVYYPDKIFRSSVLHLTQDLFLPFFSNVTWFHAIHVSGTNGTKRFDNPVLPFNDGVYFAATEKSNIIRGWIFGTTLDSKTQSLLIVNNATNVVIKVCEFQFCNDPFLGVYYHKNNKSWMESEFRVYSSANNCTFEYVSQPFLMDLEGKQGNFKNLREFVFKNIDGYFKIYSKYTPINLVRDLPQGFSALEPLVKLPIGINITRFQTLLALHRSYLTPGDSSSGWTAGAAAYYVGYLQPRTFLLKYNENGTITDAVDCALDPLSETKCTLKSFTVEKGIYQTSNFRVQPTESIVRFPNITNLCPFGEVFNATRFASVYAWNRKRISNCVADYSVLYNSASFSTFKCYGVSPTKLNDLCFTNVYADSFVIRGDEVRQIAPGQTGKIADYNYKLPDDFTGCVIAWNSNNLDSKVGGNYNYLYRLFRKSNLKPFERDISTEIYQAGSTPCNGVEGFNCYFPLQSYGFQPTNGVGYQPYRVVVLSFELLHAPATVCGPKKSTNLVKNKCVNFNFNGLTGTGVLTESNKKFLPFQQFGRDISDTTDAVRDPQTLEILDITPCSFGGVSVITPGTNTSNQVAVLYQDVNCTDVPVAIHADQLTPTWRVYSTGSNVFQTQAGCLIGAEHVNNSYECDIPIGAGICASYQTQTNSPSGAGSVASQSIIAYTMSLGAENSVAYSNNSIAIPTNFTISVTTEILPVSMTKTSVDCTMYICGDSTECSNLLLQYGSFCTQLNRALTGIAVEQDKNTQEVFAQVKQIYKTPPIKDFGGFNFSQILPDPSKPSKRSFIEDLLFNKVTLADAGFIKQYGDCLGDIAARDLICAQKFNGLTVLPPLLTDEMIAAYTAALLAGTATAGWTFGAGAALQIPFAMQMAYRFNGIGVTQNVLYENQKLIANQFNSAIGKIQDSLSSTASALGKLQDVVNQNAQALNTLVKQLSSNFGAISSVLNDILSRLDPPEAEVQIDRLITGRLQSLQTYVTQQLIRAAEIRASANLAATKMSECVLGQSKRVDFCGKGYHLMSFPQSAPHGVVFLHVTYVPAQEKNFTTAPAICHDGKAHFPREGVFVSNGTHWFVTQRNFYEPQIITTDNTFVSGNCDVVIGIVNNTVYDPLQPELDSFKEELDKYFKNHTSPDVDLGDISGINASVVNIQKEIDRLNEVAKNLNESLIDLQELGKYEQYIKGSGRENLYFQGGGGSGYIPEAPRDGQAYVRKDGEWVLLSTFLGHHHHHHHH

SEQ ID NO: 2237 - protein, 1281 aa, Artificial Sequence
  Description of Artificial Sequence: Synthetic polypeptide
MGILPSPGMPALLSLVSLLSVLLMGCVAETGTQCVNLTTRTQLPPAYTNSFTRGVYYPDKVFRSSVLHSTQDLFLPFFSNVTWFHAIHVSGTNGTKRFDNPVLPFNDGVYFASTEKSNIIRGWIFGTTLDSKTQSLLIVNNATNVVIKVCEFQFCNDPFLGVYYHKNNKSWMESEWRVYSSANNCTFEYVSQPFLMDLEGKQGNFKNLREFVFKNIDGYFKIYSKHTPINLVRDLPQGFSALEPLVDLPIGINITRFQTLLALHRSYLTPGDSSSGWTAGAAAYYVGYLQPRTFLLKYNENGTITDAVDCALDPLSETKCTLKSFTVEKGIYQTSNFRVQPTESIVRFPNITNLCPFGEVFNATRFASVYAWNRKRISNCVADYSVLYNSASFSTFKCYGVSPTKLNDLCFTNVYADSFVIRGDEVRQIAPGQTGKIADYNYKLPDDFTGCVIAWNSNNLDSKVGGNYNYLYRLFRKSNLKPFERDISTEIYQAGSTPCNGVEGFNCYFPLQSYGFQPTNGVGYQPYRVVVLSFELLHAPATVCGPKKSTNLVKNKCVNFNFNGLTGTGVLTESNKKFLPFQQFGRDIADTTDAVRDPQTLEILDITPCSFGGVSVITPGTNTSNQVAVLYQDVNCTEVPVAIHADQLTPTWRVYSTGSNVFQTRAGCLIGAEHVNNSYECDIPIGAGICASYQTQTNSPSGAGSVASQSIIAYTMSLGAENSVAYSNNSIAIPTNFTISVTTEILPVSMTKTSVDCTMYICGDSTECSNLLLQYGSFCTQLNRALTGIAVEQDKNTQEVFAQVKQIYKTPPIKDFGGFNFSQILPDPSKPSKRSFIEDLLFNKVTLADAGFIKQYGDCLGDIAARDLICAQKFNGLTVLPPLLTDEMIAQYTSALLAGTITSGWTFGAGAALQIPFAMQMAYRFNGIGVTQNVLYENQKLIANQFNSAIGKIQDSLSSTASALGKLQDVVNQNAQALNTLVKQLSSNFGAISSVLNDILSRLDPPEAEVQIDRLITGRLQSLQTYVTQQLIRAAEIRASANLAATKMSECVLGQSKRVDFCGKGYHLMSFPQSAPHGVVFLHVTYVPAQEKNFTTAPAICHDGKAHFPREGVFVSNGTHWFVTQRNFYEPQIITTDNTFVSGNCDVVIGIVNNTVYDPLQPELDSFKEELDKYFKNHTSPDVDLGDISGINASVVNIQKEIDRLNEVAKNLNESLIDLQELGKYEQYIKGSGRENLYFQGGGGSGYIPEAPRDGQAYVRKDGEWVLLSTFLGHHHHHHHH

SEQ ID NO: 2238 - protein, 1281 aa, Artificial Sequence
  Description of Artificial Sequence: Synthetic polypeptide
MGILPSPGMPALLSLVSLLSVLLMGCVAETGTQCVNLTTRTQLPPAYTNSFTRGVYYPDKVFRSSVLHSTQDLFLPFFSNVTWFHAIHVSGTNGTKRFDNPVLPFNDGVYFASTEKSNIIRGWIFGTTLDSKTQSLLIVNNATNVVIKVCEFQFCNDPFLGVYYHKNNKSWMESEFRVYSSANNCTFEYVSQPFLMDLEGKQGNFKNLREFVFKNIDGYFKIYSKHTPINLVRDLPQGFSALEPLMDLPIGINITRFQTLLALHRSYLTPGDSSSGWTAGAAAYYVGYLQPRTFLLKYNENGTITDAVDCALDPLSETKCTLKSFTVEKGIYQTSNFRVQPTESIVRFPNITNLCPFGEVFNATRFASVYAWNRKRISNCVADYSVLYNSASFSTFKCYGVSPTKLNDLCFTNVYADSFVIRGDEVRQIAPGQTGKIADYNYKLPDDFTGCVIAWNSNNLDSKVGGNYNYLYRLFRKSNLKPFERDISTEIYQAGSTPCNGVEGFNCYFPLQSYGFQPTNGVGYQPYRVVVLSFELLHAPATVCGPKKSTNLVKNKCVNFNFNGLTGTGVLTESNKKFLPFQQFGRDIADTTDAVRDPQTLEILDITPCSFGGVSVITPGTNTSNQVAVLYQDVNCTEVPVAIHADQLTPTWRVYSTGSNVFQTRAGCLIGAEHVNNSYECDIPIGAGICASYQTQTNSPSGAGSVASQSIIAYTMSLGAENSVAYSNNSIAIPTNFTISVTTEILPVSMTKTSVDCTMYICGDSTECSNLLLQYGSFCTQLNRALTGIAVEQDKNTQEVFAQVKQIYKTPPIKDFGGFNFSQILPDPSKPSKRSFIEDLLFNKVTLADAGFIKQYGDCLGDIAARDLICAQKFNGLTVLPPLLTDEMIAQYTSALLAGTITSGWTFGAGAALQIPFAMQMAYRFNGIGVTQNVLYENQKLIANQFNSAIGKIQDSLSSTASALGKLQDVVNQNAQALNTLVKQLSSNFGAISSVLNDILSRLDPPEAEVQIDRLITGRLQSLQTYVTQQLIRAAEIRASANLAATKMSECVLGQSKRVDFCGKGYHLMSFPQSAPHGVVFLHVTYVPAQEKNFTTAPAICHDGKAHFPREGVFVSNGTHWFVTQRNFYEPQIITTDNTFVSGNCDVVIGIVNNTVYDPLQPELDSFKEELDKYFKNHTSPDVDLGDISGINASVVNIQKEIDRLNEVAKNLNESLIDLQELGKYEQYIKGSGRENLYFQGGGGSGYIPEAPRDGQAYVRKDGEWVLLSTFLGHHHHHHHH

SEQ ID NO: 2239 - protein, 1281 aa, Artificial Sequence
  Description of Artificial Sequence: Synthetic polypeptide
MGILPSPGMPALLSLVSLLSVLLMGCVAETGTQCVNLTTRTQLPPAYTNSFTRGVYYPDKVFRSSVLHSTQDLFLPFFSNVTWFHAIHVSGTNGTKRFDNPVLPFNDGVYFASTEKSNIIRGWIFGTTLDSKTQSLLIVNNATNVVIKVCEFQFCNDPFLGVYYHKNNKSWMESEFRVYSSANNCTFEYVSQPFLMDLEGKQGNFKNLREFVFKNIDGYFKIYSKHTPINLVRDLPQGFSALEPLVDLPIGINITRFQTLLALHRSYRTPGDSSSGWTAGAAAYYVGYLQPRTFLLKYNENGTITDAVDCALDPLSETKCTLKSFTVEKGIYQTSNFRVQPTESIVRFPNITNLCPFGEVFNATRFASVYAWNRKRISNCVADYSVLYNSASFSTFKCYGVSPTKLNDLCFTNVYADSFVIRGDEVRQIAPGQTGKIADYNYKLPDDFTGCVIAWNSNNLDSKVGGNYNYLYRLFRKSNLKPFERDISTEIYQAGSTPCNGVEGFNCYFPLQSYGFQPTNGVGYQPYRVVVLSFELLHAPATVCGPKKSTNLVKNKCVNFNFNGLTGTGVLTESNKKFLPFQQFGRDIADTTDAVRDPQTLEILDITPCSFGGVSVITPGTNTSNQVAVLYQDVNCTEVPVAIHADQLTPTWRVYSTGSNVFQTRAGCLIGAEHVNNSYECDIPIGAGICASYQTQTNSPSGAGSVASQSIIAYTMSLGAENSVAYSNNSIAIPTNFTISVTTEILPVSMTKTSVDCTMYICGDSTECSNLLLQYGSFCTQLNRALTGIAVEQDKNTQEVFAQVKQIYKTPPIKDFGGFNFSQILPDPSKPSKRSFIEDLLFNKVTLADAGFIKQYGDCLGDIAARDLICAQKFNGLTVLPPLLTDEMIAQYTSALLAGTITSGWTFGAGAALQIPFAMQMAYRFNGIGVTQNVLYENQKLIANQFNSAIGKIQDSLSSTASALGKLQDVVNQNAQALNTLVKQLSSNFGAISSVLNDILSRLDPPEAEVQIDRLITGRLQSLQTYVTQQLIRAAEIRASANLAATKMSECVLGQSKRVDFCGKGYHLMSFPQSAPHGVVFLHVTYVPAQEKNFTTAPAICHDGKAHFPREGVFVSNGTHWFVTQRNFYEPQIITTDNTFVSGNCDVVIGIVNNTVYDPLQPELDSFKEELDKYFKNHTSPDVDLGDISGINASVVNIQKEIDRLNEVAKNLNESLIDLQELGKYEQYIKGSGRENLYFQGGGGSGYIPEAPRDGQAYVRKDGEWVLLSTFLGHHHHHHHH

SEQ ID NO: 2240 - protein, 1281 aa, Artificial Sequence
  Description of Artificial Sequence: Synthetic polypeptide
MGILPSPGMPALLSLVSLLSVLLMGCVAETGTQCVNLTTRTQLPPAYTNSFTRGVYYPDKVFRSSVLHSTQDLFLPFFSNVTWFHAIHVSGTNGTKRFDNPVLPFNDGVYFASTEKSNIIRGWIFGTTLDSKTQSLLIVNNATNVVIKVCEFQFCNDPFLGVYYHKNNKSWMESEFRVYSSANNCTFEYVSQPFLMDLEGKQGNFKNLREFVFKNIDGYFKIYSKHTPINLVRDLPQGFSALEPLVDLPIGINITRFQTLLALHRSYLTPGDSSSGWTAGAAAYYVGYLQPRTFLLKYNENGTITDAVDCALDPLSETKCTLKSFTVEKGIYQTSNFRVQPTESIVRFPNITNLCPFGEVFNATRFASVYAWNRKRISNCVADYSVLYNSASFSTFKCYGVSPTKLNDLCFTNVYADSFVIRGDEVRQIAPGQTGKIADYNYKLPDDFTGCVIAWNSNNLDSKVGGNYNYLYRLFRKSNLKPFERDISTEIYQAGSTPCNGVEGFNCYFPLQSYGFQPTNGVGYQPYRVVVLSFELLHAPATVCGPKKSTNLVKNKCVNFNFNGLTGTGVLTESNKKFLPFQQFGRDIADTTDAVRDPQTLEILDITPCSFGGVSVITPGTNTSNQVAVLYQDVNCTEVPVAIHADQLTPTWRVYSTGSNVFQTRAGCLIGAEHVNNSYECDIPIGAGICASYQTQTNSPSGAGSVASQSIIAYTMSLGAENSVAYSNNSIAIPTNFTISVTTEILPVSMTKTSVDCTMYICGDSTECSNLLLQYGSFCTQLNRALTGIAVEQDKNTQEVFAQVKQIYKTPPIKDFGGFNFSQILPDPSKPSKRSFIEDLLFNKVTLADAGFIKQYGDCLGDIAARDLICAQKFNGLTVLPPLLTDEMIAQYTSALLAGTITSGWTFGAGAALQIPFAMQMAYRFNGIGVTQNVLYENQKLIANQFNSAIGKIQDSLSSTATALGKLQDVVNQNAQALNTLVKQLSSNFGAISSVLNDILSRLDPPEAEVQIDRLITGRLQSLQTYVTQQLIRAAEIRASANLAATKMSECVLGQSKRVDFCGKGYHLMSFPQSAPHGVVFLHVTYVPAQEKNFTTAPAICHDGKAHFPREGVFVSNGTHWFVTQRNFYEPQIITTDNTFVSGNCDVVIGIVNNTVYDPLQPELDSFKEELDKYFKNHTSPDVDLGDISGINASVVNIQKEIDRLNEVAKNLNESLIDLQELGKYEQYIKGSGRENLYFQGGGGSGYIPEAPRDGQAYVRKDGEWVLLSTFLGHHHHHHHH

SEQ ID NO: 2241 - protein, 1281 aa, Artificial Sequence
  Description of Artificial Sequence: Synthetic polypeptide
MGILPSPGMPALLSLVSLLSVLLMGCVAETGTQCVNLTTRTQLPPAYTNSFTRGVYYPDKVFRSSVLHSTQDLFLPFFSNVTWFHAIHVSGTNGTKRFDNPVLPFNDGVYFASTEKSNIIRGWIFGTTLDSKTQSLLIVNNATNVVIKVCEFQFCNDPFLGVYYHKNNKSWMESEFRVYSSANNCTFEYVSQPFLMDLEGKQGNFKNLREFVFKNIDGYFKIYSKHTPINLVRDLPQGFSALEPLVDLPIGINITRFQTLLALHRSYLTPGDSSSGWTAGAAAYYVGYLQPRTFLLKYNENGTITDAVDCALDPLSETKCTLKSFTVEKGIYQTSNFRVQPTESIVRFPNITNLCPFGEVFNATRFASVYAWNRKRISNCVADYSVLYNSASFSTFKCYGVSPTKLNDLCFTNVYADSFVIRGDEVRQIAPGQTGKIADYNYKLPDDFTGCVIAWNSNNLDSKVGGNYNYLYRLFRKSNLKPFERDISTEIYQAGSTPCNGVEGFNCYFPLQSYGFQPTNGVGYQPYRVVVLSFELLHAPATVCGPKKSTNLVKNKCVNFNFNGLTGTGVLTESNKKFLPFQQFGRDIADTTDAVRDPQTLEILDITPCSFGGVSVITPGTNTSNQVAVLYQDVNCTEVPVAIHADQLTPTWRVYSTGSNVFQTRAGCLIGAEHVNNSYECDIPIGAGICASYQTQTNSPSGAGSVASQSIIAYTMSLGAENSVAYSNNSIAIPTNFTISVTTEILPVSMTKTSVDCTMYICGDSTECSNLLLQYGSFCTQLNRALTGIAVEQDKNLQEVFAQVKQIYKTPPIKDFGGFNFSQILPDPSKPSKRSFIEDLLFNKVTLADAGFIKQYGDCLGDIAARDLICAQKFNGLTVLPPLLTDEMIAQYTSALLAGTITSGWTFGAGAALQIPFAMQMAYRFNGIGVTQNVLYENQKLIANQFNSAIGKIQDSLSSTASALGKLQDVVNQNAQALNTLVKQLSSNFGAISSVLNDILSRLDPPEAEVQIDRLITGRLQSLQTYVTQQLIRAAEIRASANLAATKMSECVLGQSKRVDFCGKGYHLMSFPQSAPHGVVFLHVTYVPAQEKNFTTAPAICHDGKAHFPREGVFVSNGTHWFVTQRNFYEPQIITTDNTFVSGNCDVVIGIVNNTVYDPLQPELDSFKEELDKYFKNHTSPDVDLGDISGINASVVNIQKEIDRLNEVAKNLNESLIDLQELGKYEQYIKGSGRENLYFQGGGGSGYIPEAPRDGQAYVRKDGEWVLLSTFLGHHHHHHHH

SEQ ID NO: 2242 - protein, 1281 aa, Artificial Sequence
  Description of Artificial Sequence: Synthetic polypeptide
MGILPSPGMPALLSLVSLLSVLLMGCVAETGTQCVNLTTRTQLPPAYTNSFTRGVYYPDKVFRSSVLHSTQDLFLPFFSNVTWFHAIHVSGTNGTKRFDNPVLPFNDGVYFASTEKSNIIRGWIFGTTLDSKTQSLLIVNNATNVVIKVCEFQFCNDPFLGVYYHKNNKSWMESEFRVYSSANNCTFEYVSQPFLMDLEGKQGNFKNLREFVFKNIDGYFKIYSKHTPINLVRDLPQGFSALEPLVDLPIGINITRFQTLLALHRSYLTPGDSSSGWTAGAAAYYVGYLQPRTFLLKYNENGTITDAVDCALDPLSETKCTLKSFTVEKGIYQTSNFRVQPTESIVRFPNITNLCPFGEVFNATRFASVYAWNRKRISNCVADYSVLYNSASFSTFKCYGVSPTKLNDLCFTNVYADSFVIRGDEVRQIAPGQTGKIADYNYKLPDDFTGCVIAWNSNNLDSKVGGNYNYLYRLFRKSNLKPFERDISTEIYQAGSTPCNGVEGFNCYFPLQSYGFQPTNGVGYQPYRVVVLSFELLHAPATVCGPKKSTNLVKNKCVNFNFNGLTGTGVLTESNKKFLPFQQFGRDIADTTDAVRDPQTLEILDITPCSFGGVSVITPGTNTSNQVAVLYQDVNCTEVPVAIHADQLTPTWRVYSTGSNVFQTRAGCLIGAEHVNNSYECDIPIGAGICASYQTQTNSPSGAGSVASQSIIAYTMSLGAENSVAYSNNSIAIPTNFTISVTTEILPVSMTKTSVDCTMYICGDSTECSNLLLQYGSFCTQLNRALTGIAVEQDKNTQNVFAQVKQIYKTPPIKDFGGFNFSQILPDPSKPSKRSFIEDLLFNKVTLADAGFIKQYGDCLGDIAARDLICAQKFNGLTVLPPLLTDEMIAQYTSALLAGTITSGWTFGAGAALQIPFAMQMAYRFNGIGVTQNVLYENQKLIANQFNSAIGKIQDSLSSTASALGKLQDVVNQNAQALNTLVKQLSSNFGAISSVLNDILSRLDPPEAEVQIDRLITGRLQSLQTYVTQQLIRAAEIRASANLAATKMSECVLGQSKRVDFCGKGYHLMSFPQSAPHGVVFLHVTYVPAQEKNFTTAPAICHDGKAHFPREGVFVSNGTHWFVTQRNFYEPQIITTDNTFVSGNCDVVIGIVNNTVYDPLQPELDSFKEELDKYFKNHTSPDVDLGDISGINASVVNIQKEIDRLNEVAKNLNESLIDLQELGKYEQYIKGSGRENLYFQGGGGSGYIPEAPRDGQAYVRKDGEWVLLSTFLGHHHHHHHH

SEQ ID NO: 2243 - protein, 1281 aa, Artificial Sequence
  Description of Artificial Sequence: Synthetic polypeptide
MGILPSPGMPALLSLVSLLSVLLMGCVAETGTQCVNLTTRTQLPPAYTNSFTRGVYYPDKVFRSSVLHSTQDLFLPFFSNVTWFHAIHVSGTNGTKRFDNPVLPFNDGVYFASTEKSNIIRGWIFGTTLDSKTQSLLIVNNATNVVIKVCEFQFCNDPFLGVYYHKNNKSWMESEFRVYSSANNCTFEYVSQPFLMDLEGKQGNFKNLREFVFKNIDGYFKIYSKHTPINLVRDLPQGFSALEPLVDLPIGINITRFQTLLALHRSYLTPGDSSSGWTAGAAAYYVGYLQPRTFLLKYNENGTITDAVDCALDPLSETKCTLKSFTVEKGIYQTSNFRVQPTESIVRFPNITNLCPFGEVFNATRFASVYAWNRKRISNCVADYSVLYNSASFSTFKCYGVSPTKLNDLCFTNVYADSFVIRGDEVRQIAPGQTGKIADYNYKLPDDFTGCVIAWNSNNLDSKVGGNYNYLYRLFRKSNLKPFERDISTEIYQAGSTPCNGVEGFNCYFPLQSYGFQPTNGVGYQPYRVVVLSFELLHAPATVCGPKKSTNLVKNKCVNFNFNGLTGTGVLTESNKKFLPFQQFGRDIADTTDAVRDPQTLEILDITPCSFGGVSVITPGTNTSNQVAVLYQDVNCTEVPQAIHADQLTPTWRVYSTGSNVFQTRAGCLIGAEHVNNSYECDIPIGAGICASYQTQTNSPSGAGSVASQSIIAYTMSLGAENSVAYSNNSIAIPTNFTISVTTEILPVSMTKTSVDCTMYICGDSTECSNLLLQYGSFCTQLNRALTGIAVEQDKNTQEVFAQVKQIYKTPPIKDFGGFNFSQILPDPSKPSKRSFIEDLLFNKVTLADAGFIKQYGDCLGDIAARDLICAQKFNGLTVLPPLLTDEMIAQYTSALLAGTITSGWTFGAGAALQIPFAMQMAYRFNGIGVTQNVLYENQKLIANQFNSAIGKIQDSLSSTASALGKLQDVVNQNAQALNTLVKQLSSNFGAISSVLNDILSRLDPPEAEVQIDRLITGRLQSLQTYVTQQLIRAAEIRASANLAATKMSECVLGQSKRVDFCGKGYHLMSFPQSAPHGVVFLHVTYVPAQEKNFTTAPAICHDGKAHFPREGVFVSNGTHWFVTQRNFYEPQIITTDNTFVSGNCDVVIGIVNNTVYDPLQPELDSFKEELDKYFKNHTSPDVDLGDISGINASVVNIQKEIDRLNEVAKNLNESLIDLQELGKYEQYIKGSGRENLYFQGGGGSGYIPEAPRDGQAYVRKDGEWVLLSTFLGHHHHHHHH

SEQ ID NO: 2244 - protein, 1281 aa, Artificial Sequence
  Description of Artificial Sequence: Synthetic polypeptide
MGILPSPGMPALLSLVSLLSVLLMGCVAETGTQCVNLTTRTQLPPAYTNSFTRGVYYPDKVFRSSVLHSTQDLFLPFFSNVTWFHAIHVSGTNGTKRFDNPVLPFNDGVYFASTEKSNIIRGWIFGTTLDSKTQSLLIVNNATNVVIKVCEFQFCNDPFLGVYYHKNNKSWMESEFRVYSSANNCTFEYVSQPFLMDLEGKQGNFKNLREFVFKNIDGYFKIYSKHTPINLVRDLPQGFSALEPLVDLPIGINITRFQTLLALHRSYLTPGDSSSGWTAGAAAYYVGYLQPRTFLLKYNENGTITDAVDCALDPLSETKCTLKSFTVEKGIYQTSNFRVQPTESIVRFPNITNLCPFGEVFNATRFASVYAWNRKRISNCVADYSVLYNSASFSTFKCYGVSPTKLNDLCFTNVYADSFVIRGDEVRQIAPGQTGKIADYNYKLPDDFTGCVIAWNSNNLDSKVGGNYNYLYRLFRKSNLKPFERDISTEIYQAGSTPCNGVEGFNCYFPLQSYGFQPTNGVGYQPYRVVVLSFELLHAPATVCGPKKSTNLVKNKCVNFNFNGLTGTGVLTESNKKFLPFQQFGRDIADTTDAVRDPQTLEILDITPCSFGGVSVITPGTNTSNQVAVLYQDVNCTEVPRAIHADQLTPTWRVYSTGSNVFQTRAGCLIGAEHVNNSYECDIPIGAGICASYQTQTNSPSGAGSVASQSIIAYTMSLGAENSVAYSNNSIAIPTNFTISVTTEILPVSMTKTSVDCTMYICGDSTECSNLLLQYGSFCTQLNRALTGIAVEQDKNTQEVFAQVKQIYKTPPIKDFGGFNFSQILPDPSKPSKRSFIEDLLFNKVTLADAGFIKQYGDCLGDIAARDLICAQKFNGLTVLPPLLTDEMIAQYTSALLAGTITSGWTFGAGAALQIPFAMQMAYRFNGIGVTQNVLYENQKLIANQFNSAIGKIQDSLSSTASALGKLQDVVNQNAQALNTLVKQLSSNFGAISSVLNDILSRLDPPEAEVQIDRLITGRLQSLQTYVTQQLIRAAEIRASANLAATKMSECVLGQSKRVDFCGKGYHLMSFPQSAPHGVVFLHVTYVPAQEKNFTTAPAICHDGKAHFPREGVFVSNGTHWFVTQRNFYEPQIITTDNTFVSGNCDVVIGIVNNTVYDPLQPELDSFKEELDKYFKNHTSPDVDLGDISGINASVVNIQKEIDRLNEVAKNLNESLIDLQELGKYEQYIKGSGRENLYFQGGGGSGYIPEAPRDGQAYVRKDGEWVLLSTFLGHHHHHHHH

SEQ ID NO: 2245 - protein, 1281 aa, Artificial Sequence
  Description of Artificial Sequence: Synthetic polypeptide
MGILPSPGMPALLSLVSLLSVLLMGCVAETGTQCVNLTTRTQLPPAYTNSFTRGVYYPDKVFRSSVLHSTQDLFLPFFSNVTWFHAIHVSGTNGTKRFDNPVLPFNDGVYFASTEKSNIIRGWIFGTTLDSKTQSLLIVNNATNVVIKVCEFQFCNDPFLGVYYHKNNKSWMESEFRVYSSANNCTFEYVSQPFLMDLEGKQGNFKNLREFVFKNIDGYFKIYSKHTPINLVRDLPQGFSALEPLVDLPIGINITRFQTLLALHRSYLTPGDSSSGWTAGAAAYYVGYLQPRTFLLKYNENGTITDAVDCALDPLSETKCTLKSFTVEKGIYQTSNFRVQPTEEIVRFPNITNLCPFGEVFNATRFASVYAWNRKRISNCVADYSVLYNSASFSTFKCYGVSPTKLNDLCFTNVYADSFVIRGDEVRQIAPGQTGKIADYNYKLPDDFTGCVIAWNSNNLDSKVGGNYNYLYRLFRKSNLKPFERDISTEIYQAGSTPCNGVEGFNCYFPLQSYGFQPTNGVGYQPYRVVVLSFELLHAPATVCGPKKSTNLVKNKCVNFNFNGLTGTGVLTESNKKFLPFQQFGRDIADTTDAVRDPQTLEILDITPCSFGGVSVITPGTNTSNQVAVLYQDVNCTEVPVAIHADQLTPTWRVYSTGSNVFQTRAGCLIGAEHVNNSYECDIPIGAGICASYQTQTNSPSGAGSVASQSIIAYTMSLGAENSVAYSNNSIAIPTNFTISVTTEILPVSMTKTSVDCTMYICGDSTECSNLLLQYGSFCTQLNRALTGIAVEQDKNTQEVFAQVKQIYKTPPIKDFGGFNFSQILPDPSKPSKRSFIEDLLFNKVTLADAGFIKQYGDCLGDIAARDLICAQKFNGLTVLPPLLTDEMIAQYTSALLAGTITSGWTFGAGAALQIPFAMQMAYRFNGIGVTQNVLYENQKLIANQFNSAIGKIQDSLSSTASALGKLQDVVNQNAQALNTLVKQLSSNFGAISSVLNDILSRLDPPEAEVQIDRLITGRLQSLQTYVTQQLIRAAEIRASANLAATKMSECVLGQSKRVDFCGKGYHLMSFPQSAPHGVVFLHVTYVPAQEKNFTTAPAICHDGKAHFPREGVFVSNGTHWFVTQRNFYEPQIITTDNTFVSGNCDVVIGIVNNTVYDPLQPELDSFKEELDKYFKNHTSPDVDLGDISGINASVVNIQKEIDRLNEVAKNLNESLIDLQELGKYEQYIKGSGRENLYFQGGGGSGYIPEAPRDGQAYVRKDGEWVLLSTFLGHHHHHHHH

SEQ ID NO: 2246 - protein, 1281 aa, Artificial Sequence
  Description of Artificial Sequence: Synthetic polypeptide
MGILPSPGMPALLSLVSLLSVLLMGCVAETGTQCVNLTTRTQLPPAYTNSFTRGVYYPDKVFRSSVLHSTQDLFLPFFSNVTWFHAIHVSGTNGTKRFDNPVLPFNDGVYFASTEKSNIIRGWIFGTTLDSKTQSLLIVNNATNVVIKVCEFQFCNDPFLGVYYHKNNKSWMESEFRVYSSANNCTFEYVSQPFLMDLEGKQGNFKNLREFVFKNIDGYFKIYSKHTPINLVRDLPQGFSALEPLVDLPIGINITRFQTLLALHRSYLTPGDSSSGWTAGAAAYYVGYLQPRTFLLKYNENGTITDAVDCALDPLSETKCTLKSFTVEKGIYQTSNFRVQPTESIVRFPNITNLCPFGEVFNATRFASVYAWNRKRISNCVADYSVLYNSASFSTFKCYGVSPTKLNDLCFTNVYADSFVIRGDEVRQIAPGQTGKIADYNYKLPDDFTGCVIAWNSNNLDSKVGGNYNYLYRLFRKSNLKPFERDISTEIYQAGSTPCNGVEGFNCYFPLQSYGFQPTNGVGYQPYRVVVLSFELLHAPATVCGPKKSTNLVKNKCVNFNFNGLTGTGVLTESNKKFLPFQQFGRDIADTTDAVRDPQTLEILDITPCSFGGVSVITPGTNTSNQVAVLYQDVNCTEVPVAIHADQLTPTWRVYSTGSNVFQTRAGCLIGAEHVNNSYECDIPIGAGICASYQTQTNSPSGAGSVASQSIIAYTMSLGAENSVAYSNNSIAIPTNFTISVTTEILPVSMTKTSVDCTMYICGDSTECSNLLLQYGSFCTQLNRALTGIAVEQDKNTQEVFAQVKQIYKTPPIKDFGGFNFSQILPDPSKPSKRSFIEDLLFNKVTLADAGFIKQYGDCLGDIAARDLICAQKFNGLTVLPPLLTDEMIAQYTSALLAGTITSGWTFGAGAALQIPFAMQMAYRFNGIGVTQNVLYENQKLIANQFNSAIGKIQDSLSSTASALGKLQDVVNQNAQALNTLVKQLSSNFGAISSVLNDILSRLDPPEAEAQIDRLITGRLQSLQTYVTQQLIRAAEIRASANLAATKMSECVLGQSKRVDFCGKGYHLMSFPQSAPHGVVFLHVTYVPAQEKNFTTAPAICHDGKAHFPREGVFVSNGTHWFVTQRNFYEPQIITTDNTFVSGNCDVVIGIVNNTVYDPLQPELDSFKEELDKYFKNHTSPDVDLGDISGINASVVNIQKEIDRLNEVAKNLNESLIDLQELGKYEQYIKGSGRENLYFQGGGGSGYIPEAPRDGQAYVRKDGEWVLLSTFLGHHHHHHHH

SEQ ID NO: 2247 - protein, 1281 aa, Artificial Sequence
  Description of Artificial Sequence: Synthetic polypeptide
MGILPSPGMPALLSLVSLLSVLLMGCVAETGTQCVNLTTRTQLPPAYTNSFTRGVYYPDKVFRSSVLHSTQDLFLPFFSNVTWFHAIHVSGTNGTKRFDNPVLPFNDGVYFASTEKSNIIRGWIFGTTLDSKTQSLLIVNNATNVVIKVCEFQFCNDPFLGVYYHKNNKSWMESEFRVYSSANNCTFEYVSQPFLMDLEGKQGNFKNLREFVFKNIDGYFKIYSKHTPINLVRDLPQGFSALEPLVDLPIGINITRFQTLLALHRSYLTPGDSSSGWTAGAAAYYVGYLQPRTFLLKYNENGTITDAVDCALDPLSETKCTLKSFTVEKGIYQTSNFRVQPTESIVRFPNITNLCPFGEVFNATRFASVYAWNRKRISNCVADYSVLYNSASFSTFKCYGVSPTKLNDLCFTNVYADSFVIRGDEVRQIAPGQTGKIADYNYKLPDDFTGCVIAWNSNNLDSKVGGNYNYLYRLFRKSNLKPFERDISTEIYQAGSTPCNGVEGFNCYFPLQSYGFQPTNGVGYQPYRVVVLSFELLHAPATVCGPKKSTNLVKNKCVNFNFNGLTGTGVLTESNKKFLPFQQFGRDIADTTDAVRDPQTLEILDITPCSFGGVSVITPGTNTSNQVAVLYQDVNCTEVPVAIHADQLTPTWRVYSTGSNVFQTRAGCLIGAEHVNNSYECDIPIGAGICASYQTQTNSPSGAGSVASQSIIAYTMSLGAENSVAYSNNSIAIPTNFTISVTTEILPVSMTKTSVDCTMYICGDSTECSNLLLQYGSFCTQLNRALTGIAVEQDKNTQEVFAQVKQIYKTPPIKDFGGFNFSQILPDPSKPSKRSFIEDLLFNKVTLADAGFIKQYGDCLGDIAARDLICAQKFNGLTVLPPLLTDEMIAQYTSALLAGTITSGWTFGAGAALQIPFAMQMAYRFNGIGVTQNVLYENQKLIANQFNSAIGKIQDSLSSTASALGKLQDVVNQNAQALTTLVKQLSSNFGAISSVLNDILSRLDPPEAEVQIDRLITGRLQSLQTYVTQQLIRAAEIRASANLAATKMSECVLGQSKRVDFCGKGYHLMSFPQSAPHGVVFLHVTYVPAQEKNFTTAPAICHDGKAHFPREGVFVSNGTHWFVTQRNFYEPQIITTDNTFVSGNCDVVIGIVNNTVYDPLQPELDSFKEELDKYFKNHTSPDVDLGDISGINASVVNIQKEIDRLNEVAKNLNESLIDLQELGKYEQYIKGSGRENLYFQGGGGSGYIPEAPRDGQAYVRKDGEWVLLSTFLGHHHHHHHH

SEQ ID NO: 2248 - protein, 1281 aa, Artificial Sequence
  Description of Artificial Sequence: Synthetic polypeptide
MGILPSPGMPALLSLVSLLSVLLMGCVAETGTQCVNLTTRTQLPPAYTNSFTRGVYYPDKIFRSNVLHSTQDLFLPFFSNVTWFHAIHVSGTNGTKRFDNPVLPFNDGVYFASTEKSNIIRGWIFGTTLDSKTQSLLIVNNATNVVIKVCEFQFCNDPFLGVYYHKNNKSWMESEFRVYSSANNCTFEYVSQPFLMDLEGKQGNFKNLREFVFKNIDGYFKIYSKWEPINLVRDLPQGFSPLEPLVDLPIGINITRFQTLLALHRSYLTPGDSSSGWTAGAAAYYVGYLQPRTFLLKYDENGYITDAVDCALDPLSETKCTLKSFTVEKGIYQTSNFRVQPTESIVRFPNITNLCPFGEVFNATRFASVYAWNRKRISNCVADYSVLYNSASFSTFKCYGVSPTKLNDLCFTNVYADSFVIRGDEVRQIAPGQTGKIADYNYKLPDDFTGCVIAWNSNNLDSKVGGNYNYLYRLFRKSNLKPFERDISTEIYQAGSTPCNGVEGFNCYFPLQSYGFQPTNGVGYQPYRVVVLSFELLHAPATVCGPKKSTNLVKNKCVNFNFNGLTGTGVLTESNKKFLPFQQFGRDIADTTDAVRDPQTLEILDITPCSFGGVSVITPGTNTSNQVAVLYQDVNCTEVPVAIHADQLTPTWRVYSTGSNVFQTRAGCLIGAEHVNNSYECDIPIGAGICASYQTQTNSPSGAGSVASQSIIAYTMSLGAENSVAYSNNSIAIPTNFTISVTTEILPVSMTKTSVDCTMYICGDSTECSNLLLQYGSFCTQLNRALTGIAVEQDKNTQEVFAQVKQIYKTPPIKDFGGFNFSQILPDPSKPSKRSFIEDLLFNKVTLADAGFIKQYGDCLGDIAARDLICAQKFNGLTVLPPLLTDEMIAQYTSALLAGTITSGWTFGAGAALQIPFAMQMAYRFNGIGVTQNVLYENQKLIANQFNSAIGKIQDSLSSTASALGKLQDVVNQNAQALNTLVKQLSSNFGAISSVLNDILSRLDPPEAEVQIDRLITGRLQSLQTYVTQQLIRAAEIRASANLAATKMSECVLGQSKRVDFCGKGYHLMSFPQSAPHGVVFLHVTYVPAQEKNFTTAPAICHDGKAHFPREGVFVSNGTHWFVTQRNFYEPQIITTDNTFVSGNCDVVIGIVNNTVYDPLQPELDSFKEELDKYFKNHTSPDVDLGDISGINASVVNIQKEIDRLNEVAKNLNESLIDLQELGKYEQYIKGSGRENLYFQGGGGSGYIPEAPRDGQAYVRKDGEWVLLSTFLGHHHHHHHH

SEQ ID NO: 2249 - protein, 1281 aa, Artificial Sequence
  Description of Artificial Sequence: Synthetic polypeptide
MGILPSPGMPALLSLVSLLSVLLMGCVAETGTQCVNLTTRTQLPPAYTNSFTRGVYYPDKVFRSSVLHSTQDLFLPFFSNVTWFHAIHVSGTNGTKRFDNPVLPFNDGVYFASTEKSNIIRGWIFGTTLDSKTQSLLIVNNATNVVIKVCEFQFCNDPFLVVYYHKNNKSWMESEFRVYSSANNCTFEYVSQPFLMDLEGKQGNFKNLREFVFKNIDGYFKIYSKHTPINLVRDLPQGFSALEPLVDLPIGINITRFQTLLALHRSYLTPGDSSSGWTAGAAAYYVGYLQPRTFLLKYNENGTITDAVDCALDPLSETKCTLKSFTVEKGIYQTSNFRVQPTESIVRFPNITNLCPFGEVFNATRFASVYAWNRKRISNCVADYSVLYNSASFSTFKCYGVSPTKLNDLCFTNVYADSFVIRGDEVRQIAPGQTGKIADYNYKLPDDFTGCVIAWNSNNLDSKVGGNYNYLYRLFRKSNLKPFERDISTEIYQAGSTPCNGVEGFNCYFPLQSYGFQPTNGVGYQPYRVVVLSFELLHAPATVCGPKKSTNLVKNKCVNFNFNGLTGTGVLTESNKKFLPFQQFGRDIADTTDAVRDPQTLEILDITPCSFGGVSVITPGTNTSNQVAVLYQDVNCTEVPVAIHADQLTPTWRVYSTGSNVFQTRAGCLIGAEHVNNSYECDIPIGAGICASYQTQTNSPSGAGSVASQSIIAYTMSLGAENSVAYSNNSIAIPTNFTISVTTEILPVSMTKTSVDCTMYICGDSTECSNLLLQYGSFCTQLNRALTGIAVEQDKNTQEVFAQVKQIYKTPPIKDFGGFNFSQILPDPSKPSKRSFIEDLLFNKVTLADAGFIKQYGDCLGDIAARDLICAQKFNGLTVLPPLLTDEMIAQYTSALLAGTITSGWTFGAGAALQIPFAMQMAYRFNGIGVTQNVLYENQKLIANQFNSAIGKIQDSLSSTASALGKLQDVVNQNAQALNTLVKQLSSNFGAISSVLNDILSRLDPPEAEVQIDRLITGRLQSLQTYVTQQLIRAAEIRASANLAATKMSECVLGQSKRVDFCGKGYHLMSFPQSAPHGVVFLHVTYVPAQEKNFTTAPAICHDGKAHFPREGVFVSNGTHWFVTQRNFYEPQIITTDNTFVSGNCDVVIGIVNNTVYDPLQPELDSFKEELDKYFKNHTSPDVDLGDISGINASVVNIQKEIDRLNEVAKNLNESLIDLQELGKYEQYIKGSGRENLYFQGGGGSGYIPEAPRDGQAYVRKDGEWVLLSTFLGHHHHHHHH

SEQ ID NO: 2250 - protein, 1281 aa, Artificial Sequence
  Description of Artificial Sequence: Synthetic polypeptide
MGILPSPGMPALLSLVSLLSVLLMGCVAETGTQCVNLTTRTQLPPAYTNSFTRGVYYPDKVFRSSVLHSTQDLFLPFFSNVTWFHAIHVSGTNGTKRFDNPVLPFNDGVYFASTEKSNIIRGWIFGTTLDSKTQSLLIVNNATNVVIKVCEFQFCNDPFLGVYYHKNNKSWMESEFRVYSSANNCTFEYVSQPFLMDLEGKQGNFKNLREFVFKNIDGYFKIYSKHTPINLVRDLPQGFSALEPLVDLPIGINITRFQTLLALHRSYLTPGDSSSGWTAGAAAYYVGYLQPRTFLLKYNENGTITDAVDCALDPLSETKCTLKSFTVEKGIYQTSNFRVQPTESIVRFPNITNLCPFGEVFNATRFASVYAWNRKRISNCVADYSVLYNSASFSTFKCYGVSPTKLNDLCFTNVYADSFVIRGDEVRQIAPGQTGKIADYNYKLPDDFTGCVIAWNSNNLDSKVGGNYNYLYRLFRKSNLKPFERDISTEIYQAGSTPCNGVEGFNCYFPLQSYGFQPTNGVGYQPYRVVVLSFELLHAPATVCGPKKSTNLVKNKCVNFNFNGLTGTGVLTESNKKFLPFQQFGRDIADTTDAVRDPQTLEILDITPCSFGGVSVITPGTNTSNQVAVLYQDVNCTEVPVAIHADQLTPTWRVYSTGSNVFQTRAGCLIGAEHVNNSYECDIPIGAGICASYQTQTNSPSGAGSVASQSIIAYTMSLGAENSVAYSNNSIAIPTNFTISVTTEILPVSMTKTSVDCTMYICGDSTECSNLLLQYGSFCTQLNRALTGIAVEQDKNTQEVFAQVKQIYKTPPIKDFGGFNFSQILPDPSKPSKRSFIEDLLFNKVTLADAGFIKQYGDCLGDIAARDLICAQKFNGLTVLPPLLTDEMIAQYTSALLAGTITSGWTFGAGAALQIPFAMQMAYRFNGIGVQQNVLYENQKLIANQFNSAIGKIQDSLSSTASALGKLQDVVNQNAQALNTLVKQLSSNFGAISSVLNDILSRLDPPEAEVQIDRLITGRLQSLQTYVTQQLIRAAEIRASANLAATKMSECVLGQSKRVDFCGKGYHLMSFPQSAPHGVVFLHVTYVPAQEKNFTTAPAICHDGKAHFPREGVFVSNGTHWFVTQRNFYEPQIITTDNTFVSGNCDVVIGIVNNTVYDPLQPELDSFKEELDKYFKNHTSPDVDLGDISGINASVVNIQKEIDRLNEVAKNLNESLIDLQELGKYEQYIKGSGRENLYFQGGGGSGYIPEAPRDGQAYVRKDGEWVLLSTFLGHHHHHHHH

SEQ ID NO: 2251 - protein, 1281 aa, Artificial Sequence
  Description of Artificial Sequence: Synthetic polypeptide
MGILPSPGMPALLSLVSLLSVLLMGCVAETGTQCVNLTTRTQLPPAYTNSFTRGVYYPDKIFRSSVLHLTQDLFLPFFSNVTWFHAIHVSGTNGTKRFDNPVLPFNDGVYFAATEKSNIIRGWIFGTTLDSKTQSLLIVNNATNVVIKVCNFQFCNDPFLGVYYHKNNKSWMESEFRVYSSANNCTFEYVSQPFLMDLEGKQGNFKNLREFVFKNIDGYFKIYSKHTPINLVRDLPQGFSALEPLVKLPIGINITRFQTLLALHRSYLTPGDSSSGWTAGAAAYYVGYLQPRTFLLKYNENGTITDAVDCALDPLSETKCTLKSFTVEKGIYQTSNFRVQPTESIVRFPNITNLCPFGEVFNATRFASVYAWNRKRISNCVADYSVLYNSASFSTFKCYGVSPTKLNDLCFTNVYADSFVIRGDEVRQIAPGQTGKIADYNYKLPDDFTGCVIAWNSNNLDSKVGGNYNYLYRLFRKSNLKPFERDISTEIYQAGSTPCNGVEGFNCYFPLQSYGFQPTNGVGYQPYRVVVLSFELLHAPATVCGPKKSTNLVKNKCVNFNFNGLTGTGVLTESNKKFLPFQQFGRDISDTTDAVRDPQTLEILDITPCSFGGVSVITPGTNTSNQVAVLYQDVNCTDVPVAIHADQLTPTWRVYSTGSNVFQTQAGCLIGAEHVNNSYECDIPIGAGICASYQTQTNSPSGAGSVASQSIIAYTMSLGAENSVAYSNNSIAIPTNFTISVTTEILPVSMTKTSVDCTMYICGDSTECSNLLLQYGSFCTQLNRALTGIAVEQDKNTQEVFAQVKQIYKTPPIKDFGGFNFSQILPDPSKPSKRSFIEDLLFNKVTLADAGFIKQYGDCLGDIAARDLICAQKFNGLTVLPPLLTDEMIAAYTAALLAGTATAGWTFGAGAALQIPFAMQMAYRFNGIGVTQNVLYENQKLIANQFNSAIGKIQDSLSSTASALGKLQDVVNQNAQALNTLVKQLSSNFGAISSVLNDILSRLDPPEAEVQIDRLITGRLQSLQTYVTQQLIRAAEIRASANLAATKMSECVLGQSKRVDFCGKGYHLMSFPQSAPHGVVFLHVTYVPAQEKNFTTAPAICHDGKAHFPREGVFVSNGTHWFVTQRNFYEPQIITTDNTFVSGNCDVVIGIVNNTVYDPLQPELDSFKEELDKYFKNHTSPDVDLGDISGINASVVNIQKEIDRLNEVAKNLNESLIDLQELGKYEQYIKGSGRENLYFQGGGGSGYIPEAPRDGQAYVRKDGEWVLLSTFLGHHHHHHHH

SEQ ID NO: 2252 - protein, 1281 aa, Artificial Sequence
  Description of Artificial Sequence: Synthetic polypeptide
MGILPSPGMPALLSLVSLLSVLLMGCVAETGTQCVNLTTRTQLPPAYTNSFTRGVYYPDKVFRSDVLHSTQDLFLPFFSNVTWFHAIHVSGTNGTKRFDNPVLPFNDGVYFASTEKSNIIRGWIFGTTLDSKTQSLLIVNNATNVVIKVCEFQFCENPFLGVYYHKNNKSWMEKEFRVYSSANNCTFEYVSQPFLMDLGGKQGNFKWLREFVFKNIDGYFKIYSKHTPINLVRDLPQGFSALEPLMDLPIGINITRFQTLLALHRSYLTPGDSSSGWTAGAAAYYVGYLQPRTFLLKYNENGTITDAVDCALDPLSETKCTLKSFTVEKGIYQTSNFRVQPTESIVRFPNITNLCPFGEVFNATRFASVYAWNRKRISNCVADYSVLYNSASFSTFKCYGVSPTKLNDLCFTNVYADSFVIRGDEVRQIAPGQTGKIADYNYKLPDDFTGCVIAWNSNNLDSKVGGNYNYLYRLFRKSNLKPFERDISTEIYQAGSTPCNGVEGFNCYFPLQSYGFQPTNGVGYQPYRVVVLSFELLHAPATVCGPKKSTNLVKNKCVNFNFNGLTGTGVLTESNKKFLPFQQFGRDIADNTDAVRDPQTLEILDITPCSFGGVSVITPGTNTSNQVAVLYQDVNCTEVPNAIHADQLTPTWRVYSTGSNVFQTRAGCLIGAEHVNNSYECDIPIGAGICASYQTQTNSPSGAGSVASQSIIAYTMSLGAENSVAYSNNSIAIPTNFTISVTTEILPVSMTKTSVDCTMYICGDSTECSNLLLQYGSFCTQLNRALQGIAQEQDKNTQEVFAQVKQIYKTPPIKDFGGFNFSQILPDPSKPSKRSFIEDLLFNKVTLADAGFIKQYGDCLGDIAARDLICAQKFNGLTVLPPLLTDEMIAQYTSALLAGTITSGWTFGAGAALQIPFAMQMAYRFNGIGVTQNVLYENQKLIANQFNQAIGKIQDSLSSTASALGKLQDVVNQNAQALNTLVKQLSSNFGAISSVLNDILSRLDPPEAEVQIDRLITGRLQSLQTYVTQQLIRAAEIRASANLAATKMSECVLGQSKRVDFCGKGYHLMSFPQSAPHGVVFLHVTYVPAQEKNFTTAPAICHDGKAFFPREGVFVSNGTQWFVTQRNFYEPQIITTDNTFVSGNCDVVIGIVNNTVYDPLQPELDSFKEELDKYFKNHTSPDVDLGDISGINASVVNIQKEIDRLNEVAKNLNESLIDLQELGKYEQYIKGSGRENLYFQGGGGSGYIPEAPRDGQAYVRKDGEWVLLSTFLGHHHHHHHH

SEQ ID NO: 2253 - protein, 1281 aa, Artificial Sequence
  Description of Artificial Sequence: Synthetic polypeptide
MGILPSPGMPALLSLVSLLSVLLMGCVAETGTQCVNLTTRTQLPPAYTNSFTRGVYYPDKVFRSSVLHSTQDLFLPFFSNVTWFHAIHVSGTNGTKRFDNPVLPFNDGVYFASTEKSNIIRGWIFGTTLDSKTQSLLIVNNATNVVIKVCEFQFCNDPFLGVYYHKNNKSWMESEFRVYSSANNCTFEYVSQPFLMDLEGKQGNFKNLREFVFKNIDGYFKIYSKHTPINLVRDLPQGFSALEPSVDLPIGINITRFQTLLALHRSYLTPGDSSSGWTAGAAAYYVGYLQPRTFLLKYNENGTITDAVDCALDPLSETKCTLKSFTVEKGIYQTSNFRVQPTESIVRFPNITNLCPFGEVFNATRFASVYAWNRKRISNCVADYSVLYNSASFSTFKCYGVSPTKLNDLCFTNVYADSFVIRGDEVRQIAPGQTGKIADYNYKLPDDFTGCVIAWNSNNLDSKVGGNYNYLYRLFRKSNLKPFERDISTEIYQAGSTPCNGVEGFNCYFPLQSYGFQPTNGVGYQPYRVVVLSFELLHAPATVCGPKKSTNLVKNKCVNFNFNGLTGTGVLTESNKKFLPFQQFGRDIADTTDAVRDPQTLEILDITPCSFGGVSVITPGTNTSNQVAVLYQDVNCTEVPVAIHADQLTPTWRVYSTGSNVFQTRAGCLIGAEHVNNSYECDIPIGAGICASYQTQTNSPSGAGSVASQSIIAYTMSLGAENSVAYSNNSIAIPTNFTISVTTEILPVSMTKTSVDCTMYICGDSTECSNLLLQYGSFCTQLNRALTGIAVEQDKNTQEVFAQVKQIYKTPPIKDFGGFNFSQILPDPSKPSKRSFIEDLLFNKVTLADAGFIKQYGDCLGDIAARDLICAQKFNGLTVLPPLLTDEMIAQYTSALLAGTITSGWTFGAGAALQIPFAMQMAYRFNGIGVTQNVLYENQKLIANQFNSAIGKIQDSLSSTASALGKLQDVVNQNAQALNTLVKQLSSNFGAISSVLNDILSRLDPPEAEVQIDRLITGRLQSLQTYVTQQLIRAAEIRASANLAATKMSECVLGQSKRVDFCGKGYHLMSFPQSAPHGVVFLHVTYVPAQEKNFTTAPAICHDGKAHFPREGVFVSNGTHWFVTQRNFYEPQIITTDNTFVSGNCDVVIGIVNNTVYDPLQPELDSFKEELDKYFKNHTSPDVDLGDISGINASVVNIQKEIDRLNEVAKNLNESLIDLQELGKYEQYIKGSGRENLYFQGGGGSGYIPEAPRDGQAYVRKDGEWVLLSTFLGHHHHHHHH

SEQ ID NO: 2254 - protein, 1281 aa, Artificial Sequence
  Description of Artificial Sequence: Synthetic polypeptide
MGILPSPGMPALLSLVSLLSVLLMGCVAETGTQCVNLTTRTQLPPAYTNSFTRGVYYPDKVFRSSVLHSTQDLFLPFFSNVTWFHAIHVSGTNGTKRFDNPVLPFNDGVYFASTEKSNIIRGWIFGTTLDSKTQSLLIVNNATNVVIKVCEFQFCNDPFLGVYYHKNNKSWMEREFRVYSSANNCTFEYVSQPFLMDLEGKQGNFKNLREFVFKNIDGYFKIYSKHTPINLVRDLPQGFSALEPLVDLPIGINITRFQTLLALHRSYLTPGDSSSGWTAGAAAYYVGYLQPRTFLLKYNENGTITDAVDCALDPLSETKCTLKSFTVEKGIYQTSNFRVQPTESIVRFPNITNLCPFGEVFNATRFASVYAWNRKRISNCVADYSVLYNSASFSTFKCYGVSPTKLNDLCFTNVYADSFVIRGDEVRQIAPGQTGKIADYNYKLPDDFTGCVIAWNSNNLDSKVGGNYNYLYRLFRKSNLKPFERDISTEIYQAGSTPCNGVEGFNCYFPLQSYGFQPTNGVGYQPYRVVVLSFELLHAPATVCGPKKSTNLVKNKCVNFNFNGLTGTGVLTESNKKFLPFQQFGRDIADTTDAVRDPQTLEILDITPCSFGGVSVITPGTNTSNQVAVLYQDVNCTEVPVAIHADQLTPTWRVYSTGSNVFQTRAGCLIGAEHVNNSYECDIPIGAGICASYQTQTNSPSGAGSVASQSIIAYTMSLGAENSVAYSNNSIAIPTNFTISVTTEILPVSMTKTSVDCTMYICGDSTECSNLLLQYGSFCTQLNRALTGIAVEQDKNTQEVFAQVKQIYKTPPIKDFGGFNFSQILPDPSKPSKRSFIEDLLFNKVTLADAGFIKQYGDCLGDIAARDLICAQKFNGLTVLPPLLTDEMIAQYTSALLAGTITSGWTFGAGAALQIPFAMQMAYRFNGIGVTQNVLYENQKLIANQFNSAIGKIQDSLSSTASALGKLQDVVNQNAQALNTLVKQLSSNFGAISSVLNDILSRLDPPEAEVQIDRLITGRLQSLQTYVTQQLIRAAEIRASANLAATKMSECVLGQSKRVDFCGKGYHLMSFPQSAPHGVVFLHVTYVPAQEKNFTTAPAICHDGKAHFPREGVFVSNGTHWFVTQRNFYEPQIITTDNTFVSGNCDVVIGIVNNTVYDPLQPELDSFKEELDKYFKNHTSPDVDLGDISGINASVVNIQKEIDRLNEVAKNLNESLIDLQELGKYEQYIKGSGRENLYFQGGGGSGYIPEAPRDGQAYVRKDGEWVLLSTFLGHHHHHHHH

SEQ ID NO: 2255 - protein, 1281 aa, Artificial Sequence
  Description of Artificial Sequence: Synthetic polypeptide
MGILPSPGMPALLSLVSLLSVLLMGCVAETGTQCVNLTTRTQLPPAYTNSFRRGVYYPDKIFRSNVLHSTQDLFLPFFSNVTWFHAIHVSGTNGTKRFDNPVLPFNDGVYFAATEKSNIIRGWIFGTTLDSKTQSLLIVNNATNVVIKVCEFQFCNDPFLGVYYHKNNKSWMESEFRVYSSANNCTFEYVSQPFLMDLEGKQGNFKHLREFVFKNIDGYFKIYSKWTPINLVRDLPQGFSPLEPLMKLPIGINITRFQTLLALHRSYLTPGDSSSGWTAGAAAYYVGYLQPRTFLLKYNENGTITDAVDCALDPLSETKCTLKSFTVEKGIYQTSNFRVQPTESIVRFPNITNLCPFGEVFNATRFASVYAWNRKRISNCVADYSVLYNSASFSTFKCYGVSPTKLNDLCFTNVYADSFVIRGDEVRQIAPGQTGKIADYNYKLPDDFTGCVIAWNSNNLDSKVGGNYNYLYRLFRKSNLKPFERDISTEIYQAGSTPCNGVEGFNCYFPLQSYGFQPTNGVGYQPYRVVVLSFELLHAPATVCGPKKSTNLVKNKCVNFNFNGLTGTGVLTESNKKFLPFQQFGRDIADTTDAVRDPQTLEILDITPCSFGGVSVITPGTNTSNQVAVLYQDVNCTEVPVAIHADQLTPTWRVYSTGSNVFQTRAGCLIGAEHVNNSYECDIPIGAGICASYQTQTNSPSGAGSVASQSIIAYTMSLGAENSVAYSNNSIAIPTNFTISVTTEILPVSMTKTSVDCTMYICGDSTECSNLLLQYGSFCTQLNRALTGIAVEQDKNTQEVFAQVKQIYKTPPIKDFGGFNFSQILPDPSKPSKRSFIEDLLFNKVTLADAGFIKQYGDCLGDIAARDLICAQKFNGLTVLPPLLTDEMIAQYTSALLAGTITSGWTFGAGAALQIPFAMQMAYRFNGIGVTQNVLYENQKLIANQFNSAIGKIQDSLSSTASALGKLQDVVNQNAQALNTLVKQLSSNFGAISSVLNDILSRLDPPEAEVQIDRLITGRLQSLQTYVTQQLIRAAEIRASANLAATKMSECVLGQSKRVDFCGKGYHLMSFPQSAPHGVVFLHVTYVPAQEKNFTTAPAICHDGKAHFPREGVFVSNGTHWFVTQRNFYEPQIITTDNTFVSGNCDVVIGIVNNTVYDPLQPELDSFKEELDKYFKNHTSPDVDLGDISGINASVVNIQKEIDRLNEVAKNLNESLIDLQELGKYEQYIKGSGRENLYFQGGGGSGYIPEAPRDGQAYVRKDGEWVLLSTFLGHHHHHHHH

SEQ ID NO: 2256 - protein, 1281 aa, Artificial Sequence
  Description of Artificial Sequence: Synthetic polypeptide
MGILPSPGMPALLSLVSLLSVLLMGCVAETGTQCVNLTTRTQLPPAYTNSFTRGVYYPDKVFRSSVLHSTQDLFLPFFSNVTWFHAIHVSGTNGTKRFDNPVLPFNDGVYFASTEKSNIIRGWIFGTTLDSKTQSLLIVNNATNVVIKVCEFQFCNDPFLGVYYHKNNKSWMESEFRVYSSANNCTFEYVSQPFLMDLEGKQGNFKNLREFVFKNIDGYFKIYSKHTPINLVRDLPQGFSALEPLWDLPIGINITRFQTLLALHRSYLTPGDSSSGWTAGAAAYYVGYLQPRTFLLKYNENGTITDAVDCALDPLSETKCTLKSFTVEKGIYQTSNFRVQPTESIVRFPNITNLCPFGEVFNATRFASVYAWNRKRISNCVADYSVLYNSASFSTFKCYGVSPTKLNDLCFTNVYADSFVIRGDEVRQIAPGQTGKIADYNYKLPDDFTGCVIAWNSNNLDSKVGGNYNYLYRLFRKSNLKPFERDISTEIYQAGSTPCNGVEGFNCYFPLQSYGFQPTNGVGYQPYRVVVLSFELLHAPATVCGPKKSTNLVKNKCVNFNFNGLTGTGVLTESNKKFLPFQQFGRDIADTTDAVRDPQTLEILDITPCSFGGVSVITPGTNTSNQVAVLYQDVNCTEVPVAIHADQLTPTWRVYSTGSNVFQTRAGCLIGAEHVNNSYECDIPIGAGICASYQTQTNSPSGAGSVASQSIIAYTMSLGAENSVAYSNNSIAIPTNFTISVTTEILPVSMTKTSVDCTMYICGDSTECSNLLLQYGSFCTQLNRALTGIAVEQDKNTQEVFAQVKQIYKTPPIKDFGGFNFSQILPDPSKPSKRSFIEDLLFNKVTLADAGFIKQYGDCLGDIAARDLICAQKFNGLTVLPPLLTDEMIAQYTSALLAGTITSGWTFGAGAALQIPFAMQMAYRFNGIGVTQNVLYENQKLIANQFNSAIGKIQDSLSSTASALGKLQDVVNQNAQALNTLVKQLSSNFGAISSVLNDILSRLDPPEAEVQIDRLITGRLQSLQTYVTQQLIRAAEIRASANLAATKMSECVLGQSKRVDFCGKGYHLMSFPQSAPHGVVFLHVTYVPAQEKNFTTAPAICHDGKAHFPREGVFVSNGTHWFVTQRNFYEPQIITTDNTFVSGNCDVVIGIVNNTVYDPLQPELDSFKEELDKYFKNHTSPDVDLGDISGINASVVNIQKEIDRLNEVAKNLNESLIDLQELGKYEQYIKGSGRENLYFQGGGGSGYIPEAPRDGQAYVRKDGEWVLLSTFLGHHHHHHHH

SEQ ID NO: 2257 - protein, 1281 aa, Artificial Sequence
  Description of Artificial Sequence: Synthetic polypeptide
MGILPSPGMPALLSLVSLLSVLLMGCVAETGTQCVNLTTRTQLPPAYTNSFTRGVYYPDKVFRSSVLHSTQDLFLPFFSNVTWFHAIHVSGTNGTKRFDNPVLPFNDGVYFASTEKSNIIRGWIFGTTLDSKTQSLLIVNNATNVVIKVCEFQFCNDPFLGVYYHKNNKSWMESEFRVYSSANNCTFEYVSRPFLMDLEGKQGNFKNLREFVFKNIDGYFKIYSKHTPINLVRDLPQGFSALEPLVDLPIGINITRFQTLLALHRSYLTPGDSSSGWTAGAAAYYVGYLQPRTFLLKYNENGTITDAVDCALDPLSETKCTLKSFTVEKGIYQTSNFRVQPTESIVRFPNITNLCPFGEVFNATRFASVYAWNRKRISNCVADYSVLYNSASFSTFKCYGVSPTKLNDLCFTNVYADSFVIRGDEVRQIAPGQTGKIADYNYKLPDDFTGCVIAWNSNNLDSKVGGNYNYLYRLFRKSNLKPFERDISTEIYQAGSTPCNGVEGFNCYFPLQSYGFQPTNGVGYQPYRVVVLSFELLHAPATVCGPKKSTNLVKNKCVNFNFNGLTGTGVLTESNKKFLPFQQFGRDIADTTDAVRDPQTLEILDITPCSFGGVSVITPGTNTSNQVAVLYQDVNCTEVPVAIHADQLTPTWRVYSTGSNVFQTRAGCLIGAEHVNNSYECDIPIGAGICASYQTQTNSPSGAGSVASQSIIAYTMSLGAENSVAYSNNSIAIPTNFTISVTTEILPVSMTKTSVDCTMYICGDSTECSNLLLQYGSFCTQLNRALTGIAVEQDKNTQEVFAQVKQIYKTPPIKDFGGFNFSQILPDPSKPSKRSFIEDLLFNKVTLADAGFIKQYGDCLGDIAARDLICAQKFNGLTVLPPLLTDEMIAQYTSALLAGTITSGWTFGAGAALQIPFAMQMAYRFNGIGVTQNVLYENQKLIANQFNSAIGKIQDSLSSTASALGKLQDVVNQNAQALNTLVKQLSSNFGAISSVLNDILSRLDPPEAEVQIDRLITGRLQSLQTYVTQQLIRAAEIRASANLAATKMSECVLGQSKRVDFCGKGYHLMSFPQSAPHGVVFLHVTYVPAQEKNFTTAPAICHDGKAHFPREGVFVSNGTHWFVTQRNFYEPQIITTDNTFVSGNCDVVIGIVNNTVYDPLQPELDSFKEELDKYFKNHTSPDVDLGDISGINASVVNIQKEIDRLNEVAKNLNESLIDLQELGKYEQYIKGSGRENLYFQGGGGSGYIPEAPRDGQAYVRKDGEWVLLSTFLGHHHHHHHH

SEQ ID NO: 2258 - protein, 1281 aa, Artificial Sequence
  Description of Artificial Sequence: Synthetic polypeptide
MGILPSPGMPALLSLVSLLSVLLMGCVAETGTQCVNLTTRTQLPPAYTNSFTRGVYYPDKVFRSSVLHSTQDLFLPFFSNVTWFHAIHVSGTNGTKRFDNPVLPFNDGVYFASTEKSNIIRGWIFGTTLDSKTQSLLIVNNATNVVIKVCEFQFCNDPFLGVYYHKNNKSWMESEFRVYSSANNCTFEYVSQPFLMDLEGKQGNFKNLREFVFKNIDGYFKIYSKHTPINLVRDLPQGFSALEPLVDLPIGINITRFQTLLALHRSYLTPGDSSSGWTAGAAAYYVGYLQPRTFLLKYNENGTITDAVDCALDPLSETKCTLKSFTVEKGIYQTSNFRVQPTESIVRFPNITNLCPFGEVFNATRFASVYAWNRKRISNCVADYSVLYNSASFSTFKCYGVSPTKLNDLCFTNVYADSFVIRGDEVRQIAPGQTGKIADYNYKLPDDFTGCVIAWNSNNLDSKVGGNYNYLYRLFRKSNLKPFERDISTEIYQAGSTPCNGVEGFNCYFPLQSYGFQPTNGVGYQPYRVVVLSFELLHAPATVCGPKKSTNLVKNKCVNFNFNGLTGTGVLTESNKKFLPFQQFGRDIADTTDAVRDPQTLEILDITPCSFGGVSVITPGTNTSNQVAVLYQDVNCTEVPVAIHADQLTPTWRVYSTGSNVFQTRAGCLIGAEHVNNSYECDIPIGAGICASYQTQTNSPSGAGSVASESIIAYTMSLGAENSVAYSNNSIAIPTNFTISVTTEILPVSMTKTSVDCTMYICGDSTECSNLLLQYGSFCTQLNRALTGIAVEQDKNTQEVFAQVKQIYKTPPIKDFGGFNFSQILPDPSKPSKRSFIEDLLFNKVTLADAGFIKQYGDCLGDIAARDLICAQKFNGLTVLPPLLTDEMIAQYTSALLAGTITSGWTFGAGAALQIPFAMQMAYRFNGIGVTQNVLYENQKLIANQFNSAIGKIQDSLSSTASALGKLQDVVNQNAQALNTLVKQLSSNFGAISSVLNDILSRLDPPEAEVQIDRLITGRLQSLQTYVTQQLIRAAEIRASANLAATKMSECVLGQSKRVDFCGKGYHLMSFPQSAPHGVVFLHVTYVPAQEKNFTTAPAICHDGKAHFPREGVFVSNGTHWFVTQRNFYEPQIITTDNTFVSGNCDVVIGIVNNTVYDPLQPELDSFKEELDKYFKNHTSPDVDLGDISGINASVVNIQKEIDRLNEVAKNLNESLIDLQELGKYEQYIKGSGRENLYFQGGGGSGYIPEAPRDGQAYVRKDGEWVLLSTFLGHHHHHHHH

SEQ ID NO: 2259 - protein, 1281 aa, Artificial Sequence
  Description of Artificial Sequence: Synthetic polypeptide
MGILPSPGMPALLSLVSLLSVLLMGCVAETGTQCVNLTTRTQLPPAYTNSFTRGVYYPDKVFRSSVLHSTQDLFLPFFSNVTWFHAIHVSGTNGTKRFDNPVLPFNDGVYFASTEKSNIIRGWIFGTTLDSKTQSLLIVNNATNVVIKVCEFQFCNDPFLGVYYHKNNKSWMESEFRVYSSANNCTFEYVSQPFLMDLEGKQGNFKNLREFVFKNIDGYFKIYSKHTPINLVRDLPQGFSALEPLVDLPIGINITRFQTLLALHRSYLTPGDSSSGWTAEAAAYYVGYLQPRTFLLKYNENGTITDAVDCALDPLSETKCTLKSFTVEKGIYQTSNFRVQPTESIVRFPNITNLCPFGEVFNATRFASVYAWNRKRISNCVADYSVLYNSASFSTFKCYGVSPTKLNDLCFTNVYADSFVIRGDEVRQIAPGQTGKIADYNYKLPDDFTGCVIAWNSNNLDSKVGGNYNYLYRLFRKSNLKPFERDISTEIYQAGSTPCNGVEGFNCYFPLQSYGFQPTNGVGYQPYRVVVLSFELLHAPATVCGPKKSTNLVKNKCVNFNFNGLTGTGVLTESNKKFLPFQQFGRDIADTTDAVRDPQTLEILDITPCSFGGVSVITPGTNTSNQVAVLYQDVNCTEVPVAIHADQLTPTWRVYSTGSNVFQTRAGCLIGAEHVNNSYECDIPIGAGICASYQTQTNSPSGAGSVASQSIIAYTMSLGAENSVAYSNNSIAIPTNFTISVTTEILPVSMTKTSVDCTMYICGDSTECSNLLLQYGSFCTQLNRALTGIAVEQDKNTQEVFAQVKQIYKTPPIKDFGGFNFSQILPDPSKPSKRSFIEDLLFNKVTLADAGFIKQYGDCLGDIAARDLICAQKFNGLTVLPPLLTDEMIAQYTSALLAGTITSGWTFGAGAALQIPFAMQMAYRFNGIGVTQNVLYENQKLIANQFNSAIGKIQDSLSSTASALGKLQDVVNQNAQALNTLVKQLSSNFGAISSVLNDILSRLDPPEAEVQIDRLITGRLQSLQTYVTQQLIRAAEIRASANLAATKMSECVLGQSKRVDFCGKGYHLMSFPQSAPHGVVFLHVTYVPAQEKNFTTAPAICHDGKAHFPREGVFVSNGTHWFVTQRNFYEPQIITTDNTFVSGNCDVVIGIVNNTVYDPLQPELDSFKEELDKYFKNHTSPDVDLGDISGINASVVNIQKEIDRLNEVAKNLNESLIDLQELGKYEQYIKGSGRENLYFQGGGGSGYIPEAPRDGQAYVRKDGEWVLLSTFLGHHHHHHHH

SEQ ID NO: 2260 - protein, 1281 aa, Artificial Sequence
  Description of Artificial Sequence: Synthetic polypeptide
MGILPSPGMPALLSLVSLLSVLLMGCVAETGTQCVNLTTRTQLPPAYTNSFTRGVYYPDKVFRSSVLHSTQDLFLPFFSNVTWFHAIHVSGTNGTKRFDNPVLPFNDGVYFASTEKSNIIRGWIFGTTLDSKTQSLLIVNNATNVVIKVCEFQFCNDPFLGVYYHKNNKSWMESEFRVYSSANNCTFEYVSQPFLMDLEGKQGNFKNLREFVFKNIDGYFKIYSKHTPINLVRDLPQGFSALEPLVDLPIGINITRFQTLLALSRSYLTPGDSSSGWTAGAAAYYVGYLQPRTFLLKYNENGTITDAVDCALDPLSETKCTLKSFTVEKGIYQTSNFRVQPTESIVRFPNITNLCPFGEVFNATRFASVYAWNRKRISNCVADYSVLYNSASFSTFKCYGVSPTKLNDLCFTNVYADSFVIRGDEVRQIAPGQTGKIADYNYKLPDDFTGCVIAWNSNNLDSKVGGNYNYLYRLFRKSNLKPFERDISTEIYQAGSTPCNGVEGFNCYFPLQSYGFQPTNGVGYQPYRVVVLSFELLHAPATVCGPKKSTNLVKNKCVNFNFNGLTGTGVLTESNKKFLPFQQFGRDIADTTDAVRDPQTLEILDITPCSFGGVSVITPGTNTSNQVAVLYQDVNCTEVPVAIHADQLTPTWRVYSTGSNVFQTRAGCLIGAEHVNNSYECDIPIGAGICASYQTQTNSPSGAGSVASQSIIAYTMSLGAENSVAYSNNSIAIPTNFTISVTTEILPVSMTKTSVDCTMYICGDSTECSNLLLQYGSFCTQLNRALTGIAVEQDKNTQEVFAQVKQIYKTPPIKDFGGFNFSQILPDPSKPSKRSFIEDLLFNKVTLADAGFIKQYGDCLGDIAARDLICAQKFNGLTVLPPLLTDEMIAQYTSALLAGTITSGWTFGAGAALQIPFAMQMAYRFNGIGVTQNVLYENQKLIANQFNSAIGKIQDSLSSTASALGKLQDVVNQNAQALNTLVKQLSSNFGAISSVLNDILSRLDPPEAEVQIDRLITGRLQSLQTYVTQQLIRAAEIRASANLAATKMSECVLGQSKRVDFCGKGYHLMSFPQSAPHGVVFLHVTYVPAQEKNFTTAPAICHDGKAHFPREGVFVSNGTHWFVTQRNFYEPQIITTDNTFVSGNCDVVIGIVNNTVYDPLQPELDSFKEELDKYFKNHTSPDVDLGDISGINASVVNIQKEIDRLNEVAKNLNESLIDLQELGKYEQYIKGSGRENLYFQGGGGSGYIPEAPRDGQAYVRKDGEWVLLSTFLGHHHHHHHH

SEQ ID NO: 2261 - protein, 1281 aa, Artificial Sequence
  Description of Artificial Sequence: Synthetic polypeptide
MGILPSPGMPALLSLVSLLSVLLMGCVAETGTQCVNLTTRTQLPPAYTNSFTRGVYYPDKVFRSSVLHSTQDLFLPFFSNVTWFHAIHVSGTNGTKRFDNPVLPFNDGVYFAATEKSNIIRGWIFGTTLDSKTQSLLIVNNATNVVIKVCEFQFCNDPFLGVYYHKNNKSWMESEFRVYSSANNCTFEYVSQPFLMDLEGKQGNFKNLREFVFKNIDGYFKIYSKHTPINLVRDLPQGFSALEPLVDLPIGINITRFQTLLALHRSYLTPGDSSSGWTAGAAAYFVGYLQPRTFLLKYNENGTITDAVDCALDPLSETKCTLKSFTVEKGIYQTSNFRVQPTESIVRFPNITNLCPFGEVFNATRFASVYAWNRKRISNCVADYSVLYNSASFSTFKCYGVSPTKLNDLCFTNVYADSFVIRGDEVRQIAPGQTGKIADYNYKLPDDFTGCVIAWNSNNLDSKVGGNYNYLYRLFRKSNLKPFERDISTEIYQAGSTPCNGVEGFNCYFPLQSYGFQPTNGVGYQPYRVVVLSFELLHAPATVCGPKKSTNLVKNKCVNFNFNGLTGTGVLTESNKKFLPFQQFGRDISDTTDAVRDPQTLEILDITPCSFGGVSVITPGTNTSNQVAVLYQDVNCTEVPVAIHADQLTPTWRVYSTGSNVFQTRAGCLIGAEHVNNSYECDIPIGAGICASYQTQTNSPSGAGSVASQSIIAYTMSLGAENSVAYSNNSIAIPTNFTISVTTEILPVSMTKTSVDCTMYICGDSTECSNLLLQYGSFCTQLNRALTGIAVEQDKNTQEVFAQVKQIYKTPPIKDFGGFNFSQILPDPSKPSKRSFIEDLLFNKVTLADAGFIKQYGDCLGDIAARDLICAQKFNGLTVLPPLLTDEMIAQYTSALLAGTITAGWTFGAGAALQIPFAMQMAYRFNGIGVTQNVLYENQKLIANQFNSAIGKIQDSLSSTASALGKLQDVVNQNAQALNTLVKQLSSNFGAISSVLNDILSRLDPPEAEVQIDRLITGRLQSLQTYVTQQLIRAAEIRASANLAATKMSECVLGQSKRVDFCGKGYHLMSFPQAAPHGVVFLHVTYVPAQEKNFTTAPAICHDGKAHFPREGVFVSNGTHWFVTQRNFYEPQIITTDNTFVSGNCDVVIGIVNNTVYDPLQPELDSFKEELDKYFKNHTSPDVDLGDISGINASVVNIQKEIDRLNEVAKNLNESLIDLQELGKYEQYIKGSGRENLYFQGGGGSGYIPEAPRDGQAYVRKDGEWVLLSTFLGHHHHHHHH

SEQ ID NO: 2262 - protein, 1281 aa, Artificial Sequence
  Description of Artificial Sequence: Synthetic polypeptide
MGILPSPGMPALLSLVSLLSVLLMGCVAETGTQCVNLTTRTQLPPAYTNSFTRGVYYPDKVFRSSVLHSTQDLFLPFFSNVTWFHAIHVSGTNGTKRFDNPVLPFNDGVYFASTEKSNIIRGWIFGSTLDSKTQSLLIVNNATNVVIKVCEFQFCDDPFLGVYYHKNNKSWMETEFRVYSSANNCTFEYVSQPFLMDLEGKQGNFKNLREFVFKNIDGYFKIYSKHTPINLVRDLPQGFSALEPLVDLPIGINITRFQTLLALHRSYLTPGDSSSGWTAGAAAYYVGYLQPRTFLLKYNENGTITDAVDCALDPLSETKCTLKSFTVEKGIYQTSNFRVQPTESIVRFPNITNLCPFGEVFNATRFASVYAWNRKRISNCVADYSVLYNSASFSTFKCYGVSPTKLNDLCFTNVYADSFVIRGDEVRQIAPGQTGKIADYNYKLPDDFTGCVIAWNSNNLDSKVGGNYNYLYRLFRKSNLKPFERDISTEIYQAGSTPCNGVEGFNCYFPLQSYGFQPTNGVGYQPYRVVVLSFELLHAPATVCGPKKSTNLVKNKCVNFNFNGLTGTGVLTESNKKFLPFQQFGRDIADTTDAVRDPQTLEILDITPCSFGGVSVITPGTNTSNQVAVLYQDVNCTEVPVAIHADQLTPTWRVYSTGSNVFQTRAGCLIGAEHVNNSYECDIPIGAGICASYQTQTNSPSGAGSVASQSIIAYTMSLGAENSVAYSNNSIAIPTNFTISVTTEILPVSMTKTSVDCTMYICGDSTECSNLLLQYGSFCTQLNRALTGIAVEQDKNTQEVFAQVKQIYKTPPIKDFGGFNFSQILPDPSKPSKRSFIEDLLFNKVTLADAGFIKQYGDCLGDIAARDLICAQKFNGLTVLPPLLTDEMIAQYTSALLAGTITSGWTFGAGAALQIPFAMQMAYRFNGIGVTQNVLYENQKLIANQFNSAIGKIQDSLSSTASALGKLQDVVNQNAQALNTLVKQLSSNFGAISSVLNDILSRLDPPEAEVQIDRLITGRLQSLQTYVTQQLIRAAEIRASANLAATKMSECVLGQSKRVDFCGKGYHLMSFPQSAPHGVVFLHVTYVPAQEKNFTTAPAICHDGKAHFPREGVFVSNGTHWFVTQRNFYEPQIITTDNTFVSGNCDVVIGIVNNTVYDPLQPELDSFKEELDKYFKNHTSPDVDLGDISGINASVVNIQKEIDRLNEVAKNLNESLIDLQELGKYEQYIKGSGRENLYFQGGGGSGYIPEAPRDGQAYVRKDGEWVLLSTFLGHHHHHHHH

SEQ ID NO: 2263 - protein, 1281 aa, Artificial Sequence
  Description of Artificial Sequence: Synthetic polypeptide
MGILPSPGMPALLSLVSLLSVLLMGCVAETGTQCVNLTTRTQLPPAYTNSFTRGVYYPDKVFRSSVLHSTQDLFLPFFSNVTWFHAIHVSGTNGTKRFDNPVLPFNDGVYFASTEKSNIIRGWIFGTTLDSKTQSLLIVNNATNVVIKVCEFQFCNDPFLGVYYHKNNKSWMESEFRVYSSANNCTFEYVSQPFLMDLEGKQGNFKNLREFVFKNIDGYFKIYSKHTPINLVRDLPQGFSALEPLTDLPIGINITRFQTLLALHRSYLTPGDSSSGWTAGAAAYYVGYLQPRTFLLKYNENGTITDAVDCALDPLSETKCTLKSFTVEKGIYQTSNFRVQPTESIVRFPNITNLCPFGEVFNATRFASVYAWNRKRISNCVADYSVLYNSASFSTFKCYGVSPTKLNDLCFTNVYADSFVIRGDEVRQIAPGQTGKIADYNYKLPDDFTGCVIAWNSNNLDSKVGGNYNYLYRLFRKSNLKPFERDISTEIYQAGSTPCNGVEGFNCYFPLQSYGFQPTNGVGYQPYRVVVLSFELLHAPATVCGPKKSTNLVKNKCVNFNFNGLTGTGVLTESNKKFLPFQQFGRDIADTTDAVRDPQTLEILDITPCSFGGVSVITPGTNTSNQVAVLYQDVNCTEVPVAIHADQLTPTWRVYSTGSNVFQTRAGCLIGAEHVNNSYECDIPIGAGICASYQTQTNSPSGAGSVASQSIIAYTMSLGAENSVAYSNNSIAIPTNFTISVTTEILPVSMTKTSVDCTMYICGDSTECSNLLLQYGSFCTQLNRALTGIAVEQDKNTQEVFAQVKQIYKTPPIKDFGGFNFSQILPDPSKPSKRSFIEDLLFNKVTLADAGFIKQYGDCLGDIAARDLICAQKFNGLTVLPPLLTDEMIAQYTSALLAGTITSGWTFGAGAALQIPFAMQMAYRFNGIGVTQNVLYENQKLIANQFNSAIGKIQDSLSSTASALGKLQDVVNQNAQALNTLVKQLSSNFGAISSVLNDILSRLDPPEAEVQIDRLITGRLQSLQTYVTQQLIRAAEIRASANLAATKMSECVLGQSKRVDFCGKGYHLMSFPQSAPHGVVFLHVTYVPAQEKNFTTAPAICHDGKAHFPREGVFVSNGTHWFVTQRNFYEPQIITTDNTFVSGNCDVVIGIVNNTVYDPLQPELDSFKEELDKYFKNHTSPDVDLGDISGINASVVNIQKEIDRLNEVAKNLNESLIDLQELGKYEQYIKGSGRENLYFQGGGGSGYIPEAPRDGQAYVRKDGEWVLLSTFLGHHHHHHHH

SEQ ID NO: 2264 - protein, 1281 aa, Artificial Sequence
  Description of Artificial Sequence: Synthetic polypeptide
MGILPSPGMPALLSLVSLLSVLLMGCVAETGTQCVNLTTRTQLPPAYTNSSTRGVYYPDKVFRSSVLHSTQDLFLPFFSNVTWFHAIHVSGTNGTKRFDNPVLPFNDGVYFASTEKSNIIRGWIFGTTLDSKTQSLLIVNNATNVVIKVCEFQFCNDPFLGVYYHKNNKSWMESEFRVYSSANNCTFEYVSQPFLMDLEGKQGNFKNLREFVFKNIDGYFKIYSKHTPINLVRDLPQGFSALEPLVDLPIGINITRFQTLLALHRSYLTPGDSSSGWTAGAAAYYVGYLQPRTFLLKYNENGTITDAVDCALDPLSETKCTLKSFTVEKGIYQTSNFRVQPTESIVRFPNITNLCPFGEVFNATRFASVYAWNRKRISNCVADYSVLYNSASFSTFKCYGVSPTKLNDLCFTNVYADSFVIRGDEVRQIAPGQTGKIADYNYKLPDDFTGCVIAWNSNNLDSKVGGNYNYLYRLFRKSNLKPFERDISTEIYQAGSTPCNGVEGFNCYFPLQSYGFQPTNGVGYQPYRVVVLSFELLHAPATVCGPKKSTNLVKNKCVNFNFNGLTGTGVLTESNKKFLPFQQFGRDIADTTDAVRDPQTLEILDITPCSFGGVSVITPGTNTSNQVAVLYQDVNCTEVPVAIHADQLTPTWRVYSTGSNVFQTRAGCLIGAEHVNNSYECDIPIGAGICASYQTQTNSPSGAGSVASQSIIAYTMSLGAENSVAYSNNSIAIPTNFTISVTTEILPVSMTKTSVDCTMYICGDSTECSNLLLQYGSFCTQLNRALTGIAVEQDKNTQEVFAQVKQIYKTPPIKDFGGFNFSQILPDPSKPSKRSFIEDLLFNKVTLADAGFIKQYGDCLGDIAARDLICAQKFNGLTVLPPLLTDEMIAQYTSALLAGTITSGWTFGAGAALQIPFAMQMAYRFNGIGVTQNVLYENQKLIANQFNSAIGKIQDSLSSTASALGKLQDVVNQNAQALNTLVKQLSSNFGAISSVLNDILSRLDPPEAEVQIDRLITGRLQSLQTYVTQQLIRAAEIRASANLAATKMSECVLGQSKRVDFCGKGYHLMSFPQSAPHGVVFLHVTYVPAQEKNFTTAPAICHDGKAHFPREGVFVSNGTHWFVTQRNFYEPQIITTDNTFVSGNCDVVIGIVNNTVYDPLQPELDSFKEELDKYFKNHTSPDVDLGDISGINASVVNIQKEIDRLNEVAKNLNESLIDLQELGKYEQYIKGSGRENLYFQGGGGSGYIPEAPRDGQAYVRKDGEWVLLSTFLGHHHHHHHH

SEQ ID NO: 2265 - protein, 1281 aa, Artificial Sequence
  Description of Artificial Sequence: Synthetic polypeptide
MGILPSPGMPALLSLVSLLSVLLMGCVAETGTQCVNLTTRTQLPPAYTNSFTRGVYYPDKVFRSSVLHSTQDLFLPFFSNVTWFHAIHVSGTNGTKRFDNPVLPFNDGVYFASTEKSNIIRGWIFGTTLDSKTQSLLIVNNATNVVIKVCEFQFCNDPFLGVYYHKNNKSWMESEFRVYSSANNCTFEYVSQPFLMDLEGKQGNFKNLREFVFKNIDGYFKIYSKHTPINLVRDLPQGFSALEPLFDLPIGINITRFQTLLALHRSYLTPGDSSSGWTAGAAAYYVGYLQPRTFLLKYNENGTITDAVDCALDPLSETKCTLKSFTVEKGIYQTSNFRVQPTESIVRFPNITNLCPFGEVFNATRFASVYAWNRKRISNCVADYSVLYNSASFSTFKCYGVSPTKLNDLCFTNVYADSFVIRGDEVRQIAPGQTGKIADYNYKLPDDFTGCVIAWNSNNLDSKVGGNYNYLYRLFRKSNLKPFERDISTEIYQAGSTPCNGVEGFNCYFPLQSYGFQPTNGVGYQPYRVVVLSFELLHAPATVCGPKKSTNLVKNKCVNFNFNGLTGTGVLTESNKKFLPFQQFGRDIADTTDAVRDPQTLEILDITPCSFGGVSVITPGTNTSNQVAVLYQDVNCTEVPVAIHADQLTPTWRVYSTGSNVFQTRAGCLIGAEHVNNSYECDIPIGAGICASYQTQTNSPSGAGSVASQSIIAYTMSLGAENSVAYSNNSIAIPTNFTISVTTEILPVSMTKTSVDCTMYICGDSTECSNLLLQYGSFCTQLNRALTGIAVEQDKNTQEVFAQVKQIYKTPPIKDFGGFNFSQILPDPSKPSKRSFIEDLLFNKVTLADAGFIKQYGDCLGDIAARDLICAQKFNGLTVLPPLLTDEMIAQYTSALLAGTITSGWTFGAGAALQIPFAMQMAYRFNGIGVTQNVLYENQKLIANQFNSAIGKIQDSLSSTASALGKLQDVVNQNAQALNTLVKQLSSNFGAISSVLNDILSRLDPPEAEVQIDRLITGRLQSLQTYVTQQLIRAAEIRASANLAATKMSECVLGQSKRVDFCGKGYHLMSFPQSAPHGVVFLHVTYVPAQEKNFTTAPAICHDGKAHFPREGVFVSNGTHWFVTQRNFYEPQIITTDNTFVSGNCDVVIGIVNNTVYDPLQPELDSFKEELDKYFKNHTSPDVDLGDISGINASVVNIQKEIDRLNEVAKNLNESLIDLQELGKYEQYIKGSGRENLYFQGGGGSGYIPEAPRDGQAYVRKDGEWVLLSTFLGHHHHHHHH

SEQ ID NO: 2266 - protein, 1281 aa, Artificial Sequence
  Description of Artificial Sequence: Synthetic polypeptide
MGILPSPGMPALLSLVSLLSVLLMGCVAETGTQCVNLTTRTQLPPAYTNSFTRGVYYPDKVFRSSVLHSTQDLFLPFFSNVTWFHAIHVSGTNGTKRFDNPVLPFNDGVYFASTEKSNIIRGWIFGTTLDSKTQSLLIVNNATNVVIKVCEFQFCNDPFLGVYYHKNNKSWMESEFRVYSSANNCTFEYVSQPFLMDLEGKQGNFKNLREFVFKNIDGYFKIYSKHTPINLVRDLPQGFSALEPLVDLPIGINITRFQTLLALHRSYLTPGDSSSGWTAGAAAYYVGYLQPRTFLLKYNENGTITDAVDCALDPLSETKCTLKSFTVEKGIYQTSNFRVQPTESIVRFPNITNLCPFGEVFNATRFASVYAWNRKRISNCVADYSVLYNSASFSTFKCYGVSPTKLNDLCFTNVYADSFVIRGDEVRQIAPGQTGKIADYNYKLPDDFTGCVIAWNSNNLDSKVGGNYNYLYRLFRKSNLKPFERDISTEIYQAGSTPCNGVEGFNCYFPLQSYGFQPTNGVGYQPYRVVVLSFELLHAPATVCGPKKSTNLVKNKCVNFNFNGLTGTGVLTESNKKFLPFQQFGRDIADFTDAVRDPQTLEILDITPCSFGGVSVITPGTNTSNQVAVLYQDVNCTEVPVAIHADQLTPTWRVYSTGSNVFQTRAGCLIGAEHVNNSYECDIPIGAGICASYQTQTNSPSGAGSVASQSIIAYTMSLGAENSVAYSNNSIAIPTNFTISVTTEILPVSMTKTSVDCTMYICGDSTECSNLLLQYGSFCTQLNRALTGIAVEQDKNTQEVFAQVKQIYKTPPIKDFGGFNFSQILPDPSKPSKRSFIEDLLFNKVTLADAGFIKQYGDCLGDIAARDLICAQKFNGLTVLPPLLTDEMIAQYTSALLAGTITSGWTFGAGAALQIPFAMQMAYRFNGIGVTQNVLYENQKLIANQFNSAIGKIQDSLSSTASALGKLQDVVNQNAQALNTLVKQLSSNFGAISSVLNDILSRLDPPEAEVQIDRLITGRLQSLQTYVTQQLIRAAEIRASANLAATKMSECVLGQSKRVDFCGKGYHLMSFPQSAPHGVVFLHVTYVPAQEKNFTTAPAICHDGKAHFPREGVFVSNGTHWFVTQRNFYEPQIITTDNTFVSGNCDVVIGIVNNTVYDPLQPELDSFKEELDKYFKNHTSPDVDLGDISGINASVVNIQKEIDRLNEVAKNLNESLIDLQELGKYEQYIKGSGRENLYFQGGGGSGYIPEAPRDGQAYVRKDGEWVLLSTFLGHHHHHHHH

SEQ ID NO: 2267 - protein, 1281 aa, Artificial Sequence
  Description of Artificial Sequence: Synthetic polypeptide
MGILPSPGMPALLSLVSLLSVLLMGCVAETGTQCVNLTTRTQLPPAYTNSFTRGVYYPDKIFRSSVLHLTQDLFLPFFSNVTWFHAIHVSGTNGTKRFDNPVLPFNDGVYFAATEKSNIIRGWIFGTTLDSKTQSLLIVNNATNVVIKVCEFQFCNDPFLGVYYHKNNKSWMESEFRVYSSANNCTFEYVSQPFLMDLEGKQGNFKNLREFVFKNIDGYFKIYSKHTPINLVRDLPQGFSALEPLVKLPIGINITRFQTLLALHRSYLTPGDSSSGWTAGAAAYYVGYLQPRTFLLKYNENGTITDAVDCALDPLSETKCTLKSFTVEKGIYQTSNFRVQPTESIVRFPNITNLCPFGEVFNATRFASVYAWNRKRISNCVADYSVLYNSASFSTFKCYGVSPTKLNDLCFTNVYADSFVIRGDEVRQIAPGQTGKIADYNYKLPDDFTGCVIAWNSNNLDSKVGGNYNYLYRLFRKSNLKPFERDISTEIYQAGSTPCNGVEGFNCYFPLQSYGFQPTNGVGYQPYRVVVLSFELLHAPATVCGPKKSTNLVKNKCVNFNFNGLTGTGVLTESNKKFLPFQQFGRDISDTTDAVRDPQTLEILDITPCSFGGVSVITPGTNTSNQVAVLYQDVNCTDVPVAIHADQLTPTWRVYSTGSNVFQTQAGCLIGAEHVNNSYECDIPIGAGICASYQTQTNSPSGAGSVASQSIIAYTMSLGAENSVAYSNNSIAIPTNFTISVTTEILPVSMTKTSVDCTMYICGDSTECSNLLLQYGSFCTQLNRALTGIAVEQDKNTQEVFAQVKQIYKTPPIKDFGGFNFSQILPDPSKPSKRSFIEDLLFNKVTLADAGFIKQYGDCLGDIAARDLICAQKFNGLTVLPPLLTDEMIAQYTAALLAGTATAGWTFGAGAALQIPFAMQMAYRFNGIGVTQNVLYENQKLIANQFNSAIGKIQDSLSSTASALGKLQDVVNQNAQALNTLVKQLSSNFGAISSVLNDILSRLDPPEAEVQIDRLITGRLQSLQTYVTQQLIRAAEIRASANLAATKMSECVLGQSKRVDFCGKGYHLMSFPQSAPHGVVFLHVTYVPAQEKNFTTAPAICHDGKAHFPREGVFVSNGTHWFVTQRNFYEPQIITTDNTFVSGNCDVVIGIVNNTVYDPLQPELDSFKEELDKYFKNHTSPDVDLGDISGINASVVNIQKEIDRLNEVAKNLNESLIDLQELGKYEQYIKGSGRENLYFQGGGGSGYIPEAPRDGQAYVRKDGEWVLLSTFLGHHHHHHHH

SEQ ID NO: 2268 - protein, 1281 aa, Artificial Sequence
  Description of Artificial Sequence: Synthetic polypeptide
MGILPSPGMPALLSLVSLLSVLLMGCVAETGTQCVNLTTRTQLPPAYTNSFTRGVYYPDKVFRSSVLHSTQDLFLPFFSNVTWFHAIHVSGTNGTKRFDNPVLPFNDGVYFASTEKSNIIRGWIFGTTLDSKTQSLLIVNNATNVVIKVCEFQFCNDPFLGVYYHKNNKSWMESEFRVYSSANNCTFEYVSQPFLMDLEGKQGNFKNLREFVFKNIDGYFKIYSKHTPINLVRDLPQGFSALEPLLDLPIGINITRFQTLLALHRSYLTPGDSSSGWTAGAAAYYVGYLQPRTFLLKYNENGTITDAVDCALDPLSETKCTLKSFTVEKGIYQTSNFRVQPTESIVRFPNITNLCPFGEVFNATRFASVYAWNRKRISNCVADYSVLYNSASFSTFKCYGVSPTKLNDLCFTNVYADSFVIRGDEVRQIAPGQTGKIADYNYKLPDDFTGCVIAWNSNNLDSKVGGNYNYLYRLFRKSNLKPFERDISTEIYQAGSTPCNGVEGFNCYFPLQSYGFQPTNGVGYQPYRVVVLSFELLHAPATVCGPKKSTNLVKNKCVNFNFNGLTGTGVLTESNKKFLPFQQFGRDIADTTDAVRDPQTLEILDITPCSFGGVSVITPGTNTSNQVAVLYQDVNCTEVPVAIHADQLTPTWRVYSTGSNVFQTRAGCLIGAEHVNNSYECDIPIGAGICASYQTQTNSPSGAGSVASQSIIAYTMSLGAENSVAYSNNSIAIPTNFTISVTTEILPVSMTKTSVDCTMYICGDSTECSNLLLQYGSFCTQLNRALTGIAVEQDKNTQEVFAQVKQIYKTPPIKDFGGFNFSQILPDPSKPSKRSFIEDLLFNKVTLADAGFIKQYGDCLGDIAARDLICAQKFNGLTVLPPLLTDEMIAQYTSALLAGTITSGWTFGAGAALQIPFAMQMAYRFNGIGVTQNVLYENQKLIANQFNSAIGKIQDSLSSTASALGKLQDVVNQNAQALNTLVKQLSSNFGAISSVLNDILSRLDPPEAEVQIDRLITGRLQSLQTYVTQQLIRAAEIRASANLAATKMSECVLGQSKRVDFCGKGYHLMSFPQSAPHGVVFLHVTYVPAQEKNFTTAPAICHDGKAHFPREGVFVSNGTHWFVTQRNFYEPQIITTDNTFVSGNCDVVIGIVNNTVYDPLQPELDSFKEELDKYFKNHTSPDVDLGDISGINASVVNIQKEIDRLNEVAKNLNESLIDLQELGKYEQYIKGSGRENLYFQGGGGSGYIPEAPRDGQAYVRKDGEWVLLSTFLGHHHHHHHH

SEQ ID NO: 2269 - protein, 1281 aa, Artificial Sequence
  Description of Artificial Sequence: Synthetic polypeptide
MGILPSPGMPALLSLVSLLSVLLMGCVAETGTQCVNLTTRTQLPPAYTNSFTRGVYYPDKVFRSSVLHSTQDLFLPFFSNVTWFHAIHVSGTNGTKRFDNPVLPFNDGVYFASTEKSNIIRGWIFGTTLDSKTQSLLIVNNATNVVIKVCEFQFCNDPFLGVYYHKNNKSWMESEFRVYSSANNCTFEYVSQPFLMDLEGKQGNFKNLREFVFKNIDGYFKIYSKHTPINLVRDLPQGFSALRPLVDLPIGINITRFQTLLALHRSYLTPGDSSSGWTAGAAAYYVGYLQPRTFLLKYNENGTITDAVDCALDPLSETKCTLKSFTVEKGIYQTSNFRVQPTESIVRFPNITNLCPFGEVFNATRFASVYAWNRKRISNCVADYSVLYNSASFSTFKCYGVSPTKLNDLCFTNVYADSFVIRGDEVRQIAPGQTGKIADYNYKLPDDFTGCVIAWNSNNLDSKVGGNYNYLYRLFRKSNLKPFERDISTEIYQAGSTPCNGVEGFNCYFPLQSYGFQPTNGVGYQPYRVVVLSFELLHAPATVCGPKKSTNLVKNKCVNFNFNGLTGTGVLTESNKKFLPFQQFGRDIADTTDAVRDPQTLEILDITPCSFGGVSVITPGTNTSNQVAVLYQDVNCTEVPVAIHADQLTPTWRVYSTGSNVFQTRAGCLIGAEHVNNSYECDIPIGAGICASYQTQTNSPSGAGSVASQSIIAYTMSLGAENSVAYSNNSIAIPTNFTISVTTEILPVSMTKTSVDCTMYICGDSTECSNLLLQYGSFCTQLNRALTGIAVEQDKNTQEVFAQVKQIYKTPPIKDFGGFNFSQILPDPSKPSKRSFIEDLLFNKVTLADAGFIKQYGDCLGDIAARDLICAQKFNGLTVLPPLLTDEMIAQYTSALLAGTITSGWTFGAGAALQIPFAMQMAYRFNGIGVTQNVLYENQKLIANQFNSAIGKIQDSLSSTASALGKLQDVVNQNAQALNTLVKQLSSNFGAISSVLNDILSRLDPPEAEVQIDRLITGRLQSLQTYVTQQLIRAAEIRASANLAATKMSECVLGQSKRVDFCGKGYHLMSFPQSAPHGVVFLHVTYVPAQEKNFTTAPAICHDGKAHFPREGVFVSNGTHWFVTQRNFYEPQIITTDNTFVSGNCDVVIGIVNNTVYDPLQPELDSFKEELDKYFKNHTSPDVDLGDISGINASVVNIQKEIDRLNEVAKNLNESLIDLQELGKYEQYIKGSGRENLYFQGGGGSGYIPEAPRDGQAYVRKDGEWVLLSTFLGHHHHHHHH

SEQ ID NO: 2270 - protein, 1281 aa, Artificial Sequence
  Description of Artificial Sequence: Synthetic polypeptide
MGILPSPGMPALLSLVSLLSVLLMGCVAETGTQCVNLTTRTQLPPAYTNSFTRGVYYPDKVFRSSVLHSTQDLFLPFFSNVTWFHAIHVSGTNGTKRFDNPVLPFNDGVYFASTEKSNIIRGWIFGTTLDSKTQSLLIVNNATNVVIKVCEFQFCNDPFLGVYYHKNNKSWMEVEFRVYSSANNCTFEYVSQPFLMDLEGKQGNFKNLREFVFKNIDGYFKIYSKHTPINLVRDLPQGFSALEPLVDLPIGINITRFQTLLALHRSYLTPGDSSSGWTAGAAAYYVGYLQPRTFLLKYNENGTITDAVDCALDPLSETKCTLKSFTVEKGIYQTSNFRVQPTESIVRFPNITNLCPFGEVFNATRFASVYAWNRKRISNCVADYSVLYNSASFSTFKCYGVSPTKLNDLCFTNVYADSFVIRGDEVRQIAPGQTGKIADYNYKLPDDFTGCVIAWNSNNLDSKVGGNYNYLYRLFRKSNLKPFERDISTEIYQAGSTPCNGVEGFNCYFPLQSYGFQPTNGVGYQPYRVVVLSFELLHAPATVCGPKKSTNLVKNKCVNFNFNGLTGTGVLTESNKKFLPFQQFGRDIADTTDAVRDPQTLEILDITPCSFGGVSVITPGTNTSNQVAVLYQDVNCTEVPVAIHADQLTPTWRVYSTGSNVFQTRAGCLIGAEHVNNSYECDIPIGAGICASYQTQTNSPSGAGSVASQSIIAYTMSLGAENSVAYSNNSIAIPTNFTISVTTEILPVSMTKTSVDCTMYICGDSTECSNLLLQYGSFCTQLNRALTGIAVEQDKNTQEVFAQVKQIYKTPPIKDFGGFNFSQILPDPSKPSKRSFIEDLLFNKVTLADAGFIKQYGDCLGDIAARDLICAQKFNGLTVLPPLLTDEMIAQYTSALLAGTITSGWTFGAGAALQIPFAMQMAYRFNGIGVTQNVLYENQKLIANQFNSAIGKIQDSLSSTASALGKLQDVVNQNAQALNTLVKQLSSNFGAISSVLNDILSRLDPPEAEVQIDRLITGRLQSLQTYVTQQLIRAAEIRASANLAATKMSECVLGQSKRVDFCGKGYHLMSFPQSAPHGVVFLHVTYVPAQEKNFTTAPAICHDGKAHFPREGVFVSNGTHWFVTQRNFYEPQIITTDNTFVSGNCDVVIGIVNNTVYDPLQPELDSFKEELDKYFKNHTSPDVDLGDISGINASVVNIQKEIDRLNEVAKNLNESLIDLQELGKYEQYIKGSGRENLYFQGGGGSGYIPEAPRDGQAYVRKDGEWVLLSTFLGHHHHHHHH

SEQ ID NO: 2271 - protein, 1281 aa, Artificial Sequence
  Description of Artificial Sequence: Synthetic polypeptide
MGILPSPGMPALLSLVSLLSVLLMGCVAETGTQCVNLTTRTQLPPAYTNSFTRGVYYPDKVFRSSVLHSTQDLFLPFFSNVTWFHAIHVSGTNGTKRFDNPVLPFNDGVYFASTEKSNIIRGWIFGTTLDSKTQSLLIVNNATNVVIKVCEFQFCNDPFLGVYYHKNNKSWMESEFRVYSSANNCTFEYVSQPFLMDLEGKQGNFKNLREFVFKNIDGYFKIYSKHTPINLVRDLPQGFSALEPLVDLPIGINITRFQTLLALHRSYLTPGDSSSGWTAGAAAYYVGYLQPRTFLLKYNENGTITDAVDCALDPLSETKCTLKSFTVEKGIYQTSNFRVQPTESIVRFPNITNLCPFGEVFNATRFASVYAWNRKRISNCVADYSVLYNSASFSTFKCYGVSPTKLNDLCFTNVYADSFVIRGDEVRQIAPGQTGKIADYNYKLPDDFTGCVIAWNSNNLDSKVGGNYNYLYRLFRKSNLKPFERDISTEIYQAGSTPCNGVEGFNCYFPLQSYGFQPTNGVGYQPYRVVVLSFELLHAPATVCGPKKSTNLVKNKCVNFNFNGLTGTGVLTESNKKFLPFQQFGRDIADTTDAVRDPQTLEILDITPCSFGGVSVITPGTNTSNQVAVLYQDVNCTEVPVAIHADQLTPTWRVYSTGSNVFQTRAGCLIGAEHVNNSYECDIPIGAGICASYQTQTNSPSGAGSVASQSIIAYTMSLGAENSVAYSNNSIAIPTNFTISVTTEILPVSMTKTSVDCTMYICGDSTECSNLLLQYGSFCTQLNRALTGIAVEQDKNTQEVFAQVKQIYKTPPIKDFGGFNFSQILPDPSKPSKRSFIEDLLFNKVTLADAGFIKQYGDCLGDIAARDLICAQKFNGLTVLPPLLTDEMIAQYTSALLAGTITSGWTFGAGAALQIPFAMQMAYRFNGIGVTQNVLYENQKLIANQFNSAIGKIQDSLSSTSSALGKLQDVVNQNAQALNTLVKQLSSNFGAISSVLNDILSRLDPPEAEVQIDRLITGRLQSLQTYVTQQLIRAAEIRASANLAATKMSECVLGQSKRVDFCGKGYHLMSFPQSAPHGVVFLHVTYVPAQEKNFTTAPAICHDGKAHFPREGVFVSNGTHWFVTQRNFYEPQIITTDNTFVSGNCDVVIGIVNNTVYDPLQPELDSFKEELDKYFKNHTSPDVDLGDISGINASVVNIQKEIDRLNEVAKNLNESLIDLQELGKYEQYIKGSGRENLYFQGGGGSGYIPEAPRDGQAYVRKDGEWVLLSTFLGHHHHHHHH

SEQ ID NO: 2272 - protein, 1281 aa, Artificial Sequence
  Description of Artificial Sequence: Synthetic polypeptide
MGILPSPGMPALLSLVSLLSVLLMGCVAETGTQCVNLTTRTQLPPAYTNSFTRGVYYPDKVFRSSVLHSTQDLFLPFFSNVTWFHAIHVSGTNGTKRFDNPVLPFNDGVYFASTEKSNIIRGWIFGTTLDSKTQSLLIVNNATNVVIKVCEFQFCNDPFLGVYYHKNNKSWMESEFRVYSSANNCTFEYVSQPFLMDLEGKQGNFKNLREFVFKNIDGYFKIYSTHTPINLVRDLPQGFSALEPLVDLPIGINITRFQTLLALHRSYLTPGDSSSGWTAGAAAYYVGYLQPRTFLLKYNENGTITDAVDCALDPLSETKCTLKSFTVEKGIYQTSNFRVQPTESIVRFPNITNLCPFGEVFNATRFASVYAWNRKRISNCVADYSVLYNSASFSTFKCYGVSPTKLNDLCFTNVYADSFVIRGDEVRQIAPGQTGKIADYNYKLPDDFTGCVIAWNSNNLDSKVGGNYNYLYRLFRKSNLKPFERDISTEIYQAGSTPCNGVEGFNCYFPLQSYGFQPTNGVGYQPYRVVVLSFELLHAPATVCGPKKSTNLVKNKCVNFNFNGLTGTGVLTESNKKFLPFQQFGRDIADTTDAVRDPQTLEILDITPCSFGGVSVITPGTNTSNQVAVLYQDVNCTEVPVAIHADQLTPTWRVYSTGSNVFQTRAGCLIGAEHVNNSYECDIPIGAGICASYQTQTNSPSGAGSVASQSIIAYTMSLGAENSVAYSNNSIAIPTNFTISVTTEILPVSMTKTSVDCTMYICGDSTECSNLLLQYGSFCTQLNRALTGIAVEQDKNTQEVFAQVKQIYKTPPIKDFGGFNFSQILPDPSKPSKRSFIEDLLFNKVTLADAGFIKQYGDCLGDIAARDLICAQKFNGLTVLPPLLTDEMIAQYTSALLAGTITSGWTFGAGAALQIPFAMQMAYRFNGIGVTQNVLYENQKLIANQFNSAIGKIQDSLSSTASALGKLQDVVNQNAQALNTLVKQLSSNFGAISSVLNDILSRLDPPEAEVQIDRLITGRLQSLQTYVTQQLIRAAEIRASANLAATKMSECVLGQSKRVDFCGKGYHLMSFPQSAPHGVVFLHVTYVPAQEKNFTTAPAICHDGKAHFPREGVFVSNGTHWFVTQRNFYEPQIITTDNTFVSGNCDVVIGIVNNTVYDPLQPELDSFKEELDKYFKNHTSPDVDLGDISGINASVVNIQKEIDRLNEVAKNLNESLIDLQELGKYEQYIKGSGRENLYFQGGGGSGYIPEAPRDGQAYVRKDGEWVLLSTFLGHHHHHHHH

SEQ ID NO: 2273 - protein, 1281 aa, Artificial Sequence
  Description of Artificial Sequence: Synthetic polypeptide
MGILPSPGMPALLSLVSLLSVLLMGCVAETGTQCVNLTTRTQLPPAYTNSFTRGVYYPDKVFRSSVLHSTQDLFLPFFSNVTWFHAIHVSGTNGTKRFDNPVLPFNDGVYFASTEKSNIIRGWIFGTTLDSKTQSLLIVNNATNVVIKVCEFQFCNDPFLGVYYHKNNKSWMESEFRVYSSANNCTFEYVSQPFLFDLEGKQGNFKNLREFVFKNIDGYFKIYSKHTPINLVRDLPQGFSALEPLVDLPIGINITRFQTLLALHRSYLTPGDSSSGWTAGAAAYYVGYLQPRTFLLKYNENGTITDAVDCALDPLSETKCTLKSFTVEKGIYQTSNFRVQPTESIVRFPNITNLCPFGEVFNATRFASVYAWNRKRISNCVADYSVLYNSASFSTFKCYGVSPTKLNDLCFTNVYADSFVIRGDEVRQIAPGQTGKIADYNYKLPDDFTGCVIAWNSNNLDSKVGGNYNYLYRLFRKSNLKPFERDISTEIYQAGSTPCNGVEGFNCYFPLQSYGFQPTNGVGYQPYRVVVLSFELLHAPATVCGPKKSTNLVKNKCVNFNFNGLTGTGVLTESNKKFLPFQQFGRDIADTTDAVRDPQTLEILDITPCSFGGVSVITPGTNTSNQVAVLYQDVNCTEVPVAIHADQLTPTWRVYSTGSNVFQTRAGCLIGAEHVNNSYECDIPIGAGICASYQTQTNSPSGAGSVASQSIIAYTMSLGAENSVAYSNNSIAIPTNFTISVTTEILPVSMTKTSVDCTMYICGDSTECSNLLLQYGSFCTQLNRALTGIAVEQDKNTQEVFAQVKQIYKTPPIKDFGGFNFSQILPDPSKPSKRSFIEDLLFNKVTLADAGFIKQYGDCLGDIAARDLICAQKFNGLTVLPPLLTDEMIAQYTSALLAGTITSGWTFGAGAALQIPFAMQMAYRFNGIGVTQNVLYENQKLIANQFNSAIGKIQDSLSSTASALGKLQDVVNQNAQALNTLVKQLSSNFGAISSVLNDILSRLDPPEAEVQIDRLITGRLQSLQTYVTQQLIRAAEIRASANLAATKMSECVLGQSKRVDFCGKGYHLMSFPQSAPHGVVFLHVTYVPAQEKNFTTAPAICHDGKAHFPREGVFVSNGTHWFVTQRNFYEPQIITTDNTFVSGNCDVVIGIVNNTVYDPLQPELDSFKEELDKYFKNHTSPDVDLGDISGINASVVNIQKEIDRLNEVAKNLNESLIDLQELGKYEQYIKGSGRENLYFQGGGGSGYIPEAPRDGQAYVRKDGEWVLLSTFLGHHHHHHHH

SEQ ID NO: 2274 - protein, 1281 aa, Artificial Sequence
  Description of Artificial Sequence: Synthetic polypeptide
MGILPSPGMPALLSLVSLLSVLLMGCVAETGTQCVNLTTRTQLPPAYTNSFTRGVYYPDKVFRSSVLHSTQDLFLPFFSNVTWFHAIHVSGTNGTKRFDNPVLPFNDGVYFASTEKSNIIRGWIFGTTLDSKTQSLLIVNNATNVVIKVCEFQFCNDPFLGVYYHKNNKSWMESEFRVYSSANNCTFEYVSQPFLMDLEGKQGNFKNLREFVFKNIDGYFKIYSKHTPINLVRDLPQGFSALEPLVDLPIGINITRFQTLLALHRSYLTPGDSSSGWTAGAAAYYVGYLQPRTFLLKYNENGTITDAVDCGLDPLSETKCTLKSFTVEKGIYQTSNFRVQPTESIVRFPNITNLCPFGEVFNATRFASVYAWNRKRISNCVADYSVLYNSASFSTFKCYGVSPTKLNDLCFTNVYADSFVIRGDEVRQIAPGQTGKIADYNYKLPDDFTGCVIAWNSNNLDSKVGGNYNYLYRLFRKSNLKPFERDISTEIYQAGSTPCNGVEGFNCYFPLQSYGFQPTNGVGYQPYRVVVLSFELLHAPATVCGPKKSTNLVKNKCVNFNFNGLTGTGVLTESNKKFLPFQQFGRDIADTTDAVRDPQTLEILDITPCSFGGVSVITPGTNTSNQVAVLYQDVNCTEVPVAIHADQLTPTWRVYSTGSNVFQTRAGCLIGAEHVNNSYECDIPIGAGICASYQTQTNSPSGAGSVASQSIIAYTMSLGAENSVAYSNNSIAIPTNFTISVTTEILPVSMTKTSVDCTMYICGDSTECSNLLLQYGSFCTQLNRALTGIAVEQDKNTQEVFAQVKQIYKTPPIKDFGGFNFSQILPDPSKPSKRSFIEDLLFNKVTLADAGFIKQYGDCLGDIAARDLICAQKFNGLTVLPPLLTDEMIAQYTSALLAGTITSGWTFGAGAALQIPFAMQMAYRFNGIGVTQNVLYENQKLIANQFNSAIGKIQDSLSSTASALGKLQDVVNQNAQALNTLVKQLSSNFGAISSVLNDILSRLDPPEAEVQIDRLITGRLQSLQTYVTQQLIRAAEIRASANLAATKMSECVLGQSKRVDFCGKGYHLMSFPQSAPHGVVFLHVTYVPAQEKNFTTAPAICHDGKAHFPREGVFVSNGTHWFVTQRNFYEPQIITTDNTFVSGNCDVVIGIVNNTVYDPLQPELDSFKEELDKYFKNHTSPDVDLGDISGINASVVNIQKEIDRLNEVAKNLNESLIDLQELGKYEQYIKGSGRENLYFQGGGGSGYIPEAPRDGQAYVRKDGEWVLLSTFLGHHHHHHHH

SEQ ID NO: 2275 - protein, 1281 aa, Artificial Sequence
  Description of Artificial Sequence: Synthetic polypeptide
MGILPSPGMPALLSLVSLLSVLLMGCVAETGTQCVNLTTRTQLPPAYTNSFTRGVYYPDKVFRSSVLHSTQDLFLPFFSNVTWFHAIHVSGTNGTKRFDNPVLPFNDGVYFASTEKSNIIRGWIFGTTLDSKTQSLLIVNNATNVVIKVCEFQFCNDPFLGVYYHKNNKSWMESEFRVYSSANNCTFEYVSQPFLMDLEGKQGNFKNLREFVFKNIDGYFKIYSKHTPINLVRDLPQGFSALEPLVDLPIGINITRFQTLLALHRSYLTPGDSSSGWTAGAAAYYVGYLQPRTFLLKYNENGTITDAVDCALDPLSETKCTLKSFTVEKGIYQTSNFRVQPTESIVRFPNITNLCPFGEVFNATRFASVYAWNRKRISNCVADYSVLYNSASFSTFKCYGVSPTKLNDLCFTNVYADSFVIRGDEVRQIAPGQTGKIADYNYKLPDDFTGCVIAWNSNNLDSKVGGNYNYLYRLFRKSNLKPFERDISTEIYQAGSTPCNGVEGFNCYFPLQSYGFQPTNGVGYQPYRVVVLSFELLHAPATVCGPKKSTNLVKNKCVNFNFNGLTGTGVLTESNKKFLPFQQFGRDIADTTDAVRDPQTLEILDITPCSFGGVSVITPGTNTSNQVAVLYQDVNCTEVPVAIHADQLTPTWRVYSTGSNVFQTRAGCLIGAEHVNNSYECDIPIGAGICASYQTQTNSPSGAGSVASQSIIAYTMSLGAENSVAYSNNSIAIPTNFTISVTTEILPVSMTKTSVDCTMYICGDSEECSNLLLQYGSFCTQLNRALTGIAVEQDKNTQEVFAQVKQIYKTPPIKDFGGFNFSQILPDPSKPSKRSFIEDLLFNKVTLADAGFIKQYGDCLGDIAARDLICAQKFNGLTVLPPLLTDEMIAQYTSALLAGTITSGWTFGAGAALQIPFAMQMAYRFNGIGVTQNVLYENQKLIANQFNSAIGKIQDSLSSTASALGKLQDVVNQNAQALNTLVKQLSSNFGAISSVLNDILSRLDPPEAEVQIDRLITGRLQSLQTYVTQQLIRAAEIRASANLAATKMSECVLGQSKRVDFCGKGYHLMSFPQSAPHGVVFLHVTYVPAQEKNFTTAPAICHDGKAHFPREGVFVSNGTHWFVTQRNFYEPQIITTDNTFVSGNCDVVIGIVNNTVYDPLQPELDSFKEELDKYFKNHTSPDVDLGDISGINASVVNIQKEIDRLNEVAKNLNESLIDLQELGKYEQYIKGSGRENLYFQGGGGSGYIPEAPRDGQAYVRKDGEWVLLSTFLGHHHHHHHH

SEQ ID NO: 2276 - protein, 1281 aa, Artificial Sequence
  Description of Artificial Sequence: Synthetic polypeptide
MGILPSPGMPALLSLVSLLSVLLMGCVAETGTQCVNLTTRTQLPPAYTNSFTRGVYYPDKVFRSSVLHSTQDLFLPFFSNVTWFHAIHVSGTNGTKRFDNPVLPFNDGVYFASTEKSNIIRGWIFGTTLDSKTQSLLIVNNATNVVIKVCEFQFCNDPFLGVYYHKNNKSWMESEFRVYSSANNCTFEYVSQPFLMDLEGKQGNFKNLREFVFKNIDGYFKIYSKHTPINLVRDLPQGFSALEPLVDLPIGINITRFQTLLALHRSYLTPGDSSSGWTAGAAAYYVGYLQPRTFLLKYNENGTITDAVDCALDPLSETKCTLKSFTVEKGIYQTSNFRVQPTESIVRFPNITNLCPFGEVFNATRFASVYAWNRKRISNCVADYSVLYNSASFSTFKCYGVSPTKLNDLCFTNVYADSFVIRGDEVRQIAPGQTGKIADYNYKLPDDFTGCVIAWNSNNLDSKVGGNYNYLYRLFRKSNLKPFERDISTEIYQAGSTPCNGVEGFNCYFPLQSYGFQPTNGVGYQPYRVVVLSFELLHAPATVCGPKKSTNLVKNKCVNFNFNGLTGTGVLTESNKKFLPFQQFGRDIADTTDAVRDPQTLEILDITPCSFGGVSVITPGTNTSNQVAVLYQDVNCTEVPVAIHADQLTPTWRVYSTGSNVFQTRAGCLIGAEHVNNSYECDIPIGAGICASYQTQTNSPSGAGSVASQSIIAYTMSLGAENSVAYSNNSIAIPTNFTISVTTEILPVSMTKTSVDCTMYICGDSTECSNLLLQYGSFCTQLNRALTGIAVEQDKNTQEVFAQVKQIYKTPPIKDFGGFNFSQILPDPSKPSKRSFIEDLLFNKVTLADAGFIKQYGDCLGDIAARDLICAQKFNGLTVLPPLLTDEMIAQYTSALLAGTITSGWTFGAGAALQIPFAMQMAYRFNGIGVTQNVLYENQKLIANQFNKAIGKIQDSLSTTASALGKLQDVVNQNAQALNTLVKQLSSNFGAISSVLNDILSRLDPPEAEVQIDRLITGRLQSLQTYVTQQLIRAAEIRASANLAATKMSECVLGQSKRVDFCGKGYHLMSFPQSAPHGVVFLHVTYVPAQEKNFTTAPAICHDGKAHFPREGVFVSNGTHWFVTQRNFYEPQIITTDNTFVSGNCDVVIGIVNNTVYDPLQPELDSFKEELDKYFKNHTSPDVDLGDISGINASVVNIQKEIDRLNEVAKNLNESLIDLQELGKYEQYIKGSGRENLYFQGGGGSGYIPEAPRDGQAYVRKDGEWVLLSTFLGHHHHHHHH

SEQ ID NO: 2277 - protein, 1281 aa, Artificial Sequence
  Description of Artificial Sequence: Synthetic polypeptide
MGILPSPGMPALLSLVSLLSVLLMGCVAETGTQCVNLTTRTQLPPAYTNSFTRGVYYPDKVFRSDVLHSTQDLFLPFFSNVTWFHAIHVSGTNGTKRFDNPVLPFNDGVYFASTEKSNIIRGWIFGTTLDSKTQSLLIVNNATNVVIKVCEFQFCENPFLGVYYHKNNKSWMEKEFRVYSSANNCTFEYVSQPFLMDLGGKQGNFKWLREFVFKNIDGYFKIYSKHTPINLVRDLPQGFSALEPLMDLPIGINITRFQTLLALHRSYLTPGDSSSGWTAGAAAYYVGYLQPRTFLLKYNENGTITDAVDCALDPLSETKCTLKSFTVEKGIYQTSNFRVQPTESIVRFPNITNLCPFGEVFNATRFASVYAWNRKRISNCVADYSVLYNSASFSTFKCYGVSPTKLNDLCFTNVYADSFVIRGDEVRQIAPGQTGKIADYNYKLPDDFTGCVIAWNSNNLDSKVGGNYNYLYRLFRKSNLKPFERDISTEIYQAGSTPCNGVEGFNCYFPLQSYGFQPTNGVGYQPYRVVVLSFELLHAPATVCGPKKSTNLVKNKCVNFNFNGLTGTGVLTESNKKFLPFQQFGRDIADNTDAVRDPQTLEILDITPCSFGGVSVITPGTNTSNQVAVLYQDVNCTEVPNAIHADQLTPTWRVYSTGSNVFQTRAGCLIGAEHVNNSYECDIPIGAGICASYQTQTNSPSGAGSVASQSIIAYTMSLGAENSVAYSNNSIAIPTNFTISVTTEILPVSMTKTSVDCTMYICGDSTECSNLLLQYGSFCTQLNRALHGIAREQDKNTQEVFAQVKQIYKTPPIKDFGGFNFSQILPDPSKPSKRSFIEDLLFNKVTLADAGFIKQYGDCLGDIAARDLICAQKFNGLTVLPPLLTDEMIAQYTSALLAGTITSGWTFGAGAALQIPFAMQMAYRFNGIGVTQNVLYENQKLIANQFNKAIGKIQDSLSSTASALGKLQDVVNQNAQALNTLVKQLSSNFGAISSVLNDILSRLDPPEAEVQIDRLITGRLQSLQTYVTQQLIRAAEIRASANLAATKMSECVLGQSKRVDFCGKGYHLMSFPQSAPHGVVFLHVTYVPAQEKNFTTAPAICHDGKAFFPREGVFVSNGTQWFVTQRNFYEPQIITTDNTFVSGNCDVVIGIVNNTVYDPLQPELDSFKEELDKYFKNHTSPDVDLGDISGINASVVNIQKEIDRLNEVAKNLNESLIDLQELGKYEQYIKGSGRENLYFQGGGGSGYIPEAPRDGQAYVRKDGEWVLLSTFLGHHHHHHHH

SEQ ID NO: 2278 - protein, 1281 aa, Artificial Sequence
  Description of Artificial Sequence: Synthetic polypeptide
MGILPSPGMPALLSLVSLLSVLLMGCVAETGTQCVNLTTRTQLPPAYTNSFTRGVYYPDKVFRSSVLHSTQDLFLPFFSNVTWFHAIHVSGTNGTKRFDNPVLPFNDGVYFASTEKSNIIRGWIFGTTLDSKTQSLLIVNNATNVVIKVCEFQFCNDPFLGVYYHKNNKSWMESEFRVYSSANNCTFEYVSQPFLMDLEGKQGNFKNLREFVFKNIDGYFKIYSKHTPINLVRDLPQGFSALEPLVDLPIGINITRFQTLLALHRSYLTPGDSSSGWTAGAAAYYVGYLQPRTFLLKYNENGTITDAVDCALDPLSETKCTLKSFTVEKGIYQTSNFRVQPTESIVRFPNITNLCPFGEVFNATRFASVYAWNRKRISNCVADYSVLYNSASFSTFKCYGVSPTKLNDLCFTNVYADSFVIRGDEVRQIAPGQTGKIADYNYKLPDDFTGCVIAWNSNNLDSKVGGNYNYLYRLFRKSNLKPFERDISTEIYQAGSTPCNGVEGFNCYFPLQSYGFQPTNGVGYQPYRVVVLSFELLHAPATVCGPKKSTNLVKNKCVNFNFNGLTGTGVLTESNKKFLPFQQFGRDIADTTDAVRDPQTLEILDITPCSFGGVSVITPGTNTSNQVAVLYQDVNCTEVPVAIHADQLTPTWRVYSTGSNVFQTRAGCLIGAEHVNNSYECDIPIGAGICASYQTQTNSPSGAGSVASQSIIAYTMSLGAENSVAYSNNSIAIPTNFTISVTTEILPVSMTKTSVDCTMYICGDSTECSNLLLQYGSFCTQLNRALTGIAVEQDKNTQEVFAQVKQIYKTPPIKDFGGFNFSQILPDPSKPSKRSFIEDLLFNKVTLADAGFIKQYGDCLGDIAARDLICAQKFNGLTVLPPLLTDEMIAQYTSALLAGTITSGWTFGAGAALQIPFAMQMAYRFNGIGVTQNVLYENQKLIANQFNSAIGKIQDSLSSTASALGKLQDVVNQNAQALNTLVKQLSSNFGAISSVLNDILSRLDPPEAEVQIDRLITGRLQSLQTYVTQQLIRAAEIRASANLAATKMSECVLGQSKRVDFCGKGYHLMSFPQSAPHGVVFLHVTYVPAQEKNFTTAPAICHDGKAHFPREGVFVSNGTRWFVTQRNFYEPQIITTDNTFVSGNCDVVIGIVNNTVYDPLQPELDSFKEELDKYFKNHTSPDVDLGDISGINASVVNIQKEIDRLNEVAKNLNESLIDLQELGKYEQYIKGSGRENLYFQGGGGSGYIPEAPRDGQAYVRKDGEWVLLSTFLGHHHHHHHH

SEQ ID NO: 2279 - protein, 1281 aa, Artificial Sequence
  Description of Artificial Sequence: Synthetic polypeptide
MGILPSPGMPALLSLVSLLSVLLMGCVAETGTQCVNLTTRTQLPPAYTNSFTRGVYYPDKVFRSSVLHSTQDLFLPFFSNVTWFHAIHVSGTNGTKRFDNPVLPFNDGVYFASTEKSNIIRGWIFGTTLDSKTQSLLIVNNATNVVIKVCEFQFCNDPFLGVYYHKNNKSWMESEFRVYSSANNCTFEYVSQPFLMDLEGKQGNFKNLREFVFKNIDGYFKIYSKHTPINLVRDLPQGFSALEPLVDLPIGINITRFQTLLALHRSYLTPGDSSSGWTAGAAAYYVGYLQPRTFLLKYNENGTITDAVDCALDPLSETKCTLKSFTVEKGIYQTSNFRVQPTESIVRFPNITNLCPFGEVFNATRFASVYAWNRKRISNCVADYSVLYNSASFSTFKCYGVSPTKLNDLCFTNVYADSFVIRGDEVRQIAPGQTGKIADYNYKLPDDFTGCVIAWNSNNLDSKVGGNYNYLYRLFRKSNLKPFERDISTEIYQAGSTPCNGVEGFNCYFPLQSYGFQPTNGVGYQPYRVVVLSFELLHAPATVCGPKKSTNLVKNKCVNFNFNGLTGTGVLTESNKKFLPFQQFGRDIADTTDAVRDPQTLEILDITPCSFGGVSVITPGTNTSNQVAVLYQDVNCTEVPVAIHADQLTPTWRVYSTGSNVFQTRAGCLIGAEHVNNSYECDIPIGAGICASYQTQTNSPSGAGSVASQSIIAYTMSLGAENSVAYSNNSIAIPTNFTISVTTEILPVSMTKTSVDCTMYICGDSTECSNLLLQYGSFCTQLNRALTGIAVEQDKNTQEVFAQVKQIYKTPPIKDFGGFNFSQILPDPSKPSKRSFIEDLLFNKVTLADAGFIKQYGDCLGDIAARDLICAQKFNGLTVLPPLLTDEMIAQYTSALLAGTITSGWTFGAGAALQIPFAMQMAYRFNGIGVTQNVLYENQKLIANQFNTAIGKIQDSLSSTASALGKLQDVVNQNAQALNTLVKQLSSNFGAISSVLNDILSRLDPPEAEVQIDRLITGRLQSLQTYVTQQLIRAAEIRASANLAATKMSECVLGQSKRVDFCGKGYHLMSFPQSAPHGVVFLHVTYVPAQEKNFTTAPAICHDGKAHFPREGVFVSNGTHWFVTQRNFYEPQIITTDNTFVSGNCDVVIGIVNNTVYDPLQPELDSFKEELDKYFKNHTSPDVDLGDISGINASVVNIQKEIDRLNEVAKNLNESLIDLQELGKYEQYIKGSGRENLYFQGGGGSGYIPEAPRDGQAYVRKDGEWVLLSTFLGHHHHHHHH

SEQ ID NO: 2280 - protein, 1281 aa, Artificial Sequence
  Description of Artificial Sequence: Synthetic polypeptide
MGILPSPGMPALLSLVSLLSVLLMGCVAETGTQCVNLTTRTQLPPAYTNSFTRGVYYPDKVFRSSVLHSTQDLFLPFFSNVTWFHAIHVSGTNGTKRFDNPVLPFNDGVYFASTEKSNIIRGWIFGTTLDSKTQSLLIVNNATNVVIKVCEFQFCNDPFLGVYYHKNNKSWMESEFRVYSSANNCTFEYVSQPFLMDLEGKQGNFKNLREFVFKNIDGYFKIYSKHTPINLVRDLPQGFSALEPLVDLPIGINITRFQTLLALHRSYLTPGDSSSGWTAGAAAYYVGYLQPRTFLLKYNENGTITDAVDCALDPLSETKCTLKSFTVEKGIYQTSNFRVQPTESIVRFPNITNLCPFGEVFNATRFASVYAWNRKRISNCVADYSVLYNSASFSTFKCYGVSPTKLNDLCFTNVYADSFVIRGDEVRQIAPGQTGKIADYNYKLPDDFTGCVIAWNSNNLDSKVGGNYNYLYRLFRKSNLKPFERDISTEIYQAGSTPCNGVEGFNCYFPLQSYGFQPTNGVGYQPYRVVVLSFELLHAPATVCGPKKSTNLVKNKCVNFNFNGLTGTGVLTESNKKFLPFQQFGRDIADTTDAVRDPQTLEILDITPCSFGGVSVITPGTNTSNQVAVLYQDVNCTEVPVAIHADQLTPTWRVYSTGSNVFQTRAGCLIGAEHVNNSYECDIPIGAGICASYQTQTNSPSGAGSVASQSIIAYTMSLGAENSVAYSNNSIAIPTNFTISVTTEILPVSMTKTSVDCTMYICGDSTECSNLLLQYGSFCTQLNRALTGIAVEQDKNTQEVFAQVKQIYKTPPIKDFGGFNFSQILPDPSKPSKRSFIEDLLFNKVTLADAGFIKQYGDCLGDIAARDLICAQKFNGLTVLPPLLTDEMIAQYTSALLAGTITAGWTFGAGAALQIPFAMQMAYRFNGIGVTQNVLYENQKLIANQFNNAIGNIQDSLSTTASALGKLQDVVNQNAQALNTLVKQLSSNFGAISSVLNDILSRLDPPEAEVQIDRLITGRLQSLQTYVTQQLIRAAEIRASANLAATKMSECVLGQSKRVDFCGKGYHLMSFPQSAPHGVVFLHVTYVPAQEKNFTTAPAICHDGKAHFPREGVFVSNGTHWFVTQRNFYEPQIITTDNTFVSGNCDVVIGIVNNTVYDPLQPELDSFKEELDKYFKNHTSPDVDLGDISGINASVVNIQKEIDRLNEVAKNLNESLIDLQELGKYEQYIKGSGRENLYFQGGGGSGYIPEAPRDGQAYVRKDGEWVLLSTFLGHHHHHHHH

SEQ ID NO: 2281 - protein, 1281 aa, Artificial Sequence
  Description of Artificial Sequence: Synthetic polypeptide
MGILPSPGMPALLSLVSLLSVLLMGCVAETGTQCVNLTTRTQLPPAYTNSFTRGVYYPDKIFRSSVLHLTQDLFLPFFSNVTWFHAIHVSGTNGTKRFDNPVLPFNDGVYFAATEKSNIIRGWIFGTTLDSKTQSLLIVNNATNVVIKVCEFQFCNDPFLGVYYHKNNKSWMESEFRVYSSANNCTFEYVSQPFLMDLEGKQGNFKNLREFVFKNIDGYFKIYSKHTPINLVRDLPQGFSALEPLVKLPIGINITRFQTLLALHRSYLTPGDSSSGWTAGAAAYYVGYLQPRTFLLKYNENGTITDAVDCALDPLSETKCTLKSFTVEKGIYQTSNFRVQPTESIVRFPNITNLCPFGEVFNATRFASVYAWNRKRISNCVADYSVLYNSASFSTFKCYGVSPTKLNDLCFTNVYADSFVIRGDEVRQIAPGQTGKIADYNYKLPDDFTGCVIAWNSNNLDSKVGGNYNYLYRLFRKSNLKPFERDISTEIYQAGSTPCNGVEGFNCYFPLQSYGFQPTNGVGYQPYRVVVLSFELLHAPATVCGPKKSTNLVKNKCVNFNFNGLTGTGVLTESNKKFLPFQQFGRDISDTTDAVRDPQTLEILDITPCSFGGVSVITPGTNTSNQVAVLYQDVNCTDVPVAIHADQLTPTWRVYSTGSNVFQTQAGCLIGAEHVNNSYECDIPIGAGICASYQTQTNSPSGAGSVASQSIIAYTMSLGAENSVAYSNNSIAIPTNFTISVTTEILPVSMTKTSVDCTMYICGDSTECSNLLLQYGSFCTQLNRALTGIAVEQDKNTQEVFAQVKQIYKTPPIKDFGGFNFSQILPDPSKPSKRSFIEDLLFNKVTLADAGFIKQYGDCLGDIAARDLICAQKFNGLTVLPPLLTDEMIAAYTAALLAGTATAGWTFGAGAALQIPFAMQMAYRFNGIGVTQNVLYENQKLIANQFNSAIGKIQDSLSSTASALGKLQDVVNQNAQALNTLVKQLSSNFGAISSVLNDILSRLDPPEAEVQIDRLITGRLQSLQTYVTQQLIRAAEIRASANLAATKMSECVLGQSKRVDFCGKGYHLMSFPQSAPHGVVFLHVTYVPAQEKNFTTAPAICHDGKAHFPREGVFVSNGTHWFVTQRNFYEPQIITTDNTFVSGNCDVVIGIVNNTVYDPLQPELDSFKEELDKYFKNHTSPDVDLGDISGINASVVNIQKEIDRLNEVAKNLNESLIDLQELGKYEQYIKGSGRENLYFQGGGGSGYIPEAPRDGQAYVRKDGEWVLLSTFLGHHHHHHHH

SEQ ID NO: 2282 - protein, 1281 aa, Artificial Sequence
  Description of Artificial Sequence: Synthetic polypeptide
MGILPSPGMPALLSLVSLLSVLLMGCVAETGTQCVNLTTRTQLPPAYTNSFTRGVYYPDKVFRSSVLHSTQDLFLPFFSNVTWFHAIHVSGTNGTKRFDNPVLPFNDGVYFASTEKSNIIRGWIFGTTLDSKTQSLLIVNNATNVVIKVCEFQFCNDPFLGVYYHKNNKSWMESEFRVYSSANNCTFEYVSQPFLMDLEGKQGNFKNLREFVFKNIDGYFKIYSKHTPINLVRDLPQGFSALEPLVDLPIGINITRFQTLLALHRSYLTPGDSSSGWTAGAAAYYVGYLQPRTFLLKYNENGTITDAVDCALDPLSETKCTLKSFTVEKGIYQTSNFRVQPTESIVRFPNITNLCPFGEVFNATRFASVYAWNRKRISNCVADYSVLYNSASFSTFKCYGVSPTKLNDLCFTNVYADSFVIRGDEVRQIAPGQTGKIADYNYKLPDDFTGCVIAWNSNNLDSKVGGNYNYLYRLFRKSNLKPFERDISTEIYQAGSTPCNGVEGFNCYFPLQSYGFQPTNGVGYQPYRVVVLSFELLHAPATVCGPKKSTNLVKNKCVNFNFNGLTGTGVLTESNKKFLPFQQFGRDIADTTDAVRDPQTLEILDIVPCSFGGVSVITPGTNTSNQVAVLYQDVNCTEVPVAIHADQLTPTWRVYSTGSNVFQTRAGCLIGAEHVNNSYECDIPIGAGICASYQTQTNSPSGAGSVASQSIIAYTMSLGAENSVAYSNNSIAIPTNFTISVTTEILPVSMTKTSVDCTMYICGDSTECSNLLLQYGSFCTQLNRALTGIAVEQDKNTQEVFAQVKQIYKTPPIKDFGGFNFSQILPDPSKPSKRSFIEDLLFNKVTLADAGFIKQYGDCLGDIAARDLICAQKFNGLTVLPPLLTDEMIAQYTSALLAGTITSGWTFGAGAALQIPFAMQMAYRFNGIGVTQNVLYENQKLIANQFNSAIGKIQDSLSSTASALGKLQDVVNQNAQALNTLVKQLSSNFGAISSVLNDILSRLDPPEAEVQIDRLITGRLQSLQTYVTQQLIRAAEIRASANLAATKMSECVLGQSKRVDFCGKGYHLMSFPQSAPHGVVFLHVTYVPAQEKNFTTAPAICHDGKAHFPREGVFVSNGTHWFVTQRNFYEPQIITTDNTFVSGNCDVVIGIVNNTVYDPLQPELDSFKEELDKYFKNHTSPDVDLGDISGINASVVNIQKEIDRLNEVAKNLNESLIDLQELGKYEQYIKGSGRENLYFQGGGGSGYIPEAPRDGQAYVRKDGEWVLLSTFLGHHHHHHHH

SEQ ID NO: 2283 - protein, 1281 aa, Artificial Sequence
  Description of Artificial Sequence: Synthetic polypeptide
MGILPSPGMPALLSLVSLLSVLLMGCVAETGTQCVNLTTRTQLPPAYTNSFTRGVYYPDKVFRSSVLHSTQDLFLPFFSNVTWFHAIHVSGTNGTKRFDNPVLPFNDGVYFASTEKSNIIRGWIFGTTLDSKTQSLLIVNNATNVVIKVCEFQFCNDPFLGVYYHKNNKSWMESEFRVYSSANNCTFEYVSQPFLMDLEGKQGNFKNLREFVFKNIDGYFKIYSKHTPINLVRDLPQGFSALEPLVDLPIGINITRFQTLLALHRSYLTPGDSSSGWTAGAAAYYVGYLQPRTFLLKYNENGTITDAVDCALDPLSETKCTLKSFTVEKGIYQTSNFRVQPTESIVRFPNITNLCPFGEVFNATRFASVYAWNRKRISNCVADYSVLYNSASFSTFKCYGVSPTKLNDLCFTNVYADSFVIRGDEVRQIAPGQTGKIADYNYKLPDDFTGCVIAWNSNNLDSKVGGNYNYLYRLFRKSNLKPFERDISTEIYQAGSTPCNGVEGFNCYFPLQSYGFQPTNGVGYQPYRVVVLSFELLHAPATVCGPKKSTNLVKNKCVNFNFNGLTGTGVLTESNKKFLPFQQFGRDIADTTDAVRDPQTLEILDITPCSFGGVSVITPGTNTSNQVAVLYQDVNCTEVPVAIHADQLTPTWRVYSTGSNVFQTRAGCLIGAEHVNNSYECDIPIGAGICASYQTQTNSPSGAGSVASQSIIAYTMSLGAENSVAYSNNSIAIPTNFTISVTTEILPVSMTKTSVDCTMYICGDSTECSNLLLQYGSFCTQLNRALTGIAEEQDKNTQEVFAQVKQIYKTPPIKDFGGFNFSQILPDPSKPSKRSFIEDLLFNKVTLADAGFIKQYGDCLGDIAARDLICAQKFNGLTVLPPLLTDEMIAQYTSALLAGTITSGWTFGAGAALQIPFAMQMAYRFNGIGVTQNVLYENQKLIANQFNSAIGKIQDSLSSTASALGKLQDVVNQNAQALNTLVKQLSSNFGAISSVLNDILSRLDPPEAEVQIDRLITGRLQSLQTYVTQQLIRAAEIRASANLAATKMSECVLGQSKRVDFCGKGYHLMSFPQSAPHGVVFLHVTYVPAQEKNFTTAPAICHDGKAHFPREGVFVSNGTHWFVTQRNFYEPQIITTDNTFVSGNCDVVIGIVNNTVYDPLQPELDSFKEELDKYFKNHTSPDVDLGDISGINASVVNIQKEIDRLNEVAKNLNESLIDLQELGKYEQYIKGSGRENLYFQGGGGSGYIPEAPRDGQAYVRKDGEWVLLSTFLGHHHHHHHH

SEQ ID NO: 2284 - protein, 1281 aa, Artificial Sequence
  Description of Artificial Sequence: Synthetic polypeptide
MGILPSPGMPALLSLVSLLSVLLMGCVAETGTQCVNLTTRTQLPPAYTNSFTRGVYYPDKVFRSSVLHSTQDLFLPFFSNVTWFHAIHVSGTNGTKRFDNPVLPFNDGVYFASTEKSNIIRGWIFGTTLDSKTQSLLIVNNATNVVIKVCEFQFCNDPFLGVYYHKNNKSWMESEFRVYSSANNCTFEYTSQPFLMDLEGKQGNFKNLREFVFKNIDGYFKIYSKHTPINLVRDLPQGFSALEPLVDLPIGINITRFQTLLALHRSYLTPGDSSSGWTAGAAAYYVGYLQPRTFLLKYNENGTITDAVDCALDPLSETKCTLKSFTVEKGIYQTSNFRVQPTESIVRFPNITNLCPFGEVFNATRFASVYAWNRKRISNCVADYSVLYNSASFSTFKCYGVSPTKLNDLCFTNVYADSFVIRGDEVRQIAPGQTGKIADYNYKLPDDFTGCVIAWNSNNLDSKVGGNYNYLYRLFRKSNLKPFERDISTEIYQAGSTPCNGVEGFNCYFPLQSYGFQPTNGVGYQPYRVVVLSFELLHAPATVCGPKKSTNLVKNKCVNFNFNGLTGTGVLTESNKKFLPFQQFGRDIADTTDAVRDPQTLEILDITPCSFGGVSVITPGTNTSNQVAVLYQDVNCTEVPVAIHADQLTPTWRVYSTGSNVFQTRAGCLIGAEHVNNSYECDIPIGAGICASYQTQTNSPSGAGSVASQSIIAYTMSLGAENSVAYSNNSIAIPTNFTISVTTEILPVSMTKTSVDCTMYICGDSTECSNLLLQYGSFCTQLNRALTGIAVEQDKNTQEVFAQVKQIYKTPPIKDFGGFNFSQILPDPSKPSKRSFIEDLLFNKVTLADAGFIKQYGDCLGDIAARDLICAQKFNGLTVLPPLLTDEMIAQYTSALLAGTITSGWTFGAGAALQIPFAMQMAYRFNGIGVTQNVLYENQKLIANQFNSAIGKIQDSLSSTASALGKLQDVVNQNAQALNTLVKQLSSNFGAISSVLNDILSRLDPPEAEVQIDRLITGRLQSLQTYVTQQLIRAAEIRASANLAATKMSECVLGQSKRVDFCGKGYHLMSFPQSAPHGVVFLHVTYVPAQEKNFTTAPAICHDGKAHFPREGVFVSNGTHWFVTQRNFYEPQIITTDNTFVSGNCDVVIGIVNNTVYDPLQPELDSFKEELDKYFKNHTSPDVDLGDISGINASVVNIQKEIDRLNEVAKNLNESLIDLQELGKYEQYIKGSGRENLYFQGGGGSGYIPEAPRDGQAYVRKDGEWVLLSTFLGHHHHHHHH

SEQ ID NO: 2285 - protein, 1281 aa, Artificial Sequence
  Description of Artificial Sequence: Synthetic polypeptide
MGILPSPGMPALLSLVSLLSVLLMGCVAETGTQCVNLTTRTQLPPAYTNSFTRGVYYPDKIFRSSVLHLTQDLFLPFFSNVTWFHAIHVSGTNGTKRFDNPVLPFNDGVYFAATEKSNIIRGWIFGTTLDSKTQSLLIVNNATNVVIKVCEFQFCNDPFLGVYYHKNNKSWMESEFRVYSSANNCTFEYVSQPFLMDLEGKQGNFKNLREFVFKNIDGYFKIYSKHTPINLVRDLPQGFSALEPLVKLPIGINITRFQTLLALHRSYLTPGDSSSGWTAGAAAYYVGYLQPRTFLLKYNENGTITDAVDCALDPLSETKCTLKSFTVEKGIYQTSNFRVQPTESIVRFPNITNLCPFGEVFNATRFASVYAWNRKRISNCVADYSVLYNSASFSTFKCYGVSPTKLNDLCFTNVYADSFVIRGDEVRQIAPGQTGKIADYNYKLPDDFTGCVIAWNSNNLDSKVGGNYNYLYRLFRKSNLKPFERDISTEIYQAGSTPCNGVEGFNCYFPLQSYGFQPTNGVGYQPYRVVVLSFELLHAPATVCGPKKSTNLVKNKCVNFNFNGLTGTGVLTESNKKFLPFQQFGRDISDTTDAVRDPQTLEILDITPCSFGGVSVITPGTNTSNQVAVLYQDVNCTDVPVAIHADQLTPTWRVYSTGSNVFQTQAGCLIGAEHVNNSYECDIPIGAGICASYQTQTNSPSGAGSVASQSIIAYTMSLGAENSVAYSNNSIAIPTNFTISVTTEILPVSMTKTSVDCTMYICGDSTECSNLLLQYGSFCTQLNRALTGIAVEQDKNTQEVFAQVKQIYKTPPIKDFGGFNFSQILPDPSKPSKRSFIEDLLFNKVTLADAGFIKQYGDCLGDIAARDLICAQKFNGLTVLPPLLTDEMIAAYTAALLAGTITAGWTFGAGAALQIPFAMQMAYRFNGIGVTQNVLYENQKLIANQFNSAIGKIQDSLSSTASALGKLQDVVNQNAQALNTLVKQLSSNFGAISSVLNDILSRLDPPEAEVQIDRLITGRLQSLQTYVTQQLIRAAEIRASANLAATKMSECVLGQSKRVDFCGKGYHLMSFPQSAPHGVVFLHVTYVPAQEKNFTTAPAICHDGKAHFPREGVFVSNGTHWFVTQRNFYEPQIITTDNTFVSGNCDVVIGIVNNTVYDPLQPELDSFKEELDKYFKNHTSPDVDLGDISGINASVVNIQKEIDRLNEVAKNLNESLIDLQELGKYEQYIKGSGRENLYFQGGGGSGYIPEAPRDGQAYVRKDGEWVLLSTFLGHHHHHHHH

SEQ ID NO: 2286 - protein, 1281 aa, Artificial Sequence
  Description of Artificial Sequence: Synthetic polypeptide
MGILPSPGMPALLSLVSLLSVLLMGCVAETGTQCVNLTTRTQLPPAYTNSFTRGVYYPDKVFRSSVLHSTQDLFLPFFSNVTWFHAIHVSGTNGTKRFDNPVLPFNDGVYFASTEKSNIIRGWIFGTTLDSKTQSLLIVNNATNVVIKVCEFQFCNDPFLGVYYHKNNKSWMESEFRVYSSANNCTFEYVSQPFLMDLEGKQGNFKNLREFVFKNIDGYFKIYSKHTPINLVRDLPQGFSALEPLVDLPIGINITRFQTLLALHRSYLTPGDSSSGWTAGAAAYYVGYLQPRTFLLKYNENGTITDAVDCALDPLSETKCTLKSFTVEKGIYQTSNFRVQPTESIVRFPNITNLCPFGEVFNATRFASVYAWNRKRISNCVADYSVLYNSASFSTFKCYGVSPTKLNDLCFTNVYADSFVIRGDEVRQIAPGQTGKIADYNYKLPDDFTGCVIAWNSNNLDSKVGGNYNYLYRLFRKSNLKPFERDISTEIYQAGSTPCNGVEGFNCYFPLQSYGFQPTNGVGYQPYRVVVLSFELLHAPATVCGPKKSTNLVKNKCVNFNFNGLTGTGVLTESNKKFLPFQQFGRDIADATDAVRDPQTLEILDITPCSFGGVSVITPGTNTSNQVAVLYQDVNCTEVPVAIHADQLTPTWRVYSTGSNVFQTRAGCLIGAEHVNNSYECDIPIGAGICASYQTQTNSPSGAGSVASQSIIAYTMSLGAENSVAYSNNSIAIPTNFTISVTTEILPVSMTKTSVDCTMYICGDSTECSNLLLQYGSFCTQLNRALTGIAVEQDKNTQEVFAQVKQIYKTPPIKDFGGFNFSQILPDPSKPSKRSFIEDLLFNKVTLADAGFIKQYGDCLGDIAARDLICAQKFNGLTVLPPLLTDEMIAQYTSALLAGTITSGWTFGAGAALQIPFAMQMAYRFNGIGVTQNVLYENQKLIANQFNSAIGKIQDSLSSTASALGKLQDVVNQNAQALNTLVKQLSSNFGAISSVLNDILSRLDPPEAEVQIDRLITGRLQSLQTYVTQQLIRAAEIRASANLAATKMSECVLGQSKRVDFCGKGYHLMSFPQSAPHGVVFLHVTYVPAQEKNFTTAPAICHDGKAHFPREGVFVSNGTHWFVTQRNFYEPQIITTDNTFVSGNCDVVIGIVNNTVYDPLQPELDSFKEELDKYFKNHTSPDVDLGDISGINASVVNIQKEIDRLNEVAKNLNESLIDLQELGKYEQYIKGSGRENLYFQGGGGSGYIPEAPRDGQAYVRKDGEWVLLSTFLGHHHHHHHH

SEQ ID NO: 2287 - protein, 1281 aa, Artificial Sequence
  Description of Artificial Sequence: Synthetic polypeptide
MGILPSPGMPALLSLVSLLSVLLMGCVAETGTQCVNLTTRTQLPPAYTNSFTRGVYYPDKVFRSSVLHSTQDLFLPFFSNVTWFHAIHVSGTNGTKRFDNPVLPFNDGVYFASTEKSNIIRGWIFGTTLDSKTQSLLIVNNATNVVIKVCEFQFCNDPFLGVYYHKNNKSWMESEFRVYSSANNCTFEYVSQPFLMDLEGKQGNFKNLREFVFKNIDGYFKIYSKHTPINLVRDLPQGFSALEPLVDLPIGINITRFQTLLALHRSYLTPGDSSSGWTAGAAAYYVGYLQPRTFLLKYNENGTITDAVDCALDPLSETKCTLKSFTVEKGIYQTSNFRVQPTESIVRFPNITNLCPFGEVFNATRFASVYAWNRKRISNCVADYSVLYNSASFSTFKCYGVSPTKLNDLCFTNVYADSFVIRGDEVRQIAPGQTGKIADYNYKLPDDFTGCVIAWNSNNLDSKVGGNYNYLYRLFRKSNLKPFERDISTEIYQAGSTPCNGVEGFNCYFPLQSYGFQPTNGVGYQPYRVVVLSFELLHAPATVCGPKKSTNLVKNKCVNFNFNGLTGTGVLTESNKKFLPFQQFGRDIADTTDAVRDPQTLEILDITPCSFGGVSVITPGTNTSNQVAVLYQDVNCTEVPVAIHADQLTPTWRVYSTGSNVFQTRAGCLIGAEHVNNSYECDIPIGAGICASYQTQTNSPSGAGSVASQSIIAYTMSLGAENSVAYSNNSIAIPTNFTISVTTEILPVSMTKTSVDCTMYICGDSTECSNLLLQYGSFCTQLNRALTGIAVEQDKNTQEVFAQVKQIYKTPPIKDFGGFNFSQILPDPSKPSKRSFIEDLLFNKVTLADAGFIKQYGDCLGDIAARDLICAQKFNGLTVLPPLLTDEMIAQYTSALLAGTITSGWTFGAGAALQIPFAMQMAYRFNGIGVTQNVLYENQKLIANQFNSAISKIQDSLSSTASALGKLQDVVNQNAQALNTLVKQLSSNFGAISSVLNDILSRLDPPEAEVQIDRLITGRLQSLQTYVTQQLIRAAEIRASANLAATKMSECVLGQSKRVDFCGKGYHLMSFPQSAPHGVVFLHVTYVPAQEKNFTTAPAICHDGKAHFPREGVFVSNGTHWFVTQRNFYEPQIITTDNTFVSGNCDVVIGIVNNTVYDPLQPELDSFKEELDKYFKNHTSPDVDLGDISGINASVVNIQKEIDRLNEVAKNLNESLIDLQELGKYEQYIKGSGRENLYFQGGGGSGYIPEAPRDGQAYVRKDGEWVLLSTFLGHHHHHHHH

SEQ ID NO: 2288 - protein, 1281 aa, Artificial Sequence
  Description of Artificial Sequence: Synthetic polypeptide
MGILPSPGMPALLSLVSLLSVLLMGCVAETGTQCVNLTTRTQLPPAYTNSFTRGVYYPDKVFRSSVLHSTQDLFLPFFSNVTWFHAIHVSGTNGTKRFDNPVLPFNDGVYFASTEKSNIIRGWIFGTTLDSKTQSLLIVNNATNVVIKVCEFQFCNDPFLGVYYHKNNKSWMESEFRVYSSANNCTFEYVSQPFLMDLEGKQGNFKNLREFVFKNIDGYFKIYSKHTPINLVRDLPQGFSALEPLVDLPIGINITRFQTLLALHRSYLTPGDSSSGWTAGAAAYYVGYLQPRTFLLKYNENGTITDAVDCALDPLSETKCTLKSFTVEKGIYQTSNFRVQPTESIVRFPNITNLCPFGEVFNATRFASVYAWNRKRISNCVADYSVLYNSASFSTFKCYGVSPTKLNDLCFTNVYADSFVIRGDEVRQIAPGQTGKIADYNYKLPDDFTGCVIAWNSNNLDSKVGGNYNYLYRLFRKSNLKPFERDISTEIYQAGSTPCNGVEGFNCYFPLQSYGFQPTNGVGYQPYRVVVLSFELLHAPATVCGPKKSTNLVKNKCVNFNFNGLTGTGVLTESNKKFLPFQQFGRDLADTTDAVRDPQTLEILDITPCSFGGVSVITPGTNTSNQVAVLYQDVNCTEVPVAIHADQLTPTWRVYSTGSNVFQTRAGCLIGAEHVNNSYECDIPIGAGICASYQTQTNSPSGAGSVASQSIIAYTMSLGAENSVAYSNNSIAIPTNFTISVTTEILPVSMTKTSVDCTMYICGDSTECSNLLLQYGSFCTQLNRALTGIAVEQDKNTQEVFAQVKQIYKTPPIKDFGGFNFSQILPDPSKPSKRSFIEDLLFNKVTLADAGFIKQYGDCLGDIAARDLICAQKFNGLTVLPPLLTDEMIAQYTSALLAGTITSGWTFGAGAALQIPFAMQMAYRFNGIGVTQNVLYENQKLIANQFNSAIGKIQDSLSSTASALGKLQDVVNQNAQALNTLVKQLSSNFGAISSVLNDILSRLDPPEAEVQIDRLITGRLQSLQTYVTQQLIRAAEIRASANLAATKMSECVLGQSKRVDFCGKGYHLMSFPQSAPHGVVFLHVTYVPAQEKNFTTAPAICHDGKAHFPREGVFVSNGTHWFVTQRNFYEPQIITTDNTFVSGNCDVVIGIVNNTVYDPLQPELDSFKEELDKYFKNHTSPDVDLGDISGINASVVNIQKEIDRLNEVAKNLNESLIDLQELGKYEQYIKGSGRENLYFQGGGGSGYIPEAPRDGQAYVRKDGEWVLLSTFLGHHHHHHHH

SEQ ID NO: 2289 - protein, 1281 aa, Artificial Sequence
  Description of Artificial Sequence: Synthetic polypeptide
MGILPSPGMPALLSLVSLLSVLLMGCVAETGTQCVNLTTRTQLPPAYTNSFTRGVYYPDKVFRSSVLHSTQDLFLPFFSNVTWFHAIHVSGTNGTKRFDNPVLPFNDGVYFASTEKSNIIRGWIFGTTLDSKTQSLLIVNNATNVVIKVCEFQFCNDPFLGVYYHKNNKSWMESEFRVYSSANNCTFEYVSQPFLMDLEGKQGNFKNLREFVFKNIDGYFKIYSKHTPINLVRDLPQGFSALEPLVDLPIGINITRFQTLLALHRSYLTPGDSSSGWTAGAAAYYVGYLQPRTFLLKYNENGTITDAVDCALDPLSETKCTLKSFTVEKGIYQTSNFRVQPTESIVRFPNITNLCPFGEVFNATRFASVYAWNRKRISNCVADYSVLYNSASFSTFKCYGVSPTKLNDLCFTNVYADSFVIRGDEVRQIAPGQTGKIADYNYKLPDDFTGCVIAWNSNNLDSKVGGNYNYLYRLFRKSNLKPFERDISTEIYQAGSTPCNGVEGFNCYFPLQSYGFQPTNGVGYQPYRVVVLSFELLHAPATVCGPKKSTNLVKNKCVNFNFNGLTGTGVLTESNKKFLPFQQFGRDIADTTDAVRDPQTLEILDITPCSFGGVSVITPGTNTSNQVAVLYQDVNCTEVPVAIHADQLTPTWRVYSTGSNVFQTRAGCLIGAEHVNNSYECDIPIGAGICASYQTQTNSPSGAGSVASQSIIAYTMSLGAENSVAYSNNSIAIPTNFTISVTTEILPVSMTKTSVDCTMYICGDSTECSNLLLQYGSFCTQLNRALTGIADEQDKNTQEVFAQVKQIYKTPPIKDFGGFNFSQILPDPSKPSKRSFIEDLLFNKVTLADAGFIKQYGDCLGDIAARDLICAQKFNGLTVLPPLLTDEMIAQYTSALLAGTITSGWTFGAGAALQIPFAMQMAYRFNGIGVTQNVLYENQKLIANQFNSAIGKIQDSLSSTASALGKLQDVVNQNAQALNTLVKQLSSNFGAISSVLNDILSRLDPPEAEVQIDRLITGRLQSLQTYVTQQLIRAAEIRASANLAATKMSECVLGQSKRVDFCGKGYHLMSFPQSAPHGVVFLHVTYVPAQEKNFTTAPAICHDGKAHFPREGVFVSNGTHWFVTQRNFYEPQIITTDNTFVSGNCDVVIGIVNNTVYDPLQPELDSFKEELDKYFKNHTSPDVDLGDISGINASVVNIQKEIDRLNEVAKNLNESLIDLQELGKYEQYIKGSGRENLYFQGGGGSGYIPEAPRDGQAYVRKDGEWVLLSTFLGHHHHHHHH

SEQ ID NO: 2290 - protein, 1281 aa, Artificial Sequence
  Description of Artificial Sequence: Synthetic polypeptide
MGILPSPGMPALLSLVSLLSVLLMGCVAETGTQCVNLTTRTQLPPAYTNSFTRGVYYPDKVFRSSVLHSTQDLFLPFFSNVTWFHAIHVSGTNGTKRFDNPVLPFNDGVYFASTEKSNIIRGWIFGTTLDSKTQSLLIVNNATNVVIKVCEFQFCNDPFLGVYYHKNNKSWMESEFRVYSSANNCTFEYVSQPFLMDLEGKQGNFKNLREFVFKNIDGYFKIYSKHTPINLVRDLPQGFSALEPLVDLPIGINITRFQTLLALHRSYLTPGDSSSGWTAGAAAYYVGYLQPRTFLLKYNENGTITDAVDCALDPLSETKCTLKSFTVEKGIYQTSNFRVQPTESIVRFPNITNLCPFGEVFNATRFASVYAWNRKRISNCVADYSVLYNSASFSTFKCYGVSPTKLNDLCFTNVYADSFVIRGDEVRQIAPGQTGKIADYNYKLPDDFTGCVIAWNSNNLDSKVGGNYNYLYRLFRKSNLKPFERDISTEIYQAGSTPCNGVEGFNCYFPLQSYGFQPTNGVGYQPYRVVVLSFELLHAPATVCGPKKSTNLVKNKCVNFNFNGLTGTGVLTESNKKFLPFQQFGRDIADTTDAVRDPQTLEILDITPCSFGGVSVITPGTNTSNQVAVLYQDVNCTEVPYAIHADQLTPTWRVYSTGSNVFQTRAGCLIGAEHVNNSYECDIPIGAGICASYQTQTNSPSGAGSVASQSIIAYTMSLGAENSVAYSNNSIAIPTNFTISVTTEILPVSMTKTSVDCTMYICGDSTECSNLLLQYGSFCTQLNRALTGIAVEQDKNTQEVFAQVKQIYKTPPIKDFGGFNFSQILPDPSKPSKRSFIEDLLFNKVTLADAGFIKQYGDCLGDIAARDLICAQKFNGLTVLPPLLTDEMIAQYTSALLAGTITSGWTFGAGAALQIPFAMQMAYRFNGIGVTQNVLYENQKLIANQFNSAIGKIQDSLSSTASALGKLQDVVNQNAQALNTLVKQLSSNFGAISSVLNDILSRLDPPEAEVQIDRLITGRLQSLQTYVTQQLIRAAEIRASANLAATKMSECVLGQSKRVDFCGKGYHLMSFPQSAPHGVVFLHVTYVPAQEKNFTTAPAICHDGKAHFPREGVFVSNGTHWFVTQRNFYEPQIITTDNTFVSGNCDVVIGIVNNTVYDPLQPELDSFKEELDKYFKNHTSPDVDLGDISGINASVVNIQKEIDRLNEVAKNLNESLIDLQELGKYEQYIKGSGRENLYFQGGGGSGYIPEAPRDGQAYVRKDGEWVLLSTFLGHHHHHHHH

SEQ ID NO: 2291 - protein, 1281 aa, Artificial Sequence
  Description of Artificial Sequence: Synthetic polypeptide
MGILPSPGMPALLSLVSLLSVLLMGCVAETGTQCVNLTTRTQLPPAYTNSFTRGVYYPDKVFRSSVLHSTQDLFLPFFSNVTWFHAIHVSGTNGTKRFDNPVLPFNDGVYFASTEKSNIIRGWIFGTTLDSKTQSLLIVNNATNVVIKVCEFQFCNDPFLGVYYHKNNKSWMESEFRVYSSANNCTFEYVSQPFLMDLEGKQGNFKNLREFVFKNIDGYFKIYSKHTPINLVRDLPQGFSALEPLVDLPIGINITRFQTLLALHRSYLTPGDSSSGWTAGAAAYYVGYLQPRTFLLKYNENGTITDAVDCALDPLSETKCTLKSFTVEKGIYQTSNFRVQPTESIVRFPNITNLCPFGEVFNATRFASVYAWNRKRISNCVADYSVLYNSASFSTFKCYGVSPTKLNDLCFTNVYADSFVIRGDEVRQIAPGQTGKIADYNYKLPDDFTGCVIAWNSNNLDSKVGGNYNYLYRLFRKSNLKPFERDISTEIYQAGSTPCNGVEGFNCYFPLQSYGFQPTNGVGYQPYRVVVLSFELLHAPATVCGPKKSTNLVKNKCVNFNFNGLTGTGVLTESNKKFLPFQQFGRDIADTTDAVRDPQTLEILDITPCSFGGVSVITPGTNTSNQVAVLYQDVNCTEVPVAIHADQLTPTWRVYSTGSNVFQTRAGCLIGAEHVNNSYECDIPIGAGICASYQTQTNSPSGAGSVASQSIIAYTMSLGAENSVAYSNNSIAIPTNFTISVQTEILPVSMTKTSVDCTMYICGDSTECSNLLLQYGSFCTQLNRALTGIAVEQDKNTQEVFAQVKQIYKTPPIKDFGGFNFSQILPDPSKPSKRSFIEDLLFNKVTLADAGFIKQYGDCLGDIAARDLICAQKFNGLTVLPPLLTDEMIAQYTASLLAGTITAGWTFGAGAALVIPFAMQMAYRFNGIGVQQNVLYENQKIIANQFNNAIGNIQDSLSSTASALGKLQDVVNQNAQALNTLVKQLSSNFGAISSVLNDILSRLDPPEAEVQIDRLITGRLQSLQTYVTQQLIRAAEIRASANLAATKMSECVKGQSNRYGFCGNGYHLMSFPQSAPHGVVFLHVTYVPTQFKNFTTAPAICHDGKAHFPREGVFVSNGTHWFVTQRNFYEPQIITTDNTFVSGNCDVVIGIVNNTVYDPLQPELDSFKEELDKYFKNHTSPDVDLGDISGINASVVNIQKEIDRLNEVAKNLNESLIDLQELGKYEQYIKGSGRENLYFQGGGGSGYIPEAPRDGQAYVRKDGEWVLLSTFLGHHHHHHHH

SEQ ID NO: 2292 - protein, 1281 aa, Artificial Sequence
  Description of Artificial Sequence: Synthetic polypeptide
MGILPSPGMPALLSLVSLLSVLLMGCVAETGTQCVNLTTRTQLPPAYTNSKTRGVYYPDKVFRSSVLHSTQDLFLPFFSNVTWFHAIHVSGTNGTKRFDNPVLPFNDGVYFASTEKSNIIRGWIFGTTLDSKTQSLLIVNNATNVVIKVCEFQFCNDPFLGVYYHKNNKSWMESEFRVYSSANNCTFEYVSQPFLMDLEGKQGNFKNLREFVFKNIDGYFKIYSKHTPINLVRDLPQGFSALEPLVDLPIGINITRFQTLLALHRSYLTPGDSSSGWTAGAAAYYVGYLQPRTFLLKYNENGTITDAVDCALDPLSETKCTLKSFTVEKGIYQTSNFRVQPTESIVRFPNITNLCPFGEVFNATRFASVYAWNRKRISNCVADYSVLYNSASFSTFKCYGVSPTKLNDLCFTNVYADSFVIRGDEVRQIAPGQTGKIADYNYKLPDDFTGCVIAWNSNNLDSKVGGNYNYLYRLFRKSNLKPFERDISTEIYQAGSTPCNGVEGFNCYFPLQSYGFQPTNGVGYQPYRVVVLSFELLHAPATVCGPKKSTNLVKNKCVNFNFNGLTGTGVLTESNKKFLPFQQFGRDIADTTDAVRDPQTLEILDITPCSFGGVSVITPGTNTSNQVAVLYQDVNCTEVPVAIHADQLTPTWRVYSTGSNVFQTRAGCLIGAEHVNNSYECDIPIGAGICASYQTQTNSPSGAGSVASQSIIAYTMSLGAENSVAYSNNSIAIPTNFTISVTTEILPVSMTKTSVDCTMYICGDSTECSNLLLQYGSFCTQLNRALTGIAVEQDKNTQEVFAQVKQIYKTPPIKDFGGFNFSQILPDPSKPSKRSFIEDLLFNKVTLADAGFIKQYGDCLGDIAARDLICAQKFNGLTVLPPLLTDEMIAQYTSALLAGTITSGWTFGAGAALQIPFAMQMAYRFNGIGVTQNVLYENQKLIANQFNSAIGKIQDSLSSTASALGKLQDVVNQNAQALNTLVKQLSSNFGAISSVLNDILSRLDPPEAEVQIDRLITGRLQSLQTYVTQQLIRAAEIRASANLAATKMSECVLGQSKRVDFCGKGYHLMSFPQSAPHGVVFLHVTYVPAQEKNFTTAPAICHDGKAHFPREGVFVSNGTHWFVTQRNFYEPQIITTDNTFVSGNCDVVIGIVNNTVYDPLQPELDSFKEELDKYFKNHTSPDVDLGDISGINASVVNIQKEIDRLNEVAKNLNESLIDLQELGKYEQYIKGSGRENLYFQGGGGSGYIPEAPRDGQAYVRKDGEWVLLSTFLGHHHHHHHH

SEQ ID NO: 2293 - protein, 1281 aa, Artificial Sequence
  Description of Artificial Sequence: Synthetic polypeptide
MGILPSPGMPALLSLVSLLSVLLMGCVAETGTQCVNLTTRTQLPPAYTNSFTRGVYYPDKVFRSSVLHSTQDLFLPFFSNVTWFHAIHVSGTNGTKRFDNPVLPFNDGVYFASTEKSNIIRGWIFGTTLDSKTQSLLIVNNATNVVIKVCEFQFCNDPFLGVYYHKNNKSWMESEFRVYSSANNCTFEYVSQPFLMDLEGKQGNFKNLREFVFKNIDGYFKIYSKHTPINLVRDLPQGFSALEPLVDLPIGINITRFQTLLALHRSYLTPGDSSSGWQAGAAAYYVGYLQPRTFLLKYNENGTITDAVDCALDPLSETKCTLKSFTVEKGIYQTSNFRVQPTESIVRFPNITNLCPFGEVFNATRFASVYAWNRKRISNCVADYSVLYNSASFSTFKCYGVSPTKLNDLCFTNVYADSFVIRGDEVRQIAPGQTGKIADYNYKLPDDFTGCVIAWNSNNLDSKVGGNYNYLYRLFRKSNLKPFERDISTEIYQAGSTPCNGVEGFNCYFPLQSYGFQPTNGVGYQPYRVVVLSFELLHAPATVCGPKKSTNLVKNKCVNFNFNGLTGTGVLTESNKKFLPFQQFGRDIADTTDAVRDPQTLEILDITPCSFGGVSVITPGTNTSNQVAVLYQDVNCTEVPVAIHADQLTPTWRVYSTGSNVFQTRAGCLIGAEHVNNSYECDIPIGAGICASYQTQTNSPSGAGSVASQSIIAYTMSLGAENSVAYSNNSIAIPTNFTISVTTEILPVSMTKTSVDCTMYICGDSTECSNLLLQYGSFCTQLNRALTGIAVEQDKNTQEVFAQVKQIYKTPPIKDFGGFNFSQILPDPSKPSKRSFIEDLLFNKVTLADAGFIKQYGDCLGDIAARDLICAQKFNGLTVLPPLLTDEMIAQYTSALLAGTITSGWTFGAGAALQIPFAMQMAYRFNGIGVTQNVLYENQKLIANQFNSAIGKIQDSLSSTASALGKLQDVVNQNAQALNTLVKQLSSNFGAISSVLNDILSRLDPPEAEVQIDRLITGRLQSLQTYVTQQLIRAAEIRASANLAATKMSECVLGQSKRVDFCGKGYHLMSFPQSAPHGVVFLHVTYVPAQEKNFTTAPAICHDGKAHFPREGVFVSNGTHWFVTQRNFYEPQIITTDNTFVSGNCDVVIGIVNNTVYDPLQPELDSFKEELDKYFKNHTSPDVDLGDISGINASVVNIQKEIDRLNEVAKNLNESLIDLQELGKYEQYIKGSGRENLYFQGGGGSGYIPEAPRDGQAYVRKDGEWVLLSTFLGHHHHHHHH

SEQ ID NO: 2294 - protein, 1281 aa, Artificial Sequence
  Description of Artificial Sequence: Synthetic polypeptide
MGILPSPGMPALLSLVSLLSVLLMGCVAETGTQCVNLTTRTQLPPAYTNSFTRGVYYPDKVFRSSVLHSTQDLFLPFFSNVTWFHAIHVSGTNGTKRFDNPVLPFNDGVYFASTEKSNIIRGWIFGTTLDSKTQSLLIVNNATNVVIKVCEFQFCNDPFLGVYYHKNNKSWMESEFRVYSSANNCTFEYVSQPFLMDLEGKQGNFKNLREFVFKNIDGYFKIYSKHTPINLVRDLPQGFSALEPLVDLPIGINITRFQTLLALHRSYLTPGDSSSGWTAGAAAYYVGYLQPRTFLLKYNENGTITDAVDCALDPLSETKCTLKSFTVEKGIYQTSNFRVQPTESIVRFPNITNLCPFGEVFNATRFASVYAWNRKRISNCVADYSVLYNSASFSTFKCYGVSPTKLNDLCFTNVYADSFVIRGDEVRQIAPGQTGKIADYNYKLPDDFTGCVIAWNSNNLDSKVGGNYNYLYRLFRKSNLKPFERDISTEIYQAGSTPCNGVEGFNCYFPLQSYGFQPTNGVGYQPYRVVVLSFELLHAPATVCGPKKSTNLVKNKCVNFNFNGLTGTGVLTESNKKFLPFQQFGRDIADTTDAVRDPQTLEILDITPCSFGGVSVITPGTNTSNQVAVLYQDVNCTEVPVAIHADQLTPTWRVYSTGSNVFQTRAGCLIGAEHVNNSYECDIPIGAGICASYQTQTNSPSGAGSVASQSIIAYTMSLGAENSVAYSNNSIAIPTNFTISVTTEILPVSMTKTSVDCTMYICGDSTECLNLLSQYGSFCSQLERALNGIAVEQDKNTQEVFAQVKQIYKTPPIKDFGGFNFSQILPDPSKPSKRSFIEDLLFNKVTLADAGFIKQYGDCLGDIAARDLICAQKFNGLTVLPPLLTDEMIAQYTSALLAGTITSGWTFGAGAALQIPFAMQMAYRFNGIGVTQNVLYENQKLIANQFNSAIGKIQDSLSSTASALGKLQDVVNQNAQALNTLVKQLSSNFGAISSVINDIYNRLDKPEAQAQIDRLITGRLQSLQTYVTQQLIRAAEIRASANLAATKMSECVLGQSKRVDFCGKGYHLMSFPQSAPHGVVFLHVTYVPAQEKNFTTAPAICHDGKAHFPREGVFVSNGTHWFVTQRNFYEPQIITTDNTFVSGNCDVVIGIVNNTVYDPLQPELDSFKEELDKYFKNHTSPDVDLGDISGINASVVNIQKEIDRLNEVAKNLNESLIDLQELGKYEQYIKGSGRENLYFQGGGGSGYIPEAPRDGQAYVRKDGEWVLLSTFLGHHHHHHHH

SEQ ID NO: 2295 - protein, 1281 aa, Artificial Sequence
  Description of Artificial Sequence: Synthetic polypeptide
MGILPSPGMPALLSLVSLLSVLLMGCVAETGTQCVNLTTRTQLPPAYTNSFTRGVYYPDKIFRSSVLHLTQDLFLPFFSNVTWFHAIHVSGTNGTKRFDNPVLPFNDGVYFAATEKSNIIRGWIFGTTLDSKTQSLLIVNNATNVVIKVCEFQFCNDPFLGVYYHKNNKSWMESEFRVYSSANNCTFEYVSQPFLMDLEGKQGNFKNLREFVFKNIDGYFKIYSKHTPINLVRDLPQGFSALEPLVKLPIGINITRFQTLLALHRSYLTPGDSSSGWTAGAAAYYVGYLQPRTFLLKYNENGTITDAVDCALDPLSETKCTLKSFTVEKGIYQTSNFRVQPTESIVRFPNITNLCPFGEVFNATRFASVYAWNRKRISNCVADYSVLYNSASFSTFKCYGVSPTKLNDLCFTNVYADSFVIRGDEVRQIAPGQTGKIADYNYKLPDDFTGCVIAWNSNNLDSKVGGNYNYLYRLFRKSNLKPFERDISTEIYQAGSTPCNGVEGFNCYFPLQSYGFQPTNGVGYQPYRVVVLSFELLHAPATVCGPKKSTNLVKNKCVNFNFNGLTGTGVLTESNKKFLPFQQFGRDISDTTDAVRDPQTLEILDITPCSFGGVSVITPGTNTSNQVAVLYQDVNCTDVPVAIHADQLTPTWRVYSTGSNVFQTQAGCLIGAEHVNNSYECDIPIGAGICASYQTQTNSPSGAGSVASQSIIAYTMSLGAENSVAYSNNSIAIPTNFTISVTTEILPVSMTKTSVDCTMYICGDSTECSNLLLQYGSFCTQLNRALTGIAVEQDKNTQEVFAQVKQIYKTPPIKDFGGFNFSQILPDPSKPSKRSFIEDLLFNKVTLADAGFIKQYGDCLGDIAARDLICAQKFNGLTVLPPLLTDEMIAQYTAALLAGTITAGWTFGAGAALQIPFAMQMAYRFNGIGVTQNVLYENQKLIANQFNSAIGKIQDSLSSTASALGKLQDVVNQNAQALNTLVKQLSSNFGAISSVLNDILSRLDPPEAEVQIDRLITGRLQSLQTYVTQQLIRAAEIRASANLAATKMSECVLGQSKRVDFCGKGYHLMSFPQSAPHGVVFLHVTYVPAQEKNFTTAPAICHDGKAHFPREGVFVSNGTHWFVTQRNFYEPQIITTDNTFVSGNCDVVIGIVNNTVYDPLQPELDSFKEELDKYFKNHTSPDVDLGDISGINASVVNIQKEIDRLNEVAKNLNESLIDLQELGKYEQYIKGSGRENLYFQGGGGSGYIPEAPRDGQAYVRKDGEWVLLSTFLGHHHHHHHH

SEQ ID NO: 2296 - protein, 1281 aa, Artificial Sequence
  Description of Artificial Sequence: Synthetic polypeptide
MGILPSPGMPALLSLVSLLSVLLMGCVAETGTQCVNLTTRTQLPPAYTNSFTRGVYYPDKVFRSSVLHSTQDLFLPFFSNVTWFHAIHVSGTNGTKRFDNPVLPFNDGVYFASTEKSNIIRGWIFGTTLDSKTQSLLIVNNATNVVIKVCEFQFCNDPFLGVYYHKNNKSWMESEFRVYSSANNCTFEYVSQPFLMDLEGKQGNFKNLREFVFKNIDGYFKIYSKHTPINLVRDLPQGFSALEPLVDLPIGINITRFQTLLALHRSYLTPGDSSSGWTAGAAAYYVGYLQPRTFLLKYNENGTITDAVDCALDPLSETKCTLKSFTVEKGIYQTSNFRVQPTESIVRFPNITNLCPFGEVFNATRFASVYAWNRKRISNCVADYSVLYNSASFSTFKCYGVSPTKLNDLCFTNVYADSFVIRGDEVRQIAPGQTGKIADYNYKLPDDFTGCVIAWNSNNLDSKVGGNYNYLYRLFRKSNLKPFERDISTEIYQAGSTPCNGVEGFNCYFPLQSYGFQPTNGVGYQPYRVVVLSFELLHAPATVCGPKKSTNLVKNKCVNFNFNGLTGTGVLTESNKKFLPFQQFGRDIADTTDAVRDPQTLEILDITPCSFGGVSVITPGTNTSNQVAVLYQDVNCTEVPVAIHADQLTPTWRVYSTGSNVFQTRAGCLIGAEHVNNSYECDIPIGAGICASYQTQTNSPSGAGSVASQSIIAYTMSLGAENSVAYSNNSIAIPTNFTISVTTEILPVSMTKTSVDCTMYICGDSTECSNLLLQYGSFCTQLNRALTGIAVEQDKNTQEVFAQVKQIYKTPPIKDFGGFNFSQILPDPSKPSKRSFIEDLLFNKVTLADAGFIKQYGDCLGDIAARDLICAQKFNGLTVLPPLLTDEMIAQYTSALLAGTITSGWTFGAGAALQIPFAMQMAYRFNGIGVTQNVLYENQKLIANQFNSAIGKIQDSLSSTASALGKLQDVVNQNAQALNTLVKQLSSNFGAISSVLNDILSRLDPPEAEVQIDRLITGRLQSLQTYVTQQLIRAAEIRASANLAATKMSECVLGQSKRVDFCGKGYHLMSFPQSAPHGVVFLHVTYVPAQEKNFTTAPAICHDGKAHFPREGVFVSNGTHWFVTQRNFYEPQTITTDNTFVSGNCDVVIGIVNNTVYDPLQPELDSFKEELDKYFKNHTSPDVDLGDISGINASVVNIQKEIDRLNEVAKNLNESLIDLQELGKYEQYIKGSGRENLYFQGGGGSGYIPEAPRDGQAYVRKDGEWVLLSTFLGHHHHHHHH

SEQ ID NO: 2297 - protein, 1281 aa, Artificial Sequence
  Description of Artificial Sequence: Synthetic polypeptide
MGILPSPGMPALLSLVSLLSVLLMGCVAETGTQCVNLTTRTQLPPAYTNSFTRGVYYPDEVFRSSVLHSTQDLFLPFFSNVTWFHAIHVSGTNGTKRFDNPVLPFNDGVYFASTEKSNIIRGWIFGTTLDSKTQSLLIVNNATNVVIKVCEFQFCNDPFLGVYYHKNNKSWMESEFRVYSSANNCTFEYVSQPFLMDLEGKQGNFKNLREFVFKNIDGYFKIYSKHTPINLVRDLPQGFSALEPLVDLPIGINITRFQTLLALHRSYLTPGDSSSGWTAGAAAYYVGYLQPRTFLLKYNENGTITDAVDCALDPLSETKCTLKSFTVEKGIYQTSNFRVQPTESIVRFPNITNLCPFGEVFNATRFASVYAWNRKRISNCVADYSVLYNSASFSTFKCYGVSPTKLNDLCFTNVYADSFVIRGDEVRQIAPGQTGKIADYNYKLPDDFTGCVIAWNSNNLDSKVGGNYNYLYRLFRKSNLKPFERDISTEIYQAGSTPCNGVEGFNCYFPLQSYGFQPTNGVGYQPYRVVVLSFELLHAPATVCGPKKSTNLVKNKCVNFNFNGLTGTGVLTESNKKFLPFQQFGRDIADTTDAVRDPQTLEILDITPCSFGGVSVITPGTNTSNQVAVLYQDVNCTEVPVAIHADQLTPTWRVYSTGSNVFQTRAGCLIGAEHVNNSYECDIPIGAGICASYQTQTNSPSGAGSVASQSIIAYTMSLGAENSVAYSNNSIAIPTNFTISVTTEILPVSMTKTSVDCTMYICGDSTECSNLLLQYGSFCTQLNRALTGIAVEQDKNTQEVFAQVKQIYKTPPIKDFGGFNFSQILPDPSKPSKRSFIEDLLFNKVTLADAGFIKQYGDCLGDIAARDLICAQKFNGLTVLPPLLTDEMIAQYTSALLAGTITSGWTFGAGAALQIPFAMQMAYRFNGIGVTQNVLYENQKLIANQFNSAIGKIQDSLSSTASALGKLQDVVNQNAQALNTLVKQLSSNFGAISSVLNDILSRLDPPEAEVQIDRLITGRLQSLQTYVTQQLIRAAEIRASANLAATKMSECVLGQSKRVDFCGKGYHLMSFPQSAPHGVVFLHVTYVPAQEKNFTTAPAICHDGKAHFPREGVFVSNGTHWFVTQRNFYEPQIITTDNTFVSGNCDVVIGIVNNTVYDPLQPELDSFKEELDKYFKNHTSPDVDLGDISGINASVVNIQKEIDRLNEVAKNLNESLIDLQELGKYEQYIKGSGRENLYFQGGGGSGYIPEAPRDGQAYVRKDGEWVLLSTFLGHHHHHHHH

SEQ ID NO: 2298 - protein, 1281 aa, Artificial Sequence
  Description of Artificial Sequence: Synthetic polypeptide
MGILPSPGMPALLSLVSLLSVLLMGCVAETGTQCVNLTTRTQLPPAYTNSFTRGVYYPDKVFRSSVLHSTQDLFLPFFSNVTWFHAIHVSGTNGTKRFDNPVLPFNDGVYFASTEKSNIIRGWIFGTTLDSKTQSLLIVNNATNVVIKVCEFQFCNDPFLGVYYHKNNKSWMESEFRVYSSANNCTFEYVSQPFLMDLEGKQGNFKNLREFVFKNIDGYFKIYSKHTPINLVRDLPQGFSALEPLVDLPIGINITRFQTLLALHRSYLTPGDSSSGWTAGAAAYYVGYLQPRTFLLKYNENGTITDAVDCALDPLSETKCTLKSFTVEKGIYQTSNFRVQPTESIVRFPNITNLCPFGEVFNATRFASVYAWNRKRISNCVADYSVLYNSASFSTFKCYGVSPTKLNDLCFTNVYADSFVIRGDEVRQIAPGQTGKIADYNYKLPDDFTGCVIAWNSNNLDSKVGGNYNYLYRLFRKSNLKPFERDISTEIYQAGSTPCNGVEGFNCYFPLQSYGFQPTNGVGYQPYRVVVLSFELLHAPATVCGPKKSTNLVKNKCVNFNFNGLTGTGVLTESNKKFLPFQQFGRDIADTTDAVRDPQTLEILDITPCSFGGVSVITPGTNTSNAVAVLYQDVNCTEVPVAIHADQLTPTWRVYSTGSNVFQTRAGCLIGAEHVNNSYECDIPIGAGICASYQTQTNSPSGAGSVASQSIIAYTMSLGAENSVAYSNNSIAIPTNFTISVTTEILPVSMTKTSVDCTMYICGDSTECSNLLLQYGSFCTQLNRALTGIAVEQDKNTQEVFAQVKQIYKTPPIKDFGGFNFSQILPDPSKPSKRSFIEDLLFNKVTLADAGFIKQYGDCLGDIAARDLICAQKFNGLTVLPPLLTDEMIAQYTSALLAGTITSGWTFGAGAALQIPFAMQMAYRFNGIGVTQNVLYENQKLIANQFNSAIGKIQDSLSSTASALGKLQDVVNQNAQALNTLVKQLSSNFGAISSVLNDILSRLDPPEAEVQIDRLITGRLQSLQTYVTQQLIRAAEIRASANLAATKMSECVLGQSKRVDFCGKGYHLMSFPQSAPHGVVFLHVTYVPAQEKNFTTAPAICHDGKAHFPREGVFVSNGTHWFVTQRNFYEPQIITTDNTFVSGNCDVVIGIVNNTVYDPLQPELDSFKEELDKYFKNHTSPDVDLGDISGINASVVNIQKEIDRLNEVAKNLNESLIDLQELGKYEQYIKGSGRENLYFQGGGGSGYIPEAPRDGQAYVRKDGEWVLLSTFLGHHHHHHHH

SEQ ID NO: 2299 - protein, 1281 aa, Artificial Sequence
  Description of Artificial Sequence: Synthetic polypeptide
MGILPSPGMPALLSLVSLLSVLLMGCVAETGTQCVNLTTRTQLPPAYTNSFTRGVYYPDKVFRSSVLHSTQDLFLPFFSNVTWFHAIHVSGTNGTKRFDNPVLPFNDGVYFASTEKSNIIRGWIFGTTLDSKTQSLLIVNNATNVVIKVCEFQFCNDPFLGVYYHKNNKSWMESEFRVYSSANNCTFEYVSQPFLMDLEGKQGNFKNLREFVFKNIDGYFKIYSKHTPINLVRDLPQGFSALEPLVDLPIGINITRFQTLLALHRSYLTPGDSSSGWTAGAAAYYVGYLQPRTFLLKYNENGTITDAVDCALDPLSETKCTLKSFTVEKGIYQTSNFRVQPTESIVRFPNITNLCPFGEVFNATRFASVYAWNRKRISNCVADYSVLYNSASFSTFKCYGVSPTKLNDLCFTNVYADSFVIRGDEVRQIAPGQTGKIADYNYKLPDDFTGCVIAWNSNNLDSKVGGNYNYLYRLFRKSNLKPFERDISTEIYQAGSTPCNGVEGFNCYFPLQSYGFQPTNGVGYQPYRVVVLSFELLHAPATVCGPKKSTNLVKNKCVNFNFNGLTGTGVLTESNKKFLPFQQFGRDIADTTDAVRDPQTLEILDIQPCSFGGVSVITPGTNTSNQVAVLYQDVNCTEVPVAIHADQLTPTWRVYSTGSNVFQTRAGCLIGAEHVNNSYECDIPIGAGICASYQTQTNSPSGAGSVASQSIIAYTMSLGAENSVAYSNNSIAIPTNFTISVTTEILPVSMTKTSVDCTMYICGDSTECSNLLLQYGSFCTQLNRALTGIAVEQDKNTQEVFAQVKQIYKTPPIKDFGGFNFSQILPDPSKPSKRSFIEDLLFNKVTLADAGFIKQYGDCLGDIAARDLICAQKFNGLTVLPPLLTDEMIAQYTSALLAGTITSGWTFGAGAALQIPFAMQMAYRFNGIGVTQNVLYENQKLIANQFNSAIGKIQDSLSSTASALGKLQDVVNQNAQALNTLVKQLSSNFGAISSVLNDILSRLDPPEAEVQIDRLITGRLQSLQTYVTQQLIRAAEIRASANLAATKMSECVLGQSKRVDFCGKGYHLMSFPQSAPHGVVFLHVTYVPAQEKNFTTAPAICHDGKAHFPREGVFVSNGTHWFVTQRNFYEPQIITTDNTFVSGNCDVVIGIVNNTVYDPLQPELDSFKEELDKYFKNHTSPDVDLGDISGINASVVNIQKEIDRLNEVAKNLNESLIDLQELGKYEQYIKGSGRENLYFQGGGGSGYIPEAPRDGQAYVRKDGEWVLLSTFLGHHHHHHHH

SEQ ID NO: 2300 - protein, 1281 aa, Artificial Sequence
  Description of Artificial Sequence: Synthetic polypeptide
MGILPSPGMPALLSLVSLLSVLLMGCVAETGTQCVNLTTRTQLPPAYTNSFTRGVYYPDKIFRSNVLHSTQDLFLPFFSNVTWFHAIHVSGTNGTKRFDNPVLPFNDGVYFASTEKSNIIRGWIFGTTLDSKTQSLLIVNNATNVVIKVCEFQFCNDPFLGVYYHKNNKSWMESEFRVYSSANNCTFEYVSQPFLMDLEGKQGNFKNLREFVFKNIDGYFKIYSKHTPINLVRDLPQGFSALEPLVDLPIGINITRFQTLLALHRSYLTPGDSSSGWTAGAAAYYVGYLQPRTFLLKYDENGYITDAVDCALDPLSETKCTLKSFTVEKGIYQTSNFRVQPTESIVRFPNITNLCPFGEVFNATRFASVYAWNRKRISNCVADYSVLYNSASFSTFKCYGVSPTKLNDLCFTNVYADSFVIRGDEVRQIAPGQTGKIADYNYKLPDDFTGCVIAWNSNNLDSKVGGNYNYLYRLFRKSNLKPFERDISTEIYQAGSTPCNGVEGFNCYFPLQSYGFQPTNGVGYQPYRVVVLSFELLHAPATVCGPKKSTNLVKNKCVNFNFNGLTGTGVLTESNKKFLPFQQFGRDIADTTDAVRDPQTLEILDITPCSFGGVSVITPGTNTSNQVAVLYQDVNCTEVPVAIHADQLTPTWRVYSTGSNVFQTRAGCLIGAEHVNNSYECDIPIGAGICASYQTQTNSPSGAGSVASQSIIAYTMSLGAENSVAYSNNSIAIPTNFTISVTTEILPVSMTKTSVDCTMYICGDSTECSNLLLQYGSFCTQLNRALTGIAVEQDKNTQEVFAQVKQIYKTPPIKDFGGFNFSQILPDPSKPSKRSFIEDLLFNKVTLADAGFIKQYGDCLGDIAARDLICAQKFNGLTVLPPLLTDEMIAQYTSALLAGTITSGWTFGAGAALQIPFAMQMAYRFNGIGVTQNVLYENQKLIANQFNSAIGKIQDSLSSTASALGKLQDVVNQNAQALNTLVKQLSSNFGAISSVLNDILSRLDPPEAEVQIDRLITGRLQSLQTYVTQQLIRAAEIRASANLAATKMSECVLGQSKRVDFCGKGYHLMSFPQSAPHGVVFLHVTYVPAQEKNFTTAPAICHDGKAHFPREGVFVSNGTHWFVTQRNFYEPQIITTDNTFVSGNCDVVIGIVNNTVYDPLQPELDSFKEELDKYFKNHTSPDVDLGDISGINASVVNIQKEIDRLNEVAKNLNESLIDLQELGKYEQYIKGSGRENLYFQGGGGSGYIPEAPRDGQAYVRKDGEWVLLSTFLGHHHHHHHH

SEQ ID NO: 2301 - protein, 1281 aa, Artificial Sequence
  Description of Artificial Sequence: Synthetic polypeptide
MGILPSPGMPALLSLVSLLSVLLMGCVAETGTQCVNLTTRTQLPPAYTNSFTRGVYYPDKVFRSSVLHSTQDLFLPFFSNVTWFHAIHVSGTNGTKRFDNPVLPFNDGVYFASTEKSNIIRGWIFGTTLDSKTQSLLIVNNATNVVIKVCEFQFCNDPFLGVYYHKNNKSWMESEFRVYSSANNCTFEYVSQPFLMDLEGKQGNFKNLREFVFKNIDGYFKIYSKHTPINLVRDLPQGFSALEPLVDLPIGINITRFQTLLALHRSYLTPGDSSSGWTAGAAAYYVGYLQPRTFLLKFNENGTITDAVDCALDPLSETKCTLKSFTVEKGIYQTSNFRVQPTESIVRFPNITNLCPFGEVFNATRFASVYAWNRKRISNCVADYSVLYNSASFSTFKCYGVSPTKLNDLCFTNVYADSFVIRGDEVRQIAPGQTGKIADYNYKLPDDFTGCVIAWNSNNLDSKVGGNYNYLYRLFRKSNLKPFERDISTEIYQAGSTPCNGVEGFNCYFPLQSYGFQPTNGVGYQPYRVVVLSFELLHAPATVCGPKKSTNLVKNKCVNFNFNGLTGTGVLTESNKKFLPFQQFGRDIADTTDAVRDPQTLEILDITPCSFGGVSVITPGTNTSNQVAVLYQDVNCTEVPVAIHADQLTPTWRVYSTGSNVFQTRAGCLIGAEHVNNSYECDIPIGAGICASYQTQTNSPSGAGSVASQSIIAYTMSLGAENSVAYSNNSIAIPTNFTISVTTEILPVSMTKTSVDCTMYICGDSTECSNLLLQYGSFCTQLNRALTGIAVEQDKNTQEVFAQVKQIYKTPPIKDFGGFNFSQILPDPSKPSKRSFIEDLLFNKVTLADAGFIKQYGDCLGDIAARDLICAQKFNGLTVLPPLLTDEMIAQYTSALLAGTITSGWTFGAGAALQIPFAMQMAYRFNGIGVTQNVLYENQKLIANQFNSAIGKIQDSLSSTASALGKLQDVVNQNAQALNTLVKQLSSNFGAISSVLNDILSRLDPPEAEVQIDRLITGRLQSLQTYVTQQLIRAAEIRASANLAATKMSECVLGQSKRVDFCGKGYHLMSFPQSAPHGVVFLHVTYVPAQEKNFTTAPAICHDGKAHFPREGVFVSNGTHWFVTQRNFYEPQIITTDNTFVSGNCDVVIGIVNNTVYDPLQPELDSFKEELDKYFKNHTSPDVDLGDISGINASVVNIQKEIDRLNEVAKNLNESLIDLQELGKYEQYIKGSGRENLYFQGGGGSGYIPEAPRDGQAYVRKDGEWVLLSTFLGHHHHHHHH

SEQ ID NO: 2302 - protein, 1281 aa, Artificial Sequence
  Description of Artificial Sequence: Synthetic polypeptide
MGILPSPGMPALLSLVSLLSVLLMGCVAETGTQCVNLTTRTQLPPAYTNSFTRGVYYPDKVFRSSVLHSTQDLFLPFFSNVTWFHAIHVSGTNGTKRFDNPVLPFNDGVYFASTEKSNIIRGWIFGTTLDSKTQSLLIVNNATNVVIKVCEFQFCNDPFLGVYYHKNNKSWMESEFRVYSSANNCTFEYVSQPFLMDLEGKQGNFKNLREFVFKNIDGYFKIYSKHTPINLVRDLPQGFSALEPLVDLPIGINITRFQTLLALHRSYLTPGDSSSGWTAGAAAYYVGYLQPRTFLLKYNENGTITDAVDCALDPLSETKCTLKSFTVEKGIYQTSNFRVQPTESIVRFPNITNLCPFGEVFNATRFASVYAWNRKRISNCVADYSVLYNSASFSTFKCYGVSPTKLNDLCFTNVYADSFVIRGDEVRQIAPGQTGKIADYNYKLPDDFTGCVIAWNSNNLDSKVGGNYNYLYRLFRKSNLKPFERDISTEIYQAGSTPCNGVEGFNCYFPLQSYGFQPTNGVGYQPYRVVVLSFELLHAPATVCGPKKSTNLVKNKCVNFNFNGLTGTGVLTESNKKFLPFQQFGRDIADTTDAVRDPQTLEILDITPCSFGGVSVITPGTNTSNQVAVLYQDVNCTEVPVAIHADQLTPTWRVYSTGSNVFQTRAGCLIGAEHVNNSYECDIPIGAGICASYQTQTNSPSGAGSVASQSIIAYTMSLGAENSVAYSNNSIAIPTNFTISVTTEILPVSMTKTSVDCTMYICGDSTECSNLLLQYGSFCTQLNRALTGIAVEQDKNTQEVFAQVKQIYKTPPIKDFGGFNFSQILPDPSKPSKRSFIEDLLFNKVTLADAGFIKQYGDCLGDINARDLICAQKFNGLTVLPPLLTDEMIAQYTSALLAGTITSGWTFGAGAALQIPFAMQMAYRFNGIGVTQNVLYENQKLIANQFNSAIGKIQDSLSSTASALGKLQDVVNQNAQALNTLVKQLSSNFGAISSVLNDILSRLDPPEAEVQIDRLITGRLQSLQTYVTQQLIRAAEIRASANLAATKMSECVLGQSKRVDFCGKGYHLMSFPQSAPHGVVFLHVTYVPAQEKNFTTAPAICHDGKAHFPREGVFVSNGTHWFVTQRNFYEPQIITTDNTFVSGNCDVVIGIVNNTVYDPLQPELDSFKEELDKYFKNHTSPDVDLGDISGINASVVNIQKEIDRLNEVAKNLNESLIDLQELGKYEQYIKGSGRENLYFQGGGGSGYIPEAPRDGQAYVRKDGEWVLLSTFLGHHHHHHHH

SEQ ID NO: 2303 - protein, 1281 aa, Artificial Sequence
  Description of Artificial Sequence: Synthetic polypeptide
MGILPSPGMPALLSLVSLLSVLLMGCVAETGTQCVNLTTRTQLPPAYTNSFTRGVYYPDKVFRSSVLHSTQDLFLPFFSNVTWFHAIHVSGTNGTKRFDNPVLPFNDGVYFASTEKSNIIRGWIFGTTLDSKTQSLLIVNNATNVVIKVCEFQFCNDPFLGVYYHKNNKSWMESEFRVYSSANNCTFEYSSQPFLMDLEGKQGNFKNLREFVFKNIDGYFKIYSKHTPINLVRDLPQGFSALEPLVDLPIGINITRFQTLLALHRSYLTPGDSSSGWTAGAAAYYVGYLQPRTFLLKYNENGTITDAVDCALDPLSETKCTLKSFTVEKGIYQTSNFRVQPTESIVRFPNITNLCPFGEVFNATRFASVYAWNRKRISNCVADYSVLYNSASFSTFKCYGVSPTKLNDLCFTNVYADSFVIRGDEVRQIAPGQTGKIADYNYKLPDDFTGCVIAWNSNNLDSKVGGNYNYLYRLFRKSNLKPFERDISTEIYQAGSTPCNGVEGFNCYFPLQSYGFQPTNGVGYQPYRVVVLSFELLHAPATVCGPKKSTNLVKNKCVNFNFNGLTGTGVLTESNKKFLPFQQFGRDIADTTDAVRDPQTLEILDITPCSFGGVSVITPGTNTSNQVAVLYQDVNCTEVPVAIHADQLTPTWRVYSTGSNVFQTRAGCLIGAEHVNNSYECDIPIGAGICASYQTQTNSPSGAGSVASQSIIAYTMSLGAENSVAYSNNSIAIPTNFTISVTTEILPVSMTKTSVDCTMYICGDSTECSNLLLQYGSFCTQLNRALTGIAVEQDKNTQEVFAQVKQIYKTPPIKDFGGFNFSQILPDPSKPSKRSFIEDLLFNKVTLADAGFIKQYGDCLGDIAARDLICAQKFNGLTVLPPLLTDEMIAQYTSALLAGTITSGWTFGAGAALQIPFAMQMAYRFNGIGVTQNVLYENQKLIANQFNSAIGKIQDSLSSTASALGKLQDVVNQNAQALNTLVKQLSSNFGAISSVLNDILSRLDPPEAEVQIDRLITGRLQSLQTYVTQQLIRAAEIRASANLAATKMSECVLGQSKRVDFCGKGYHLMSFPQSAPHGVVFLHVTYVPAQEKNFTTAPAICHDGKAHFPREGVFVSNGTHWFVTQRNFYEPQIITTDNTFVSGNCDVVIGIVNNTVYDPLQPELDSFKEELDKYFKNHTSPDVDLGDISGINASVVNIQKEIDRLNEVAKNLNESLIDLQELGKYEQYIKGSGRENLYFQGGGGSGYIPEAPRDGQAYVRKDGEWVLLSTFLGHHHHHHHH

SEQ ID NO: 2304 - protein, 1281 aa, Artificial Sequence
  Description of Artificial Sequence: Synthetic polypeptide
MGILPSPGMPALLSLVSLLSVLLMGCVAETGTQCVNLTTRTQLPPAYTNSFTRGVYYPDKVFRSSVLHSTQDLFLPFFSNVTWFHAIHVSGTNGTKRFDNPVLPFNDGVYFASTEKSNIIRGWIFGTTLDSKTQSLLIVNNATNVVIKVCEFQFCNDPFLGVYYHKNNKSWMESEFRVYSSANNCTFEYVSQPFLMDLEGKQGNFKNLREFVFKNIDGYFKIYSKHTPINLVRDLPQGFSALEPLVDLPIGINITRFQTLLALHRSYLTPGDSSSGWTAGAAAYYVGYLQPRTFLLKYNENGTITDAVDCALDPLSETKCTLKSFTVEKGIYQTSNFRVQPTESIVRFPNITNLCPFGEVFNATRFASVYAWNRKRISNCVADYSVLYNSASFSTFKCYGVSPTKLNDLCFTNVYADSFVIRGDEVRQIAPGQTGKIADYNYKLPDDFTGCVIAWNSNNLDSKVGGNYNYLYRLFRKSNLKPFERDISTEIYQAGSTPCNGVEGFNCYFPLQSYGFQPTNGVGYQPYRVVVLSFELLHAPATVCGPKKSTNLVKNKCVNFNFNGLTGTGVLTESNKKFLPFQQFGRDIADTTDAVRDPQTLEILDITPCSFGGVSVITPGTNTSNQVAVLYQDVNCTEVPVAIHADQLTPTWRVYSTGSNVFQTRAGCLIGAEHVNNSYECDIPIGAGICASYQTQTNSPSGAGSVASQSIIAYTMSLGAENSVAYSNNNIAIPTNFTISVTTEILPVSMTKTSVDCTMYICGDSTECSNLLLQYGSFCTQLNRALTGIAVEQDKNTQEVFAQVKQIYKTPPIKDFGGFNFSQILPDPSKPSKRSFIEDLLFNKVTLADAGFIKQYGDCLGDIAARDLICAQKFNGLTVLPPLLTDEMIAQYTSALLAGTITSGWTFGAGAALQIPFAMQMAYRFNGIGVTQNVLYENQKLIANQFNSAIGKIQDSLSSTASALGKLQDVVNQNAQALNTLVKQLSSNFGAISSVLNDILSRLDPPEAEVQIDRLITGRLQSLQTYVTQQLIRAAEIRASANLAATKMSECVLGQSKRVDFCGKGYHLMSFPQSAPHGVVFLHVTYVPAQEKNFTTAPAICHDGKAHFPREGVFVSNGTHWFVTQRNFYEPQIITTDNTFVSGNCDVVIGIVNNTVYDPLQPELDSFKEELDKYFKNHTSPDVDLGDISGINASVVNIQKEIDRLNEVAKNLNESLIDLQELGKYEQYIKGSGRENLYFQGGGGSGYIPEAPRDGQAYVRKDGEWVLLSTFLGHHHHHHHH

SEQ ID NO: 2305 - protein, 1281 aa, Artificial Sequence
  Description of Artificial Sequence: Synthetic polypeptide
MGILPSPGMPALLSLVSLLSVLLMGCVAETGTQCVNLTTRTQLPPAYTNSFTRGVYYPDKVFRSSVLHSTQDLFLPFFSNVTWFHAIHVSGTNGTKRFDNPVLPFNDGVYFASTEKSNIIRGWIFGTTLDSKTQSLLIVNNATNVVIKVCEFQFCNDPFLGVYYHKNNKSWMESEFRVYSSANNCTFEYVSQPFLMDLEGKQGNFKNLREFVFKNIDGYFKIYSKHTPINLVRDLPQGFSALEPLVDLPIGINITRFQTLLALHRSYLTPGDSSSGWTAGAAAYYVGYLQPRTFLLKYNENGTITDAVDCALDPLSETKCTLKSFTVEKGIYQTSNFRVQPTESIVRFPNITNLCPFGEVFNATRFASVYAWNRKRISNCVADYSVLYNSASFSTFKCYGVSPTKLNDLCFTNVYADSFVIRGDEVRQIAPGQTGKIADYNYKLPDDFTGCVIAWNSNNLDSKVGGNYNYLYRLFRKSNLKPFERDISTEIYQAGSTPCNGVEGFNCYFPLQSYGFQPTNGVGYQPYRVVVLSFELLHAPATVCGPKKSTNLVKNKCVNFNFNGLTGTGVLTESNKKFLPFQQFGRDIADTTDAVRDPQTLEILDITPCSFGGVSVITPGTNTSNQVAVLYQDVNCTEVPVAIHADQLTPTWRVYSTGSNVFQTRAGCLIGAEHVNNSYECDIPIGAGICASYQTQTNSPSGAGSVASQSIIAYTMSLGAENSVAYSNNSIAIPTNFTISVTTEILPVSMTKTSVDCTMYICGDSTECSNLLLQYGSFCTQLNRALHGIAVEQDKNTQEVFAQVKQIYKTPPIKDFGGFNFSQILPDPSKPSKRSFIEDLLFNKVTLADAGFIKQYGDCLGDIAARDLICAQKFNGLTVLPPLLTDEMIAQYTSALLAGTITSGWTFGAGAALQIPFAMQMAYRFNGIGVTQNVLYENQKLIANQFNSAIGKIQDSLSSTASALGKLQDVVNQNAQALNTLVKQLSSNFGAISSVLNDILSRLDPPEAEVQIDRLITGRLQSLQTYVTQQLIRAAEIRASANLAATKMSECVLGQSKRVDFCGKGYHLMSFPQSAPHGVVFLHVTYVPAQEKNFTTAPAICHDGKAHFPREGVFVSNGTHWFVTQRNFYEPQIITTDNTFVSGNCDVVIGIVNNTVYDPLQPELDSFKEELDKYFKNHTSPDVDLGDISGINASVVNIQKEIDRLNEVAKNLNESLIDLQELGKYEQYIKGSGRENLYFQGGGGSGYIPEAPRDGQAYVRKDGEWVLLSTFLGHHHHHHHH

SEQ ID NO: 2306 - protein, 1281 aa, Artificial Sequence
  Description of Artificial Sequence: Synthetic polypeptide
MGILPSPGMPALLSLVSLLSVLLMGCVAETGTQCVNLTTRTQLPPAYTNSFTRGVYYPDKVFRSSVLHSTQDLFLPFFSNVTWFHAIHVSGTNGTKRFDNPVLPFNDGVYFASTEKSNIIRGWIFGTTLDSKTQSLLIVNNATNVVIKVCEFQFCNDPFLGVYYHKNNKSWMESEFRVYSSANNCTFEYVSQPFLMDLEGKQGNFKNLREFVFKNIDGYFKIYSKHTPINLVRDLPQGFSALEPLVDLPIGINITRFQTLLALHRSYLTPGDSSSGWTAGAAAYYVGYLQPRTFLLKYNENGTITDAVDCALDPLSETKCTLKSFTVEKGIYQTSNFRVQPTESIVRFPNITNLCPFGEVFNATRFASVYAWNRKRISNCVADYSVLYNSASFSTFKCYGVSPTKLNDLCFTNVYADSFVIRGDEVRQIAPGQTGKIADYNYKLPDDFTGCVIAWNSNNLDSKVGGNYNYLYRLFRKSNLKPFERDISTEIYQAGSTPCNGVEGFNCYFPLQSYGFQPTNGVGYQPYRVVVLSFELLHAPATVCGPKKSTNLVKNKCVNFNFNGLTGTGVLTESNKKFLPFQQFGRDIADTTDAVRDPQTLEILDITPCSFGGVSVITPGTNTSNQVAVLYQDVNCTEVPVAIHADQLTPTWRVYSTGSNVFQTRAGCLIGAEHVNNSYECDIPIGAGICASYQTQTNSPSGAGSVASQSIIAYTMSLGAENSVAYSNNSIAIPTNFTISVTTEILPVSMTKTSVDCTMYICGDSTECSNLLLQYGSFCTQLNRALTGIAVEQDKNTQEVFAQVKQIYKTPPIKDFGGFNFSQILPDPSKPSKRSFIEDLLFNKVTLADAGFIKQYGDCLGDIAARDLICAQKFNGLTVLPPLLTDEMIAQYTSALLAGTITSGWTFGAGAALQIPFAMQMAYRFNGIGVTQNVLYENQKLIANQFNSAIGKIQDSLSSTASALGKLQDVVNQNAQALNTLVKQLSSNFGAISSVLNDILSRLDPPEAEVQIDRLITGRLQSLQTYVTQQLIRAAEIRASANLAATKMSECVLGQSKRVDFCGKGYHLMSFPQSAPHGVVFLHVTYVPAQEKNFTTAPAICHDGKAWFPREGVFVSNGTHWFVTQRNFYEPQIITTDNTFVSGNCDVVIGIVNNTVYDPLQPELDSFKEELDKYFKNHTSPDVDLGDISGINASVVNIQKEIDRLNEVAKNLNESLIDLQELGKYEQYIKGSGRENLYFQGGGGSGYIPEAPRDGQAYVRKDGEWVLLSTFLGHHHHHHHH

SEQ ID NO: 2307 - protein, 1281 aa, Artificial Sequence
  Description of Artificial Sequence: Synthetic polypeptide
MGILPSPGMPALLSLVSLLSVLLMGCVAETGTQCVNLTTRTQLPPAYTNSFTRGVYYPDKVFRSSVLHSTQDLFLPFFSNVTWFHAIHVSGTNGTKRFDNPVLPFNDGVYFASTEKSNIIRGWIFGTTLDSKTQSLLIVNNATNVVIKVCEFQFCNDPMLGVYYHKNNKSWMESEFRVYSSANNCTFEYVSQPFLMDLEGKQGNFKNLREFVFKNIDGYFKIYSKHTPINLVRDLPQGFSALEPLVDLPIGINITRFQTLLALHRSYLTPGDSSSGWTAGAAAYYVGYLQPRTFLLKYNENGTITDAVDCALDPLSETKCTLKSFTVEKGIYQTSNFRVQPTESIVRFPNITNLCPFGEVFNATRFASVYAWNRKRISNCVADYSVLYNSASFSTFKCYGVSPTKLNDLCFTNVYADSFVIRGDEVRQIAPGQTGKIADYNYKLPDDFTGCVIAWNSNNLDSKVGGNYNYLYRLFRKSNLKPFERDISTEIYQAGSTPCNGVEGFNCYFPLQSYGFQPTNGVGYQPYRVVVLSFELLHAPATVCGPKKSTNLVKNKCVNFNFNGLTGTGVLTESNKKFLPFQQFGRDIADTTDAVRDPQTLEILDITPCSFGGVSVITPGTNTSNQVAVLYQDVNCTEVPVAIHADQLTPTWRVYSTGSNVFQTRAGCLIGAEHVNNSYECDIPIGAGICASYQTQTNSPSGAGSVASQSIIAYTMSLGAENSVAYSNNSIAIPTNFTISVTTEILPVSMTKTSVDCTMYICGDSTECSNLLLQYGSFCTQLNRALTGIAVEQDKNTQEVFAQVKQIYKTPPIKDFGGFNFSQILPDPSKPSKRSFIEDLLFNKVTLADAGFIKQYGDCLGDIAARDLICAQKFNGLTVLPPLLTDEMIAQYTSALLAGTITSGWTFGAGAALQIPFAMQMAYRFNGIGVTQNVLYENQKLIANQFNSAIGKIQDSLSSTASALGKLQDVVNQNAQALNTLVKQLSSNFGAISSVLNDILSRLDPPEAEVQIDRLITGRLQSLQTYVTQQLIRAAEIRASANLAATKMSECVLGQSKRVDFCGKGYHLMSFPQSAPHGVVFLHVTYVPAQEKNFTTAPAICHDGKAHFPREGVFVSNGTHWFVTQRNFYEPQIITTDNTFVSGNCDVVIGIVNNTVYDPLQPELDSFKEELDKYFKNHTSPDVDLGDISGINASVVNIQKEIDRLNEVAKNLNESLIDLQELGKYEQYIKGSGRENLYFQGGGGSGYIPEAPRDGQAYVRKDGEWVLLSTFLGHHHHHHHH

SEQ ID NO: 2308 - protein, 1281 aa, Artificial Sequence
  Description of Artificial Sequence: Synthetic polypeptide
MGILPSPGMPALLSLVSLLSVLLMGCVAETGTQCVNLTTRTQLPPAYTNSFTRGVYYPDKVFRSSVLHSTQDLFLPFFSNVTWFHAIHVSGTNGTKRFDNPVLPFNDGVYFASTEKSNIIRGWIFGTTLDSKTQSLLIVNNATNVVIKVCEFQFCNDPFLGVYYHKNNKSWMESEFRVYSSANNCTFEYVSQPFLMDLEGKQGNFKNLREFVFKNIDGYFKIYSKHTPINLVRDLPQGFSALEPLVDLPIGINITRFQTLLALHRSYLTPGDSSSGWTAGAAAYYVGYLQPRTFLLKYNENGTITDAVDCALDPLSETKCTLKSFTVEKGIYQTSNFRVQPTESIVRFPNITNLCPFGEVFNATRFASVYAWNRKRISNCVADYSVLYNSASFSTFKCYGVSPTKLNDLCFTNVYADSFVIRGDEVRQIAPGQTGKIADYNYKLPDDFTGCVIAWNSNNLDSKVGGNYNYLYRLFRKSNLKPFERDISTEIYQAGSTPCNGVEGFNCYFPLQSYGFQPTNGVGYQPYRVVVLSFELLHAPATVCGPKKSTNLVKNKCVNFNFNGLTGTGVLTESNKKFLPFQQFGRDIADTTDAVRDPQTLEILDITPCSFGGVSVITPGTNTSNQVAVLYQDVNCTEVPVAIHADQLTPTWRVYSTGSNVFQTRAGCLIGAEHVNNSYECDIPIGAGICASYQTQTNSPSGAGSVASQSIIAYTMSLGAENSVAYSNNSIAIPTNFTISVTTEILPVSMTKTSVDCTMYICGDSTECSNLLLQYGSFCTQLNRALTGIAMEQDKNTQEVFAQVKQIYKTPPIKDFGGFNFSQILPDPSKPSKRSFIEDLLFNKVTLADAGFIKQYGDCLGDIAARDLICAQKFNGLTVLPPLLTDEMIAQYTSALLAGTITSGWTFGAGAALQIPFAMQMAYRFNGIGVTQNVLYENQKLIANQFNSAIGKIQDSLSSTASALGKLQDVVNQNAQALNTLVKQLSSNFGAISSVLNDILSRLDPPEAEVQIDRLITGRLQSLQTYVTQQLIRAAEIRASANLAATKMSECVLGQSKRVDFCGKGYHLMSFPQSAPHGVVFLHVTYVPAQEKNFTTAPAICHDGKAHFPREGVFVSNGTHWFVTQRNFYEPQIITTDNTFVSGNCDVVIGIVNNTVYDPLQPELDSFKEELDKYFKNHTSPDVDLGDISGINASVVNIQKEIDRLNEVAKNLNESLIDLQELGKYEQYIKGSGRENLYFQGGGGSGYIPEAPRDGQAYVRKDGEWVLLSTFLGHHHHHHHH

SEQ ID NO: 2309 - protein, 1281 aa, Artificial Sequence
  Description of Artificial Sequence: Synthetic polypeptide
MGILPSPGMPALLSLVSLLSVLLMGCVAETGTQCVNLTTRTQLPPAYTNSFTRGVYYPDKVFRSSVLHSTQDLFLPFFSNVTWFHAIHVSGTNGTKRFDNPVLPFNDGVYFASTEKSNIIRGWIFGTTLDSKTQSLLIVNNATNVVIKVCEFQFCNDPFLGVYYHKNNKSWMESEFRVYSSANNCTFEYVSQPFLMDLEGKQGNFKNLREFVFKNIDGYFKIYSKHTPINLVRDLPQGFSALEPLVSLPIGINITRFQTLLALHRSYLTPGDSSSGWTAGAAAYYVGYLQPRTFLLKYNENGTITDAVDCALDPLSETKCTLKSFTVEKGIYQTSNFRVQPTESIVRFPNITNLCPFGEVFNATRFASVYAWNRKRISNCVADYSVLYNSASFSTFKCYGVSPTKLNDLCFTNVYADSFVIRGDEVRQIAPGQTGKIADYNYKLPDDFTGCVIAWNSNNLDSKVGGNYNYLYRLFRKSNLKPFERDISTEIYQAGSTPCNGVEGFNCYFPLQSYGFQPTNGVGYQPYRVVVLSFELLHAPATVCGPKKSTNLVKNKCVNFNFNGLTGTGVLTESNKKFLPFQQFGRDIADTTDAVRDPQTLEILDITPCSFGGVSVITPGTNTSNQVAVLYQDVNCTEVPVAIHADQLTPTWRVYSTGSNVFQTRAGCLIGAEHVNNSYECDIPIGAGICASYQTQTNSPSGAGSVASQSIIAYTMSLGAENSVAYSNNSIAIPTNFTISVTTEILPVSMTKTSVDCTMYICGDSTECSNLLLQYGSFCTQLNRALTGIAVEQDKNTQEVFAQVKQIYKTPPIKDFGGFNFSQILPDPSKPSKRSFIEDLLFNKVTLADAGFIKQYGDCLGDIAARDLICAQKFNGLTVLPPLLTDEMIAQYTSALLAGTITSGWTFGAGAALQIPFAMQMAYRFNGIGVTQNVLYENQKLIANQFNSAIGKIQDSLSSTASALGKLQDVVNQNAQALNTLVKQLSSNFGAISSVLNDILSRLDPPEAEVQIDRLITGRLQSLQTYVTQQLIRAAEIRASANLAATKMSECVLGQSKRVDFCGKGYHLMSFPQSAPHGVVFLHVTYVPAQEKNFTTAPAICHDGKAHFPREGVFVSNGTHWFVTQRNFYEPQIITTDNTFVSGNCDVVIGIVNNTVYDPLQPELDSFKEELDKYFKNHTSPDVDLGDISGINASVVNIQKEIDRLNEVAKNLNESLIDLQELGKYEQYIKGSGRENLYFQGGGGSGYIPEAPRDGQAYVRKDGEWVLLSTFLGHHHHHHHH

SEQ ID NO: 2310 - protein, 1281 aa, Artificial Sequence
  Description of Artificial Sequence: Synthetic polypeptide
MGILPSPGMPALLSLVSLLSVLLMGCVAETGTQCVNLTTRTQLPPAYTNSFTRGVYYPDKVFRSSVLHSTQDLFLPFFSNVTWFHAIHVSGTNGTKRFDNPVLPFNDGVYFASTEKSNIIRGWIFGTTLDSKTQSLLIVNNATNVVIKVCEFQFCNDPFLGVYYHKNNKSWMESEFRVYSSANNCTFEYVSQPFLMDLEGKQGNFKNLREFVFKNIDGYFKIYSKHTPINLVRDLPQGFSALEPLVDLPIGINITRFQTLLALHRSYLTPGDSSSGWRAGAAAYYVGYLQPRTFLLKYNENGTITDAVDCALDPLSETKCTLKSFTVEKGIYQTSNFRVQPTESIVRFPNITNLCPFGEVFNATRFASVYAWNRKRISNCVADYSVLYNSASFSTFKCYGVSPTKLNDLCFTNVYADSFVIRGDEVRQIAPGQTGKIADYNYKLPDDFTGCVIAWNSNNLDSKVGGNYNYLYRLFRKSNLKPFERDISTEIYQAGSTPCNGVEGFNCYFPLQSYGFQPTNGVGYQPYRVVVLSFELLHAPATVCGPKKSTNLVKNKCVNFNFNGLTGTGVLTESNKKFLPFQQFGRDIADTTDAVRDPQTLEILDITPCSFGGVSVITPGTNTSNQVAVLYQDVNCTEVPVAIHADQLTPTWRVYSTGSNVFQTRAGCLIGAEHVNNSYECDIPIGAGICASYQTQTNSPSGAGSVASQSIIAYTMSLGAENSVAYSNNSIAIPTNFTISVTTEILPVSMTKTSVDCTMYICGDSTECSNLLLQYGSFCTQLNRALTGIAVEQDKNTQEVFAQVKQIYKTPPIKDFGGFNFSQILPDPSKPSKRSFIEDLLFNKVTLADAGFIKQYGDCLGDIAARDLICAQKFNGLTVLPPLLTDEMIAQYTSALLAGTITSGWTFGAGAALQIPFAMQMAYRFNGIGVTQNVLYENQKLIANQFNSAIGKIQDSLSSTASALGKLQDVVNQNAQALNTLVKQLSSNFGAISSVLNDILSRLDPPEAEVQIDRLITGRLQSLQTYVTQQLIRAAEIRASANLAATKMSECVLGQSKRVDFCGKGYHLMSFPQSAPHGVVFLHVTYVPAQEKNFTTAPAICHDGKAHFPREGVFVSNGTHWFVTQRNFYEPQIITTDNTFVSGNCDVVIGIVNNTVYDPLQPELDSFKEELDKYFKNHTSPDVDLGDISGINASVVNIQKEIDRLNEVAKNLNESLIDLQELGKYEQYIKGSGRENLYFQGGGGSGYIPEAPRDGQAYVRKDGEWVLLSTFLGHHHHHHHH

SEQ ID NO: 2311 - protein, 1281 aa, Artificial Sequence
  Description of Artificial Sequence: Synthetic polypeptide
MGILPSPGMPALLSLVSLLSVLLMGCVAETGTQCVNLTTRTQLPPAYTNSFTRGVYYPDKVFRSSVLHSTQDLFLPFFSNVTWFHAIHVSGTNGTKRFDNPVLPFNDGVYFASTEKSNIIRGWIFGTTLDSKTQSLLIVNNATNVVIKVCEFQFCNDPFLGVYYHKNNKSWMESEFRVYSSANNCTFEYVSQPFLMDLEGKQGNFKNLREFVFKNIDGYFKIYSKHTPINLVRDLPQGFSALEPLVDLPIGINITRFQTLLALHRSYLTPGDSSSGWTAGAAAYYVGYLQPRTFLLKYNENGTITDAVDCTLDPLSETKCTLKSFTVEKGIYQTSNFRVQPTESIVRFPNITNLCPFGEVFNATRFASVYAWNRKRISNCVADYSVLYNSASFSTFKCYGVSPTKLNDLCFTNVYADSFVIRGDEVRQIAPGQTGKIADYNYKLPDDFTGCVIAWNSNNLDSKVGGNYNYLYRLFRKSNLKPFERDISTEIYQAGSTPCNGVEGFNCYFPLQSYGFQPTNGVGYQPYRVVVLSFELLHAPATVCGPKKSTNLVKNKCVNFNFNGLTGTGVLTESNKKFLPFQQFGRDIADTTDAVRDPQTLEILDITPCSFGGVSVITPGTNTSNQVAVLYQDVNCTEVPVAIHADQLTPTWRVYSTGSNVFQTRAGCLIGAEHVNNSYECDIPIGAGICASYQTQTNSPSGAGSVASQSIIAYTMSLGAENSVAYSNNSIAIPTNFTISVTTEILPVSMTKTSVDCTMYICGDSTECSNLLLQYGSFCTQLNRALTGIAVEQDKNTQEVFAQVKQIYKTPPIKDFGGFNFSQILPDPSKPSKRSFIEDLLFNKVTLADAGFIKQYGDCLGDIAARDLICAQKFNGLTVLPPLLTDEMIAQYTSALLAGTITSGWTFGAGAALQIPFAMQMAYRFNGIGVTQNVLYENQKLIANQFNSAIGKIQDSLSSTASALGKLQDVVNQNAQALNTLVKQLSSNFGAISSVLNDILSRLDPPEAEVQIDRLITGRLQSLQTYVTQQLIRAAEIRASANLAATKMSECVLGQSKRVDFCGKGYHLMSFPQSAPHGVVFLHVTYVPAQEKNFTTAPAICHDGKAHFPREGVFVSNGTHWFVTQRNFYEPQIITTDNTFVSGNCDVVIGIVNNTVYDPLQPELDSFKEELDKYFKNHTSPDVDLGDISGINASVVNIQKEIDRLNEVAKNLNESLIDLQELGKYEQYIKGSGRENLYFQGGGGSGYIPEAPRDGQAYVRKDGEWVLLSTFLGHHHHHHHH

SEQ ID NO: 2312 - protein, 1281 aa, Artificial Sequence
  Description of Artificial Sequence: Synthetic polypeptide
MGILPSPGMPALLSLVSLLSVLLMGCVAETGTQCVNLTTRTQLPPAYTNSFTRGVYYPDKVFRSSVLHSTQDLFLPFFSNVTWFHAIHVSGTNGTKRFDNPVLPFNDGVYFASTEKSNIIRGWIFGTTLDSKTQSLLIVNNATNVVIKVCEFQFCNDPFLGVYYHKNNKSWMESEFRVYSSANNCTFEYVSQPFLMDLEGKQGNFKNLREFVFKNIDGYFKIYSKHTPINLVRDLPQGFSALEPLVDLPIGINITRFQTLLALHRSYLTPGDSSSGWTAGAAAYYVGYLQPRTFLLKYNENGTITDAVDCALDPLSETKCTLKSFTVEKGIYQTSNFRVQPTESIVRFPNITNLCPFGEVFNATRFASVYAWNRKRISNCVADYSVLYNSASFSTFKCYGVSPTKLNDLCFTNVYADSFVIRGDEVRQIAPGQTGKIADYNYKLPDDFTGCVIAWNSNNLDSKVGGNYNYLYRLFRKSNLKPFERDISTEIYQAGSTPCNGVEGFNCYFPLQSYGFQPTNGVGYQPYRVVVLSFELLHAPATVCGPKKSTNLVKNKCVNFNFNGLTGTGVLTESNKKFLPFQQFGRDISDTTDAVRDPTTLEILDITPCSFGGVSVITPGTNTSNQVAVLYQDVNCTEVPVAIHADQLTPTWRVYSTGSNVFQTRAGCLIGAEHVNNSYECDIPIGAGICASYQTQTNSPSGAGSVASQSIIAYTMSLGAENSVAYSNNSIAIPTNFTISVTTEILPVSMTKTSVDCTMYICGDSTECSNLLLQYGSFCTQLNRALTGIAVEQDKNTQEVFAQVKQIYKTPPIKDFGGFNFSQILPDPSKPSKRSFIEDLLFNKVTLADAGFIKQYGDCLGDIAARDLICAQKFNGLTVLPPLLTDEMIAQYTSALLAGTITSGWTFGAGAALQIPFAMQMAYRFNGIGVTQNVLYENQKLIANQFNSAIGKIQDSLSSTASALGKLQDVVNQNAQALNTLVKQLSSNFGAISSVLNDILSRLDPPEAEVQIDRLITGRLQSLQTYVTQQLIRAAEIRASANLAATKMSECVLGQSKRVDFCGKGYHLMSFPQSAPHGVVFLHVTYVPAQEKNFTTAPAICHDGKAHFPREGVFVSNGTHWFVTQRNFYEPQIITTDNTFVSGNCDVVIGIVNNTVYDPLQPELDSFKEELDKYFKNHTSPDVDLGDISGINASVVNIQKEIDRLNEVAKNLNESLIDLQELGKYEQYIKGSGRENLYFQGGGGSGYIPEAPRDGQAYVRKDGEWVLLSTFLGHHHHHHHH

SEQ ID NO: 2313 - protein, 1281 aa, Artificial Sequence
  Description of Artificial Sequence: Synthetic polypeptide
MGILPSPGMPALLSLVSLLSVLLMGCVAETGTQCVNLTTRTQLPPAYTNSFTRGVYYPDKVFRSSVLHSTQDLFLPFFSNVTWFHAIHVSGTNGTKRFDNPVLPFNDGVYFASTEKSNIIRGWIFGTTLDSKTQSLLIVNNATNVVIKVCEFQFCNDPFLGVYYHKNNKSWMESEFRVYSSANNCTFEYVSQPFLMDLEGKQGNFKNLREFVFKNIDGYFKIYSKHTPINLVRDLPQGFSALEPLVDLPIGINITRFQTLLALHRSYLTPGDSSSGWTAGAAAYYVGYLQPRTFLLKYNENGTITDAVDCALDPLSETKCTLKSFTVEKGIYQTSNFRVQPTESIVRFPNITNLCPFGEVFNATRFASVYAWNRKRISNCVADYSVLYNSASFSTFKCYGVSPTKLNDLCFTNVYADSFVIRGDEVRQIAPGQTGKIADYNYKLPDDFTGCVIAWNSNNLDSKVGGNYNYLYRLFRKSNLKPFERDISTEIYQAGSTPCNGVEGFNCYFPLQSYGFQPTNGVGYQPYRVVVLSFELLHAPATVCGPKKSTNLVKNKCVNFNFNGLTGTGVLTESNKKFLPFQQFGRDIADTTDAVRDPQTLEILDITPCSFGGVSVITPGTNTSNQVAVLYQDVNCTEVPPAIHADQLTPTWRVYSTGSNVFQTRAGCLIGAEHVNNSYECDIPIGAGICASYQTQTNSPSGAGSVASQSIIAYTMSLGAENSVAYSNNSIAIPTNFTISVTTEILPVSMTKTSVDCTMYICGDSTECSNLLLQYGSFCTQLNRALTGIAVEQDKNTQEVFAQVKQIYKTPPIKDFGGFNFSQILPDPSKPSKRSFIEDLLFNKVTLADAGFIKQYGDCLGDIAARDLICAQKFNGLTVLPPLLTDEMIAQYTSALLAGTITSGWTFGAGAALQIPFAMQMAYRFNGIGVTQNVLYENQKLIANQFNSAIGKIQDSLSSTASALGKLQDVVNQNAQALNTLVKQLSSNFGAISSVLNDILSRLDPPEAEVQIDRLITGRLQSLQTYVTQQLIRAAEIRASANLAATKMSECVLGQSKRVDFCGKGYHLMSFPQSAPHGVVFLHVTYVPAQEKNFTTAPAICHDGKAHFPREGVFVSNGTHWFVTQRNFYEPQIITTDNTFVSGNCDVVIGIVNNTVYDPLQPELDSFKEELDKYFKNHTSPDVDLGDISGINASVVNIQKEIDRLNEVAKNLNESLIDLQELGKYEQYIKGSGRENLYFQGGGGSGYIPEAPRDGQAYVRKDGEWVLLSTFLGHHHHHHHH

SEQ ID NO: 2314 - protein, 1281 aa, Artificial Sequence
  Description of Artificial Sequence: Synthetic polypeptide
MGILPSPGMPALLSLVSLLSVLLMGCVAETGTQCVNLTTRTQLPPAYTNSFTRGVYYPDKVFRSSVLHSTQDLFLPFFSNVTWFHAIHVSGTNGTKRFDNPVLPFNDGVYFASTEKSNIIRGWIFGTTLDSKTQSLLIVNNATNVVIKVCEFQFCNDPFLGVYYHKNNKSWMESEFRVYSSANNCTFEYVSQPFLMDLEGKQGNFKNLREFVFKNIDGYFKIYSKHTPINLVRDLPQGFSALEPLVDLPIGINITRFQTLLALHRSYLTPGDSSSGWTAGAAAYYVGYLQPRTFLLKYNENGTITDAVDCALDPLSETKCTLKSFTVEKGIYQTSNFRVQPTESIVRFPNITNLCPFGEVFNATRFASVYAWNRKRISNCVADYSVLYNSASFSTFKCYGVSPTKLNDLCFTNVYADSFVIRGDEVRQIAPGQTGKIADYNYKLPDDFTGCVIAWNSNNLDSKVGGNYNYLYRLFRKSNLKPFERDISTEIYQAGSTPCNGVEGFNCYFPLQSYGFQPTNGVGYQPYRVVVLSFELLHAPATVCGPKKSTNLVKNKCVNFNFNGLTGTGVLTESNKKFLPFQQFGRDIADTTDAVRDPQTLEILDITPCSFGGVSVITPGTNTSNQVAVLYQDVNCTEVPVAIHADQLTPTWRVYSTGSNVFQTRAGCLIGAEHVNNSYECDIPIGAGICASYQTQTNSPSGAGSVASQSIIAYTMSLGAENSVAYSNNSIAIPTNFTISVTTEILPVSMTKTSVDCTMYICGDSTECSNLLLQYGSFCTQLNRALTGIAVEQDKNTQEVFAQVKQIYKTPPIKDFGGFNFSQILPDPSKPSKRSFIEDLLFNKVTLADAGFIKQYGKCLGDIAARDLICAQKFNGLTVLPPLLTDEMIAQYTSALLAGTITSGWTFGAGAALQIPFAMQMAYRFNGIGVTQNVLYENQKLIANQFNSAIGKIQDSLSSTASALGKLQDVVNQNAQALNTLVKQLSSNFGAISSVLNDILSRLDPPEAEVQIDRLITGRLQSLQTYVTQQLIRAAEIRASANLAATKMSECVLGQSKRVDFCGKGYHLMSFPQSAPHGVVFLHVTYVPAQEKNFTTAPAICHDGKAHFPREGVFVSNGTHWFVTQRNFYEPQIITTDNTFVSGNCDVVIGIVNNTVYDPLQPELDSFKEELDKYFKNHTSPDVDLGDISGINASVVNIQKEIDRLNEVAKNLNESLIDLQELGKYEQYIKGSGRENLYFQGGGGSGYIPEAPRDGQAYVRKDGEWVLLSTFLGHHHHHHHH

SEQ ID NO: 2315 - protein, 1281 aa, Artificial Sequence
  Description of Artificial Sequence: Synthetic polypeptide
MGILPSPGMPALLSLVSLLSVLLMGCVAETGTQCVNLTTRTQLPPAYTNSFTRGVYYPDKVFRSSVLHSTQDLFLPFFSNVTWFHAIHVSGTNGTKRFDNPVLPFNDGVYFASTEKSNIIRGWIFGTTLDSKTQSLLIVNNATNVVIKVCEFQFCNDPFLGVYYHKNNKSWMESEFRVYSSANNCTFEYVSQPFLMDLEGKQGNFKNLREFVFKNIDGYFKIYSKHTPINLVRDLPQGFSALEPLVDLPIGINITRFQTLLALHRSYLTPGDSSSGWTAGAAAYYVGYLQPRTFLLKYNENGTITDAVDCALDPLSETKCTLKSFTVEKGIYQTSNFRVQPTESIVRFPNITNLCPFGEVFNATRFASVYAWNRKRISNCVADYSVLYNSASFSTFKCYGVSPTKLNDLCFTNVYADSFVIRGDEVRQIAPGQTGKIADYNYKLPDDFTGCVIAWNSNNLDSKVGGNYNYLYRLFRKSNLKPFERDISTEIYQAGSTPCNGVEGFNCYFPLQSYGFQPTNGVGYQPYRVVVLSFELLHAPATVCGPKKSTNLVKNKCVNFNFNGLTGTGVLTESNKKFLPFQQFGRDIADTTDAVRDPQTLEILDITPCSFGGVSVITPGTNTSNQVAVLYQDVNCTEVPVAIHADQLTPTWRVYSTGSNVFQTRAGCLIGAEHVNNSYECDIPIGAGICASYQTQTNSPSGAGSVASQSIIAYTMSLGAENSVAYSNNSIAIPTNFTISVTTEILPVSMTKTSVDCAMYICGDSTECSNLLLQYGSFCTQLNRALTGIAVEQDKNTQEVFAQVKQIYKTPPIKDFGGFNFSQILPDPSKPSKRSFIEDLLFNKVTLADAGFIKQYGDCLGDIAARDLICAQKFNGLTVLPPLLTDEMIAQYTSALLAGTITSGWTFGAGAALQIPFAMQMAYRFNGIGVTQNVLYENQKLIANQFNSAIGKIQDSLSSTASALGKLQDVVNQNAQALNTLVKQLSSNFGAISSVLNDILSRLDPPEAEVQIDRLITGRLQSLQTYVTQQLIRAAEIRASANLAATKMSECVLGQSKRVDFCGKGYHLMSFPQSAPHGVVFLHVTYVPAQEKNFTTAPAICHDGKAHFPREGVFVSNGTHWFVTQRNFYEPQIITTDNTFVSGNCDVVIGIVNNTVYDPLQPELDSFKEELDKYFKNHTSPDVDLGDISGINASVVNIQKEIDRLNEVAKNLNESLIDLQELGKYEQYIKGSGRENLYFQGGGGSGYIPEAPRDGQAYVRKDGEWVLLSTFLGHHHHHHHH

SEQ ID NO: 2316 - protein, 1281 aa, Artificial Sequence
  Description of Artificial Sequence: Synthetic polypeptide
MGILPSPGMPALLSLVSLLSVLLMGCVAETGTQCVNLTTRTQLPPAYTNSFTRGVYYPDKVFRSSVLHSTQDLFLPFFSNVTWFHAIHVSGTNGTKRFDNPVLPFNDGVYFASTEKSNIIRGWIFGTTLDSKTQSLLIVNNATNVVIKVCEFQFCNDPFLGVYYHKNNKSWMESEFRVYSSANNCTFEYVSQPFLMDLEGKQGNFKNLREFVFKNIDGYFKIYSKHTPINLVRDLPQGFSALEPLVDLPIGINITRFQTLLALHRSYLTPGDSSSGWTAGAAAYYVGYLQPRTFLLKYNENGTITDAVDCALDPLSETKCTLKSFTVEKGIYQTSNFRVQPTESIVRFPNITNLCPFGEVFNATRFASVYAWNRKRISNCVADYSVLYNSASFSTFKCYGVSPTKLNDLCFTNVYADSFVIRGDEVRQIAPGQTGKIADYNYKLPDDFTGCVIAWNSNNLDSKVGGNYNYLYRLFRKSNLKPFERDISTEIYQAGSTPCNGVEGFNCYFPLQSYGFQPTNGVGYQPYRVVVLSFELLHAPATVCGPKKSTNLVKNKCVNFNFNGLTGTGVLTESNKKFLPFQQFGRDIADTTDAVRDPQTLEILDITPCSFGGVSVITPGTNTSNQVAVLYQDVNCTEVPVAIHADQLTPTWRVYSTGSNVFQTRAGCLIGAEHVNNSYECDIPIGAGICASYQTQTNSPSGAGSVASDSIIAYTMSLGAENSVAYSNNSIAIPTNFTISVTTEILPVSMTKTSVDCTMYICGDSTECSNLLLQYGSFCTQLNRALTGIAVEQDKNTQEVFAQVKQIYKTPPIKDFGGFNFSQILPDPSKPSKRSFIEDLLFNKVTLADAGFIKQYGDCLGDIAARDLICAQKFNGLTVLPPLLTDEMIAQYTSALLAGTITSGWTFGAGAALQIPFAMQMAYRFNGIGVTQNVLYENQKLIANQFNSAIGKIQDSLSSTASALGKLQDVVNQNAQALNTLVKQLSSNFGAISSVLNDILSRLDPPEAEVQIDRLITGRLQSLQTYVTQQLIRAAEIRASANLAATKMSECVLGQSKRVDFCGKGYHLMSFPQSAPHGVVFLHVTYVPAQEKNFTTAPAICHDGKAHFPREGVFVSNGTHWFVTQRNFYEPQIITTDNTFVSGNCDVVIGIVNNTVYDPLQPELDSFKEELDKYFKNHTSPDVDLGDISGINASVVNIQKEIDRLNEVAKNLNESLIDLQELGKYEQYIKGSGRENLYFQGGGGSGYIPEAPRDGQAYVRKDGEWVLLSTFLGHHHHHHHH

SEQ ID NO: 2317 - protein, 1281 aa, Artificial Sequence
  Description of Artificial Sequence: Synthetic polypeptide
MGILPSPGMPALLSLVSLLSVLLMGCVAETGTQCVNLTTRTQLPPAYTNSFTRGVYYPDKVFRSSVLHSTQDLFLPFFSNVTWFHAIHVSGTNGTKRFDNPVLPFNDGVYFASTEKSNIIRGWIFGTTLDSKTQSLLIVNNATNVVIKVCEFQFCNDPFLGVYYHKNNKSWMESEFRVYSSANNCTFEYVSQPFLMDLEGKQGNFKNLREFVFKNIDGYFKIYSKHTPINLVRDLPQGFSALEPLVDLPIGINITRFQTLLALHRSYLTPGDSSSGWTAGAAAYYVGYLQPRTFLLKYNENGTITDAVDCALDPLSETKCTLKSFTVEKGIYQTSNFRVQPTESIVRFPNITNLCPFGEVFNATRFASVYAWNRKRISNCVADYSVLYNSASFSTFKCYGVSPTKLNDLCFTNVYADSFVIRGDEVRQIAPGQTGKIADYNYKLPDDFTGCVIAWNSNNLDSKVGGNYNYLYRLFRKSNLKPFERDISTEIYQAGSTPCNGVEGFNCYFPLQSYGFQPTNGVGYQPYRVVVLSFELLHAPATVCGPKKSTNLVKNKCVNFNFNGLTGTGVLTESNKKFLPFQQFGRDIADTTDAVRDPQTLEILDITPCSFGGVSVITPGTNTSNQVAVLYQDVNCTEVPVAIHADQLTPTWRVYSTGSNVFQTRAGCLIGAEHVNNSYECDIPIGAGICASYQTQTNSPSGAGSVASNSIIAYTMSLGAENSVAYSNNSIAIPTNFTISVTTEILPVSMTKTSVDCTMYICGDSTECSNLLLQYGSFCTQLNRALTGIAVEQDKNTQEVFAQVKQIYKTPPIKDFGGFNFSQILPDPSKPSKRSFIEDLLFNKVTLADAGFIKQYGDCLGDIAARDLICAQKFNGLTVLPPLLTDEMIAQYTSALLAGTITSGWTFGAGAALQIPFAMQMAYRFNGIGVTQNVLYENQKLIANQFNSAIGKIQDSLSSTASALGKLQDVVNQNAQALNTLVKQLSSNFGAISSVLNDILSRLDPPEAEVQIDRLITGRLQSLQTYVTQQLIRAAEIRASANLAATKMSECVLGQSKRVDFCGKGYHLMSFPQSAPHGVVFLHVTYVPAQEKNFTTAPAICHDGKAHFPREGVFVSNGTHWFVTQRNFYEPQIITTDNTFVSGNCDVVIGIVNNTVYDPLQPELDSFKEELDKYFKNHTSPDVDLGDISGINASVVNIQKEIDRLNEVAKNLNESLIDLQELGKYEQYIKGSGRENLYFQGGGGSGYIPEAPRDGQAYVRKDGEWVLLSTFLGHHHHHHHH

SEQ ID NO: 2318 - protein, 1281 aa, Artificial Sequence
  Description of Artificial Sequence: Synthetic polypeptide
MGILPSPGMPALLSLVSLLSVLLMGCVAETGTQCVNLTTRTQLPPAYTNSFTRGVYYPDKVFRSSVLHSTQDLFLPFFSNVTWFHAIHVSGTNGTKRFDNPVLPFNDGVYFASTEKSNIIRGWIFGTTLDSKTQSLLIVNNATNVVIKVCEFQFCNDPFLGVYYHKNNKSWMESEFRVYSSANNCTFEYVSQPFLMDLEGKQGNFKNLREFVFKNIDGYFKIYSKHTPINLVRDLPQGFSALEPLVDLPIGINITRFQTLLALHRSYLTPGDSSSGWTAGAAAYYVGYLQPRTFLLKYNENGTITDAVDCALDPLSETKCTLKSFTVEKGIYQTSNFRVQPTESIVRFPNITNLCPFGEVFNATRFASVYAWNRKRISNCVADYSVLYNSASFSTFKCYGVSPTKLNDLCFTNVYADSFVIRGDEVRQIAPGQTGKIADYNYKLPDDFTGCVIAWNSNNLDSKVGGNYNYLYRLFRKSNLKPFERDISTEIYQAGSTPCNGVEGFNCYFPLQSYGFQPTNGVGYQPYRVVVLSFELLHAPATVCGPKKSTNLVKNKCVNFNFNGLTGTGVLTESNKKFLPFQQFGRDIADTTDAVRDPQTLEILDITPCSFGGVSVITPGTNTSNQVAVLYQDVNCTEVPVAIHADQLTPTWRVYSTGSNVFQTRAGCLIGAEHVNNSYECDIPIGAGICASYQTQTNSPSGAGSVASQSIIAYTMSLGAENSVAYSNNSIAIPTNFTISVTTEILPVSMTKTSVDCTMYICGDSTECSNLLLQYGSFCTQLNRALTGIAAEQDKNTQEVFAQVKQIYKTPPIKDFGGFNFSQILPDPSKPSKRSFIEDLLFNKVTLADAGFIKQYGDCLGDIAARDLICAQKFNGLTVLPPLLTDEMIAQYTSALLAGTITSGWTFGAGAALQIPFAMQMAYRFNGIGVTQNVLYENQKLIANQFNSAIGKIQDSLSSTASALGKLQDVVNQNAQALNTLVKQLSSNFGAISSVLNDILSRLDPPEAEVQIDRLITGRLQSLQTYVTQQLIRAAEIRASANLAATKMSECVLGQSKRVDFCGKGYHLMSFPQSAPHGVVFLHVTYVPAQEKNFTTAPAICHDGKAHFPREGVFVSNGTHWFVTQRNFYEPQIITTDNTFVSGNCDVVIGIVNNTVYDPLQPELDSFKEELDKYFKNHTSPDVDLGDISGINASVVNIQKEIDRLNEVAKNLNESLIDLQELGKYEQYIKGSGRENLYFQGGGGSGYIPEAPRDGQAYVRKDGEWVLLSTFLGHHHHHHHH

SEQ ID NO: 2319 - protein, 1281 aa, Artificial Sequence
  Description of Artificial Sequence: Synthetic polypeptide
MGILPSPGMPALLSLVSLLSVLLMGCVAETGTQCVNLTTRTQLPPAYTNSFTRGVYYPDKVFRSSVLHSTQDLFLPFFSNVTWFHAIHVSGTNGTKRFDNPVLPFNDGVYFASTEKSNIIRGWIFGTTLDSKTQSLLIVNNATNVVIKVCEFQFCNDPFLGVYYHKNNKSWMESEFRVYSSANNCTFEYVSQPFLMDLEGKQGNFKNLREFVFKNIDGYFKIYSKHTPINLVRDLPQGFSALEPLVDLPIGINITRFQTLLALHRSYLTPGDSSSGWTAGAAAYYVGYLQPRTFLLKYNENGTITDAVDCALDPLSETKCTLKSFTVEKGIYQTSNFRVQPTESIVRFPNITNLCPFGEVFNATRFASVYAWNRKRISNCVADYSVLYNSASFSTFKCYGVSPTKLNDLCFTNVYADSFVIRGDEVRQIAPGQTGKIADYNYKLPDDFTGCVIAWNSNNLDSKVGGNYNYLYRLFRKSNLKPFERDISTEIYQAGSTPCNGVEGFNCYFPLQSYGFQPTNGVGYQPYRVVVLSFELLHAPATVCGPKKSTNLVKNKCVNFNFNGLTGTGVLTESNKKFLPFQQFGRDIADTTDAVRDPQTLEILDITPCSFGGVSVITPGTNTSNQVAVLYQDVNCTEVPVAIHADQLTPTWRVYSTGSNVFQTRAGCLIGAEHVNNSYECDIPIGAGICASYQTQTNSPSGAGSVASQSIIAYTMSLGAENSVAYSNNSIAIPTNFTISVTTEILPVSMTKTSVDCTMYICGDSTECSNLLLQYGSFCTQLNRALTGIAVEQDKNTQEVFAQVKQIYKTPPIKDFGGFNFSQILPDPSKPSKRSFIEDLLFNKVTLADAGFIKQYGDCLGDIAARDLICAQKFNGLTVLPPLLTDEMIAQYTSALLAGTITSGWTFGAGAALQIPFAMQMAYRFNGIGVTQNVLYENQKLIANQFNSAIGKIQDSLSSTASALGKLQDVVNQNAQALNELVKQLSSNFGAISSVLNDILSRLDPPEAEVQIDRLITGRLQSLQTYVTQQLIRAAEIRASANLAATKMSECVLGQSKRVDFCGKGYHLMSFPQSAPHGVVFLHVTYVPAQEKNFTTAPAICHDGKAHFPREGVFVSNGTHWFVTQRNFYEPQIITTDNTFVSGNCDVVIGIVNNTVYDPLQPELDSFKEELDKYFKNHTSPDVDLGDISGINASVVNIQKEIDRLNEVAKNLNESLIDLQELGKYEQYIKGSGRENLYFQGGGGSGYIPEAPRDGQAYVRKDGEWVLLSTFLGHHHHHHHH

SEQ ID NO: 2320 - protein, 1281 aa, Artificial Sequence
  Description of Artificial Sequence: Synthetic polypeptide
MGILPSPGMPALLSLVSLLSVLLMGCVAETGTQCVNLTTRTQLPPAYTNSFTRGVYYPDKVFRSSVLHSTQDLFLPFFSNVTWFHAIHVSGTNGTKRFDNPVLPFNDGVYFASTEKSNIIRGWIFGTTLDSKTQSLLIVNNATNVVIKVCEFQFCNDPFLGVYYHKNNKSWMESEFRVYSSANNCTFEYVSQPFLMDLEGKQGNFKNLREFVFKNIDGYFKIYSKHTPINLVRDLPQGFSALEPLVDLPIGINITRFQTLLALHRSYLTPGDSSSGWTAGAAAYYVGYLQPRTFLLKYNENGTITDAVDCALDPLSETKCTLKSFTVEKGIYQTSNFRVQPTESIVRFPNITNLCPFGEVFNATRFASVYAWNRKRISNCVADYSVLYNSASFSTFKCYGVSPTKLNDLCFTNVYADSFVIRGDEVRQIAPGQTGKIADYNYKLPDDFTGCVIAWNSNNLDSKVGGNYNYLYRLFRKSNLKPFERDISTEIYQAGSTPCNGVEGFNCYFPLQSYGFQPTNGVGYQPYRVVVLSFELLHAPATVCGPKKSTNLVKNKCVNFNFNGLTGTGVLTESNKKFLPFQQFGRDIADTTDAVRDPQTLEILDITPCSFGGVSVITPGTNTSNQVAVLYQDVNCTEVPVAIHADQLTPTWRVYSTGSNVFQTRAGCLIGAEHVNNSYECDIPIGAGICASYQTQTNSPSGAGSVASQSIIAYTMSLGAENSVAYSNNSIAIPTNFTISVTTEILPVSMQKTSVDCTMYICGDSTECSNLLLQYGSFCTQLNRALTGIAVEQDKNTQEVFAQVKQIYKTPPIKDFGGFNFSQILPDPSKPSKRSFIEDLLFNKVTLADAGFIKQYGDCLGDIAARDLICAQKFNGLTVLPPLLTDEMIAQYTSALLAGTITSGWTFGAGAALQIPFAMQMAYRFNGIGVTQNVLYENQKLIANQFNSAIGKIQDSLSSTASALGKLQDVVNQNAQALNTLVKQLSSNFGAISSVLNDILSRLDPPEAEVQIDRLITGRLQSLQTYVTQQLIRAAEIRASANLAATKMSECVLGQSKRVDFCGKGYHLMSFPQSAPHGVVFLHVTYVPAQEKNFTTAPAICHDGKAHFPREGVFVSNGTHWFVTQRNFYEPQIITTDNTFVSGNCDVVIGIVNNTVYDPLQPELDSFKEELDKYFKNHTSPDVDLGDISGINASVVNIQKEIDRLNEVAKNLNESLIDLQELGKYEQYIKGSGRENLYFQGGGGSGYIPEAPRDGQAYVRKDGEWVLLSTFLGHHHHHHHH

SEQ ID NO: 2321 - protein, 1281 aa, Artificial Sequence
  Description of Artificial Sequence: Synthetic polypeptide
MGILPSPGMPALLSLVSLLSVLLMGCVAETGTQCVNLTTRTQLPPAYTNSFTRGVYYPDKVFRSSVLHSTQDLFLPFFSNVTWFHAIHVSGTNGTKRFDNPVLPFNDGVYFASTEKSNIIRGWIFGTTLDSKTQSLLIVNNATNVVIKVCEFQFCNDPFLGVYYHKNNKSWMENEFRVYSSANNCTFEYVSQPFLMDLEGKQGNFKNLREFVFKNIDGYFKIYSKHTPINLVRDLPQGFSALEPLVDLPIGINITRFQTLLALHRSYLTPGDSSSGWTAGAAAYYVGYLQPRTFLLKYNENGTITDAVDCALDPLSETKCTLKSFTVEKGIYQTSNFRVQPTESIVRFPNITNLCPFGEVFNATRFASVYAWNRKRISNCVADYSVLYNSASFSTFKCYGVSPTKLNDLCFTNVYADSFVIRGDEVRQIAPGQTGKIADYNYKLPDDFTGCVIAWNSNNLDSKVGGNYNYLYRLFRKSNLKPFERDISTEIYQAGSTPCNGVEGFNCYFPLQSYGFQPTNGVGYQPYRVVVLSFELLHAPATVCGPKKSTNLVKNKCVNFNFNGLTGTGVLTESNKKFLPFQQFGRDIADTTDAVRDPQTLEILDITPCSFGGVSVITPGTNTSNQVAVLYQDVNCTEVPVAIHADQLTPTWRVYSTGSNVFQTRAGCLIGAEHVNNSYECDIPIGAGICASYQTQTNSPSGAGSVASQSIIAYTMSLGAENSVAYSNNSIAIPTNFTISVTTEILPVSMTKTSVDCTMYICGDSTECSNLLLQYGSFCTQLNRALTGIAVEQDKNTQEVFAQVKQIYKTPPIKDFGGFNFSQILPDPSKPSKRSFIEDLLFNKVTLADAGFIKQYGDCLGDIAARDLICAQKFNGLTVLPPLLTDEMIAQYTSALLAGTITSGWTFGAGAALQIPFAMQMAYRFNGIGVTQNVLYENQKLIANQFNSAIGKIQDSLSSTASALGKLQDVVNQNAQALNTLVKQLSSNFGAISSVLNDILSRLDPPEAEVQIDRLITGRLQSLQTYVTQQLIRAAEIRASANLAATKMSECVLGQSKRVDFCGKGYHLMSFPQSAPHGVVFLHVTYVPAQEKNFTTAPAICHDGKAHFPREGVFVSNGTHWFVTQRNFYEPQIITTDNTFVSGNCDVVIGIVNNTVYDPLQPELDSFKEELDKYFKNHTSPDVDLGDISGINASVVNIQKEIDRLNEVAKNLNESLIDLQELGKYEQYIKGSGRENLYFQGGGGSGYIPEAPRDGQAYVRKDGEWVLLSTFLGHHHHHHHH

SEQ ID NO: 2322 - protein, 1281 aa, Artificial Sequence
  Description of Artificial Sequence: Synthetic polypeptide
MGILPSPGMPALLSLVSLLSVLLMGCVAETGTQCVNLTTRTQLPPAYTNSFTRGVYYPDKVFRSSVLHSTQDLFLPFFSNVTWFHAIHVSGTNGTKRFDNPVLPFNDGVYFASTEKSNIIRGWIFGTTLDSKTQSLLIVNNATNVVIKVCEFQFCNDPFLGVYYHKNNKSWMEDEFRVYSSANNCTFEYVSQPFLMDLEGKQGNFKNLREFVFKNIDGYFKIYSKHTPINLVRDLPQGFSALEPLVDLPIGINITRFQTLLALHRSYLTPGDSSSGWTAGAAAYYVGYLQPRTFLLKYNENGTITDAVDCALDPLSETKCTLKSFTVEKGIYQTSNFRVQPTESIVRFPNITNLCPFGEVFNATRFASVYAWNRKRISNCVADYSVLYNSASFSTFKCYGVSPTKLNDLCFTNVYADSFVIRGDEVRQIAPGQTGKIADYNYKLPDDFTGCVIAWNSNNLDSKVGGNYNYLYRLFRKSNLKPFERDISTEIYQAGSTPCNGVEGFNCYFPLQSYGFQPTNGVGYQPYRVVVLSFELLHAPATVCGPKKSTNLVKNKCVNFNFNGLTGTGVLTESNKKFLPFQQFGRDIADTTDAVRDPQTLEILDITPCSFGGVSVITPGTNTSNQVAVLYQDVNCTEVPVAIHADQLTPTWRVYSTGSNVFQTRAGCLIGAEHVNNSYECDIPIGAGICASYQTQTNSPSGAGSVASQSIIAYTMSLGAENSVAYSNNSIAIPTNFTISVTTEILPVSMTKTSVDCTMYICGDSTECSNLLLQYGSFCTQLNRALTGIAVEQDKNTQEVFAQVKQIYKTPPIKDFGGFNFSQILPDPSKPSKRSFIEDLLFNKVTLADAGFIKQYGDCLGDIAARDLICAQKFNGLTVLPPLLTDEMIAQYTSALLAGTITSGWTFGAGAALQIPFAMQMAYRFNGIGVTQNVLYENQKLIANQFNSAIGKIQDSLSSTASALGKLQDVVNQNAQALNTLVKQLSSNFGAISSVLNDILSRLDPPEAEVQIDRLITGRLQSLQTYVTQQLIRAAEIRASANLAATKMSECVLGQSKRVDFCGKGYHLMSFPQSAPHGVVFLHVTYVPAQEKNFTTAPAICHDGKAHFPREGVFVSNGTHWFVTQRNFYEPQIITTDNTFVSGNCDVVIGIVNNTVYDPLQPELDSFKEELDKYFKNHTSPDVDLGDISGINASVVNIQKEIDRLNEVAKNLNESLIDLQELGKYEQYIKGSGRENLYFQGGGGSGYIPEAPRDGQAYVRKDGEWVLLSTFLGHHHHHHHH

SEQ ID NO: 2323 - protein, 1281 aa, Artificial Sequence
  Description of Artificial Sequence: Synthetic polypeptide
MGILPSPGMPALLSLVSLLSVLLMGCVAETGTQCVNLTTRTQLPPAYTNSFTRGVYYPDKVFRSSVLHSTQDLFLPFFSNVTWFHAIHVSGTNGTKRFDNPVLPFNDGVYFASTEKSNIIRGWIFGTTLDSKTQSLLIVNNATNVVIKVCEFQFCNDPFLGVYYHKNNKSWMESEFRVYSSANNCTFEYVSQPFLMDLEGKQGNFKNLREFVFKNIDGYFKIYSKHTPINLVRDLPQGFSALEPLVDLPIGINITRFQTLLALHRSYLTPGDSSSGWTAGAAAYYVGYLQPRTFLLKYNENGTITDAVDCALDPLSETKCTLKSFTVEKGIYQTSNFRVQPTESIVRFPNITNLCPFGEVFNATRFASVYAWNRKRISNCVADYSVLYNSASFSTFKCYGVSPTKLNDLCFTNVYADSFVIRGDEVRQIAPGQTGKIADYNYKLPDDFTGCVIAWNSNNLDSKVGGNYNYLYRLFRKSNLKPFERDISTEIYQAGSTPCNGVEGFNCYFPLQSYGFQPTNGVGYQPYRVVVLSFELLHAPATVCGPKKSTNLVKNKCVNFNFNGLTGTGVLTESNKKFLPFQQFGRDIADTTDAVRDPQTLEILDITPCSFGGVSVITPGTNTSNQVAVLYQDVNCTEVPVAIHADQLTPTWRVYSTGSNVFQTRAGCLIGAEHVNNSYECDIPIGNGICASYQTQTNSPSGAGSVASQSIIAYTMSLGAENSVAYSNNSIAIPTNFTISVTTEILPVSMTKTSVDCTMYICGDSTECSNLLLQYGSFCTQLNRALTGIAVEQDKNTQEVFAQVKQIYKTPPIKDFGGFNFSQILPDPSKPSKRSFIEDLLFNKVTLADAGFIKQYGDCLGDIAARDLICAQKFNGLTVLPPLLTDEMIAQYTSALLAGTITSGWTFGAGAALQIPFAMQMAYRFNGIGVTQNVLYENQKLIANQFNSAIGKIQDSLSSTASALGKLQDVVNQNAQALNTLVKQLSSNFGAISSVLNDILSRLDPPEAEVQIDRLITGRLQSLQTYVTQQLIRAAEIRASANLAATKMSECVLGQSKRVDFCGKGYHLMSFPQSAPHGVVFLHVTYVPAQEKNFTTAPAICHDGKAHFPREGVFVSNGTHWFVTQRNFYEPQIITTDNTFVSGNCDVVIGIVNNTVYDPLQPELDSFKEELDKYFKNHTSPDVDLGDISGINASVVNIQKEIDRLNEVAKNLNESLIDLQELGKYEQYIKGSGRENLYFQGGGGSGYIPEAPRDGQAYVRKDGEWVLLSTFLGHHHHHHHH

SEQ ID NO: 2324 - protein, 1281 aa, Artificial Sequence
  Description of Artificial Sequence: Synthetic polypeptide
MGILPSPGMPALLSLVSLLSVLLMGCVAETGTQCVNLTTRTQLPPAYTNSFTRGVYYPDKVFRSSVLHSTQDLFLPFFSNVTWFHAIHVSGTNGTKRFDNPVLPFNDGVYFASTEKSNIIRGWIFGTTLDSKTQSLLIVNNATNVVIKVCEFQFCNDPFLGVYYHKNNKSWMESEFRVYSSANNCTFEYVSQPFLMDLEGKQGNFKNLREFVFKNIDGYFKIYSKHTPINLVRDLPQGFSALEPLVDLPIGINITRFQTLLALHRSYLTPGDSSSGWTAGAAAYYVGYLQPRTFLLKYNENGTITDAVDCALDPLSETKCTLKSFTVEKGIYQTSNFRVQPTESIVRFPNITNLCPFGEVFNATRFASVYAWNRKRISNCVADYSVLYNSASFSTFKCYGVSPTKLNDLCFTNVYADSFVIRGDEVRQIAPGQTGKIADYNYKLPDDFTGCVIAWNSNNLDSKVGGNYNYLYRLFRKSNLKPFERDISTEIYQAGSTPCNGVEGFNCYFPLQSYGFQPTNGVGYQPYRVVVLSFELLHAPATVCGPKKSTNLVKNKCVNFNFNGLTGTGVLTESNKKFLPFQQFGRDIADTTDAVRDPQTLEILDITPCSFGGVSVITPGTNTSNQVAVLYQDVNCTEVPVAIHADQLTPTWRVYSTGSNVFQTRAGCLIGAEHVNNSYECDIPIGAGICASYQTQTNSPSGAGSVASQSIIAYTMSLGAENSVAYSNNSIAIPTNFTISVTTEILPVSMTKTSVDCTMYICGDSTECSNLLLQYGSFCTQLNRALTGIAVEQDKNTQEVFAQVKQIYKTPPIKDFGGFNFSQILPDPSKPSKRSFIEDLLFNKVTLADAGFIKQYGDCLGDIAARDLICAQKFNGLTVLPPLLTDEMIAQYTSALLAGTITSGWTFGAGAALQIPFAMQMAYRFNGIGVTQNVLYENQKLIANQFNSAIGKIQDSLSTTASALGKLQDVVNQNAQALNTLVKQLSSNFGAISSVLNDILSRLDPPEAEVQIDRLITGRLQSLQTYVTQQLIRAAEIRASANLAATKMSECVLGQSKRVDFCGKGYHLMSFPQSAPHGVVFLHVTYVPAQEKNFTTAPAICHDGKAHFPREGVFVSNGTHWFVTQRNFYEPQIITTDNTFVSGNCDVVIGIVNNTVYDPLQPELDSFKEELDKYFKNHTSPDVDLGDISGINASVVNIQKEIDRLNEVAKNLNESLIDLQELGKYEQYIKGSGRENLYFQGGGGSGYIPEAPRDGQAYVRKDGEWVLLSTFLGHHHHHHHH

SEQ ID NO: 2325 - protein, 1281 aa, Artificial Sequence
  Description of Artificial Sequence: Synthetic polypeptide
MGILPSPGMPALLSLVSLLSVLLMGCVAETGTQCVNLTTRTQLPPAYTNSFTRGVYYPDKVFRSSVLHSTQDLFLPFFSNVTWFHAIHVSGTNGTKRFDNPVLPFNDGVYFASTEKSNIIRGWIFGTTLDSKTQSLLIVNNATNVVIKVCEFQFCNDPFLGVYYHKNNKSWMESEFRVYSSANNCTFEYVSQPFLMDLEGKQGNFKNLREFVFKNIDGYFKIYSKHTPINLVRDLPQGFSALEPLVDLPIGINITRFQTLLALHRSYLTPGDSSSGWTAGAAAYYVGYLQPRTFLLKYNENGTITDAVDCALDPLSETKCTLKSFTVEKGIYQTSNFRVQPTESIVRFPNITNLCPFGEVFNATRFASVYAWNRKRISNCVADYSVLYNSASFSTFKCYGVSPTKLNDLCFTNVYADSFVIRGDEVRQIAPGQTGKIADYNYKLPDDFTGCVIAWNSNNLDSKVGGNYNYLYRLFRKSNLKPFERDISTEIYQAGSTPCNGVEGFNCYFPLQSYGFQPTNGVGYQPYRVVVLSFELLHAPATVCGPKKSTNLVKNKCVNFNFNGLTGTGVLTESNKKFLPFQQFGRDIADTTDAVRDPQTLEILDITPCSFGGVSVITPGTNTSNQVAVLYQDVNCTEVPVAIHADQLTPTWRVYSTGSNVFQTRAGCLIGAEHVNNSYECDIPIGAGICASYQTQTNSPSGAGSVASQSIIAYTMSLGAENTVAYSNNSIAIPTNFTISVTTEILPVSMTKTSVDCTMYICGDSTECSNLLLQYGSFCTQLNRALTGIAVEQDKNTQEVFAQVKQIYKTPPIKDFGGFNFSQILPDPSKPSKRSFIEDLLFNKVTLADAGFIKQYGDCLGDIAARDLICAQKFNGLTVLPPLLTDEMIAQYTSALLAGTITSGWTFGAGAALQIPFAMQMAYRFNGIGVTQNVLYENQKLIANQFNSAIGKIQDSLSSTASALGKLQDVVNQNAQALNTLVKQLSSNFGAISSVLNDILSRLDPPEAEVQIDRLITGRLQSLQTYVTQQLIRAAEIRASANLAATKMSECVLGQSKRVDFCGKGYHLMSFPQSAPHGVVFLHVTYVPAQEKNFTTAPAICHDGKAHFPREGVFVSNGTHWFVTQRNFYEPQIITTDNTFVSGNCDVVIGIVNNTVYDPLQPELDSFKEELDKYFKNHTSPDVDLGDISGINASVVNIQKEIDRLNEVAKNLNESLIDLQELGKYEQYIKGSGRENLYFQGGGGSGYIPEAPRDGQAYVRKDGEWVLLSTFLGHHHHHHHH

SEQ ID NO: 2326 - protein, 1281 aa, Artificial Sequence
  Description of Artificial Sequence: Synthetic polypeptide
MGILPSPGMPALLSLVSLLSVLLMGCVAETGTQCVNLTTRTQLPPAYTNSFTRGVYYPDKVFRSSVLHSTQDLFLPFFSNVTWFHAIHVSGTNGTKRFDNPVLPFNDGVYFASTEKSNIIRGWIFGTTLDSKTQSLLIVNNATNVVIKVCEFQFCNDPFLGVYYHKNNKSWMESEFRVYSSANNCTFEYVSQPFLMDLEGKQGNFKNLREFVFKNIDGYFKIYSKHTPINLVRDLPQGFSALEPLVDLPIGINITRFQTLLALHRSYLTPGDSSSGWTAGAAAYYVGYLQPRTFLLKYNENGTITDAVDCALDPLSETKCTLKSFTVEKGIYQTSNFRVQPTESIVRFPNITNLCPFGEVFNATRFASVYAWNRKRISNCVADYSVLYNSASFSTFKCYGVSPTKLNDLCFTNVYADSFVIRGDEVRQIAPGQTGKIADYNYKLPDDFTGCVIAWNSNNLDSKVGGNYNYLYRLFRKSNLKPFERDISTEIYQAGSTPCNGVEGFNCYFPLQSYGFQPTNGVGYQPYRVVVLSFELLHAPATVCGPKKSTNLVKNKCVNFNFNGLTGTGVLTESNKKFLPFQQFGRDIADTTDAVRDPQTLEILDITPCSFGGVSVITPGTNTSSQVAVLYQDVNCTEVPVAIHADQLTPTWRVYSTGSNVFQTRAGCLIGAEHVNNSYECDIPIGAGICASYQTQTNSPSGAGSVASQSIIAYTMSLGAENSVAYSNNSIAIPTNFTISVTTEILPVSMTKTSVDCTMYICGDSTECSNLLLQYGSFCTQLNRALTGIAVEQDKNTQEVFAQVKQIYKTPPIKDFGGFNFSQILPDPSKPSKRSFIEDLLFNKVTLADAGFIKQYGDCLGDIAARDLICAQKFNGLTVLPPLLTDEMIAQYTSALLAGTITSGWTFGAGAALQIPFAMQMAYRFNGIGVTQNVLYENQKLIANQFNSAIGKIQDSLSSTASALGKLQDVVNQNAQALNTLVKQLSSNFGAISSVLNDILSRLDPPEAEVQIDRLITGRLQSLQTYVTQQLIRAAEIRASANLAATKMSECVLGQSKRVDFCGKGYHLMSFPQSAPHGVVFLHVTYVPAQEKNFTTAPAICHDGKAHFPREGVFVSNGTHWFVTQRNFYEPQIITTDNTFVSGNCDVVIGIVNNTVYDPLQPELDSFKEELDKYFKNHTSPDVDLGDISGINASVVNIQKEIDRLNEVAKNLNESLIDLQELGKYEQYIKGSGRENLYFQGGGGSGYIPEAPRDGQAYVRKDGEWVLLSTFLGHHHHHHHH

SEQ ID NO: 2327 - protein, 1281 aa, Artificial Sequence
  Description of Artificial Sequence: Synthetic polypeptide
MGILPSPGMPALLSLVSLLSVLLMGCVAETGTQCVNLTTRTQLPPAYTNSFTRGVYYPDKVFRSSVLHSTQDLFLPFFSNVTWFHAIHVSGTNGTKRFDNPVLPFNDGVYFASTEKSNIIRGWIFGTTLDSKTQSLLIVNNATNVVIKVCEFQFCNDPFLGVYYHKNNKSWMESEFRVYSSANNCTFEYVSQPFLMDLEGKQGNFKNLREFVFKNIDGYFKIYSKHTPINLVRDLPQGFSPLEPLVDLPIGINITRFQTLLALHRSYLTPGDSSSGWTAGAAAYYVGYLQPRTFLLKYNENGTITDAVDCALDPLSETKCTLKSFTVEKGIYQTSNFRVQPTESIVRFPNITNLCPFGEVFNATRFASVYAWNRKRISNCVADYSVLYNSASFSTFKCYGVSPTKLNDLCFTNVYADSFVIRGDEVRQIAPGQTGKIADYNYKLPDDFTGCVIAWNSNNLDSKVGGNYNYLYRLFRKSNLKPFERDISTEIYQAGSTPCNGVEGFNCYFPLQSYGFQPTNGVGYQPYRVVVLSFELLHAPATVCGPKKSTNLVKNKCVNFNFNGLTGTGVLTESNKKFLPFQQFGRDIADTTDAVRDPQTLEILDITPCSFGGVSVITPGTNTSNQVAVLYQDVNCTEVPVAIHADQLTPTWRVYSTGSNVFQTRAGCLIGAEHVNNSYECDIPIGAGICASYQTQTNSPSGAGSVASQSIIAYTMSLGAENSVAYSNNSIAIPTNFTISVTTEILPVSMTKTSVDCTMYICGDSTECSNLLLQYGSFCTQLNRALTGIAVEQDKNTQEVFAQVKQIYKTPPIKDFGGFNFSQILPDPSKPSKRSFIEDLLFNKVTLADAGFIKQYGDCLGDIAARDLICAQKFNGLTVLPPLLTDEMIAQYTSALLAGTITSGWTFGAGAALQIPFAMQMAYRFNGIGVTQNVLYENQKLIANQFNSAIGKIQDSLSSTASALGKLQDVVNQNAQALNTLVKQLSSNFGAISSVLNDILSRLDPPEAEVQIDRLITGRLQSLQTYVTQQLIRAAEIRASANLAATKMSECVLGQSKRVDFCGKGYHLMSFPQSAPHGVVFLHVTYVPAQEKNFTTAPAICHDGKAHFPREGVFVSNGTHWFVTQRNFYEPQIITTDNTFVSGNCDVVIGIVNNTVYDPLQPELDSFKEELDKYFKNHTSPDVDLGDISGINASVVNIQKEIDRLNEVAKNLNESLIDLQELGKYEQYIKGSGRENLYFQGGGGSGYIPEAPRDGQAYVRKDGEWVLLSTFLGHHHHHHHH

SEQ ID NO: 2328 - protein, 1281 aa, Artificial Sequence
  Description of Artificial Sequence: Synthetic polypeptide
MGILPSPGMPALLSLVSLLSVLLMGCVAETGTQCVNLTTRTQLPPAYTNSGTRGVYYPDKVFRSSVLHSTQDLFLPFFSNVTWFHAIHVSGTNGTKRFDNPVLPFNDGVYFASTEKSNIIRGWIFGTTLDSKTQSLLIVNNATNVVIKVCEFQFCNDPFLGVYYHKNNKSWMESEFRVYSSANNCTFEYVSQPFLMDLEGKQGNFKNLREFVFKNIDGYFKIYSKHTPINLVRDLPQGFSALEPLVDLPIGINITRFQTLLALHRSYLTPGDSSSGWTAGAAAYYVGYLQPRTFLLKYNENGTITDAVDCALDPLSETKCTLKSFTVEKGIYQTSNFRVQPTESIVRFPNITNLCPFGEVFNATRFASVYAWNRKRISNCVADYSVLYNSASFSTFKCYGVSPTKLNDLCFTNVYADSFVIRGDEVRQIAPGQTGKIADYNYKLPDDFTGCVIAWNSNNLDSKVGGNYNYLYRLFRKSNLKPFERDISTEIYQAGSTPCNGVEGFNCYFPLQSYGFQPTNGVGYQPYRVVVLSFELLHAPATVCGPKKSTNLVKNKCVNFNFNGLTGTGVLTESNKKFLPFQQFGRDIADTTDAVRDPQTLEILDITPCSFGGVSVITPGTNTSNQVAVLYQDVNCTEVPVAIHADQLTPTWRVYSTGSNVFQTRAGCLIGAEHVNNSYECDIPIGAGICASYQTQTNSPSGAGSVASQSIIAYTMSLGAENSVAYSNNSIAIPTNFTISVTTEILPVSMTKTSVDCTMYICGDSTECSNLLLQYGSFCTQLNRALTGIAVEQDKNTQEVFAQVKQIYKTPPIKDFGGFNFSQILPDPSKPSKRSFIEDLLFNKVTLADAGFIKQYGDCLGDIAARDLICAQKFNGLTVLPPLLTDEMIAQYTSALLAGTITSGWTFGAGAALQIPFAMQMAYRFNGIGVTQNVLYENQKLIANQFNSAIGKIQDSLSSTASALGKLQDVVNQNAQALNTLVKQLSSNFGAISSVLNDILSRLDPPEAEVQIDRLITGRLQSLQTYVTQQLIRAAEIRASANLAATKMSECVLGQSKRVDFCGKGYHLMSFPQSAPHGVVFLHVTYVPAQEKNFTTAPAICHDGKAHFPREGVFVSNGTHWFVTQRNFYEPQIITTDNTFVSGNCDVVIGIVNNTVYDPLQPELDSFKEELDKYFKNHTSPDVDLGDISGINASVVNIQKEIDRLNEVAKNLNESLIDLQELGKYEQYIKGSGRENLYFQGGGGSGYIPEAPRDGQAYVRKDGEWVLLSTFLGHHHHHHHH

SEQ ID NO: 2329 - protein, 1281 aa, Artificial Sequence
  Description of Artificial Sequence: Synthetic polypeptide
MGILPSPGMPALLSLVSLLSVLLMGCVAETGTQCVNLTTRTQLPPAYTNSFTRGVYYPDKVFRSSVLHSTQDLFLPFFSNVTWFHAIHVSGTNGTKRFDNPVLPFGDGVYFASTEKSNIIRGWIFGSTLDSKTQSLLIVNNATNVVIKVCEFQFCNDPFLGVYYHKNNKSWMESEFRVYSSANNCTFEYVSQPFLMDLEGKQGNFKNLREFVFKNIDGYFKIYSKHTPINLVRDLPQGFSALEPLVDLPIGINITRFQTLLALHRSYLTPGDSSSGWTAGAAAYYVGYLQPRTFLLKYNENGTITDAVDCALDPLSETKCTLKSFTVEKGIYQTSNFRVQPTESIVRFPNITNLCPFGEVFNATRFASVYAWNRKRISNCVADYSVLYNSASFSTFKCYGVSPTKLNDLCFTNVYADSFVIRGDEVRQIAPGQTGKIADYNYKLPDDFTGCVIAWNSNNLDSKVGGNYNYLYRLFRKSNLKPFERDISTEIYQAGSTPCNGVEGFNCYFPLQSYGFQPTNGVGYQPYRVVVLSFELLHAPATVCGPKKSTNLVKNKCVNFNFNGLTGTGVLTESNKKFLPFQQFGRDIADTTDAVRDPQTLEILDITPCSFGGVSVITPGTNTSNQVAVLYQDVNCTEVPVAIHADQLTPTWRVYSTGSNVFQTRAGCLIGAEHVNNSYECDIPIGAGICASYQTQTNSPSGAGSVASQSIIAYTMSLGAENSVAYSNNSIAIPTNFTISVTTEILPVSMTKTSVDCTMYICGDSTECSNLLLQYGSFCTQLNRALTGIAVEQDKNTQEVFAQVKQIYKTPPIKDFGGFNFSQILPDPSKPSKRSFIEDLLFNKVTLADAGFIKQYGDCLGDIAARDLICAQKFNGLTVLPPLLTDEMIAQYTSALLAGTITSGWTFGAGAALQIPFAMQMAYRFNGIGVTQNVLYENQKLIANQFNSAIGKIQDSLSSTASALGKLQDVVNQNAQALNTLVKQLSSNFGAISSVLNDILSRLDPPEAEVQIDRLITGRLQSLQTYVTQQLIRAAEIRASANLAATKMSECVLGQSKRVDFCGKGYHLMSFPQSAPHGVVFLHVTYVPAQEKNFTTAPAICHDGKAHFPREGVFVSNGTHWFVTQRNFYEPQIITTDNTFVSGNCDVVIGIVNNTVYDPLQPELDSFKEELDKYFKNHTSPDVDLGDISGINASVVNIQKEIDRLNEVAKNLNESLIDLQELGKYEQYIKGSGRENLYFQGGGGSGYIPEAPRDGQAYVRKDGEWVLLSTFLGHHHHHHHH

SEQ ID NO: 2330 - protein, 1281 aa, Artificial Sequence
  Description of Artificial Sequence: Synthetic polypeptide
MGILPSPGMPALLSLVSLLSVLLMGCVAETGTQCVNLTTRTQLPPAYTNSFTRGVYYPDKVFRSSVLHSTQDLFLPFFSNVTWFHAIHVSGTNGTKRFDNPVLPFNDGVYFASTEKSNIIRGWIFGTTLDSKTQSLLIVNNATNVVIKVCEFQFCNDPFLGVYYHKNNKSWMESEFRVYSSANNCTFEYVSQPFLMDLEGKQGNFKNLREFVFKNIDGYFKIYSKHTPINLVRDLPQGFSALEPLVDLPIGINITRFQTLLALHRSYLTPGDSSSGWTAGAAAYYVGYLQPRTFLLKYNENGTITDAVDCALDPLSETKCTLKSFTVEKGIYQTSNFRVQPTESIVRFPNITNLCPFGEVFNATRFASVYAWNRKRISNCVADYSVLYNSASFSTFKCYGVSPTKLNDLCFTNVYADSFVIRGDEVRQIAPGQTGKIADYNYKLPDDFTGCVIAWNSNNLDSKVGGNYNYLYRLFRKSNLKPFERDISTEIYQAGSTPCNGVEGFNCYFPLQSYGFQPTNGVGYQPYRVVVLSFELLHAPATVCGPKKSTNLVKNKCVNFNFNGLTGTGVLTESNKKFLPFQQFGRDIADTTDAVRDPQTLEILDITPCSFGGVSVITPGTNTSNQVAVLYQDVNCTEVPVAIHADQLTPTWRVYSTGSNVFQTRAGCLIGAEHVNNSYECDIPIGAGICASYQTQTNSPSGAGSVASQSIIAYTMSLGAENSVAYSNNSIAIPTNFTISVTTEILPVSMTKTSVDCTMYICGDSTECSNLLLQYGSFCTQLNRALTGIAVEQDKNTQEVFAQVKQIYKTPPIKDFGGFNFSQILPDPSKPSKRSFIEDLLFNKVTLADAGFIKQYGDCLGDIAARDLICAQKFNGLTVLPPLLTDEMIAQYTSALLAGTITSGWTFGAGAALQIPFAMQMAYRFNGIGVTQNVLYENQKQIANQFNSAIGKIQDSLSSTASALGKLQDVVNQNAQALNTLVKQLSSNFGAISSVLNDILSRLDPPEAEVQIDRLITGRLQSLQTYVTQQLIRAAEIRASANLAATKMSECVLGQSKRVDFCGKGYHLMSFPQSAPHGVVFLHVTYVPAQEKNFTTAPAICHDGKAHFPREGVFVSNGTHWFVTQRNFYEPQIITTDNTFVSGNCDVVIGIVNNTVYDPLQPELDSFKEELDKYFKNHTSPDVDLGDISGINASVVNIQKEIDRLNEVAKNLNESLIDLQELGKYEQYIKGSGRENLYFQGGGGSGYIPEAPRDGQAYVRKDGEWVLLSTFLGHHHHHHHH

SEQ ID NO: 2331 - protein, 1281 aa, Artificial Sequence
  Description of Artificial Sequence: Synthetic polypeptide
MGILPSPGMPALLSLVSLLSVLLMGCVAETGTQCVNLTTRTQLPPAYTNSFTRGVYYPDKVFRSSVLHSTQDLFLPFFSNVTWFHAIHVSGTNGTKRFDNPVLPFNDGVYFASTEKSNIIRGWIFGTTLDSKTQSLLIVNNATNVVIKVCEFQFCNDPFLGVYYHKNNKSWMESEFRVYSSANNCTFEYVSQPFLMDLEGKQGNFKNLREFVFKNIDGYFKIYSKHTPINLVRDLPQGFSALEPLVDLPIGINITRFQTLLALHRSYLTPGDSSSGWTAGAAAYYVGYLQPRTFLLKYNENGTITDAVDCDLDPLSETKCTLKSFTVEKGIYQTSNFRVQPTESIVRFPNITNLCPFGEVFNATRFASVYAWNRKRISNCVADYSVLYNSASFSTFKCYGVSPTKLNDLCFTNVYADSFVIRGDEVRQIAPGQTGKIADYNYKLPDDFTGCVIAWNSNNLDSKVGGNYNYLYRLFRKSNLKPFERDISTEIYQAGSTPCNGVEGFNCYFPLQSYGFQPTNGVGYQPYRVVVLSFELLHAPATVCGPKKSTNLVKNKCVNFNFNGLTGTGVLTESNKKFLPFQQFGRDIADTTDAVRDPQTLEILDITPCSFGGVSVITPGTNTSNQVAVLYQDVNCTEVPVAIHADQLTPTWRVYSTGSNVFQTRAGCLIGAEHVNNSYECDIPIGAGICASYQTQTNSPSGAGSVASQSIIAYTMSLGAENSVAYSNNSIAIPTNFTISVTTEILPVSMTKTSVDCTMYICGDSTECSNLLLQYGSFCTQLNRALTGIAVEQDKNTQEVFAQVKQIYKTPPIKDFGGFNFSQILPDPSKPSKRSFIEDLLFNKVTLADAGFIKQYGDCLGDIAARDLICAQKFNGLTVLPPLLTDEMIAQYTSALLAGTITSGWTFGAGAALQIPFAMQMAYRFNGIGVTQNVLYENQKLIANQFNSAIGKIQDSLSSTASALGKLQDVVNQNAQALNTLVKQLSSNFGAISSVLNDILSRLDPPEAEVQIDRLITGRLQSLQTYVTQQLIRAAEIRASANLAATKMSECVLGQSKRVDFCGKGYHLMSFPQSAPHGVVFLHVTYVPAQEKNFTTAPAICHDGKAHFPREGVFVSNGTHWFVTQRNFYEPQIITTDNTFVSGNCDVVIGIVNNTVYDPLQPELDSFKEELDKYFKNHTSPDVDLGDISGINASVVNIQKEIDRLNEVAKNLNESLIDLQELGKYEQYIKGSGRENLYFQGGGGSGYIPEAPRDGQAYVRKDGEWVLLSTFLGHHHHHHHH

SEQ ID NO: 2332 - protein, 1281 aa, Artificial Sequence
  Description of Artificial Sequence: Synthetic polypeptide
MGILPSPGMPALLSLVSLLSVLLMGCVAETGTQCVNLTTRTQLPPAYTNSFTRGVYYPDKVFRSSVLHSTQDLFLPFFSNVTWFHAIHVSGTNGTKRFDNPILPFNDGVYFASTEKSNIIRGWIFGTTLDSKTQSLLIVNNATNVVIKVCEFQFCNDPFLGVYYHKNNKSWMESEFRVYSSANNCTFEYVSQPFLMDLEGKQGNFKNLREFVFKNIDGYFKIYSKHTPINLVRDLPQGFSALEPLVDLPIGINITRFQTLLALHRSYLTPGDSSSGWTAGAAAYYVGYLQPRTFLLKYNENGTITDAVDCALDPLSETKCTLKSFTVEKGIYQTSNFRVQPTESIVRFPNITNLCPFGEVFNATRFASVYAWNRKRISNCVADYSVLYNSASFSTFKCYGVSPTKLNDLCFTNVYADSFVIRGDEVRQIAPGQTGKIADYNYKLPDDFTGCVIAWNSNNLDSKVGGNYNYLYRLFRKSNLKPFERDISTEIYQAGSTPCNGVEGFNCYFPLQSYGFQPTNGVGYQPYRVVVLSFELLHAPATVCGPKKSTNLVKNKCVNFNFNGLTGTGVLTESNKKFLPFQQFGRDIADTTDAVRDPQTLEILDITPCSFGGVSVITPGTNTSNQVAVLYQDVNCTEVPVAIHADQLTPTWRVYSTGSNVFQTRAGCLIGAEHVNNSYECDIPIGAGICASYQTQTNSPSGAGSVASQSIIAYTMSLGAENSVAYSNNSIAIPTNFTISVTTEILPVSMTKTSVDCTMYICGDSTECSNLLLQYGSFCTQLNRALTGIAVEQDKNTQEVFAQVKQIYKTPPIKDFGGFNFSQILPDPSKPSKRSFIEDLLFNKVTLADAGFIKQYGDCLGDIAARDLICAQKFNGLTVLPPLLTDEMIAQYTSALLAGTITSGWTFGAGAALQIPFAMQMAYRFNGIGVTQNVLYENQKLIANQFNSAIGKIQDSLSSTASALGKLQDVVNQNAQALNTLVKQLSSNFGAISSVLNDILSRLDPPEAEVQIDRLITGRLQSLQTYVTQQLIRAAEIRASANLAATKMSECVLGQSKRVDFCGKGYHLMSFPQSAPHGVVFLHVTYVPAQEKNFTTAPAICHDGKAHFPREGVFVSNGTHWFVTQRNFYEPQIITTDNTFVSGNCDVVIGIVNNTVYDPLQPELDSFKEELDKYFKNHTSPDVDLGDISGINASVVNIQKEIDRLNEVAKNLNESLIDLQELGKYEQYIKGSGRENLYFQGGGGSGYIPEAPRDGQAYVRKDGEWVLLSTFLGHHHHHHHH

SEQ ID NO: 2333 - protein, 1281 aa, Artificial Sequence
  Description of Artificial Sequence: Synthetic polypeptide
MGILPSPGMPALLSLVSLLSVLLMGCVAETGTQCVNLTTRTQLPPAYTNSFTRGVYYPDKVFRSSVLHSTQDLFLPFFSNVTWFHAIHVSGTNGTKRFDNPVLPFNDGVYFASTEKSNIIRGWIFGTTLDSKTQSLLIVNNATNVVIKVCEFQFCNDPFLGVYYHKNNKSWMESEFRVYSSANNCTFEYVSQPFLMDLEGKQGNFKNLREFVFKNIDGYFKIYSKHTPINLVRDLPQGFSALEPLVDLPIGINITRFQTLLALHRSYLTPGDSSSGWTAGAAAYYVGYLQPRTFLLKYNENGTITDAVDCALDPLSETKCTLKSFTVEKGIYQTSNFRVQPTESIVRFPNITNLCPFGEVFNATRFASVYAWNRKRISNCVADYSVLYNSASFSTFKCYGVSPTKLNDLCFTNVYADSFVIRGDEVRQIAPGQTGKIADYNYKLPDDFTGCVIAWNSNNLDSKVGGNYNYLYRLFRKSNLKPFERDISTEIYQAGSTPCNGVEGFNCYFPLQSYGFQPTNGVGYQPYRVVVLSFELLHAPATVCGPKKSTNLVKNKCVNFNFNGLTGTGVLTESNKKFLPFQQFGRDIADTTDAVRDPQTLEILDITPCSFGGVSVITPGTNTSNQVAVLYQDVNCTEVPVAIHADQLTPTWRVYSTGSNVFQTRAGCLIGAEHVNNSYECDIPIGAGICASYQTQTNSPSGAGSVASQSIIAYTMSLGAENSVAYSNNSIAIPTNFTISVTTEILPVSMTKTSVDCTMYICGDSTECSNLLLQYGSFCTQLNRALTGIAVEQDKNTQEVFAQVKQIYKTPPIKDFGGFNFSQILPDPSKPSKRSFIEDLLFNKVTLADAGFIKQYGDCLGDIAARDLICAQKFNGLTVLPPLLTDEMIAQYTSALLAGTITSGWTFGAGAALQIPFAMQMAYRFNGIGVTQNVLYENQKLIANQFNSAIGKIQDSLSSTASALGKLQDVVNQNAQALNTLVKQLSSNFGAISSVLNDILSRLDPPEAEVQIDRLITGRLQSLQTYVTQQLIRAAEIRASANLAATKMSECVLGQSKRVDFCGKGYHLMSFPQSAPHGVVFLHVTYVPAQEKNFTTAPAICHDGKAHFPREGVFVSNGTQWFVTQRNFYEPQIITTDNTFVSGNCDVVIGIVNNTVYDPLQPELDSFKEELDKYFKNHTSPDVDLGDISGINASVVNIQKEIDRLNEVAKNLNESLIDLQELGKYEQYIKGSGRENLYFQGGGGSGYIPEAPRDGQAYVRKDGEWVLLSTFLGHHHHHHHH

SEQ ID NO: 2334 - protein, 1281 aa, Artificial Sequence
  Description of Artificial Sequence: Synthetic polypeptide
MGILPSPGMPALLSLVSLLSVLLMGCVAETGTQCVNLTTRTQLPPAYTNSFTRGVYYPDKVFRSSVLHSTQDLFLPFFSNVTWFHAIHVSGTNGTKRFDNPVLPFNDGVYFASTEKSNIIRGWIFGTTLDSKTQSLLIVNNATNVVIKVCEFQFCNDPFLGVYYHKNNKSWMESEFRVYSSANNCTFEYVSQPFLMDLEGKQGNFKNLREFVFKNIDGYFKIYSKHTPINLVRDLPQGFSALEPLVDLPIGINITRFQTLLALHRSYLTPGDSSSGWTAGAAAYYVGYLQPRTFLLKYNENGTITDAVDCSLDPLSETKCTLKSFTVEKGIYQTSNFRVQPTESIVRFPNITNLCPFGEVFNATRFASVYAWNRKRISNCVADYSVLYNSASFSTFKCYGVSPTKLNDLCFTNVYADSFVIRGDEVRQIAPGQTGKIADYNYKLPDDFTGCVIAWNSNNLDSKVGGNYNYLYRLFRKSNLKPFERDISTEIYQAGSTPCNGVEGFNCYFPLQSYGFQPTNGVGYQPYRVVVLSFELLHAPATVCGPKKSTNLVKNKCVNFNFNGLTGTGVLTESNKKFLPFQQFGRDIADTTDAVRDPQTLEILDITPCSFGGVSVITPGTNTSNQVAVLYQDVNCTEVPEAIHADQLTPTWRVYSTGSNVFQTRAGCLIGAEHVNNSYECDIPIGAGICASYQTQTNSPSGAGSVASQSIIAYTMSLGAENSVAYSNNSIAIPTNFTISVTTEILPVSMTKTSVDCTMYICGDSTECSNLLLQYGSFCTQLNRALTGIAVEQDKNTQEVFAQVKQIYKTPPIKDFGGFNFSQILPDPSKPSKRSFIEDLLFNKVTLADAGFIKQYGDCLGDIAARDLICAQKFNGLTVLPPLLTDEMIAQYTSALLAGTITSGWTFGAGAALQIPFAMQMAYRFNGIGVTQNVLYENQKLIANQFNSAIGKIQDSLSSTASALGKLQDVVNQNAQALNTLVKQLSSNFGAISSVLNDILSRLDPPEAEVQIDRLITGRLQSLQTYVTQQLIRAAEIRASANLAATKMSECVLGQSKRVDFCGKGYHLMSFPQSAPHGVVFLHVTYVPAQEKNFTTAPAICHDGKAHFPREGVFVSNGTHWFVTQRNFYEPQIITTDNTFVSGNCDVVIGIVNNTVYDPLQPELDSFKEELDKYFKNHTSPDVDLGDISGINASVVNIQKEIDRLNEVAKNLNESLIDLQELGKYEQYIKGSGRENLYFQGGGGSGYIPEAPRDGQAYVRKDGEWVLLSTFLGHHHHHHHH

SEQ ID NO: 2335 - protein, 1281 aa, Artificial Sequence
  Description of Artificial Sequence: Synthetic polypeptide
MGILPSPGMPALLSLVSLLSVLLMGCVAETGTQCVNLTTRTQLPPAYTNSFTRGVYYPDKVFRSSVLHSTQDLFLPFFSNVTWFHAIHVSGTNGTKRFDNPVLPFNDGVYFASTEKSNIIRGWIFGTTLDSKTQSLLIVNNATNVVIKVCEFQFCNDPFLGVYYHKNNKSWMESEFRVYSSANNCTFEYVSQPFLMDLEGKQGNFKNLREFVFKNIDGYFKIYSKHTPINLVRDLPQGFSALEPDVDLPIGINITRFQTLLALHRSYLTPGDSSSGWTAGAAAYYVGYLQPRTFLLKYNENGTITDAVDCALDPLSETKCTLKSFTVEKGIYQTSNFRVQPTESIVRFPNITNLCPFGEVFNATRFASVYAWNRKRISNCVADYSVLYNSASFSTFKCYGVSPTKLNDLCFTNVYADSFVIRGDEVRQIAPGQTGKIADYNYKLPDDFTGCVIAWNSNNLDSKVGGNYNYLYRLFRKSNLKPFERDISTEIYQAGSTPCNGVEGFNCYFPLQSYGFQPTNGVGYQPYRVVVLSFELLHAPATVCGPKKSTNLVKNKCVNFNFNGLTGTGVLTESNKKFLPFQQFGRDIADTTDAVRDPQTLEILDITPCSFGGVSVITPGTNTSNQVAVLYQDVNCTEVPVAIHADQLTPTWRVYSTGSNVFQTRAGCLIGAEHVNNSYECDIPIGAGICASYQTQTNSPSGAGSVASQSIIAYTMSLGAENSVAYSNNSIAIPTNFTISVTTEILPVSMTKTSVDCTMYICGDSTECSNLLLQYGSFCTQLNRALTGIAVEQDKNTQEVFAQVKQIYKTPPIKDFGGFNFSQILPDPSKPSKRSFIEDLLFNKVTLADAGFIKQYGDCLGDIAARDLICAQKFNGLTVLPPLLTDEMIAQYTSALLAGTITSGWTFGAGAALQIPFAMQMAYRFNGIGVTQNVLYENQKLIANQFNSAIGKIQDSLSSTASALGKLQDVVNQNAQALNTLVKQLSSNFGAISSVLNDILSRLDPPEAEVQIDRLITGRLQSLQTYVTQQLIRAAEIRASANLAATKMSECVLGQSKRVDFCGKGYHLMSFPQSAPHGVVFLHVTYVPAQEKNFTTAPAICHDGKAHFPREGVFVSNGTHWFVTQRNFYEPQIITTDNTFVSGNCDVVIGIVNNTVYDPLQPELDSFKEELDKYFKNHTSPDVDLGDISGINASVVNIQKEIDRLNEVAKNLNESLIDLQELGKYEQYIKGSGRENLYFQGGGGSGYIPEAPRDGQAYVRKDGEWVLLSTFLGHHHHHHHH

SEQ ID NO: 2336 - protein, 1281 aa, Artificial Sequence
  Description of Artificial Sequence: Synthetic polypeptide
MGILPSPGMPALLSLVSLLSVLLMGCVAETGTQCVNLTTRTQLPPAYTNSFTRGVYYPDKVFRSSVLHSTQDLFLPFFSNVTWFHAIHVSGTNGTKRFDNPVLPFNDGVYFASTEKSNIIRGWIFGTTLDSKTQSLLIVNNATNVVIKVCEFQFCNDPFLGVYYHKNNKSWMESEFRVYSSANNCTFEYVSQPFLMDLEGKQGNFKNLREFVFKNIDGYFKIYSKHTPINLVRDLPQGFSALEPLVDLPIGINITRFQTLLALHRSYLTPGDSSSGWTAGAAAYYVGYLQPRTFLLKYNENGTITDAVDCALDPLSETKCTLKSFTVEKGIYQTSNFRVQPTESIVRFPNITNLCPFGEVFNATRFASVYAWNRKRISNCVADYSVLYNSASFSTFKCYGVSPTKLNDLCFTNVYADSFVIRGDEVRQIAPGQTGKIADYNYKLPDDFTGCVIAWNSNNLDSKVGGNYNYLYRLFRKSNLKPFERDISTEIYQAGSTPCNGVEGFNCYFPLQSYGFQPTNGVGYQPYRVVVLSFELLHAPATVCGPKKSTNLVKNKCVNFNFNGLTGTGVLTESNKKFLPFQQFGRDIADTTDAVRDPQTLEILDITPCSFGGVSVITPGTNTSNQVAVLYQDVNCTEVPVAIHADQLTPTWRVYSTGSNVFQTRAGCLIGAEHVNNSYECDIPIGAGICASYQTQTNSPSGAGSVASQSIIAYTMSLGAENSVAYSNNSIAIPTNFTISVTTEILPVSMTKTSVDCTMYICGDSTECSNLLLQYGSFCTQLNRALTGIAVEQDKNTQEVFAQVKQIYKTPPIKDFGGFNFSQILPDPSKPSKRSFIEDLLFNKVTLADAGFIKQYGDCLGDIAARDLICAQKFNGLTVLPPLLTDEMIAQYTSALLAGTITAGWTFGAGAALQIPFAMQMAYRFNGIGVTQNVLYENQKLIANQFNSAIGKIQDSLSSTASALGKLQDVVNQNAQALNTLVKQLSSNFGAISSVLNDILSRLDPPEAEVQIDRLITGRLQSLQTYVTQQLIRAAEIRASANLAATKMSECVLGQSKRVDFCGKGYHLMSFPQSAPHGVVFLHVTYVPAQEKNFTTAPAICHDGKAHFPREGVFVSNGTHWFVTQRNFYEPQIITTDNTFVSGNCDVVIGIVNNTVYDPLQPELDSFKEELDKYFKNHTSPDVDLGDISGINASVVNIQKEIDRLNEVAKNLNESLIDLQELGKYEQYIKGSGRENLYFQGGGGSGYIPEAPRDGQAYVRKDGEWVLLSTFLGHHHHHHHH

SEQ ID NO: 2337 - protein, 1281 aa, Artificial Sequence
  Description of Artificial Sequence: Synthetic polypeptide
MGILPSPGMPALLSLVSLLSVLLMGCVAETGTQCVNLTTRTQLPPAYTNSFTRGVYYPDKVFRSSVLHSTQDLFLPFFSNVTWFHAIHVSGTNGTKRFDNPVLPFNDGVYFASTEKSNIIRGWIFGTTLDSKTQSLLIVNNATNVVIKVCEFQFCNDPFLGVYYHKNNKSWMESEFRVYSSANNCTFEYVSQPFLMDLEGKQGNFKNLREFVFKNIDGYFKIYSKHTPINLVRDLPQGFSALEPLVDLPIGINITRFQTLLALHRSYLTPGDSSSGWTAGAAAYYVGYLQPRTFLLKYNENGTITDAVDCALDPLSEAKCTLKSFTVEKGIYQTSNFRVQPTESIVRFPNITNLCPFGEVFNATRFASVYAWNRKRISNCVADYSVLYNSASFSTFKCYGVSPTKLNDLCFTNVYADSFVIRGDEVRQIAPGQTGKIADYNYKLPDDFTGCVIAWNSNNLDSKVGGNYNYLYRLFRKSNLKPFERDISTEIYQAGSTPCNGVEGFNCYFPLQSYGFQPTNGVGYQPYRVVVLSFELLHAPATVCGPKKSTNLVKNKCVNFNFNGLTGTGVLTESNKKFLPFQQFGRDIADTTDAVRDPQTLEILDITPCSFGGVSVITPGTNTSNQVAVLYQDVNCTEVPVAIHADQLTPTWRVYSTGSNVFQTRAGCLIGAEHVNNSYECDIPIGAGICASYQTQTNSPSGAGSVASQSIIAYTMSLGAENSVAYSNNSIAIPTNFTISVTTEILPVSMTKTSVDCTMYICGDSTECSNLLLQYGSFCTQLNRALTGIAVEQDKNTQEVFAQVKQIYKTPPIKDFGGFNFSQILPDPSKPSKRSFIEDLLFNKVTLADAGFIKQYGDCLGDIAARDLICAQKFNGLTVLPPLLTDEMIAQYTSALLAGTITSGWTFGAGAALQIPFAMQMAYRFNGIGVTQNVLYENQKLIANQFNSAIGKIQDSLSSTASALGKLQDVVNQNAQALNTLVKQLSSNFGAISSVLNDILSRLDPPEAEVQIDRLITGRLQSLQTYVTQQLIRAAEIRASANLAATKMSECVLGQSKRVDFCGKGYHLMSFPQSAPHGVVFLHVTYVPAQEKNFTTAPAICHDGKAHFPREGVFVSNGTHWFVTQRNFYEPQIITTDNTFVSGNCDVVIGIVNNTVYDPLQPELDSFKEELDKYFKNHTSPDVDLGDISGINASVVNIQKEIDRLNEVAKNLNESLIDLQELGKYEQYIKGSGRENLYFQGGGGSGYIPEAPRDGQAYVRKDGEWVLLSTFLGHHHHHHHH

SEQ ID NO: 2338 - protein, 1281 aa, Artificial Sequence
  Description of Artificial Sequence: Synthetic polypeptide
MGILPSPGMPALLSLVSLLSVLLMGCVAETGTQCVNLTTRTQLPPAYTNSFTRGVYYPDKVFRSSVLHSTQDLFLPFFSNVTWFHAIHVSGTNGTKRFDNPVLPFNDGVYFASTEKSNIIRGWIFGTTLDSKTQSLLIVNNATNVVIKVCEFQFCNDPFLGVYYHKNNKSWMESEFRVYSSANNCTFEYVSQPFLMDLEGKQGNFKNLREFVFKNIDGYFKIYSKHTPINLVRDLPQGFSALEPLVDLPIGINITRFQTLLALHRSYLTPGDSSSGWTAGAAAYYVGYLQPRTFLLKYNENGTITDAVDCALDPLSETKCTLKSFTVEKGIYQTSNFRVQPTESIVRFPNITNLCPFGEVFNATRFASVYAWNRKRISNCVADYSVLYNSASFSTFKCYGVSPTKLNDLCFTNVYADSFVIRGDEVRQIAPGQTGKIADYNYKLPDDFTGCVIAWNSNNLDSKVGGNYNYLYRLFRKSNLKPFERDISTEIYQAGSTPCNGVEGFNCYFPLQSYGFQPTNGVGYQPYRVVVLSFELLHAPATVCGPKKSTNLVKNKCVNFNFNGLTGTGVLTSSNKKFLPFQQFGRDIADTTDAVRDPQTLEILDITPCSFGGVSVITPGTNTSNQVAVLYQDVNCTEVPVAIHADQLTPTWRVYSTGSNVFQTRAGCLIGAEHVNNSYECDIPIGAGICASYQTQTNSPSGAGSVASQSIIAYTMSLGAENSVAYSNNSIAIPTNFTISVTTEILPVSMTKTSVDCTMYICGDSTECSNLLLQYGSFCTQLNRALTGIAVEQDKNTQEVFAQVKQIYKTPPIKDFGGFNFSQILPDPSKPSKRSFIEDLLFNKVTLADAGFIKQYGDCLGDIAARDLICAQKFNGLTVLPPLLTDEMIAQYTSALLAGTITSGWTFGAGAALQIPFAMQMAYRFNGIGVTQNVLYENQKLIANQFNSAIGKIQDSLSSTASALGKLQDVVNQNAQALNTLVKQLSSNFGAISSVLNDILSRLDPPEAEVQIDRLITGRLQSLQTYVTQQLIRAAEIRASANLAATKMSECVLGQSKRVDFCGKGYHLMSFPQSAPHGVVFLHVTYVPAQEKNFTTAPAICHDGKAHFPREGVFVSNGTHWFVTQRNFYEPQIITTDNTFVSGNCDVVIGIVNNTVYDPLQPELDSFKEELDKYFKNHTSPDVDLGDISGINASVVNIQKEIDRLNEVAKNLNESLIDLQELGKYEQYIKGSGRENLYFQGGGGSGYIPEAPRDGQAYVRKDGEWVLLSTFLGHHHHHHHH

SEQ ID NO: 2339 - protein, 1281 aa, Artificial Sequence
  Description of Artificial Sequence: Synthetic polypeptide
MGILPSPGMPALLSLVSLLSVLLMGCVAETGTQCVNLTTRTQLPPAYTNSFTRGVYYPDKVFRSSVLHSTQDLFLPFFSNVTWFHAIHVSGTNGTKRFDNPVLPFNDGVYFASTEKSNIIRGWIFGTTLDSKTQSLLIVNNATNVVIKVCEFQFCNDPFLGVYYHKNNKSWMESEFRVYSSANNCTFEYVSQPFLMDLEGKQGNFKNLREFVFKNIDGYFKIYSKHTPINLVRDLPQGFSALEPLVDLPIGINITRFQTLLALHRSYLTPGDSSSGWTAGAAAYYVGYLQPRTFLLKYNENGTITDAVDCALDPLSETKCTLKSFTVEKGIYQTSNFRVQPTESIVRFPNITNLCPFGEVFNATRFASVYAWNRKRISNCVADYSVLYNSASFSTFKCYGVSPTKLNDLCFTNVYADSFVIRGDEVRQIAPGQTGKIADYNYKLPDDFTGCVIAWNSNNLDSKVGGNYNYLYRLFRKSNLKPFERDISTEIYQAGSTPCNGVEGFNCYFPLQSYGFQPTNGVGYQPYRVVVLSFELLHAPATVCGPKKSTNLVKNKCVNFNFNGLTGTGVLTESNKKFLPFQQFGRDIADTTDAVRDPQTLEILDITPCSFGGVSVITPGTNTSNQVAVLYQDVNCTEVPVAIHADQLTPTWRVYSTGSNVFQTRAGCLIGAEHVNNSYECDIPIGAGICASYQTQTNSPSGAGSVASQSIIAYTMSLGAENSVAYSNNSIAIPTNFTISVTTEILPVSMTKTSVDCTMYICGDSTECSNLLLQYGSFCTQLNRALTGIAVEQDKNTQEVFAQVKQIYKTPPIKDFGGFNFSQILPDPSKPSKRSFIEDLLFNKVTLADAGFIKQYGDCLGDIAARDLICAQKFNGLTVLPPLLTDEMIAQYTSALLAGTITSGWTFGAGAALQIPFAMQMAYRFNGIGVTQNVLYENQKLIANQFNSAIGKIQDSLSSTASALGKLQDVVNQNAQALNTLVKQLSSNFGAISSVLNDILSRLDPPEAEVQIDRLITGRLQSLQTYVTQQLIRAAEIRASANLAATKMSECVLGQSKRVDFCGKGYHLMSFPQSAPHGVVFLHVTYVPAQEKNFTTAPAICHDGKAHFPREGVFVSNGTAWFVTQRNFYEPQIITTDNTFVSGNCDVVIGIVNNTVYDPLQPELDSFKEELDKYFKNHTSPDVDLGDISGINASVVNIQKEIDRLNEVAKNLNESLIDLQELGKYEQYIKGSGRENLYFQGGGGSGYIPEAPRDGQAYVRKDGEWVLLSTFLGHHHHHHHH

SEQ ID NO: 2340 - protein, 1281 aa, Artificial Sequence
  Description of Artificial Sequence: Synthetic polypeptide
MGILPSPGMPALLSLVSLLSVLLMGCVAETGTQCVNLTTRTQLPPAYTNSFTRGVYYPDKVFRSDVLHSTQDLFLPFFSNVTWFHAIHVSGTNGTKRFDNPVLPFNDGVYFASTEKSNIIRGWIFGTTLDSKTQSLLIVNNATNVVIKVCEFQFCEDPFLGVYYHKNNKSWMEKEFRVYSSANNCTFEYVSQPFLMDLGGKQGNFKNLREFVFKNIDGYFKIYSKHTPINLVRDLPQGFSALEPLMDLPIGINITRFQTLLALHRSYLTPGDSSSGWTAGAAAYYVGYLQPRTFLLKYNENGTITDAVDCALDPLSETKCTLKSFTVEKGIYQTSNFRVQPTESIVRFPNITNLCPFGEVFNATRFASVYAWNRKRISNCVADYSVLYNSASFSTFKCYGVSPTKLNDLCFTNVYADSFVIRGDEVRQIAPGQTGKIADYNYKLPDDFTGCVIAWNSNNLDSKVGGNYNYLYRLFRKSNLKPFERDISTEIYQAGSTPCNGVEGFNCYFPLQSYGFQPTNGVGYQPYRVVVLSFELLHAPATVCGPKKSTNLVKNKCVNFNFNGLTGTGVLTESNKKFLPFQQFGRDIADNTDAVRDPQTLEILDITPCSFGGVSVITPGTNTSNQVAVLYQDVNCTEVPNAIHADQLTPTWRVYSTGSNVFQTRAGCLIGAEHVNNSYECDIPIGAGICASYQTQTNSPSGAGSVASQSIIAYTMSLGAENSVAYSNNSIAIPTNFTISVTTEILPVSMTKTSVDCTMYICGDSTECSNLLLQYGSFCTQLNRALQGIAQEQDKNTQEVFAQVKQIYKTPPIKDFGGFNFSQILPDPSKPSKRSFIEDLLFNKVTLADAGFIKQYGDCLGDIAARDLICAQKFNGLTVLPPLLTDEMIAQYTSALLAGTITSGWTFGAGAALQIPFAMQMAYRFNGIGVTQNVLYENQKLIANQFNKAIGKIQDSLSSTASALGKLQDVVNQNAQALNTLVKQLSSNFGAISSVLNDILSRLDPPEAEVQIDRLITGRLQSLQTYVTQQLIRAAEIRASANLAATKMSECVLGQSKRVDFCGKGYHLMSFPQSAPHGVVFLHVTYVPAQEKNFTTAPAICHDGKAFFPREGVFVSNGTQWFVTQRNFYEPQIITTDNTFVSGNCDVVIGIVNNTVYDPLQPELDSFKEELDKYFKNHTSPDVDLGDISGINASVVNIQKEIDRLNEVAKNLNESLIDLQELGKYEQYIKGSGRENLYFQGGGGSGYIPEAPRDGQAYVRKDGEWVLLSTFLGHHHHHHHH

SEQ ID NO: 2341 - protein, 1281 aa, Artificial Sequence
  Description of Artificial Sequence: Synthetic polypeptide
MGILPSPGMPALLSLVSLLSVLLMGCVAETGTQCVNLTTRTQLPPAYTNSFTRGVYYPDKVFRSSVLHSTQDLFLPFFSNVTWFHALHVSGTNGTKRFDNPVLPFNDGVYFASTEKSNIIRGWIFGTTLDSKTQSLLIVNNATNVVIKVCEFQFCNDPFLGVYYHKNNKSWMESEFRVYSSANNCTFEYVSQPFLMDLEGKQGNFKNLREFVFKNIDGYFKIYSKHTPINLVRDLPQGFSALEPLVDLPIGINITRFQTLLALHRSYLTPGDSSSGWTAGAAAYYVGYLQPRTFLLKYNENGTITDAVDCALDPLSETKCTLKSFTVEKGIYQTSNFRVQPTESIVRFPNITNLCPFGEVFNATRFASVYAWNRKRISNCVADYSVLYNSASFSTFKCYGVSPTKLNDLCFTNVYADSFVIRGDEVRQIAPGQTGKIADYNYKLPDDFTGCVIAWNSNNLDSKVGGNYNYLYRLFRKSNLKPFERDISTEIYQAGSTPCNGVEGFNCYFPLQSYGFQPTNGVGYQPYRVVVLSFELLHAPATVCGPKKSTNLVKNKCVNFNFNGLTGTGVLTESNKKFLPFQQFGRDIADTTDAVRDPQTLEILDITPCSFGGVSVITPGTNTSNQVAVLYQDVNCTEVPVAIHADQLTPTWRVYSTGSNVFQTRAGCLIGAEHVNNSYECDIPIGAGICASYQTQTNSPSGAGSVASQSIIAYTMSLGAENSVAYSNNSIAIPTNFTISVTTEILPVSMTKTSVDCTMYICGDSTECSNLLLQYGSFCTQLNRALTGIAVEQDKNTQEVFAQVKQIYKTPPIKDFGGFNFSQILPDPSKPSKRSFIEDLLFNKVTLADAGFIKQYGDCLGDIAARDLICAQKFNGLTVLPPLLTDEMIAQYTSALLAGTITSGWTFGAGAALQIPFAMQMAYRFNGIGVTQNVLYENQKLIANQFNSAIGKIQDSLSSTASALGKLQDVVNQNAQALNTLVKQLSSNFGAISSVLNDILSRLDPPEAEVQIDRLITGRLQSLQTYVTQQLIRAAEIRASANLAATKMSECVLGQSKRVDFCGKGYHLMSFPQSAPHGVVFLHVTYVPAQEKNFTTAPAICHDGKAHFPREGVFVSNGTHWFVTQRNFYEPQIITTDNTFVSGNCDVVIGIVNNTVYDPLQPELDSFKEELDKYFKNHTSPDVDLGDISGINASVVNIQKEIDRLNEVAKNLNESLIDLQELGKYEQYIKGSGRENLYFQGGGGSGYIPEAPRDGQAYVRKDGEWVLLSTFLGHHHHHHHH

SEQ ID NO: 2342 - protein, 1281 aa, Artificial Sequence
  Description of Artificial Sequence: Synthetic polypeptide
MGILPSPGMPALLSLVSLLSVLLMGCVAETGTQCVNLTTRTQLPPAYTNSFTRGVYYPDKVFRSSVLHSTQDLFLPFFSNVTWFHAIHVSGTNGTKRFDNPVLPFNDGVYFASTEKSNIIRGWIFGTTLDSKTQSLLIVNNATNVVIKVCEFQFCNDPFLGVYYHKNNKSWMESEFRVYSSANNCTFEYVSQPFLMDLEGKQGNFKNLREFVFKNIDGYFKIYSKHTPINLVRDLPQGFSALEPLVDLPIGINITRFQTLLALHRSYLTPGDSSSGWTAGAAAYYVGYLQPRTFLLKYNENGTITDAVDCALDPLSETKCTLKSFTVEKGIYQTSNFRVQPTESIVRFPNITNLCPFGEVFNATRFASVYAWNRKRISNCVADYSVLYNSASFSTFKCYGVSPTKLNDLCFTNVYADSFVIRGDEVRQIAPGQTGKIADYNYKLPDDFTGCVIAWNSNNLDSKVGGNYNYLYRLFRKSNLKPFERDISTEIYQAGSTPCNGVEGFNCYFPLQSYGFQPTNGVGYQPYRVVVLSFELLHAPATVCGPKKSTNLVKNKCVNFNFNGLTGTGVLTESNKKFLPFQQFGRDIADTTDAVRDPQTLEILDITPCSFGGVSVITPGTNTSNQVAVLYQDVNCTEVPVAIHADQLTPTWRVYSTGSNVFQTRAGCLIGAEHVNNSYECDIPIGAGICASYQTQTNSPSGAGSVASQSIIAYTMSLGAENSVAYSNNSIAIPTNFTISVTTEILPVSMTKTSVDCTMYICGDSTECSNLLLQYGSFCTQLNRALTGIAREQDKNLLNVFAQVKQIYKTPPIKDFGGFNFSQILPDPSKPSKRSFIEDLLFNKVTLADAGFIKQYGDCLGDIAARDLICAQKFNGLTVLPPLLTDEMIAQYTASLLAGTITAGWTFGAGAALQIPFAMQMAYRFNGIGVTQNVLYENQKLIANQFNSAIGKIQDSLSSTASALGKLQDVVNQNAQALNTLVKQLSSNFGAISSVLNDILSRLDPPEAEVQIDRLITGRLQSLQTYVTQQLIRATEIRASAQLAAEKMSECVKGQSKRVDFCGKGYHLMSFPQSAPHGVVFLHVTYVPAQEKNFTTAPAICHDGKAHFPREGVFVSNGTHWFVTQRNFYEPQIITTDNTFVSGNCDVVIGIVNNTVYDPLQPELDSFKEELDKYFKNHTSPDVDLGDISGINASVVNIQKEIDRLNEVAKNLNESLIDLQELGKYEQYIKGSGRENLYFQGGGGSGYIPEAPRDGQAYVRKDGEWVLLSTFLGHHHHHHHH

SEQ ID NO: 2343 - protein, 1281 aa, Artificial Sequence
  Description of Artificial Sequence: Synthetic polypeptide
MGILPSPGMPALLSLVSLLSVLLMGCVAETGTQCVNLTTRTQLPPAYTNSFTRGVYYPDKVFRSSVLHSTQDLFLPFFSNVTWFHAIHVSGTNGTKRFDNPVLPFNDGVYFASTEKSNIIRGWIFGTTLDSKTQSLLIVNNATNVVIKVCEFQFCNDPFLGVYYHKNNKSWMESEFRVYSSANNCTFEYVSQPFLMDLEGKQGNFKNLREFVFKNIDGYFKIYSKHTPINLVRDLPQGFSALEPLVDLPIGINITRFQTLLALHRSYLTPGDSSSGWTAGAAAYYVGYLQPRTFLLKYNENGTITDAVDCALDPLSETKCTLKSFTVEKGIYQTSNFRVQPTESIVRFPNITNLCPFGEVFNATRFASVYAWNRKRISNCVADYSVLYNSASFSTFKCYGVSPTKLNDLCFTNVYADSFVIRGDEVRQIAPGQTGKIADYNYKLPDDFTGCVIAWNSNNLDSKVGGNYNYLYRLFRKSNLKPFERDISTEIYQAGSTPCNGVEGFNCYFPLQSYGFQPTNGVGYQPYRVVVLSFELLHAPATVCGPKKSTNLVKNKCVNFNFNGLTGTGVLTESNKKFLPFQQFGRDIADTTDAVRDPQTLEILDITPCSFGGVSVITPGTNTSNQVAVLYQDVNCTEVPVAIHADQLTPTWRVYSTGSNVFQTRAGCLIGAEHVNNSYECDIPIGAGICASYQTQTNSPSGAGSVASQSIIAYTMSLGAENSVAYSNNSIAIPTNFTISVTTEILPVSMTKTSVDCTMYICGDSTECSNLLLQYGSFCTQLNRALEGIAVEQDKNTQEVFAQVKQIYKTPPIKDFGGFNFSQILPDPSKPSKRSFIEDLLFNKVTLADAGFIKQYGDCLGDIAARDLICAQKFNGLTVLPPLLTDEMIAQYTSALLAGTITSGWTFGAGAALQIPFAMQMAYRFNGIGVTQNVLYENQKLIANQFNSAIGKIQDSLSSTASALGKLQDVVNQNAQALNTLVKQLSSNFGAISSVLNDILSRLDPPEAEVQIDRLITGRLQSLQTYVTQQLIRAAEIRASANLAATKMSECVLGQSKRVDFCGKGYHLMSFPQSAPHGVVFLHVTYVPAQEKNFTTAPAICHDGKAHFPREGVFVSNGTHWFVTQRNFYEPQIITTDNTFVSGNCDVVIGIVNNTVYDPLQPELDSFKEELDKYFKNHTSPDVDLGDISGINASVVNIQKEIDRLNEVAKNLNESLIDLQELGKYEQYIKGSGRENLYFQGGGGSGYIPEAPRDGQAYVRKDGEWVLLSTFLGHHHHHHHH

SEQ ID NO: 2344 - protein, 1281 aa, Artificial Sequence
  Description of Artificial Sequence: Synthetic polypeptide
MGILPSPGMPALLSLVSLLSVLLMGCVAETGTQCVNLTTRTQLPPAYTNSFTRGVYYPDKVFRSSVLHSTQDLFLPFFSNVTWFHAIHVSGTNGTKRFDNPVLPFNDGVYFASTEKSNIIRGWIFGTTLDSKTQSLLIVNNATNVVIKVCEFQFCNDPFLGVYYHKNNKSWMESEFRVYSSANNCTFEYVSQPFLMDLEGKQGNFKNLREFVFKNIDGYFKIYSKHTPINLVRDLPQGFSALEPLVDLPIGINITRFQTLLALHRSYLTPGDSSSGWTAFAAAYYVGYLQPRTFLLKYNENGTITDAVDCALDPLSETKCTLKSFTVEKGIYQTSNFRVQPTESIVRFPNITNLCPFGEVFNATRFASVYAWNRKRISNCVADYSVLYNSASFSTFKCYGVSPTKLNDLCFTNVYADSFVIRGDEVRQIAPGQTGKIADYNYKLPDDFTGCVIAWNSNNLDSKVGGNYNYLYRLFRKSNLKPFERDISTEIYQAGSTPCNGVEGFNCYFPLQSYGFQPTNGVGYQPYRVVVLSFELLHAPATVCGPKKSTNLVKNKCVNFNFNGLTGTGVLTESNKKFLPFQQFGRDIADTTDAVRDPQTLEILDITPCSFGGVSVITPGTNTSNQVAVLYQDVNCTEVPVAIHADQLTPTWRVYSTGSNVFQTRAGCLIGAEHVNNSYECDIPIGAGICASYQTQTNSPSGAGSVASQSIIAYTMSLGAENSVAYSNNSIAIPTNFTISVTTEILPVSMTKTSVDCTMYICGDSTECSNLLLQYGSFCTQLNRALTGIAVEQDKNTQEVFAQVKQIYKTPPIKDFGGFNFSQILPDPSKPSKRSFIEDLLFNKVTLADAGFIKQYGDCLGDIAARDLICAQKFNGLTVLPPLLTDEMIAQYTSALLAGTITSGWTFGAGAALQIPFAMQMAYRFNGIGVTQNVLYENQKLIANQFNSAIGKIQDSLSSTASALGKLQDVVNQNAQALNTLVKQLSSNFGAISSVLNDILSRLDPPEAEVQIDRLITGRLQSLQTYVTQQLIRAAEIRASANLAATKMSECVLGQSKRVDFCGKGYHLMSFPQSAPHGVVFLHVTYVPAQEKNFTTAPAICHDGKAHFPREGVFVSNGTHWFVTQRNFYEPQIITTDNTFVSGNCDVVIGIVNNTVYDPLQPELDSFKEELDKYFKNHTSPDVDLGDISGINASVVNIQKEIDRLNEVAKNLNESLIDLQELGKYEQYIKGSGRENLYFQGGGGSGYIPEAPRDGQAYVRKDGEWVLLSTFLGHHHHHHHH

SEQ ID NO: 2345 - protein, 1281 aa, Artificial Sequence
  Description of Artificial Sequence: Synthetic polypeptide
MGILPSPGMPALLSLVSLLSVLLMGCVAETGTQCVNLTTRTQLPPAYTNSFTRGVYYPDKVFRSSVLHSTQDLFLPFFSNVTWFHAIHVSGTNGTKRFDNPVLPFNDGVYFASTEKSNIIRGWIFGTTLDSKTQSLLIVNNATNVVIKVCEFQFCNDPFLGVYYHKNNKSWMESEFRVYSSANNCTFEYVSQPFLMDLEGKQGNFKNLREFVFKNIDGYFKIYSKHTPINLVRDLPQGFSALEPLADLPIGINITRFQTLLALHRSYLTPGDSSSGWTAGAAAYYVGYLQPRTFLLKYNENGTITDAVDCALDPLSETKCTLKSFTVEKGIYQTSNFRVQPTESIVRFPNITNLCPFGEVFNATRFASVYAWNRKRISNCVADYSVLYNSASFSTFKCYGVSPTKLNDLCFTNVYADSFVIRGDEVRQIAPGQTGKIADYNYKLPDDFTGCVIAWNSNNLDSKVGGNYNYLYRLFRKSNLKPFERDISTEIYQAGSTPCNGVEGFNCYFPLQSYGFQPTNGVGYQPYRVVVLSFELLHAPATVCGPKKSTNLVKNKCVNFNFNGLTGTGVLTESNKKFLPFQQFGRDIADTTDAVRDPQTLEILDITPCSFGGVSVITPGTNTSNQVAVLYQDVNCTEVPVAIHADQLTPTWRVYSTGSNVFQTRAGCLIGAEHVNNSYECDIPIGAGICASYQTQTNSPSGAGSVASQSIIAYTMSLGAENSVAYSNNSIAIPTNFTISVTTEILPVSMTKTSVDCTMYICGDSTECSNLLLQYGSFCTQLNRALTGIAVEQDKNTQEVFAQVKQIYKTPPIKDFGGFNFSQILPDPSKPSKRSFIEDLLFNKVTLADAGFIKQYGDCLGDIAARDLICAQKFNGLTVLPPLLTDEMIAQYTSALLAGTITSGWTFGAGAALQIPFAMQMAYRFNGIGVTQNVLYENQKLIANQFNSAIGKIQDSLSSTASALGKLQDVVNQNAQALNTLVKQLSSNFGAISSVLNDILSRLDPPEAEVQIDRLITGRLQSLQTYVTQQLIRAAEIRASANLAATKMSECVLGQSKRVDFCGKGYHLMSFPQSAPHGVVFLHVTYVPAQEKNFTTAPAICHDGKAHFPREGVFVSNGTHWFVTQRNFYEPQIITTDNTFVSGNCDVVIGIVNNTVYDPLQPELDSFKEELDKYFKNHTSPDVDLGDISGINASVVNIQKEIDRLNEVAKNLNESLIDLQELGKYEQYIKGSGRENLYFQGGGGSGYIPEAPRDGQAYVRKDGEWVLLSTFLGHHHHHHHH

SEQ ID NO: 2346 - protein, 1281 aa, Artificial Sequence
  Description of Artificial Sequence: Synthetic polypeptide
MGILPSPGMPALLSLVSLLSVLLMGCVAETGTQCVNLTTRTQLPPAYTNSFTRGVYYPDKVFRSSVLHSTQDLFLPFFSNVTWFHAIHVSGTNGTKRFDNPVLPFNDGVYFASTEKSNIIRGWIFGTTLDSKTQSLLIVNNATNVVIKVCEFQFCNDPFLGVYYHKNNKSWMESEFRVYSSANNCTFEYVSQPFLMDLEGKQGNFKNLREFVFKNIDGYFKIYSKHTPINLVRDLPQGFSALEPLVTLPIGINITRFQTLLALHRSYLTPGDSSSGWTAGAAAYYVGYLQPRTFLLKYNENGTITDAVDCALDPLSETKCTLKSFTVEKGIYQTSNFRVQPTESIVRFPNITNLCPFGEVFNATRFASVYAWNRKRISNCVADYSVLYNSASFSTFKCYGVSPTKLNDLCFTNVYADSFVIRGDEVRQIAPGQTGKIADYNYKLPDDFTGCVIAWNSNNLDSKVGGNYNYLYRLFRKSNLKPFERDISTEIYQAGSTPCNGVEGFNCYFPLQSYGFQPTNGVGYQPYRVVVLSFELLHAPATVCGPKKSTNLVKNKCVNFNFNGLTGTGVLTESNKKFLPFQQFGRDIADTTDAVRDPQTLEILDITPCSFGGVSVITPGTNTSNQVAVLYQDVNCTEVPVAIHADQLTPTWRVYSTGSNVFQTRAGCLIGAEHVNNSYECDIPIGAGICASYQTQTNSPSGAGSVASQSIIAYTMSLGAENSVAYSNNSIAIPTNFTISVTTEILPVSMTKTSVDCTMYICGDSTECSNLLLQYGSFCTQLNRALTGIAVEQDKNTQEVFAQVKQIYKTPPIKDFGGFNFSQILPDPSKPSKRSFIEDLLFNKVTLADAGFIKQYGDCLGDIAARDLICAQKFNGLTVLPPLLTDEMIAQYTSALLAGTITSGWTFGAGAALQIPFAMQMAYRFNGIGVTQNVLYENQKLIANQFNSAIGKIQDSLSSTASALGKLQDVVNQNAQALNTLVKQLSSNFGAISSVLNDILSRLDPPEAEVQIDRLITGRLQSLQTYVTQQLIRAAEIRASANLAATKMSECVLGQSKRVDFCGKGYHLMSFPQSAPHGVVFLHVTYVPAQEKNFTTAPAICHDGKAHFPREGVFVSNGTHWFVTQRNFYEPQIITTDNTFVSGNCDVVIGIVNNTVYDPLQPELDSFKEELDKYFKNHTSPDVDLGDISGINASVVNIQKEIDRLNEVAKNLNESLIDLQELGKYEQYIKGSGRENLYFQGGGGSGYIPEAPRDGQAYVRKDGEWVLLSTFLGHHHHHHHH

SEQ ID NO: 2347 - protein, 1281 aa, Artificial Sequence
  Description of Artificial Sequence: Synthetic polypeptide
MGILPSPGMPALLSLVSLLSVLLMGCVAETGTQCVNLTTRTQLPPAYTNSFTRGVYYPDKVFRSSVLHSTQDLFLPFFSNVTWFHAIHVSGTNGTKRFDNPVLPFNDGVYFASTEKSNIIRGWIFGTTLDSKTQSLLIVNNATNVVIKVCEFQFCNDPFLGVYYHKNNKSWMESEFRVYSSANNCTFEYVSQPFLMDLEGKQGNFKNLREFVFKNIDGYFKIYSKHTPINLVRDLPQGFSALEPLVDLPIGINITRFQTLLALHRSYLTPGDSSSGWTAGAAAYYVGYLQPRTFLLKYNENGTITDAVDCALDPLSETKCTLKSFTVEKGIYQTSNFRVQPTESIVRFPNITNLCPFGEVFNATRFASVYAWNRKRISNCVADYSVLYNSASFSTFKCYGVSPTKLNDLCFTNVYADSFVIRGDEVRQIAPGQTGKIADYNYKLPDDFTGCVIAWNSNNLDSKVGGNYNYLYRLFRKSNLKPFERDISTEIYQAGSTPCNGVEGFNCYFPLQSYGFQPTNGVGYQPYRVVVLSFELLHAPATVCGPKKSTNLVKNKCVNFNFNGLTGTGVLTESNKKFLPFQQFGRDIADTTDAVRDPQTLEILDITPCSFGGVSVITPGTNTSNQVAVLYQDVNCTEVPVAIHADQLTPTWRVYSTGSNVFQTQAGCLIGAEHVNNSYECDIPIGAGICASYQTQTNSPSGAGSVASQSIIAYTMSLGAENSVAYSNNSIAIPTNFTISVTTEILPVSMTKTSVDCTMYICGDSTECSNLLLQYGSFCTQLNRALTGIAVEQDKNTQEVFAQVKQIYKTPPIKDFGGFNFSQILPDPSKPSKRSFIEDLLFNKVTLADAGFIKQYGDCLGDIAARDLICAQKFNGLTVLPPLLTDEMIAQYTSALLAGTITSGWTFGAGAALQIPFAMQMAYRFNGIGVTQNVLYENQKLIANQFNSAIGKIQDSLSSTASALGKLQDVVNQNAQALNTLVKQLSSNFGAISSVLNDILSRLDPPEAEVQIDRLITGRLQSLQTYVTQQLIRAAEIRASANLAATKMSECVLGQSKRVDFCGKGYHLMSFPQSAPHGVVFLHVTYVPAQEKNFTTAPAICHDGKAHFPREGVFVSNGTHWFVTQRNFYEPQIITTDNTFVSGNCDVVIGIVNNTVYDPLQPELDSFKEELDKYFKNHTSPDVDLGDISGINASVVNIQKEIDRLNEVAKNLNESLIDLQELGKYEQYIKGSGRENLYFQGGGGSGYIPEAPRDGQAYVRKDGEWVLLSTFLGHHHHHHHH

SEQ ID NO: 2348 - protein, 1281 aa, Artificial Sequence
  Description of Artificial Sequence: Synthetic polypeptide
MGILPSPGMPALLSLVSLLSVLLMGCVAETGTQCVNLTTRTQLPPAYTNSFTRGVYYPDKVFRSSVLHSTQDLFLPFFSNVTWFHAIHVSGTNGTKRFDNPVLPFNDGVYFASTEKSNIIRGWIFGTTLDSKTQSLLIVNNATNVVIKVCEFQFCNDPFLGVYYHKNNKSWMESEFRVYSSANNCTFEYVSQPFLMDLEGKQGNFKNLREFVFKNIDGYFKIYSKHTPINLVRDLPQGFSALEPLVDLPIGINITRFQTLLALHRSYLTPGDSSSGWTAGAAAYYVGYLQPRTFLLKYNENGTITDAVDCALDPLSETKCTLKSFTVEKGIYQTSNFRVQPTESIVRFPNITNLCPFGEVFNATRFASVYAWNRKRISNCVADYSVLYNSASFSTFKCYGVSPTKLNDLCFTNVYADSFVIRGDEVRQIAPGQTGKIADYNYKLPDDFTGCVIAWNSNNLDSKVGGNYNYLYRLFRKSNLKPFERDISTEIYQAGSTPCNGVEGFNCYFPLQSYGFQPTNGVGYQPYRVVVLSFELLHAPATVCGPKKSTNLVKNKCVNFNFNGLTGTGVLTESNKKFLPFQQFGRDIADTTDAVRDPQTLEILDITPCSFGGVSVITPGTNTSNQVAVLYQDVNCTEVPVAIHADQLTPTWRVYSTGSNVFQTRAGCLIGAEHVNNSYECDIPIGAGICASYQTQTNSPSGAGSVASQSIIAYTMSLGAENSVAYSNNSIAIPTNFTISVTTEILPVSMTKTSVDCTMYICGDSTECSNLLLQYGSFCTQLNRALTGIAVEQDKNTQEVFAQVKQIYKTPPIKDFGGFNFSQILPDPSKPSKRSFIEDLLFNKVTLADAGFIKQYGDCLGDIAARDLICAQKFNGLTVLPPLLTDEMIAQYTSALLAGTITSGWTFGAGAALQIPFAMQMAYRFNGIGVTQNVLYENQKLIANQFNSAIGAIQDSLSSTASALGKLQDVVNQNAQALNTLVKQLSSNFGAISSVLNDILSRLDPPEAEVQIDRLITGRLQSLQTYVTQQLIRAAEIRASANLAATKMSECVLGQSKRVDFCGKGYHLMSFPQSAPHGVVFLHVTYVPAQEKNFTTAPAICHDGKAHFPREGVFVSNGTHWFVTQRNFYEPQIITTDNTFVSGNCDVVIGIVNNTVYDPLQPELDSFKEELDKYFKNHTSPDVDLGDISGINASVVNIQKEIDRLNEVAKNLNESLIDLQELGKYEQYIKGSGRENLYFQGGGGSGYIPEAPRDGQAYVRKDGEWVLLSTFLGHHHHHHHH

SEQ ID NO: 2349 - protein, 1281 aa, Artificial Sequence
  Description of Artificial Sequence: Synthetic polypeptide
MGILPSPGMPALLSLVSLLSVLLMGCVAETGTQCVNLTTRTQLPPAYTNSFTRGVYYPDKVFRSSVLHSTQDLFLPFFSNVTWFHAIHVSGTNGTKRFDNPVLPFNDGVYFASTEKSNIIRGWIFGTTLDSKTQSLLIVNNATNVVIKVCEFQFCNDPFLGVYYHKNNKSWMESEFRVYSSANNCTFEYVSQPFLMDLEGKQGNFKNLREFVFKNIDGYFKIYSKHTPINLVRDLPQGFSALEPLVDLPIGINITRFQTLLALHRSYLTPGDSSSGWTAGAAAYYVGYLQPRTFLLKYNENGTITDAVDCALDPLSETKCTLKSFTVEKGIYQTSNFRVQPTESIVRFPNITNLCPFGEVFNATRFASVYAWNRKRISNCVADYSVLYNSASFSTFKCYGVSPTKLNDLCFTNVYADSFVIRGDEVRQIAPGQTGKIADYNYKLPDDFTGCVIAWNSNNLDSKVGGNYNYLYRLFRKSNLKPFERDISTEIYQAGSTPCNGVEGFNCYFPLQSYGFQPTNGVGYQPYRVVVLSFELLHAPATVCGPKKSTNLVKNKCVNFNFNGLTGTGVLTESNKKFLPFQQFGRDIADTTDAVRDPQTLEILDITPCSFGGVSVITPGTNTSNQVAVLYQDVNCTEVPVAIHADQLTPTWRVYSTGSNVFQTRAGCLIGAEHVNNSYECDIPIGAGICASYQTQTNSPSGAGSVASQSIIAYTMSLGAENSVAYSNNSIAIPTNFTISVTTEILPVSMTKTSVDCTMYICGDSTECSNLLLQYGSFCTQLNRALTGIAVEQDKNTQEVFAQVKQIYKTPPIKDFGGFNFSQILPDPSKPSKRSFIEDLLFNKWTLADAGFIKQYGDCLGDIAARDLICAQKFNGLTVLPPLLTDEMIAQYTSALLAGTITSGWTFGAGAALQIPFAMQMAYRFNGIGVTQNVLYENQKLIANQFNSAIGKIQDSLSSTASALGKLQDVVNQNAQALNTLVKQLSSNFGAISSVLNDILSRLDPPEAEVQIDRLITGRLQSLQTYVTQQLIRAAEIRASANLAATKMSECVLGQSKRVDFCGKGYHLMSFPQSAPHGVVFLHVTYVPAQEKNFTTAPAICHDGKAHFPREGVFVSNGTHWFVTQRNFYEPQIITTDNTFVSGNCDVVIGIVNNTVYDPLQPELDSFKEELDKYFKNHTSPDVDLGDISGINASVVNIQKEIDRLNEVAKNLNESLIDLQELGKYEQYIKGSGRENLYFQGGGGSGYIPEAPRDGQAYVRKDGEWVLLSTFLGHHHHHHHH

SEQ ID NO: 2350 - protein, 1281 aa, Artificial Sequence
  Description of Artificial Sequence: Synthetic polypeptide
MGILPSPGMPALLSLVSLLSVLLMGCVAETGTQCVNLTTRTQLPPAYTNSFTRGVYYPDKVFRSSVLHSTQDLFLPFFSNVTWFHAIHVSGTNGTKRFDNPVLPFNDGVYFASTEKSNIIRGWIFGTTLDSKTQSLLIVNNATNVVIKVCEFQFCNDPFLGVYYHKNNKSWMESEFRVYSSANNCTFEYVSQPFLMDLEGKQGNFKNLREFVFKNIDGYFKIYSKHTPINLVRDLPQGFSALEPLVDLPIGINITRFQTLLALHRSYLTPGDSSSGWTAGAAAYYVGYLQPRTFLLKYNENGTITDAVDCALDPLSETKCTLKSFTVEKGIYQTSNFRVQPTESIVRFPNITNLCPFGEVFNATRFASVYAWNRKRISNCVADYSVLYNSASFSTFKCYGVSPTKLNDLCFTNVYADSFVIRGDEVRQIAPGQTGKIADYNYKLPDDFTGCVIAWNSNNLDSKVGGNYNYLYRLFRKSNLKPFERDISTEIYQAGSTPCNGVEGFNCYFPLQSYGFQPTNGVGYQPYRVVVLSFELLHAPATVCGPKKSTNLVKNKCVNFNFNGLTGTGVLTESNKKFLPFQQFGRDIADTTDAVRDPQTLEILDITPCSFGGVSVITPGTNTSNQVAVLYQDVNCTEVPVAIHADQLTPTWRVYSTGSNVFQTRAGCLIGAEHVNNSYECDIPIGAGICASYQTQTNSPSGAGSVASQSIIAYTMSLGAENSVAYSNNSISIPTNFTISVTTEILPVSMTKTSVDCTMYICGDSTECSNLLLQYGSFCTQLNRALTGIAVEQDKNTQEVFAQVKQIYKTPPIKDFGGFNFSQILPDPSKPSKRSFIEDLLFNKVTLADAGFIKQYGDCLGDIAARDLICAQKFNGLTVLPPLLTDEMIAQYTSALLAGTITSGWTFGAGAALQIPFAMQMAYRFNGIGVTQNVLYENQKLIANQFNSAIGKIQDSLSSTASALGKLQDVVNQNAQALNTLVKQLSSNFGAISSVLNDILSRLDPPEAEVQIDRLITGRLQSLQTYVTQQLIRAAEIRASANLAATKMSECVLGQSKRVDFCGKGYHLMSFPQSAPHGVVFLHVTYVPAQEKNFTTAPAICHDGKAHFPREGVFVSNGTHWFVTQRNFYEPQIITTDNTFVSGNCDVVIGIVNNTVYDPLQPELDSFKEELDKYFKNHTSPDVDLGDISGINASVVNIQKEIDRLNEVAKNLNESLIDLQELGKYEQYIKGSGRENLYFQGGGGSGYIPEAPRDGQAYVRKDGEWVLLSTFLGHHHHHHHH

SEQ ID NO: 2351 - protein, 1281 aa, Artificial Sequence
  Description of Artificial Sequence: Synthetic polypeptide
MGILPSPGMPALLSLVSLLSVLLMGCVAETGTQCVNLTTRTQLPPAYTNSFTRGVYYPDKVFRSSVLHSTQDLFLPFFSNVTWFHAIHVSGTNGTKRFDNPVLPFNDGVYFASTEKSNIIRGWIFGTTLDSKTQSLLIVNNATNVVIKVCNFQFCNDPFLGVYYHKNNKSWMESEFRVYSSANNCTFEYVSQPFLMDLEGKQGNFKNLREFVFKNIDGYFKIYSKHTPINLVRDLPQGFSALEPLVDLPIGINITRFQTLLALHRSYLTPGDSSSGWTAGAAAYYVGYLQPRTFLLKYNENGTITDAVDCALDPLSETKCTLKSFTVEKGIYQTSNFRVQPTESIVRFPNITNLCPFGEVFNATRFASVYAWNRKRISNCVADYSVLYNSASFSTFKCYGVSPTKLNDLCFTNVYADSFVIRGDEVRQIAPGQTGKIADYNYKLPDDFTGCVIAWNSNNLDSKVGGNYNYLYRLFRKSNLKPFERDISTEIYQAGSTPCNGVEGFNCYFPLQSYGFQPTNGVGYQPYRVVVLSFELLHAPATVCGPKKSTNLVKNKCVNFNFNGLTGTGVLTESNKKFLPFQQFGRDIADTTDAVRDPQTLEILDITPCSFGGVSVITPGTNTSNQVAVLYQDVNCTEVPVAIHADQLTPTWRVYSTGSNVFQTRAGCLIGAEHVNNSYECDIPIGAGICASYQTQTNSPSGAGSVASQSIIAYTMSLGAENSVAYSNNSIAIPTNFTISVTTEILPVSMTKTSVDCTMYICGDSTECSNLLLQYGSFCTQLNRALTGIAVEQDKNTQEVFAQVKQIYKTPPIKDFGGFNFSQILPDPSKPSKRSFIEDLLFNKVTLADAGFIKQYGDCLGDIAARDLICAQKFNGLTVLPPLLTDEMIAQYTSALLAGTITSGWTFGAGAALQIPFAMQMAYRFNGIGVTQNVLYENQKLIANQFNSAIGKIQDSLSSTASALGKLQDVVNQNAQALNTLVKQLSSNFGAISSVLNDILSRLDPPEAEVQIDRLITGRLQSLQTYVTQQLIRAAEIRASANLAATKMSECVLGQSKRVDFCGKGYHLMSFPQSAPHGVVFLHVTYVPAQEKNFTTAPAICHDGKAHFPREGVFVSNGTHWFVTQRNFYEPQIITTDNTFVSGNCDVVIGIVNNTVYDPLQPELDSFKEELDKYFKNHTSPDVDLGDISGINASVVNIQKEIDRLNEVAKNLNESLIDLQELGKYEQYIKGSGRENLYFQGGGGSGYIPEAPRDGQAYVRKDGEWVLLSTFLGHHHHHHHH

SEQ ID NO: 2352 - protein, 1281 aa, Artificial Sequence
  Description of Artificial Sequence: Synthetic polypeptide
MGILPSPGMPALLSLVSLLSVLLMGCVAETGTQCVNLTTRTQLPPAYTNSFTRGVYYPDKVFRSSVLHSTQDLFLPFFSNVTWFHAIHVSGTNGTKRFDNPVLPFNDGVYFASTEKSNIIRGWIFGTTLDSKTQSLLIVNNATNVVIKVCEFQFCNDPFLGVYYHKNNKSWMESEFRVYSSANNCTFEYVSQPFLMDLEGKQGNFKNLREFVFKNIDGYFKIYSKHTPINLVRDLPQGFSALEPLVDLPIGINITRFQTLLALHRSYLTPGDSSSGWTAGAAAYYVGYLQPRTFLLKYNENGTITDAVDCALDPLSETKCTLKSFTVEKGIYQTSNFRVQPTESIVRFPNITNLCPFGEVFNATRFASVYAWNRKRISNCVADYSVLYNSASFSTFKCYGVSPTKLNDLCFTNVYADSFVIRGDEVRQIAPGQTGKIADYNYKLPDDFTGCVIAWNSNNLDSKVGGNYNYLYRLFRKSNLKPFERDISTEIYQAGSTPCNGVEGFNCYFPLQSYGFQPTNGVGYQPYRVVVLSFELLHAPATVCGPKKSTNLVKNKCVNFNFNGLTGTGVLTESNKKFLPFQQFGRDIADTTDAVRDPQTLEILDITPCSFGGVSVITPGTNTSNQVAVLYQDVNCTEVPVAIHADQLTPTWRVYSTGSNVFQTRAGCLIGAEHVNNSYECDIPIGAGICASYQTQTNSPSGAGSVASQSIIAYTMSLGAENSVAYSNNSIAIPTNFTISVTTEILPVSMTKTSVDCTMYICGDSTECSNLLLQYGSFCTQLNRALTGIAVEQDKNTQEVFAQVKQIYKTPPIKDFGGFNFSQILPDPSKPSKRSFIEDLLFNKVTLADAGFIKQYGDCLGDIAARDLICAQKFNGLTVLPPLLTDEMIAQYTSALLAGTITSGWTFGAGAALQIPFAMQMAYRFNGIGVTQNVLYENQKLIANQFNSAIGKIQDSLSSTASALGKLQDVVNQNAQALNTLVKQLSSNFGAISSVLNDILSRLDPPEAEVQIDRLITGRLQSLQTYVTQQLIRAAEIRASANLAATKMSECVLGQSKRVDFCGKGYHLMSFPQSAPHGVVFLHVTYVPAQEKNFTTAPAICHDGKAHFPREGVFVSNGTHWFVTQRNFYEPRIITTDNTFVSGNCDVVIGIVNNTVYDPLQPELDSFKEELDKYFKNHTSPDVDLGDISGINASVVNIQKEIDRLNEVAKNLNESLIDLQELGKYEQYIKGSGRENLYFQGGGGSGYIPEAPRDGQAYVRKDGEWVLLSTFLGHHHHHHHH

SEQ ID NO: 2353 - protein, 1281 aa, Artificial Sequence
  Description of Artificial Sequence: Synthetic polypeptide
MGILPSPGMPALLSLVSLLSVLLMGCVAETGTQCVNLTTRTQLPPAYTNSFTRGVYYPDKVFRSSVLHSTQDLFLPFFSNVTWFHAIHVSGTNGTKRFDNPVLPFNDGVYFASTEKSNIIRGWIFGTTLDSKTQSLLIVNNATNVVIKVCEFQFCNDPFLGVYYHKNNKSWMESEFRVYSSANNCTFEYVSQPFLMDLEGKQGNFKNLREFVFKNIDGYFKIYSKHTPINLVRDLPQGFSALEPLVDLPIGINITRFQTLLALHRSYLTPGDSSSGWTAGAAAYYVGYLQPRTFLLKYNENGTITDAVDCALDPLSETKCTLKSFTVEKGIYQTSNFRVQPTESIVRFPNITNLCPFGEVFNATRFASVYAWNRKRISNCVADYSVLYNSASFSTFKCYGVSPTKLNDLCFTNVYADSFVIRGDEVRQIAPGQTGKIADYNYKLPDDFTGCVIAWNSNNLDSKVGGNYNYLYRLFRKSNLKPFERDISTEIYQAGSTPCNGVEGFNCYFPLQSYGFQPTNGVGYQPYRVVVLSFELLHAPATVCGPKKSTNLVKNKCVNFNFNGLTGTGVLTESNKKFLPFQQFGRDIADVTDAVRDPQTLEILDITPCSFGGVSVITPGTNTSNQVAVLYQDVNCTEVPVAIHADQLTPTWRVYSTGSNVFQTRAGCLIGAEHVNNSYECDIPIGAGICASYQTQTNSPSGAGSVASQSIIAYTMSLGAENSVAYSNNSIAIPTNFTISVTTEILPVSMTKTSVDCTMYICGDSTECSNLLLQYGSFCTQLNRALTGIAVEQDKNTQEVFAQVKQIYKTPPIKDFGGFNFSQILPDPSKPSKRSFIEDLLFNKVTLADAGFIKQYGDCLGDIAARDLICAQKFNGLTVLPPLLTDEMIAQYTSALLAGTITSGWTFGAGAALQIPFAMQMAYRFNGIGVTQNVLYENQKLIANQFNSAIGKIQDSLSSTASALGKLQDVVNQNAQALNTLVKQLSSNFGAISSVLNDILSRLDPPEAEVQIDRLITGRLQSLQTYVTQQLIRAAEIRASANLAATKMSECVLGQSKRVDFCGKGYHLMSFPQSAPHGVVFLHVTYVPAQEKNFTTAPAICHDGKAHFPREGVFVSNGTHWFVTQRNFYEPQIITTDNTFVSGNCDVVIGIVNNTVYDPLQPELDSFKEELDKYFKNHTSPDVDLGDISGINASVVNIQKEIDRLNEVAKNLNESLIDLQELGKYEQYIKGSGRENLYFQGGGGSGYIPEAPRDGQAYVRKDGEWVLLSTFLGHHHHHHHH

SEQ ID NO: 2354 - protein, 1281 aa, Artificial Sequence
  Description of Artificial Sequence: Synthetic polypeptide
MGILPSPGMPALLSLVSLLSVLLMGCVAETGTQCVNLTTRTQLPPAYTNSFTRGVYYPDKVFRSSVLHSTQDLFLPFFSNVTWFHAIHVSGTNGTKRFDNPVLPFNDGVYFASTEKSNIIRGWIFGTTLDSKTQSLLIVNNATNVVIKVCEFQFCNDPFLGVYYHKNNKSWMESEFRVYSSANNCTFEYVSQPFLMDLEGKQGNFKNLREFVFKNIDGYFKIYSKHTPINLVRDLPQGFSALEPLVDLPIGINITRFQTLLALHRSYLTPGDSSSGWTAGAAAYYVGYLQPRTFLLKYNENGTITDAVDCALDPLSETKCTLKSFTVEKGIYQTSNFRVQPTESIVRFPNITNLCPFGEVFNATRFASVYAWNRKRISNCVADYSVLYNSASFSTFKCYGVSPTKLNDLCFTNVYADSFVIRGDEVRQIAPGQTGKIADYNYKLPDDFTGCVIAWNSNNLDSKVGGNYNYLYRLFRKSNLKPFERDISTEIYQAGSTPCNGVEGFNCYFPLQSYGFQPTNGVGYQPYRVVVLSFELLHAPATVCGPKKSTNLVKNKCVNFNFNGLTGTGVLTESNKKFLPFQQFGRDIADTTDAVRDPQTLEILDITPCSFGGVSVITPGTNTSNQVAVLYQDVNCTEVPVAIHADQLTPTWRVYSTGSNVFQTRAGCLIGAEHVNNSYECDIPIGAGICASYQTQTNSPSGAGSVASQSIIAYTMSLGAENSVAYSNNSIAIPTNFTISVTTEILPVSMTKTSVDCTMYICGDSTECSNLLLQYGSFCTQLNRALTGIAQEQDKNTQEVFAQVKQIYKTPPIKDFGGFNFSQILPDPSKPSKRSFIEDLLFNKVTLADAGFIKQYGDCLGDIAARDLICAQKFNGLTVLPPLLTDEMIAQYTSALLAGTITSGWTFGAGAALQIPFAMQMAYRFNGIGVTQNVLYENQKLIANQFNSAIGKIQDSLSSTASALGKLQDVVNQNAQALNTLVKQLSSNFGAISSVLNDILSRLDPPEAEVQIDRLITGRLQSLQTYVTQQLIRAAEIRASANLAATKMSECVLGQSKRVDFCGKGYHLMSFPQSAPHGVVFLHVTYVPAQEKNFTTAPAICHDGKAHFPREGVFVSNGTHWFVTQRNFYEPQIITTDNTFVSGNCDVVIGIVNNTVYDPLQPELDSFKEELDKYFKNHTSPDVDLGDISGINASVVNIQKEIDRLNEVAKNLNESLIDLQELGKYEQYIKGSGRENLYFQGGGGSGYIPEAPRDGQAYVRKDGEWVLLSTFLGHHHHHHHH

SEQ ID NO: 2355 - protein, 1281 aa, Artificial Sequence
  Description of Artificial Sequence: Synthetic polypeptide
MGILPSPGMPALLSLVSLLSVLLMGCVAETGTQCVNLTTRTQLPPAYTNSFTRGVYYPDKVFRSSVLHSTQDLFLPFFSNVTWFHAIHVSGTNGTKRFDNPVLPFNDGVYFASTEKSNIIRGWIFGTTLDSKTQSLLIVNNATNVVIKVCEFQFCNDPFLGVYYHKNNKSWMESEFRVYSSANNCTFEYVSQPFLMDLEGKQGNFKNLREFVFKNIDGYFKIYSKHTPINLVRDLPQGFSALEPLVDLPIGINITRFQTLLALHRSYLTPGDSSSGWTAGAAAYYVGYLQPRTFLLKYNENGTITDAVDCALDPLSETKCTLKSFTVEKGIYQTSNFRVQPTESIVRFPNITNLCPFGEVFNATRFASVYAWNRKRISNCVADYSVLYNSASFSTFKCYGVSPTKLNDLCFTNVYADSFVIRGDEVRQIAPGQTGKIADYNYKLPDDFTGCVIAWNSNNLDSKVGGNYNYLYRLFRKSNLKPFERDISTEIYQAGSTPCNGVEGFNCYFPLQSYGFQPTNGVGYQPYRVVVLSFELLHAPATVCGPKKSTNLVKNECVNFNFNGLTGTGVLTESNKKFLPFQQFGRDIADTTDAVRDPQTLEILDITPCSFGGVSVITPGTNTSNQVAVLYQDVNCTEVPVAIHADQLTPTWRVYSTGSNVFQTRAGCLIGAEHVNNSYECDIPIGAGICASYQTQTNSPSGAGSVASQSIIAYTMSLGAENSVAYSNNSIAIPTNFTISVTTEILPVSMTKTSVDCTMYICGDSTECSNLLLQYGSFCTQLNRALTGIAVEQDKNTQEVFAQVKQIYKTPPIKDFGGFNFSQILPDPSKPSKRSFIEDLLFNKVTLADAGFIKQYGDCLGDIAARDLICAQKFNGLTVLPPLLTDEMIAQYTSALLAGTITSGWTFGAGAALQIPFAMQMAYRFNGIGVTQNVLYENQKLIANQFNSAIGKIQDSLSSTASALGKLQDVVNQNAQALNTLVKQLSSNFGAISSVLNDILSRLDPPEAEVQIDRLITGRLQSLQTYVTQQLIRAAEIRASANLAATKMSECVLGQSKRVDFCGKGYHLMSFPQSAPHGVVFLHVTYVPAQEKNFTTAPAICHDGKAHFPREGVFVSNGTHWFVTQRNFYEPQIITTDNTFVSGNCDVVIGIVNNTVYDPLQPELDSFKEELDKYFKNHTSPDVDLGDISGINASVVNIQKEIDRLNEVAKNLNESLIDLQELGKYEQYIKGSGRENLYFQGGGGSGYIPEAPRDGQAYVRKDGEWVLLSTFLGHHHHHHHH

SEQ ID NO: 2356 - protein, 1281 aa, Artificial Sequence
  Description of Artificial Sequence: Synthetic polypeptide
MGILPSPGMPALLSLVSLLSVLLMGCVAETGTQCVNLTTRTQLPPAYTNSFTRGVYYPDKVFRSSVLHSTQDLFLPFFSNVTWFHAIHVSGTNGTKRFDNPVLPFNDGVYFASTEKSNIIRGWIFGTTLDSKTQSLLIVNNATNVVIKVCEFQFCYDPFLGVYYHKNNKSWMESEFRVYSSANNCTFEYVSQPFLMDLEGKQGNFKNLREFVFKNIDGYFKIYSKHTPINLVRDLPQGFSALEPLVDLPIGINITRFQTLLALHRSYLTPGDSSSGWTAGAAAYYVGYLQPRTFLLKYNENGTITDAVDCALDPLSETKCTLKSFTVEKGIYQTSNFRVQPTESIVRFPNITNLCPFGEVFNATRFASVYAWNRKRISNCVADYSVLYNSASFSTFKCYGVSPTKLNDLCFTNVYADSFVIRGDEVRQIAPGQTGKIADYNYKLPDDFTGCVIAWNSNNLDSKVGGNYNYLYRLFRKSNLKPFERDISTEIYQAGSTPCNGVEGFNCYFPLQSYGFQPTNGVGYQPYRVVVLSFELLHAPATVCGPKKSTNLVKNKCVNFNFNGLTGTGVLTESNKKFLPFQQFGRDIADTTDAVRDPQTLEILDITPCSFGGVSVITPGTNTSNQVAVLYQDVNCTEVPVAIHADQLTPTWRVYSTGSNVFQTRAGCLIGAEHVNNSYECDIPIGAGICASYQTQTNSPSGAGSVASQSIIAYTMSLGAENSVAYSNNSIAIPTNFTISVTTEILPVSMTKTSVDCTMYICGDSTECSNLLLQYGSFCTQLNRALTGIAVEQDKNTQEVFAQVKQIYKTPPIKDFGGFNFSQILPDPSKPSKRSFIEDLLFNKVTLADAGFIKQYGDCLGDIAARDLICAQKFNGLTVLPPLLTDEMIAQYTSALLAGTITSGWTFGAGAALQIPFAMQMAYRFNGIGVTQNVLYENQKLIANQFNSAIGKIQDSLSSTASALGKLQDVVNQNAQALNTLVKQLSSNFGAISSVLNDILSRLDPPEAEVQIDRLITGRLQSLQTYVTQQLIRAAEIRASANLAATKMSECVLGQSKRVDFCGKGYHLMSFPQSAPHGVVFLHVTYVPAQEKNFTTAPAICHDGKAHFPREGVFVSNGTHWFVTQRNFYEPQIITTDNTFVSGNCDVVIGIVNNTVYDPLQPELDSFKEELDKYFKNHTSPDVDLGDISGINASVVNIQKEIDRLNEVAKNLNESLIDLQELGKYEQYIKGSGRENLYFQGGGGSGYIPEAPRDGQAYVRKDGEWVLLSTFLGHHHHHHHH

SEQ ID NO: 2357 - protein, 1281 aa, Artificial Sequence
  Description of Artificial Sequence: Synthetic polypeptide
MGILPSPGMPALLSLVSLLSVLLMGCVAETGTQCVNLTTRTQLPPAYTNSFTRGVYYPDKVFRSSVLHSTQDLFLPFFSNVTWFHAIHVSGTNGTKRFDNPVLPFNDGVYFASTEKSNIIRGWIFGTTLDSKTQSLLIVNNATNVVIKVCEFQFCNDPFLGVYYHKNNKSWMESEFRVYSSANNCTFEYVSQPFLMDLEGKQGNFKNLREFVFKNIDGYFKIYSKHTPINLVRDLPQGFSALEPLVDLPIGINITRFQTLLALHRSYLTPGDSSSGWTAGAAAYYVGYLQPRTFLLKYNENGTITDAVDCALDPLSETKCYLKSFTVEKGIYQTSNFRVQPTESIVRFPNITNLCPFGEVFNATRFASVYAWNRKRISNCVADYSVLYNSASFSTFKCYGVSPTKLNDLCFTNVYADSFVIRGDEVRQIAPGQTGKIADYNYKLPDDFTGCVIAWNSNNLDSKVGGNYNYLYRLFRKSNLKPFERDISTEIYQAGSTPCNGVEGFNCYFPLQSYGFQPTNGVGYQPYRVVVLSFELLHAPATVCGPKKSTNLVKNKCVNFNFNGLTGTGVLTESNKKFLPFQQFGRDIADTTDAVRDPQTLEILDITPCSFGGVSVITPGTNTSNQVAVLYQDVNCTEVPVAIHADQLTPTWRVYSTGSNVFQTRAGCLIGAEHVNNSYECDIPIGAGICASYQTQTNSPSGAGSVASQSIIAYTMSLGAENSVAYSNNSIAIPTNFTISVTTEILPVSMTKTSVDCTMYICGDSTECSNLLLQYGSFCTQLNRALTGIAVEQDKNTQEVFAQVKQIYKTPPIKDFGGFNFSQILPDPSKPSKRSFIEDLLFNKVTLADAGFIKQYGDCLGDIAARDLICAQKFNGLTVLPPLLTDEMIAQYTSALLAGTITSGWTFGAGAALQIPFAMQMAYRFNGIGVTQNVLYENQKLIANQFNSAIGKIQDSLSSTASALGKLQDVVNQNAQALNTLVKQLSSNFGAISSVLNDILSRLDPPEAEVQIDRLITGRLQSLQTYVTQQLIRAAEIRASANLAATKMSECVLGQSKRVDFCGKGYHLMSFPQSAPHGVVFLHVTYVPAQEKNFTTAPAICHDGKAHFPREGVFVSNGTHWFVTQRNFYEPQIITTDNTFVSGNCDVVIGIVNNTVYDPLQPELDSFKEELDKYFKNHTSPDVDLGDISGINASVVNIQKEIDRLNEVAKNLNESLIDLQELGKYEQYIKGSGRENLYFQGGGGSGYIPEAPRDGQAYVRKDGEWVLLSTFLGHHHHHHHH

SEQ ID NO: 2358 - protein, 1281 aa, Artificial Sequence
  Description of Artificial Sequence: Synthetic polypeptide
MGILPSPGMPALLSLVSLLSVLLMGCVAETGTQCVNLTTRTQLPPAYTNSFTRGVYYPDKVFRSSVLHSTQDLFLPFFSNVTWFHAIHVSGTNGTKRFDNPVLPFNDGVYFASTEKSNIIRGWIFGTTLDSKTQSLLIVNNATNVVIKVCEFQFCNDPFLGVYYHKNNKSWMESEFRVYSSANNCTFEYVSQPFLTDLEGKQGNFKNLREFVFKNIDGYFKIYSKHTPINLVRDLPQGFSALEPLVDLPIGINITRFQTLLALHRSYLTPGDSSSGWTAGAAAYYVGYLQPRTFLLKYNENGTITDAVDCALDPLSETKCTLKSFTVEKGIYQTSNFRVQPTESIVRFPNITNLCPFGEVFNATRFASVYAWNRKRISNCVADYSVLYNSASFSTFKCYGVSPTKLNDLCFTNVYADSFVIRGDEVRQIAPGQTGKIADYNYKLPDDFTGCVIAWNSNNLDSKVGGNYNYLYRLFRKSNLKPFERDISTEIYQAGSTPCNGVEGFNCYFPLQSYGFQPTNGVGYQPYRVVVLSFELLHAPATVCGPKKSTNLVKNKCVNFNFNGLTGTGVLTESNKKFLPFQQFGRDIADTTDAVRDPQTLEILDITPCSFGGVSVITPGTNTSNQVAVLYQDVNCTEVPVAIHADQLTPTWRVYSTGSNVFQTRAGCLIGAEHVNNSYECDIPIGAGICASYQTQTNSPSGAGSVASQSIIAYTMSLGAENSVAYSNNSIAIPTNFTISVTTEILPVSMTKTSVDCTMYICGDSTECSNLLLQYGSFCTQLNRALTGIAVEQDKNTQEVFAQVKQIYKTPPIKDFGGFNFSQILPDPSKPSKRSFIEDLLFNKVTLADAGFIKQYGDCLGDIAARDLICAQKFNGLTVLPPLLTDEMIAQYTSALLAGTITSGWTFGAGAALQIPFAMQMAYRFNGIGVTQNVLYENQKLIANQFNSAIGKIQDSLSSTASALGKLQDVVNQNAQALNTLVKQLSSNFGAISSVLNDILSRLDPPEAEVQIDRLITGRLQSLQTYVTQQLIRAAEIRASANLAATKMSECVLGQSKRVDFCGKGYHLMSFPQSAPHGVVFLHVTYVPAQEKNFTTAPAICHDGKAHFPREGVFVSNGTHWFVTQRNFYEPQIITTDNTFVSGNCDVVIGIVNNTVYDPLQPELDSFKEELDKYFKNHTSPDVDLGDISGINASVVNIQKEIDRLNEVAKNLNESLIDLQELGKYEQYIKGSGRENLYFQGGGGSGYIPEAPRDGQAYVRKDGEWVLLSTFLGHHHHHHHH

SEQ ID NO: 2359 - protein, 1281 aa, Artificial Sequence
  Description of Artificial Sequence: Synthetic polypeptide
MGILPSPGMPALLSLVSLLSVLLMGCVAETGTQCVNLTTRTQLPPAYTNSFTRGVYYPDKVFRSSVLHSTQDLFLPFFSNVTWFHAIHVSGTNGTKRFDNPVLPFNDGVYFASTEKSNIIRGWIFGTTLDSKTQSLLIVNNATNVVIKVCEFQFCNDPFLGVYYHKNNKSWMESEFRVYSSANNCTFEYVSQPFLMDLEGKQGNFKNLREFVFKNIDGYFKIYSKHTPINLVRDLPQGFSALEPLVDLPIGINITRFQTLLALHRSYLTPGDSSSGWTAGAAAYYVGYLQPRTFLLKYNENGTITDAVDCALDPLSETKCTLKSFTVEKGIYQTSNFRVQPTESIVRFPNITNLCPFGEVFNATRFASVYAWNRKRISNCVADYSVLYNSASFSTFKCYGVSPTKLNDLCFTNVYADSFVIRGDEVRQIAPGQTGKIADYNYKLPDDFTGCVIAWNSNNLDSKVGGNYNYLYRLFRKSNLKPFERDISTEIYQAGSTPCNGVEGFNCYFPLQSYGFQPTNGVGYQPYRVVVLSFELLHAPATVCGPKKSTNLVKNKCVNFNFNGLTGTGVLTESNKKFLPFQQFGRDIADTTDAVRDPQTLEILDITPCSFGGVSVITPGTNTSNQVAVLYQDVNCTEVPDAIHADQLTPTWRVYSTGSNVFQTRAGCLIGAEHVNNSYECDIPIGAGICASYQTQTNSPSGAGSVASQSIIAYTMSLGAENSVAYSNNSIAIPTNFTISVTTEILPVSMTKTSVDCTMYICGDSTECSNLLLQYGSFCTQLNRALTGIAVEQDKNTQEVFAQVKQIYKTPPIKDFGGFNFSQILPDPSKPSKRSFIEDLLFNKVTLADAGFIKQYGDCLGDIAARDLICAQKFNGLTVLPPLLTDEMIAQYTSALLAGTITSGWTFGAGAALQIPFAMQMAYRFNGIGVTQNVLYENQKLIANQFNSAIGKIQDSLSSTASALGKLQDVVNQNAQALNTLVKQLSSNFGAISSVLNDILSRLDPPEAEVQIDRLITGRLQSLQTYVTQQLIRAAEIRASANLAATKMSECVLGQSKRVDFCGKGYHLMSFPQSAPHGVVFLHVTYVPAQEKNFTTAPAICHDGKAHFPREGVFVSNGTHWFVTQRNFYEPQIITTDNTFVSGNCDVVIGIVNNTVYDPLQPELDSFKEELDKYFKNHTSPDVDLGDISGINASVVNIQKEIDRLNEVAKNLNESLIDLQELGKYEQYIKGSGRENLYFQGGGGSGYIPEAPRDGQAYVRKDGEWVLLSTFLGHHHHHHHH

SEQ ID NO: 2360 - protein, 1281 aa, Artificial Sequence
  Description of Artificial Sequence: Synthetic polypeptide
MGILPSPGMPALLSLVSLLSVLLMGCVAETGTQCVNLTTRTQLPPAYTNSFTRGVYYPDKVFRSSVLHSTQDLFLPFFSNVTWFHAIHVSGTNGTKRFDNPVLPFNDGVYFASTEKSNIIRGWIFGTTLDSKTQSLLIVNNATNVVIKVCEFQFCNDPFLGVYYHKNNKSWMESEFRVYSSANNCTFEYVSQPFLMDLEGKQGNFKNLREFVFKNIDGYFKIYSKHTPINLVRDLPQGFSALEPLVDLPIGINITRFQTLLALHRSYLTPGDSSSGWTAGAAAYYVGYLQPRTFLLKYNENGTITDAVDCALDPLSETKCTLKSFTVEKGIYQTSNFRVQPTESIVRFPNITNLCPFGEVFNATRFASVYAWNRKRISNCVADYSVLYNSASFSTFKCYGVSPTKLNDLCFTNVYADSFVIRGDEVRQIAPGQTGKIADYNYKLPDDFTGCVIAWNSNNLDSKVGGNYNYLYRLFRKSNLKPFERDISTEIYQAGSTPCNGVEGFNCYFPLQSYGFQPTNGVGYQPYRVVVLSFELLHAPATVCGPKKSTNLVKNKCVNFNFNGLTGTGVLTESNKKFLPFQQFGRDIADTTDAVRDPQTLEILDITPCSFGGVSVITPGTNTSNQVAVLYQDVNCTEVPVAIHADQLTPTWRVYSTGSNVFQTRAGCLIGAEHVNNSYECDIPIGAGICASYQTQTNSPSGAGSVASQSIIAYTMSLGAENSVAYSNNSIAIPTNFTISVTTEILPVSMTKTSVDCTMYICGDSTECSNLLLQYGSFCTQLNRALTGIAVEQDKNTQEVFAQVKQIYKTPPIKDFGGFNFSQILPDPSKPSKRSFIEDLLFNKVTLADAGFIKQYGDCLGDIAARDLICAQKFNGLTVLPPLLTDEMIAQYTSALLAGTITSGWTFGAGAALQIPFAMQMAYRFNGIGVTQNVLYENQKLIANQFNSAIGKIQDSLSSTASALGKLQDVVNQNAQALNTLVKQLSSNFGAISSVLNDILSRLDPPEAEVQIDRLITGRLQSLQTYVTQQLIRAAEIRASANLAATKMSECVLGQSKRYDFCGKGYHLMSFPQSAPHGVVFLHVTYVPAQEKNFTTAPAICHDGKAHFPREGVFVSNGTHWFVTQRNFYEPQIITTDNTFVSGNCDVVIGIVNNTVYDPLQPELDSFKEELDKYFKNHTSPDVDLGDISGINASVVNIQKEIDRLNEVAKNLNESLIDLQELGKYEQYIKGSGRENLYFQGGGGSGYIPEAPRDGQAYVRKDGEWVLLSTFLGHHHHHHHH

SEQ ID NO: 2361 - protein, 1281 aa, Artificial Sequence
  Description of Artificial Sequence: Synthetic polypeptide
MGILPSPGMPALLSLVSLLSVLLMGCVAETGTQCVNLTTRTQLPPAYTNSFTRGVYYPDKIFRSNVLHSTQDLFLPFFSNVTWFHAWHVKGTNGTKRFDNPVLPFNDGVYFAAIEKSNIIRGWIFGTTLDSKTQSLLIVNNATNVVIRVCEFQFCENPFLGVYYHKNNKSWREEEFRWYSSANNCTFEYVSQPFLYDLNGKQGNFHHLREFVFKNIDGYFKIYSKWEPINLVRDLPQGFSPLEPLMDLPIGINITHFQTFLSLSRSYRTPGDSSSGWTAGAAAYYVGYLQPRTFLLKYDENGYITDAVDCSLDPLSETKCKLKSFTVEKGIYQTSNFRVQPTYEIVRFPNITNECPFDEVFNAPRFASVYNWERHRISNCVADYSVLYNSASFSTFQCYGVSPTKLNDLCFTNVYADIFVIRGSEVRQIAPGQTGPIADYNYKLPDDFTGCVIAWNSNNLDSTVGGNYNYLYRLFRKSNMKPFERDISTEAYQAGCTPCNGVEGFNCYFPLQSYGFQPTNGVGYQPYRVVVLKFELLHAPATVCGPKDPTNLVKNKCVDYNFNGRTGTGVLTESNKKFLPFQQFGRDISDNTDAVRDPTTGEILCITPCSFGGVSVITPGTNTSNQVAVLYQDVNCTEVPEAIHSNQLRPTWRVYSTGSNVFQTRAGCLIGAEYVNNSYECDIPIGNGICASYQTQTNSPSGSGSVSSQSIIAYTMSLGAENPVPYSNNEIAIPTNFTISVQTEILPVSMPKVSVDCTMYICGDSTECLNLLSQYGSFCSQLERALNGIAREQDKNLLNVFAQVKQIYKTPPIKDFGGFNFSQILPDPSKPSKRSFIEDLLFNKVTLADLGFVKQYKDCLGDQAARDLICAQKYNGIMVLPPLLTDEMIAQYTASLLAGTITAGWTFGAGAALQIPFAMQMAYRFNGIGVQQNVLYENQKIIANQFNNAIGNIQDGLSTTASALSKLQDVVNQQAQALNELVKQLSSNFGAISSVINDIYNRLDQPEAQAQIDRLITGRLQSLQTYVTQQLIRATEIRASAQLAAEKMSECVKGQSNRYGFCGNGYHLMSFPQSAPHGVVFLHVTYVPTQFKNFTTAPGICHDGKAYFPREGVFVSNGTSWYITQRNFYEPRPITTDNTFVSGNCDVVIGIVNNTVYDPLQPELDSFKEELDKYFKNHTSPDVDLGDISGINASVVNIQKEIDRLNEVAKNLNESLIDLQELGKYEQYIKGSGRENLYFQGGGGSGYIPEAPRDGQAYVRKDGEWVLLSTFLGHHHHHHHH

SEQ ID NO: 2362 - protein, 1281 aa, Artificial Sequence
  Description of Artificial Sequence: Synthetic polypeptide
MGILPSPGMPALLSLVSLLSVLLMGCVAETGTQCVNLTTRTQLPPAYTNSFTRGVYYPDKVFRSSVLHSTQDLFLPFFSNVTWFHAIHVSGTNGTKRFDNPVLPFNDGVYFASTEKSNIIRGWIFGTTLDSKTQSLLIVNNATNVVIKVCEFQFCNDPFLGVYYHKNNKSWMESEFRVYSSANNCTFEYVSQPFLMDLEGKQGNFKQLREFVFKNIDGYFKIYSKHTPINLVRDLPQGFSALEPLVDLPIGINITRFQTLLALHRSYLTPGDSSSGWTAGAAAYYVGYLQPRTFLLKYNENGTITDAVDCALDPLSETKCTLKSFTVEKGIYQTSNFRVQPTESIVRFPNITNLCPFGEVFNATRFASVYAWNRKRISNCVADYSVLYNSASFSTFKCYGVSPTKLNDLCFTNVYADSFVIRGDEVRQIAPGQTGKIADYNYKLPDDFTGCVIAWNSNNLDSKVGGNYNYLYRLFRKSNLKPFERDISTEIYQAGSTPCNGVEGFNCYFPLQSYGFQPTNGVGYQPYRVVVLSFELLHAPATVCGPKKSTNLVKNKCVNFNFNGLTGTGVLTESNKKFLPFQQFGRDIADTTDAVRDPQTLEILDITPCSFGGVSVITPGTNTSNQVAVLYQDVNCTEVPVAIHADQLTPTWRVYSTGSNVFQTRAGCLIGAEHVNNSYECDIPIGAGICASYQTQTNSPSGAGSVASQSIIAYTMSLGAENSVAYSNNSIAIPTNFTISVTTEILPVSMTKTSVDCTMYICGDSTECSNLLLQYGSFCTQLNRALTGIAVEQDKNTQEVFAQVKQIYKTPPIKDFGGFNFSQILPDPSKPSKRSFIEDLLFNKVTLADAGFIKQYGDCLGDIAARDLICAQKFNGLTVLPPLLTDEMIAQYTSALLAGTITSGWTFGAGAALQIPFAMQMAYRFNGIGVTQNVLYENQKLIANQFNSAIGKIQDSLSSTASALGKLQDVVNQNAQALNTLVKQLSSNFGAISSVLNDILSRLDPPEAEVQIDRLITGRLQSLQTYVTQQLIRAAEIRASANLAATKMSECVLGQSKRVDFCGKGYHLMSFPQSAPHGVVFLHVTYVPAQEKNFTTAPAICHDGKAHFPREGVFVSNGTHWFVTQRNFYEPQIITTDNTFVSGNCDVVIGIVNNTVYDPLQPELDSFKEELDKYFKNHTSPDVDLGDISGINASVVNIQKEIDRLNEVAKNLNESLIDLQELGKYEQYIKGSGRENLYFQGGGGSGYIPEAPRDGQAYVRKDGEWVLLSTFLGHHHHHHHH

SEQ ID NO: 2363 - protein, 1281 aa, Artificial Sequence
  Description of Artificial Sequence: Synthetic polypeptide
MGILPSPGMPALLSLVSLLSVLLMGCVAETGTQCVNLTTRTQLPPAYTNSFTRGVYYPDKVFRSSVLHSTQDLFLPFFSNVTWFHAIHVSGTNGTKRFDNPVLPFNDGVYFASTEKSNIIRGWIFGTTLDSKTQSLLIVNNATNVVIKVCEFQFCNDPFLGVYYHKNNKSWMESEFRVYSSANNCTFEYVSQPFLMDLEGKQGNFKNLREFVFKNIDGYFKIYSKHTPINLVRDLPQGFSALEPLVDLPIGINITRFQTLLALHRSYLTPGDSSSGWTAGAAAYYVGYLQPRTFLLKYNENGTITDAVDCALDPLSETKCTLKSFTVEKGIYQTSNFRVQPTESIVRFPNITNLCPFGEVFNATRFASVYAWNRKRISNCVADYSVLYNSASFSTFKCYGVSPTKLNDLCFTNVYADSFVIRGDEVRQIAPGQTGKIADYNYKLPDDFTGCVIAWNSNNLDSKVGGNYNYLYRLFRKSNLKPFERDISTEIYQAGSTPCNGVEGFNCYFPLQSYGFQPTNGVGYQPYRVVVLSFELLHAPATVCGPKKSTNLVKNKCVNFNFNGLTGTGVLTESNKKFLPFQQFGRDIADTTDAVRDPQTLEILDITPCSFGGVSVITPGTNTSNQVAVLYQDVNCTEVPVAIHADQLTPTWRVYSTGSNVFQTRAGCLIGAEHVNNSYECDIPIGAGICASYQTQTNSPSGAGSVASQSIIAYTMSLGAENSVAYSNNSIAIPTNFTISVTTEILPVSMTKTSVDCTMYICGDSTECSNLLLQYGSFCTQLNRALTGIAVEQDKNTQEVFAQVKQIYKTPPIKDFGGFNFSQILPDPSKPSKRSFIEDLLFNKVTLADAGFIKQYGDCLGDIAARDLICAQKFNGLTVLPPLLTDEMIAQYTSALLAGTITSGWTFGAGAALQIPFAMQMAYRFNGIGVTQNVLYENQKLIANQFNSAIGKIQKSLSSTASALGKLQDVVNQNAQALNTLVKQLSSNFGAISSVLNDILSRLDPPEAEVQIDRLITGRLQSLQTYVTQQLIRAAEIRASANLAATKMSECVLGQSKRVDFCGKGYHLMSFPQSAPHGVVFLHVTYVPAQEKNFTTAPAICHDGKAHFPREGVFVSNGTHWFVTQRNFYEPQIITTDNTFVSGNCDVVIGIVNNTVYDPLQPELDSFKEELDKYFKNHTSPDVDLGDISGINASVVNIQKEIDRLNEVAKNLNESLIDLQELGKYEQYIKGSGRENLYFQGGGGSGYIPEAPRDGQAYVRKDGEWVLLSTFLGHHHHHHHH

SEQ ID NO: 2364 - protein, 1281 aa, Artificial Sequence
  Description of Artificial Sequence: Synthetic polypeptide
MGILPSPGMPALLSLVSLLSVLLMGCVAETGTQCVNLTTRTQLPPAYTNSFTRGVYYPDKVFRSSVLHSTQDLFLPFFSNVTWFHAIHVSGTNGTKRFDNPVLPFNDGVYFASTEKSNIIRGWIFGTTLDSKTQSLLIVNNATNVVIKVCEFQFCNDPFLGVYYHKNNKSWMESEFRVYSSANNCTFEYVSQPFLMDLEGKQGNFKNLREFVFKNIDGYFKIYSKHTPINLVRDLPQGFSALEPLVDLPIGINITRFQTLLALHRSYLTPGDSSSGWTAGAAAYYVGYLQPRTFLLKYNENGTITDAVDCALDPLSETKCTLKSFTVEKGIYQTSNFRVQPTESIVRFPNITNLCPFGEVFNATRFASVYAWNRKRISNCVADYSVLYNSASFSTFKCYGVSPTKLNDLCFTNVYADSFVIRGDEVRQIAPGQTGKIADYNYKLPDDFTGCVIAWNSNNLDSKVGGNYNYLYRLFRKSNLKPFERDISTEIYQAGSTPCNGVEGFNCYFPLQSYGFQPTNGVGYQPYRVVVLSFELLHAPATVCGPKKSTNLVKNKCVNFNFNGLTGTGVLTESNKKFLPFQQFGRDIADTTDAVRDPQTLEILDITPCSFGGVSVITPGTNTSNQVAVLYQDVNCTEVPVAIHADQLTPTWRVYSTGSNVFQTRAGCLIGAEHVNNSYECDIPIGAGICASYQTQTNSPSGAGSVASQSIIAYTMSLGAENSVAYSNNSIAIPTNFTISVTTEILPVSMTKTSVDCTMYICGDSTECSNLLLQYGSFCTQLNRALTGIAVEQDKNTLEVFAQVKQIYKTPPIKDFGGFNFSQILPDPSKPSKRSFIEDLLFNKVTLADAGFIKQYGDCLGDIAARDLICAQKFNGLTVLPPLLTDEMIAQYTSALLAGTITSGWTFGAGAALQIPFAMQMAYRFNGIGVTQNVLYENQKLIANQFNSAIGKIQDSLSSTASALGKLQDVVNQNAQALNTLVKQLSSNFGAISSVLNDILSRLDPPEAEVQIDRLITGRLQSLQTYVTQQLIRAAEIRASANLAATKMSECVLGQSKRVDFCGKGYHLMSFPQSAPHGVVFLHVTYVPAQEKNFTTAPAICHDGKAHFPREGVFVSNGTHWFVTQRNFYEPQIITTDNTFVSGNCDVVIGIVNNTVYDPLQPELDSFKEELDKYFKNHTSPDVDLGDISGINASVVNIQKEIDRLNEVAKNLNESLIDLQELGKYEQYIKGSGRENLYFQGGGGSGYIPEAPRDGQAYVRKDGEWVLLSTFLGHHHHHHHH

SEQ ID NO: 2365 - protein, 1281 aa, Artificial Sequence
  Description of Artificial Sequence: Synthetic polypeptide
MGILPSPGMPALLSLVSLLSVLLMGCVAETGTQCVNLTTRTQLPPAYTNSFTRGVYYPDKVFRSSVLHSTQDLFLPFFSNVTWFHAIHVSGTNGTKRFDNPVLPFNDGVYFASTEKSNIIRGWIFGTTLDSKTQSLLIVNNATNVVIKVCEFQFCNDPFLGVYYHKNNKSWMESEFRVYSSANNCTFEYVSQPFLMDLEGKQGNFKNLREFVFKNIDGYFKIYSKHTPINLVRDLPQGFSALEPLVDLPIGINITRFQTLLALHRSYLTPGDSSSGWTAGAAAYWVGYLQPRTFLLKYNENGTITDAVDCALDPLSETKCTLKSFTVEKGIYQTSNFRVQPTESIVRFPNITNLCPFGEVFNATRFASVYAWNRKRISNCVADYSVLYNSASFSTFKCYGVSPTKLNDLCFTNVYADSFVIRGDEVRQIAPGQTGKIADYNYKLPDDFTGCVIAWNSNNLDSKVGGNYNYLYRLFRKSNLKPFERDISTEIYQAGSTPCNGVEGFNCYFPLQSYGFQPTNGVGYQPYRVVVLSFELLHAPATVCGPKKSTNLVKNKCVNFNFNGLTGTGVLTESNKKFLPFQQFGRDIADTTDAVRDPQTLEILDITPCSFGGVSVITPGTNTSNQVAVLYQDVNCTEVPVAIHADQLTPTWRVYSTGSNVFQTRAGCLIGAEHVNNSYECDIPIGAGICASYQTQTNSPSGAGSVASQSIIAYTMSLGAENSVAYSNNSIAIPTNFTISVTTEILPVSMTKTSVDCTMYICGDSTECSNLLLQYGSFCTQLNRALTGIAVEQDKNTQEVFAQVKQIYKTPPIKDFGGFNFSQILPDPSKPSKRSFIEDLLFNKVTLADAGFIKQYGDCLGDIAARDLICAQKFNGLTVLPPLLTDEMIAQYTSALLAGTITSGWTFGAGAALQIPFAMQMAYRFNGIGVTQNVLYENQKLIANQFNSAIGKIQDSLSSTASALGKLQDVVNQNAQALNTLVKQLSSNFGAISSVLNDILSRLDPPEAEVQIDRLITGRLQSLQTYVTQQLIRAAEIRASANLAATKMSECVLGQSKRVDFCGKGYHLMSFPQSAPHGVVFLHVTYVPAQEKNFTTAPAICHDGKAHFPREGVFVSNGTHWFVTQRNFYEPQIITTDNTFVSGNCDVVIGIVNNTVYDPLQPELDSFKEELDKYFKNHTSPDVDLGDISGINASVVNIQKEIDRLNEVAKNLNESLIDLQELGKYEQYIKGSGRENLYFQGGGGSGYIPEAPRDGQAYVRKDGEWVLLSTFLGHHHHHHHH

SEQ ID NO: 2366 - protein, 1281 aa, Artificial Sequence
  Description of Artificial Sequence: Synthetic polypeptide
MGILPSPGMPALLSLVSLLSVLLMGCVAETGTQCVNLTTRTQLPPAYTNSFTRGVYYPDKVFRSSVLHSTQDLFLPFFSNVTWFHAIHVSGTNGTKRFDNPVLPFNDGVYFASTEKSNIIRGWIFGTTLDSKTQSLLIVNNATNVVIKVCEFQFCNDPFLGVYYHKNNKSWMESEFRVYSSANNCTFEYVSQPFLMDLEGKQGNFKNLREFVFKNIDGYFKIYSKHTPINLVRDLPQGFSALEPLVDLPIGINITRFQTLLALHRSYLTPGDSSSGWTAGAAAYYVGYLQPRTFLLKYNENGTITDAVDCALDPLSETKCTLKSFTVEKGIYQTSNFRVQPTESIVRFPNITNLCPFGEVFNATRFASVYAWNRKRISNCVADYSVLYNSASFSTFKCYGVSPTKLNDLCFTNVYADSFVIRGDEVRQIAPGQTGKIADYNYKLPDDFTGCVIAWNSNNLDSKVGGNYNYLYRLFRKSNLKPFERDISTEIYQAGSTPCNGVEGFNCYFPLQSYGFQPTNGVGYQPYRVVVLSFELLHAPATVCGPKKSTNLVKNKCVNFNFNGLTGTGVLTESNKKFLPFQQFGRDIADTTDAVRDPQTLEILDITPCSFGGVSVITPGTNTSNQVAVLYQDVNCTEVPVAIHADQLTPTWRVYSTGSNVFQTRAGCLIGAEHVNNSYECDIPIGAGICASYQTQTNSPSGAGSVASQSIIAYTMSLGAENSVAYSNNSIAIPTNFTISVTTEILPVSMTKTSVDCTMYICGDSTECSNLLLQYGSFCTQLNRALTGIAVEQDKNTQEVFAQVKQIYKTPPIKDFGGFNFSQILPDPSKPSKRSFIEDLLFNKVTLADAGFIKQYGDCLGDIAARDLICAQKFNGLTVLPPLLTDEMIAQYTSALLAGTITSGWTFGAGAALQIPFAMQMAYRFNGIGVTQNVLYENQKLIANQFNSAIKKIQDSLSSTASALGKLQDVVNQNAQALNTLVKQLSSNFGAISSVLNDILSRLDPPEAEVQIDRLITGRLQSLQTYVTQQLIRAAEIRASANLAATKMSECVLGQSKRVDFCGKGYHLMSFPQSAPHGVVFLHVTYVPAQEKNFTTAPAICHDGKAHFPREGVFVSNGTHWFVTQRNFYEPQIITTDNTFVSGNCDVVIGIVNNTVYDPLQPELDSFKEELDKYFKNHTSPDVDLGDISGINASVVNIQKEIDRLNEVAKNLNESLIDLQELGKYEQYIKGSGRENLYFQGGGGSGYIPEAPRDGQAYVRKDGEWVLLSTFLGHHHHHHHH

SEQ ID NO: 2367 - protein, 1281 aa, Artificial Sequence
  Description of Artificial Sequence: Synthetic polypeptide
MGILPSPGMPALLSLVSLLSVLLMGCVAETGTQCVNLTTRTQLPPAYTNSFTRGVYYPDKVFRSSVLHSTQDLFLPFFSNVTWFHAIHVSGTNGTKRFDNPVLPFNDGVYFASTEKSNIIRGWIFGTTLDSKTQSLLIVNNATNVVIKVCEFQFCNDPFLGVYYHKNNKSWMESEFRVYSSANNCTFEYVSQPFLMDLEGKQGNFKTLREFVFKNIDGYFKIYSKHTPINLVRDLPQGFSALEPLVDLPIGINITRFQTLLALHRSYLTPGDSSSGWTAGAAAYYVGYLQPRTFLLKYNENGTITDAVDCALDPLSETKCTLKSFTVEKGIYQTSNFRVQPTESIVRFPNITNLCPFGEVFNATRFASVYAWNRKRISNCVADYSVLYNSASFSTFKCYGVSPTKLNDLCFTNVYADSFVIRGDEVRQIAPGQTGKIADYNYKLPDDFTGCVIAWNSNNLDSKVGGNYNYLYRLFRKSNLKPFERDISTEIYQAGSTPCNGVEGFNCYFPLQSYGFQPTNGVGYQPYRVVVLSFELLHAPATVCGPKKSTNLVKNKCVNFNFNGLTGTGVLTESNKKFLPFQQFGRDIADTTDAVRDPQTLEILDITPCSFGGVSVITPGTNTSNQVAVLYQDVNCTEVPVAIHADQLTPTWRVYSTGSNVFQTRAGCLIGAEHVNNSYECDIPIGAGICASYQTQTNSPSGAGSVASQSIIAYTMSLGAENSVAYSNNSIAIPTNFTISVTTEILPVSMTKTSVDCTMYICGDSTECSNLLLQYGSFCTQLNRALTGIAVEQDKNTQEVFAQVKQIYKTPPIKDFGGFNFSQILPDPSKPSKRSFIEDLLFNKVTLADAGFIKQYGDCLGDIAARDLICAQKFNGLTVLPPLLTDEMIAQYTSALLAGTITSGWTFGAGAALQIPFAMQMAYRFNGIGVTQNVLYENQKLIANQFNSAIGKIQDSLSSTASALGKLQDVVNQNAQALNTLVKQLSSNFGAISSVLNDILSRLDPPEAEVQIDRLITGRLQSLQTYVTQQLIRAAEIRASANLAATKMSECVLGQSKRVDFCGKGYHLMSFPQSAPHGVVFLHVTYVPAQEKNFTTAPAICHDGKAHFPREGVFVSNGTHWFVTQRNFYEPQIITTDNTFVSGNCDVVIGIVNNTVYDPLQPELDSFKEELDKYFKNHTSPDVDLGDISGINASVVNIQKEIDRLNEVAKNLNESLIDLQELGKYEQYIKGSGRENLYFQGGGGSGYIPEAPRDGQAYVRKDGEWVLLSTFLGHHHHHHHH

SEQ ID NO: 2368 - protein, 1281 aa, Artificial Sequence
  Description of Artificial Sequence: Synthetic polypeptide
MGILPSPGMPALLSLVSLLSVLLMGCVAETGTQCVNLTTRTQLPPAYTNSFTRGVYYPDKVFRSSVLHSTQDLFLPFFSNVTWFHAIHVSGTNGTKRFDNPVLPFNDGVYFASTEKSNIIRGWIFGTTLDSKTQSLLIVNNATNVVIKVCEFQFCNDPFLGVYYHKNNKSWMESEFRVYSSANNCTFEYVSQPFLMDLEGKQGNFKNLREFVFKNIDGYFKIYSKHTPINLVRDLPQGFSALEPLVDLPIGINITRFQTLLALHRSYLTPGDSSSGWTAGAAAYYVGYLQPRTFLLKYNENGTITDAVDCALDPLSETKCTLKSFTVEKGIYQTSNFRVQPTESIVRFPNITNLCPFGEVFNATRFASVYAWNRKRISNCVADYSVLYNSASFSTFKCYGVSPTKLNDLCFTNVYADSFVIRGDEVRQIAPGQTGKIADYNYKLPDDFTGCVIAWNSNNLDSKVGGNYNYLYRLFRKSNLKPFERDISTEIYQAGSTPCNGVEGFNCYFPLQSYGFQPTNGVGYQPYRVVVLSFELLHAPATVCGPKKSTNLVKNKCVNFNFNGLTGTGVLTESNKKFLPFQQFGRDIADTTDAVRDPQTLEILDIRPCSFGGVSVITPGTNTSNQVAVLYQDVNCTEVPVAIHADQLTPTWRVYSTGSNVFQTRAGCLIGAEHVNNSYECDIPIGAGICASYQTQTNSPSGAGSVASQSIIAYTMSLGAENSVAYSNNSIAIPTNFTISVTTEILPVSMTKTSVDCTMYICGDSTECSNLLLQYGSFCTQLNRALTGIAVEQDKNTQEVFAQVKQIYKTPPIKDFGGFNFSQILPDPSKPSKRSFIEDLLFNKVTLADAGFIKQYGDCLGDIAARDLICAQKFNGLTVLPPLLTDEMIAQYTSALLAGTITSGWTFGAGAALQIPFAMQMAYRFNGIGVTQNVLYENQKLIANQFNSAIGKIQDSLSSTASALGKLQDVVNQNAQALNTLVKQLSSNFGAISSVLNDILSRLDPPEAEVQIDRLITGRLQSLQTYVTQQLIRAAEIRASANLAATKMSECVLGQSKRVDFCGKGYHLMSFPQSAPHGVVFLHVTYVPAQEKNFTTAPAICHDGKAHFPREGVFVSNGTHWFVTQRNFYEPQIITTDNTFVSGNCDVVIGIVNNTVYDPLQPELDSFKEELDKYFKNHTSPDVDLGDISGINASVVNIQKEIDRLNEVAKNLNESLIDLQELGKYEQYIKGSGRENLYFQGGGGSGYIPEAPRDGQAYVRKDGEWVLLSTFLGHHHHHHHH

SEQ ID NO: 2369 - protein, 1281 aa, Artificial Sequence
  Description of Artificial Sequence: Synthetic polypeptide
MGILPSPGMPALLSLVSLLSVLLMGCVAETGTQCVNLTTRTQLPPAYTNSFTRGVYYPDKVFRSSVLHSTQDLFLPFFSNVTWFHAIHVSGTNGTKRFDNPVLPFNDGVYFASTEKSNIIRGWIFGTTLDSKTQSLLIVNNATNVVIKVCEFQFCNDPFLGVYYHKNNKSWMESEFRVYSSANNCTFEYVSQPFLMDLEGKQGNFKNLREFVFKNIDGYFKIYSKHTPINLVRDLPQGFSALEPLVDLPIGINITRFQTLLALHRSYLTPGDSSSGWTAGAAAYYVGYLQPRTFLLKYNENGTITDAVDCALDPLSETKCTLKSFTVEKGIYQTSNFRVQPTESIVRFPNITNLCPFGEVFNATRFASVYAWNRKRISNCVADYSVLYNSASFSTFKCYGVSPTKLNDLCFTNVYADSFVIRGDEVRQIAPGQTGKIADYNYKLPDDFTGCVIAWNSNNLDSKVGGNYNYLYRLFRKSNLKPFERDISTEIYQAGSTPCNGVEGFNCYFPLQSYGFQPTNGVGYQPYRVVVLSFELLHAPATVCGPKKSTNLVKNKCVNFNFNGLTGTGVLTESNKKFLPFQQFGRDIADTTDAVRDPQTLEILDITPCSFGGVSVITPGTNTSNQVAVLYQDVNCTEVPVAIHADQLTPTWRVYSTGSNVFQTRAGCLIGAEHVNNSYECDIPIGAGICASYQTQTNSPSGAGSVASQSIIAYTMSLGAENSVAYSNNSIAIPTNFTISVTTEILPVSMTKTSVDCTMYICGDSTECSNLLLQYGSFCTQLNRALTGIAVEQDKNTQEVFAQVKQIYKTPPIKDFGGFNFSQILPDPSKPSKRSFIEDLLFNKVTLADAGFIKQYGDCLGDIAARDLICAQKFNGLTVLPPLLTDEMIAQYTSALLAGTITTGWTFGAGAALQIPFAMQMAYRFNGIGVTQNVLYENQKLIANQFNSAIGKIQDSLSSTASALGKLQDVVNQNAQALNTLVKQLSSNFGAISSVLNDILSRLDPPEAEVQIDRLITGRLQSLQTYVTQQLIRAAEIRASANLAATKMSECVLGQSKRVDFCGKGYHLMSFPQSAPHGVVFLHVTYVPAQEKNFTTAPAICHDGKAHFPREGVFVSNGTHWFVTQRNFYEPQIITTDNTFVSGNCDVVIGIVNNTVYDPLQPELDSFKEELDKYFKNHTSPDVDLGDISGINASVVNIQKEIDRLNEVAKNLNESLIDLQELGKYEQYIKGSGRENLYFQGGGGSGYIPEAPRDGQAYVRKDGEWVLLSTFLGHHHHHHHH

SEQ ID NO: 2370 - protein, 1281 aa, Artificial Sequence
  Description of Artificial Sequence: Synthetic polypeptide
MGILPSPGMPALLSLVSLLSVLLMGCVAETGTQCVNLTTRTQLPPAYTNSFTRGVYYPDKVFRSSVLHSTQDLFLPFFSNVTWFHAIHVSGTNGTKRFDNPVLPFNDGVYFASTEKSNIIRGWIFGTTLDSKTQSLLIVNNATNVVIKVCEFQFCNDPFLGVYYHKNNKSWMEAEFRVYSSANNCTFEYVSQPFLMDLEGKQGNFKNLREFVFKNIDGYFKIYSKHTPINLVRDLPQGFSALEPLVDLPIGINITRFQTLLALHRSYLTPGDSSSGWTAGAAAYYVGYLQPRTFLLKYNENGTITDAVDCALDPLSETKCTLKSFTVEKGIYQTSNFRVQPTESIVRFPNITNLCPFGEVFNATRFASVYAWNRKRISNCVADYSVLYNSASFSTFKCYGVSPTKLNDLCFTNVYADSFVIRGDEVRQIAPGQTGKIADYNYKLPDDFTGCVIAWNSNNLDSKVGGNYNYLYRLFRKSNLKPFERDISTEIYQAGSTPCNGVEGFNCYFPLQSYGFQPTNGVGYQPYRVVVLSFELLHAPATVCGPKKSTNLVKNKCVNFNFNGLTGTGVLTESNKKFLPFQQFGRDIADTTDAVRDPQTLEILDITPCSFGGVSVITPGTNTSNQVAVLYQDVNCTEVPVAIHADQLTPTWRVYSTGSNVFQTRAGCLIGAEHVNNSYECDIPIGAGICASYQTQTNSPSGAGSVASQSIIAYTMSLGAENSVAYSNNSIAIPTNFTISVTTEILPVSMTKTSVDCTMYICGDSTECSNLLLQYGSFCTQLNRALTGIAVEQDKNTQEVFAQVKQIYKTPPIKDFGGFNFSQILPDPSKPSKRSFIEDLLFNKVTLADAGFIKQYGDCLGDIAARDLICAQKFNGLTVLPPLLTDEMIAQYTSALLAGTITSGWTFGAGAALQIPFAMQMAYRFNGIGVTQNVLYENQKLIANQFNSAIGKIQDSLSSTASALGKLQDVVNQNAQALNTLVKQLSSNFGAISSVLNDILSRLDPPEAEVQIDRLITGRLQSLQTYVTQQLIRAAEIRASANLAATKMSECVLGQSKRVDFCGKGYHLMSFPQSAPHGVVFLHVTYVPAQEKNFTTAPAICHDGKAHFPREGVFVSNGTHWFVTQRNFYEPQIITTDNTFVSGNCDVVIGIVNNTVYDPLQPELDSFKEELDKYFKNHTSPDVDLGDISGINASVVNIQKEIDRLNEVAKNLNESLIDLQELGKYEQYIKGSGRENLYFQGGGGSGYIPEAPRDGQAYVRKDGEWVLLSTFLGHHHHHHHH

SEQ ID NO: 2371 - protein, 1281 aa, Artificial Sequence
  Description of Artificial Sequence: Synthetic polypeptide
MGILPSPGMPALLSLVSLLSVLLMGCVAETGTQCVNLTTRTQLPPAYTNSFTRGVYYPDKVFRSSVLHSTQDLFLPFFSNVTWFHAIHVSGTNGTKRFDNPVLPFNDGVYFASTEKSNIIRGWIFGTTLDSKTQSLLIVNNATNVVIKVCEFQFCNDPFLGVYYHKNNKSWMESEFRVYSSANNCTFEYVSQPFLMDLEGKQGNFKNLREFVFKNIDGYFKIYSKHTPINLVRDLPQGFSALEPLVDLPIGINITRFQTLLALHRSYLTPGDSSSGWTAGAAAYYVGYLQPRTFLLKYNENGTITDAVDCALDPLSETKCTLKSFTVEKGIYQTSNFRVQPTESIVRFPNITNLCPFGEVFNATRFASVYAWNRKRISNCVADYSVLYNSASFSTFKCYGVSPTKLNDLCFTNVYADSFVIRGDEVRQIAPGQTGKIADYNYKLPDDFTGCVIAWNSNNLDSKVGGNYNYLYRLFRKSNLKPFERDISTEIYQAGSTPCNGVEGFNCYFPLQSYGFQPTNGVGYQPYRVVVLSFELLHAPATVCGPKKSTNLVKNKCVNFNFNGLTGTGVLTESNKKFLPFQQFGRDIADTTDAVRDPQTLEILDITPCSFGGVSVITPGTNTSNQVAVLYQDVNCTEVPVAIHADQLTPTWRVYSTGSNVFQTRAGCLIGAEHVNNSYECDIPIGAGICASYQTQTNSPSGAGSVASQSIIAYTMSLGAENSVAYSNNSIAIPTNFTISVTTEILPVSMTKTSVDCTMYICGDSTECSNLLLQYGSFCTQLNRALTGIAVEQDKNTQEVFAQVKQIYKTPPIKDFGGFNFSQILPDPSKPSKRSFIEDLLFNKVTLADAGFIKQYGDCLGDIDARDLICAQKFNGLTVLPPLLTDEMIAQYTSALLAGTITSGWTFGAGAALQIPFAMQMAYRFNGIGVTQNVLYENQKLIANQFNSAIGKIQDSLSSTASALGKLQDVVNQNAQALNTLVKQLSSNFGAISSVLNDILSRLDPPEAEVQIDRLITGRLQSLQTYVTQQLIRAAEIRASANLAATKMSECVLGQSKRVDFCGKGYHLMSFPQSAPHGVVFLHVTYVPAQEKNFTTAPAICHDGKAHFPREGVFVSNGTHWFVTQRNFYEPQIITTDNTFVSGNCDVVIGIVNNTVYDPLQPELDSFKEELDKYFKNHTSPDVDLGDISGINASVVNIQKEIDRLNEVAKNLNESLIDLQELGKYEQYIKGSGRENLYFQGGGGSGYIPEAPRDGQAYVRKDGEWVLLSTFLGHHHHHHHH

SEQ ID NO: 2372 - protein, 1281 aa, Artificial Sequence
  Description of Artificial Sequence: Synthetic polypeptide
MGILPSPGMPALLSLVSLLSVLLMGCVAETGTQCVNLTTRTQLPPAYTNSFTRGVYYPDKVFRSSVLHSTQDLFLPFFSNVTWFHAIHVSGTNGTKRFDNPVLPFNDGVYFASTEKSNIIRGWIFGTTLDSKTQSLLIVNNATNVVIKVCEFQFCNDPFLGVYYHKNNKSWMESEFRVYSSANNCTFEYVSQPFLMDLDGKQGNFKNLREFVFKNIDGYFKIYSKHTPINLVRDLPQGFSALEPLVDLPIGINITRFQTLLALHRSYLTPGDSSSGWTAGAAAYYVGYLQPRTFLLKYNENGTITDAVDCALDPLSETKCTLKSFTVEKGIYQTSNFRVQPTESIVRFPNITNLCPFGEVFNATRFASVYAWNRKRISNCVADYSVLYNSASFSTFKCYGVSPTKLNDLCFTNVYADSFVIRGDEVRQIAPGQTGKIADYNYKLPDDFTGCVIAWNSNNLDSKVGGNYNYLYRLFRKSNLKPFERDISTEIYQAGSTPCNGVEGFNCYFPLQSYGFQPTNGVGYQPYRVVVLSFELLHAPATVCGPKKSTNLVKNKCVNFNFNGLTGTGVLTESNKKFLPFQQFGRDIADTTDAVRDPQTLEILDITPCSFGGVSVITPGTNTSNQVAVLYQDVNCTEVPVAIHADQLTPTWRVYSTGSNVFQTRAGCLIGAEHVNNSYECDIPIGAGICASYQTQTNSPSGAGSVASQSIIAYTMSLGAENSVAYSNNSIAIPTNFTISVTTEILPVSMTKTSVDCTMYICGDSTECSNLLLQYGSFCTQLNRALTGIAVEQDKNTQEVFAQVKQIYKTPPIKDFGGFNFSQILPDPSKPSKRSFIEDLLFNKVTLADAGFIKQYGDCLGDIAARDLICAQKFNGLTVLPPLLTDEMIAQYTSALLAGTITSGWTFGAGAALQIPFAMQMAYRFNGIGVTQNVLYENQKLIANQFNSAIGKIQDSLSSTASALGKLQDVVNQNAQALNTLVKQLSSNFGAISSVLNDILSRLDPPEAEVQIDRLITGRLQSLQTYVTQQLIRAAEIRASANLAATKMSECVLGQSKRVDFCGKGYHLMSFPQSAPHGVVFLHVTYVPAQEKNFTTAPAICHDGKAHFPREGVFVSNGTHWFVTQRNFYEPQIITTDNTFVSGNCDVVIGIVNNTVYDPLQPELDSFKEELDKYFKNHTSPDVDLGDISGINASVVNIQKEIDRLNEVAKNLNESLIDLQELGKYEQYIKGSGRENLYFQGGGGSGYIPEAPRDGQAYVRKDGEWVLLSTFLGHHHHHHHH

SEQ ID NO: 2373 - protein, 1281 aa, Artificial Sequence
  Description of Artificial Sequence: Synthetic polypeptide
MGILPSPGMPALLSLVSLLSVLLMGCVAETGTQCVNLTTRTQLPPAYTNSFTRGVYYPDKVFRSSVLHSTQDLFLPFFSNVTWFHAIHVSGTNGTKRFDNPVLPFNDGVYFASTEKSNIIRGWIFGTTLDSKTQSLLIVNNATNVVIKVCEFQFCNDPFLGVYYHKNNKSWMESEFRVYSSANNCTFEYVSQPFLMDLEGKQGNFKNLREFVFKNIDGYFKIYSKHTPINLVRDLPQGFSALEPLVDLPIGINITRFQTLLALHRSYLTPGDSSSGWTAGAAAYYVGYLQPRTFLLKYNENGTITDAVDCALDPLSETKCTLKSFTVEKGIYQTSNFRVQPTESIVRFPNITNLCPFGEVFNATRFASVYAWNRKRISNCVADYSVLYNSASFSTFKCYGVSPTKLNDLCFTNVYADSFVIRGDEVRQIAPGQTGKIADYNYKLPDDFTGCVIAWNSNNLDSKVGGNYNYLYRLFRKSNLKPFERDISTEIYQAGSTPCNGVEGFNCYFPLQSYGFQPTNGVGYQPYRVVVLSFELLHAPATVCGPKKSTNLVKNKCVNFNFNGLTGTGVLTESNKKFLPFQQFGRDIADTTDAVRDPQTLEILDITPCSFGGVSVITPGTNTSNQVAVLYQDVNCTHVPVAIHADQLTPTWRVYSTGSNVFQTRAGCLIGAEHVNNSYECDIPIGAGICASYQTQTNSPSGAGSVASQSIIAYTMSLGAENSVAYSNNSIAIPTNFTISVTTEILPVSMTKTSVDCTMYICGDSTECSNLLLQYGSFCTQLNRALTGIAVEQDKNTQEVFAQVKQIYKTPPIKDFGGFNFSQILPDPSKPSKRSFIEDLLFNKVTLADAGFIKQYGDCLGDIAARDLICAQKFNGLTVLPPLLTDEMIAQYTSALLAGTITSGWTFGAGAALQIPFAMQMAYRFNGIGVTQNVLYENQKLIANQFNSAIGKIQDSLSSTASALGKLQDVVNQNAQALNTLVKQLSSNFGAISSVLNDILSRLDPPEAEVQIDRLITGRLQSLQTYVTQQLIRAAEIRASANLAATKMSECVLGQSKRVDFCGKGYHLMSFPQSAPHGVVFLHVTYVPAQEKNFTTAPAICHDGKAHFPREGVFVSNGTHWFVTQRNFYEPQIITTDNTFVSGNCDVVIGIVNNTVYDPLQPELDSFKEELDKYFKNHTSPDVDLGDISGINASVVNIQKEIDRLNEVAKNLNESLIDLQELGKYEQYIKGSGRENLYFQGGGGSGYIPEAPRDGQAYVRKDGEWVLLSTFLGHHHHHHHH

SEQ ID NO: 2374 - protein, 1281 aa, Artificial Sequence
  Description of Artificial Sequence: Synthetic polypeptide
MGILPSPGMPALLSLVSLLSVLLMGCVAETGTQCVNLTTRTQLPPAYTNSFTRGVYYPDKVFRSSVLHSTQDLFLPFFSNVTWFHAIHVSGTNGTKRFDNPVLPFNDGVYFASTEKSNIIRGWIFGTTLDSKTQSLLIVNNATNVVIKVCEFQFCNDPFLGVYYHKNNKSWMESEFRVYSSANNCTFEYVSQPFLMDLEGKQGNFKNLREFVFKNIDGYFKIYSKHTPINLVRDLPQGFSALEPLVDLPIGINITRFQTLLALHRSYLTPGDSSSGWTAGAAAYYVGYLQPRTFLLKYNENGTITDAVDCALDPLSETKCTLKSFTVEKGIYQTSNFRVQPTESIVRFPNITNLCPFGEVFNATRFASVYAWNRKRISNCVADYSVLYNSASFSTFKCYGVSPTKLNDLCFTNVYADSFVIRGDEVRQIAPGQTGKIADYNYKLPDDFTGCVIAWNSNNLDSKVGGNYNYLYRLFRKSNLKPFERDISTEIYQAGSTPCNGVEGFNCYFPLQSYGFQPTNGVGYQPYRVVVLSFELLHAPATVCGPKKSTNLVKNKCVNFNFNGLTGTGVLTESNKKFLPFQQFGRDIADTTDAVRDPQTLEILDITPCSFGGVSVITPGTNTSNQVAVLYQDVNCTEVPVAIHADQLTPTWRVYSTGSNVFQTRAGCLIGAEHVNNSYECDIPIGAGICASYQTQTNSPSGAGSVASQSIIAYTMSLGAENSVAYSNNSIAIPTNFTISVTTEILPVSMTKTSVDCTMYICGDSTECSNLLLQYGSFCTQLNRALTGIAVEQDKNTQEVFAQVKQIYKTPPIKDFGGFNFSQILPDPSKPSKRSFIEDLLFNKLTLADAGFIKQYGDCLGDIAARDLICAQKFNGLTVLPPLLTDEMIAQYTSALLAGTITSGWTFGAGAALQIPFAMQMAYRFNGIGVTQNVLYENQKLIANQFNSAIGKIQDSLSSTASALGKLQDVVNQNAQALNTLVKQLSSNFGAISSVLNDILSRLDPPEAEVQIDRLITGRLQSLQTYVTQQLIRAAEIRASANLAATKMSECVLGQSKRVDFCGKGYHLMSFPQSAPHGVVFLHVTYVPAQEKNFTTAPAICHDGKAHFPREGVFVSNGTHWFVTQRNFYEPQIITTDNTFVSGNCDVVIGIVNNTVYDPLQPELDSFKEELDKYFKNHTSPDVDLGDISGINASVVNIQKEIDRLNEVAKNLNESLIDLQELGKYEQYIKGSGRENLYFQGGGGSGYIPEAPRDGQAYVRKDGEWVLLSTFLGHHHHHHHH

SEQ ID NO: 2375 - protein, 1281 aa, Artificial Sequence
  Description of Artificial Sequence: Synthetic polypeptide
MGILPSPGMPALLSLVSLLSVLLMGCVAETGTQCVNLTTRTQLPPAYTNSFTRGVYYPDKIFRSNVLHSTQDLFLPFFSNVTWFHALHVKGTNGTKRFDNPVLPFNDGVYFAAIEKSNIIRGWIFGTTLDSKTQSLLIVNNATNVVIRVCEFQFCENPFLGVYYHKNNKSWREEEWRVYSSANNCTFEYVSQPFLYDLNGKQGNFHHLREFVFKNIDGYFYIYSKWEPINLVRDLPQGFSALEPLMDLPIGINITHFQTFLSLSRSYRTPGDSSSGWTAGAAAYYVGYLQPRTFLLKYDENGYITDAVDCSLDPLSETKCKLKSFTVEKGIYQTSNFRVQPTYEIVRFPNITNACPFDEVFNATRFASVYNWNRQRISNCVADYSVLYNSASFSTFQCYGVSPTKLNDLCFTNVYADIFVIRGSEVRQIAPGQTGTIADYNYKLPDDFTGCVIAWNSNNLDSTVGGNYNYLYRLFRKSNMKPFERDISTEAYQAGCTPCNGVEGFNCYFPLQSYGFQPTNGVGYQPYRVVVLKFELLHAPATVCGPKDSTNLVKNKCVDYNFNGRTGTGVLTESNKKFLPFQQFGRDISDNLDAVRDPTTGEILCITPCSFGGVSVITPGTNTSNQVAVLYQDVNCTEVPEAIHSNQLRPTWRVYSTGSNVFQTRAGCLIGAEYVNNSYECDIPIGNGICASYQTQTNSPSGSGSVSSQSIIAYTMSLGAENTVAYSNNNIAIPTNFTISVQTEILPVSMTKVSVDCTMYICGDSTRCLNLLKQYGSFCDQLERALNGIAREQDKNLLNVFAQVKQIYKTPPIKDFGGFNFSQILPDPSKPSKRSFIEDLLFNKVTLADLGFVKQYKDCLGDQAARDLICAQKYNGIMVLPPLLTDEMIAQYTASLLAGTITAGWTFGAGAALVIPFAMQMAYRFNGIGVQQNVLYENQKIIANQFNNAIGNIQDGLSTTASALSKLQDVVNQQAQALNELVKQLSSNFGAISSVINDIYNRLDPPEAEAQIDRLITGRLQSLQTYVTQQLIRATEIRASAQLAAEKMSECVKGQSNRYGFCGNGYHLMSFPQSAPHGVVFLHVTYVPTQFKNFTTAPGICHDGKAYFPREGVFVSNGTEWYITQRNFYEPRIITTDNTFVSGNCDVVIGIVNNTVYDPLQPELDSFKEELDKYFKNHTSPDVDLGDISGINASVVNIQKEIDRLNEVAKNLNESLIDLQELGKYEQYIKGSGRENLYFQGGGGSGYIPEAPRDGQAYVRKDGEWVLLSTFLGHHHHHHHH

SEQ ID NO: 2376 - protein, 1281 aa, Artificial Sequence
  Description of Artificial Sequence: Synthetic polypeptide
MGILPSPGMPALLSLVSLLSVLLMGCVAETGTQCVNLTTRTQLPPAYTNSFTRGVYYPDKVFRSSVLHSTQDLFLPFFSNVTWFHAIHVSGTNGTKRFDNPVLPFNDGVYFASTEKSNIIRGWIFGTTLDSKTQSLLIVNNATNVVIKVCEFQFCNDPFLGVYYHKNNKSWMESEFRVYSSANNCTFEYVSQPFLMDLEGKQGNFKNLREFVFKNIDGYFKIYSKHTPINLVRDLPQGFSALEPLVDLPIGINITRFQTLLALHRSYLTPGDSSSGWTAGAAAYYVGYLQPRTFLLKYNENGTITDAVDCALDPLSETKCTLKSFTVEKGIYQTSNFRVQPTESIVRFPNITNLCPFGEVFNATRFASVYAWNRKRISNCVADYSVLYNSASFSTFKCYGVSPTKLNDLCFTNVYADSFVIRGDEVRQIAPGQTGKIADYNYKLPDDFTGCVIAWNSNNLDSKVGGNYNYLYRLFRKSNLKPFERDISTEIYQAGSTPCNGVEGFNCYFPLQSYGFQPTNGVGYQPYRVVVLSFELLHAPATVCGPKKSTNLVKNKCVNFNFNGLTGTGVLTESNKKFLPFQQFGRDIADTTDAVRDPQTLEILDITPCSFGGVSVITPGTNTSNQVAVLYQDVNCTEVPVAIHADQLTPTWRVYSTGSNVFQTRAGCLIGAEHVNNSYECDIPIGAGICASYQTQTNSPSGAGSVASQSIIAYTMSLGAENSVAYSNNSIAIPTNFTISVTTEILPVSMTKTSVDCTMYICGDSTECSNLLLQYGSFCTQLNRALTGIAVEQDKNTQEVFAQVKQIYKTPPIKDFGGFNFSQILPDPSKPSKRSFIEDLLFNKVTLADAGFIKQYGDCLGDIAARDLICAQKFNGLTVLPPLLTDEMIAQYTSALLAGTITSGWTFGAGAALQIPFAMQMAYRFNGIGVTQNVLYENQKLIANQFNSAIGKIQDSLSSTASALGKLQDVVNQNAQALNTLVKQLSSNFGAISSVLNDILSRLDPPEAEVQIDRLITGRLQSLQTYVTQQLIRAAEIRASANLAATKMSECVLGQSKRVDFCGKGYHLMSFPQSAPHGVVFLHVTYVPAQEKNFTTAPAICHDGKAHFPREGVFVSNGTMWFVTQRNFYEPQIITTDNTFVSGNCDVVIGIVNNTVYDPLQPELDSFKEELDKYFKNHTSPDVDLGDISGINASVVNIQKEIDRLNEVAKNLNESLIDLQELGKYEQYIKGSGRENLYFQGGGGSGYIPEAPRDGQAYVRKDGEWVLLSTFLGHHHHHHHH

SEQ ID NO: 2377 - protein, 1281 aa, Artificial Sequence
  Description of Artificial Sequence: Synthetic polypeptide
MGILPSPGMPALLSLVSLLSVLLMGCVAETGTQCVNLTTRTQLPPAYTNSFTRGVYYPDKVFRSSVLHSTQDLFLPFFSNVTWFHAIHVSGTNGTKRFDNPVLPFNDGVYFASTEKSNIIRGWIFGTTLDSKTQSLLIVNNATNVVIKVCEFQFCNDPFLGVYYHKNNKSWMESEFRVYSSANNCTFEYVSQPFLMDLEGKQGNFKNLREFVFKNIDGYFKIYSKHTPINLVRDLPQGFSALEPLVDLPIGINITRFQTLLALHRSYLTPGDSSSGWTAGAAAYYVGYLQPRTFLLKYNENGTITDAVDCALDPLSETKCTLKSFTVEKGIYQTSNFRVQPTESIVRFPNITNLCPFGEVFNATRFASVYAWNRKRISNCVADYSVLYNSASFSTFKCYGVSPTKLNDLCFTNVYADSFVIRGDEVRQIAPGQTGKIADYNYKLPDDFTGCVIAWNSNNLDSKVGGNYNYLYRLFRKSNLKPFERDISTEIYQAGSTPCNGVEGFNCYFPLQSYGFQPTNGVGYQPYRVVVLSFELLHAPATVCGPKKSTNLVKNKCVNFNFNGLTGTGVLTESNKKFLPFQQFGRDIADTTDAVRDPQTLEILDITPCSFGGVSVITPGTNTSNQVAVLYQDVNCTEVPVAIHADQLTPTWRVYSTGSNVFQTRAGCLIGAEHVNNSYECDIPIGAGICASYQTQTNSPSGAGSVASQSIIAYTMSLGAENSVAYSNNSIAIPTNFTISVTTEILPVSMTKTSVDCTMYICGDSTECSNLLLQYGSFCTQLNRALTGIAVEQDKNTQEVFAQVKQIYKTPPIKDFGGFNFSQILPDPSKPSKRSFIEDLLFNKVTLADAGFIKQYGDCLGDIAARDLICAQKFNGLTVLPPLLTDEMIAQYTSALLAGTITSGWTFGAGAALQIPFAMQMAYRFNGIGVTQNVLYENQKLIANQFNSAIGKIQDSLSSTASALGKLQDVVNQNAQALNTLVKQLSSNFGAISSVLNDILSRLDPPEAEVQIDRLITGRLQSLQTYVTQQLIRAAEIRASANLAATKMSECVLGQSKRVDFCGKGYHLMSFPQSAPHGVVFLHVTYVPAQEKNFTTAPAICHDGKAHFPREGVFVSNGTKWFVTQRNFYEPQIITTDNTFVSGNCDVVIGIVNNTVYDPLQPELDSFKEELDKYFKNHTSPDVDLGDISGINASVVNIQKEIDRLNEVAKNLNESLIDLQELGKYEQYIKGSGRENLYFQGGGGSGYIPEAPRDGQAYVRKDGEWVLLSTFLGHHHHHHHH

SEQ ID NO: 2378 - protein, 1281 aa, Artificial Sequence
  Description of Artificial Sequence: Synthetic polypeptide
MGILPSPGMPALLSLVSLLSVLLMGCVAETGTQCVNLTTRTQLPPAYTNSFTRGVYYPDKVFRSSVLHSTQDLFLPFFSNVTWFHAIHVSGTNGTKRFDNPVLPFNDGVYFASTEKSNIIRGWIFGTTLDSKTQSLLIVNNATNVVIKVCEFQFCNDPFLGVYYHKNNKSWMESEFRVYSSANNCTFEYVSQPFLMDLEGKQGNFKNLREFVFKNIDGYFKIYSKHTPINLVRDLPQGFSALEPLVDLPIGINITRFQTLLALHRSYLTPGDSSSGWTAGAAAYYVGYLQPRTFLLKYNENGTITDAVDCALDPLSETKCTLKSFTVEKGIYQTSNFRVQPTESIVRFPNITNLCPFGEVFNATRFASVYAWNRKRISNCVADYSVLYNSASFSTFKCYGVSPTKLNDLCFTNVYADSFVIRGDEVRQIAPGQTGKIADYNYKLPDDFTGCVIAWNSNNLDSKVGGNYNYLYRLFRKSNLKPFERDISTEIYQAGSTPCNGVEGFNCYFPLQSYGFQPTNGVGYQPYRVVVLSFELLHAPATVCGPKKSTNLVKNKCVNFNFNGLTGTGVLTESNKKFLPFQQFGRDIADTTDAVRDPQTLEILDITPCSFGGVSVITPGTNTSNQVAVLYQDVNCTEVPVAIHADQLTPTWRVYSTGSNVFQTRAGCLIGAEHVNNSYECDIPIGAGICASYQTQTNSPSGAGSVASQSIIAYTMSLGAENSVAYSNNSIAIPTNFTISVTTEILPVSMTKTSVDCTMYICGDSTECSNLLLQYGSFCTQLNRALTGIAVEQDKNTQEVFAQVKQIYKTPPIKDFGGFNFSQILPDPSKPSKRSFIEDLLFNKITLADAGFIKQYGDCLGDIAARDLICAQKFNGLTVLPPLLTDEMIAQYTSALLAGTITSGWTFGAGAALQIPFAMQMAYRFNGIGVTQNVLYENQKLIANQFNSAIGKIQDSLSSTASALGKLQDVVNQNAQALNTLVKQLSSNFGAISSVLNDILSRLDPPEAEVQIDRLITGRLQSLQTYVTQQLIRAAEIRASANLAATKMSECVLGQSKRVDFCGKGYHLMSFPQSAPHGVVFLHVTYVPAQEKNFTTAPAICHDGKAHFPREGVFVSNGTHWFVTQRNFYEPQIITTDNTFVSGNCDVVIGIVNNTVYDPLQPELDSFKEELDKYFKNHTSPDVDLGDISGINASVVNIQKEIDRLNEVAKNLNESLIDLQELGKYEQYIKGSGRENLYFQGGGGSGYIPEAPRDGQAYVRKDGEWVLLSTFLGHHHHHHHH

SEQ ID NO: 2379 - protein, 1281 aa, Artificial Sequence
  Description of Artificial Sequence: Synthetic polypeptide
MGILPSPGMPALLSLVSLLSVLLMGCVAETGTQCVNLTTRTQLPPAYTNSFTRGVYYPDKVFRSSVLHSTQDLFLPFFSNVTWFHAIHVSGTNGTKRFDNPVLPFNDGVYFASTEKSNIIRGWIFGTTLDSKTQSLLIVNNATNVVIKVCEFQFCNDPFLGVYYHKNNKSWMESEFRVYSSANNCTFEYVSQPFLMDLEGKQGNFKNLREFVFKNIDGYFKIYSKHTPINLVRDLPQGFSALEPLVDLPIGINITRFQTLLALHRSYLTPGDSSSGWTAGAAAYYVGYLQPRTFLLKYNENGTITDAVDCALDPLSETKCTLKSFTVEKGIYQTSNFRVQPTESIVRFPNITNLCPFGEVFNATRFASVYAWNRKRISNCVADYSVLYNSASFSTFKCYGVSPTKLNDLCFTNVYADSFVIRGDEVRQIAPGQTGKIADYNYKLPDDFTGCVIAWNSNNLDSKVGGNYNYLYRLFRKSNLKPFERDISTEIYQAGSTPCNGVEGFNCYFPLQSYGFQPTNGVGYQPYRVVVLSFELLHAPATVCGPKKSTNLVKNKCVNFNFNGLTGTGVLTESNKKFLPFQQFGRDIADCTDAVRDPQTLEILDITPCSFGGVSVITPGTNTSNQVAVLYQDVNCTEVPVAIHADQLTPTWRVYSTGSNVFQTRAGCLIGAEHVNNSYECDIPIGAGICASYQTQTNSPSGAGSVASQSIIAYTMSLGAENSVAYSNNSIAIPTNFTISVTTEILPVSMTKTSVDCTMYICGDSTECSNLLLQYGSFCTQLNRALTGIAVEQDKNTQEVFAQVKQIYKTPPIKDFGGFNFSQILPDPSKPSKRSFIEDLLFNKVTLADAGFIKQYGDCLGDIAARDLICAQKFNGLTVLPPLLTDEMIAQYTSALLAGTITSGWTFGAGAALQIPFAMQMAYRFNGIGVTQNVLYENQKLIANQFNSAIGKIQDSLSSTASALGKLQDVVNQNAQALNTLVKQLSSNFGAISSVLNDILSRLDPPEAEVQIDRLITGRLQSLQTYVTQQLIRAAEIRASANLAATKMSECVLGQSKRVDFCGKGYHLMSFPQSAPHGVVFLHVTYVPAQEKNFTTAPAICHDGKAHFPREGVFVSNGTHWFVTQRNFYEPQIITTDNTFVSGNCDVVIGIVNNTVYDPLQPELDSFKEELDKYFKNHTSPDVDLGDISGINASVVNIQKEIDRLNEVAKNLNESLIDLQELGKYEQYIKGSGRENLYFQGGGGSGYIPEAPRDGQAYVRKDGEWVLLSTFLGHHHHHHHH

SEQ ID NO: 2380 - protein, 1281 aa, Artificial Sequence
  Description of Artificial Sequence: Synthetic polypeptide
MGILPSPGMPALLSLVSLLSVLLMGCVAETGTQCVNLTTRTQLPPAYTNSFTRGVYYPDKVFRSSVLHSTQDLFLPFFSNVTWFHAIHVSGTNGTKRFDNPVLPFNDGVYFASTEKSNIIRGWIFGTTLDSKTQSLLIVNNATNVVIKVCEFQLCNDPFLGVYYHKNNKSWMESEFRVYSSANNCTFEYVSQPFLMDLEGKQGNFKNLREFVFKNIDGYFKIYSKHTPINLVRDLPQGFSALEPLVDLPIGINITRFQTLLALHRSYLTPGDSSSGWTAGAAAYYVGYLQPRTFLLKYNENGTITDAVDCALDPLSETKCTLKSFTVEKGIYQTSNFRVQPTESIVRFPNITNLCPFGEVFNATRFASVYAWNRKRISNCVADYSVLYNSASFSTFKCYGVSPTKLNDLCFTNVYADSFVIRGDEVRQIAPGQTGKIADYNYKLPDDFTGCVIAWNSNNLDSKVGGNYNYLYRLFRKSNLKPFERDISTEIYQAGSTPCNGVEGFNCYFPLQSYGFQPTNGVGYQPYRVVVLSFELLHAPATVCGPKKSTNLVKNKCVNFNFNGLTGTGVLTESNKKFLPFQQFGRDIADTTDAVRDPQTLEILDITPCSFGGVSVITPGTNTSNQVAVLYQDVNCTEVPVAIHADQLTPTWRVYSTGSNVFQTRAGCLIGAEHVNNSYECDIPIGAGICASYQTQTNSPSGAGSVASQSIIAYTMSLGAENSVAYSNNSIAIPTNFTISVTTEILPVSMTKTSVDCTMYICGDSTECSNLLLQYGSFCTQLNRALTGIAVEQDKNTQEVFAQVKQIYKTPPIKDFGGFNFSQILPDPSKPSKRSFIEDLLFNKVTLADAGFIKQYGDCLGDIAARDLICAQKFNGLTVLPPLLTDEMIAQYTSALLAGTITSGWTFGAGAALQIPFAMQMAYRFNGIGVTQNVLYENQKLIANQFNSAIGKIQDSLSSTASALGKLQDVVNQNAQALNTLVKQLSSNFGAISSVLNDILSRLDPPEAEVQIDRLITGRLQSLQTYVTQQLIRAAEIRASANLAATKMSECVLGQSKRVDFCGKGYHLMSFPQSAPHGVVFLHVTYVPAQEKNFTTAPAICHDGKAHFPREGVFVSNGTHWFVTQRNFYEPQIITTDNTFVSGNCDVVIGIVNNTVYDPLQPELDSFKEELDKYFKNHTSPDVDLGDISGINASVVNIQKEIDRLNEVAKNLNESLIDLQELGKYEQYIKGSGRENLYFQGGGGSGYIPEAPRDGQAYVRKDGEWVLLSTFLGHHHHHHHH

SEQ ID NO: 2381 - protein, 1281 aa, Artificial Sequence
  Description of Artificial Sequence: Synthetic polypeptide
MGILPSPGMPALLSLVSLLSVLLMGCVAETGTQCVNLTTRTQLPPAYTNSFTRGVYYPDKIFRSNVLHSTQDLFLPFFSNVTWFHALHVKGTNGTKRFDNPVLPFNDGVYFAAIEKSNIIRGWIFGTTLDSKTQSLLIVNNATNVVIRVCEFQFCENPFLGVYYHKNNKSWREEEWRWYSSANNCTFEYVSQPFLYDLNGKQGNFHHLREFVFKNIDGYFKIYSKWEPINLVRDLPQGFSALEPLMDLPIGINITHFQTFLSLSRSYRTPGDSSSGWTAGAAAYYVGYLQPRTFLLKYDENGYITDAVDCSLDPLSETKCKLKSFTVEKGIYQTSNFRVQPTYEIVRFPNITNECPFDEVFNATRFASVYNWNRQRISNCVADYSVLYNSASFSTFQCYGVSPTKLNDLCFTNVYADIFVIRGSEVRQIAPGQTGEIADYNYKLPDDFTGCVIAWNSNNLDSTVGGNYNYLYRLFRKSNMKPFERDISTEQYQAGCTPCNGVEGFNCYFPLQSYGFQPTNGVGYQPYRVVVLKFELLHAPATVCGPKDSTNLVKNKCVDYNFNGRTGTGVLTESNKKFLPFQQFGRDISDNLDAVRDPTTGEILCITPCSFGGVSVITPGTNTSNQVAVLYQDVNCTEVPNAIHSNQLRPTWRVYSTGSNVFQTRAGCLIGAEHVNNSYECDIPIGNGICASYQTQTNSPSGSGSVSSQSIIAYTMSLGAENTVAYSNNNIAIPTNFTISVQTEILPVSMTKVSVDCTMYICGDSTECLNLLSQYGSFCSQLERALNGIAREQDKNLLNVFAQVKQIYKTPPIKDFGGFNFSQILPDPSKPSKRSFIEDLLFNKVTLADLGFVKQYKDCLGDQAARDLICAQKYNGIMVLPPLLTDEMIAQYTASLLAGTITAGWTFGAGAALQIPFAMQMAYRFNGIGVQQNVLYENQKIIANQFNNAIGNIQDGLSTTASALSKLQDVVNQQAQALNELVKQLSSNFGAISSVINDIYNRLDPPEAQAQIDRLITGRLQSLQTYVTQQLIRATEIRASAQLAAEKMSECVKGQSNRYGFCGNGYHLMSFPQSAPHGVVFLHVTYVPTQFKNFTTAPGICHDGKAYFPREGVFVSNGTEWYITQRNFYEPRIITTDNTFVSGNCDVVIGIVNNTVYDPLQPELDSFKEELDKYFKNHTSPDVDLGDISGINASVVNIQKEIDRLNEVAKNLNESLIDLQELGKYEQYIKGSGRENLYFQGGGGSGYIPEAPRDGQAYVRKDGEWVLLSTFLGHHHHHHHH

SEQ ID NO: 2382 - protein, 1281 aa, Artificial Sequence
  Description of Artificial Sequence: Synthetic polypeptide
MGILPSPGMPALLSLVSLLSVLLMGCVAETGTQCVNLTTRTQLPPAYTNSFTRGVYYPDKVFRSSVLHSTQDLFLPFFSNVTWFHAIHVSGTNGTKRFDNPVLPFNDGVYFASTEKSNIIRGWIFGTTLDSKTQSLLIVNNATNVVIKVCEFQFCNDPFLGVYYHKNNKSWMESEFRVYSSANNCTFEYVSQPFLMDLEGKQGNFKNLREFVFKNIDGYFKIYSKHTPINLVRDLPQGFSALEPLVDLPIGINITRFQTLLALHRSYLTPGDSSSGWTAGAAAYYVGYLQPRTFLLKYNENGTITDAVDCALDPLSETKCTLKSFTVEKGIYQTSNFRVQPTESIVRFPNITNLCPFGEVFNATRFASVYAWNRKRISNCVADYSVLYNSASFSTFKCYGVSPTKLNDLCFTNVYADSFVIRGDEVRQIAPGQTGKIADYNYKLPDDFTGCVIAWNSNNLDSKVGGNYNYLYRLFRKSNLKPFERDISTEIYQAGSTPCNGVEGFNCYFPLQSYGFQPTNGVGYQPYRVVVLSFELLHAPATVCGPKKSTNLVKNKCVNFNFNGLTGTGVLTESNKKFLPFQQFGRDIADTTDAVRDPQTLEILDITPCSFGGVSVITPGTNTSNQVAVLYQDVNCTEVPVAIHADQLTPTWRVYSTGSNVFQTRAGCLIGAEHVNNSYECDIPIGAGICASYQTQTNSPSGAGSVASQSIIAYTMSLGAENSVAYSNNSIAIPTNFTISVTTEILPVSMTKTSVDCTMYICGDSSECSNLLLQYGSFCTQLNRALTGIAVEQDKNTQEVFAQVKQIYKTPPIKDFGGFNFSQILPDPSKPSKRSFIEDLLFNKVTLADAGFIKQYGDCLGDIAARDLICAQKFNGLTVLPPLLTDEMIAQYTSALLAGTITSGWTFGAGAALQIPFAMQMAYRFNGIGVTQNVLYENQKLIANQFNSAIGKIQDSLSSTASALGKLQDVVNQNAQALNTLVKQLSSNFGAISSVLNDILSRLDPPEAEVQIDRLITGRLQSLQTYVTQQLIRAAEIRASANLAATKMSECVLGQSKRVDFCGKGYHLMSFPQSAPHGVVFLHVTYVPAQEKNFTTAPAICHDGKAHFPREGVFVSNGTHWFVTQRNFYEPQIITTDNTFVSGNCDVVIGIVNNTVYDPLQPELDSFKEELDKYFKNHTSPDVDLGDISGINASVVNIQKEIDRLNEVAKNLNESLIDLQELGKYEQYIKGSGRENLYFQGGGGSGYIPEAPRDGQAYVRKDGEWVLLSTFLGHHHHHHHH

SEQ ID NO: 2383 - protein, 1281 aa, Artificial Sequence
  Description of Artificial Sequence: Synthetic polypeptide
MGILPSPGMPALLSLVSLLSVLLMGCVAETGTQCVNLTTRTQLPPAYTNSFTRGVYYPDKVFRSSVLHSTQDLFLPFFSNVTWFHAIHVSGTNGTKRFDNPVLPFNDGVYFASTEKSNIIRGWIFGTTLDSKTQSLLIVNNATNVVIKVCEFQFCNDPFLGVYYHKNNKSWMESEFRVYSSANNCTFEYVSQPFLMDLEGKQGNFKNLREFVFKNIDGYFKIYSKHTPINLVRDLPQGFSALEPLVDLPIGINITRFQTLLALHRSYLTPGDSSSGWTAGAAAYYVGYLQPRTFLLKYNENGTITDAVDCALDPLSETKCTLKSFTVEKGIYQTSNFRVQPTESIVRFPNITNLCPFGEVFNATRFASVYAWNRKRISNCVADYSVLYNSASFSTFKCYGVSPTKLNDLCFTNVYADSFVIRGDEVRQIAPGQTGKIADYNYKLPDDFTGCVIAWNSNNLDSKVGGNYNYLYRLFRKSNLKPFERDISTEIYQAGSTPCNGVEGFNCYFPLQSYGFQPTNGVGYQPYRVVVLSFELLHAPATVCGPKKSTNLVKNKCVNFNFNGLTGTGVLTESNKKFLPFQQFGRDIADTTDAVRDPQTLEILDITPCSFGGVSVITPGTNTSNQVAVLYQDVNCTEVPVAIHADQLTPTWRVYSTGSNVFQTRAGCLIGAEHVNNSYECDIPIGAGICASYQTQTNSPSGAGSVASQSIIAYTMSLGAENSVAYSNNSIAIPTNFTISVTTEILPVSMTKTSVDCTMYICGDSTECSNLLLQYGSFCTQLNRALTGIAVEQDKNTQEVFAQVKQIYKTPPIKDFGGFNFSQILPDPSKPSKRSFIEDLLFNKVTLADAGFIKQYGDCLGDIAARDLICAQKFNGLTVLPPLLTDEMIAQYTSALLAGTITSGWTFGAGAALQIPFAMQMAYRFNGIGVTQNVLYENQKLIANQFNSAIGKIQDSLSSTASALGKLQDVVNQNAQALNTLVKQLSSNFGAISSVLNDILSRLDPPEAEVQIDRLITGRLQSLQTYVTQQLIRAAEIRASANLAATKMSECVLGQSKRVDFCGKGYHLMSFPQSAPHGVVFLHVTYVPAQEKNFTTAPAICHDGKAHFPREGVFVSNGTHWFVTQRNFYEPQIITTDNTFVSGSCDVVIGIVNNTVYDPLQPELDSFKEELDKYFKNHTSPDVDLGDISGINASVVNIQKEIDRLNEVAKNLNESLIDLQELGKYEQYIKGSGRENLYFQGGGGSGYIPEAPRDGQAYVRKDGEWVLLSTFLGHHHHHHHH

SEQ ID NO: 2384 - protein, 1281 aa, Artificial Sequence
  Description of Artificial Sequence: Synthetic polypeptide
MGILPSPGMPALLSLVSLLSVLLMGCVAETGTQCVNLTTRTQLPPAYTNSFTRGVYYPDKVFRSSILHSTQDLFLPFFSNVTWFHAIHVSGTNGTKRFDNPVLPFNDGVYFASTEKSNIIRGWIFGTTLDSKTQSLLIVNNATNVVIKVCEFQFCNDPFLGVYYHKNNKSWMESEFRVYSSANNCTFEYVSQPFLMDLEGKQGNFKNLREFVFKNIDGYFKIYSKHTPINLVRDLPQGFSALEPLVDLPIGINITRFQTLLALHRSYLTPGDSSSGWTAGAAAYYVGYLQPRTFLLKYNENGTITDAVDCALDPLSETKCTLKSFTVEKGIYQTSNFRVQPTESIVRFPNITNLCPFGEVFNATRFASVYAWNRKRISNCVADYSVLYNSASFSTFKCYGVSPTKLNDLCFTNVYADSFVIRGDEVRQIAPGQTGKIADYNYKLPDDFTGCVIAWNSNNLDSKVGGNYNYLYRLFRKSNLKPFERDISTEIYQAGSTPCNGVEGFNCYFPLQSYGFQPTNGVGYQPYRVVVLSFELLHAPATVCGPKKSTNLVKNKCVNFNFNGLTGTGVLTESNKKFLPFQQFGRDIADTTDAVRDPQTLEILDITPCSFGGVSVITPGTNTSNQVAVLYQDVNCTEVPVAIHADQLTPTWRVYSTGSNVFQTRAGCLIGAEHVNNSYECDIPIGAGICASYQTQTNSPSGAGSVASQSIIAYTMSLGAENSVAYSNNSIAIPTNFTISVTTEILPVSMTKTSVDCTMYICGDSTECSNLLLQYGSFCTQLNRALTGIAVEQDKNTQEVFAQVKQIYKTPPIKDFGGFNFSQILPDPSKPSKRSFIEDLLFNKVTLADAGFIKQYGDCLGDIAARDLICAQKFNGLTVLPPLLTDEMIAQYTSALLAGTITSGWTFGAGAALQIPFAMQMAYRFNGIGVTQNVLYENQKLIANQFNSAIGKIQDSLSSTASALGKLQDVVNQNAQALNTLVKQLSSNFGAISSVLNDILSRLDPPEAEVQIDRLITGRLQSLQTYVTQQLIRAAEIRASANLAATKMSECVLGQSKRVDFCGKGYHLMSFPQSAPHGVVFLHVTYVPAQEKNFTTAPAICHDGKAHFPREGVFVSNGTHWFVTQRNFYEPQIITTDNTFVSGNCDVVIGIVNNTVYDPLQPELDSFKEELDKYFKNHTSPDVDLGDISGINASVVNIQKEIDRLNEVAKNLNESLIDLQELGKYEQYIKGSGRENLYFQGGGGSGYIPEAPRDGQAYVRKDGEWVLLSTFLGHHHHHHHH

SEQ ID NO: 2385 - protein, 1281 aa, Artificial Sequence
  Description of Artificial Sequence: Synthetic polypeptide
MGILPSPGMPALLSLVSLLSVLLMGCVAETGTQCVNLTTRTQLPPAYTNSFTRGVYYPDKVFRSSVLHSTQDLFLPFFSNVTWFHAIHVSGTNGTKRFDNPVLPFNDGVYFASTEKSNIIRGWIFGTTLDSKTQSLLIVNNATNVVIKVCEFQFCNDPFLGVYYHKNNKSWMESEFRVYSSANNCTFEYVSQPFLMDLEGKQGNFKNLREFVFKNIDGYFKIYSKHTPINLVRDLPQGFSALPPLVDLPIGINITRFQTLLALHRSYLTPGDSSSGWTAGAAAYYVGYLQPRTFLLKYNENGTITDAVDCALDPLSETKCTLKSFTVEKGIYQTSNFRVQPTESIVRFPNITNLCPFGEVFNATRFASVYAWNRKRISNCVADYSVLYNSASFSTFKCYGVSPTKLNDLCFTNVYADSFVIRGDEVRQIAPGQTGKIADYNYKLPDDFTGCVIAWNSNNLDSKVGGNYNYLYRLFRKSNLKPFERDISTEIYQAGSTPCNGVEGFNCYFPLQSYGFQPTNGVGYQPYRVVVLSFELLHAPATVCGPKKSTNLVKNKCVNFNFNGLTGTGVLTESNKKFLPFQQFGRDIADTTDAVRDPQTLEILDITPCSFGGVSVITPGTNTSNQVAVLYQDVNCTEVPVAIHADQLTPTWRVYSTGSNVFQTRAGCLIGAEHVNNSYECDIPIGAGICASYQTQTNSPSGAGSVASQSIIAYTMSLGAENSVAYSNNSIAIPTNFTISVTTEILPVSMTKTSVDCTMYICGDSTECSNLLLQYGSFCTQLNRALTGIAVEQDKNTQEVFAQVKQIYKTPPIKDFGGFNFSQILPDPSKPSKRSFIEDLLFNKVTLADAGFIKQYGDCLGDIAARDLICAQKFNGLTVLPPLLTDEMIAQYTSALLAGTITSGWTFGAGAALQIPFAMQMAYRFNGIGVTQNVLYENQKLIANQFNSAIGKIQDSLSSTASALGKLQDVVNQNAQALNTLVKQLSSNFGAISSVLNDILSRLDPPEAEVQIDRLITGRLQSLQTYVTQQLIRAAEIRASANLAATKMSECVLGQSKRVDFCGKGYHLMSFPQSAPHGVVFLHVTYVPAQEKNFTTAPAICHDGKAHFPREGVFVSNGTHWFVTQRNFYEPQIITTDNTFVSGNCDVVIGIVNNTVYDPLQPELDSFKEELDKYFKNHTSPDVDLGDISGINASVVNIQKEIDRLNEVAKNLNESLIDLQELGKYEQYIKGSGRENLYFQGGGGSGYIPEAPRDGQAYVRKDGEWVLLSTFLGHHHHHHHH

SEQ ID NO: 2386 - protein, 1281 aa, Artificial Sequence
  Description of Artificial Sequence: Synthetic polypeptide
MGILPSPGMPALLSLVSLLSVLLMGCVAETGTQCVNLTTRTQLPPAYTNSFTRGVYYPDKVFRSSVLHSTQDLFLPFFSNVTWFHAIHVSGTNGTKRFDNPVLPFNDGVYFASTEKSNIIRGWIFGTTLDSKTQSLLIVNNATNVVIKVCEFQFCNDPFLGVYYHKNNKSWMESEFRVYSSANNCTFEYVSQPFLMDLEGKQGNFKNLREFVFKNIDGYFKIYSKHTPINLVRDLPQGFSALEPLVDLPIGINITRFQTLLALHRSYLTPGDSSSGWTAGAAAYYVGYLQPRTFLLKYNENGTITDAVDCALDPLSETKCTLKSFTVEKGIYQTSNFRVQPTESIVRFPNITNLCPFGEVFNATRFASVYAWNRKRISNCVADYSVLYNSASFSTFKCYGVSPTKLNDLCFTNVYADSFVIRGDEVRQIAPGQTGKIADYNYKLPDDFTGCVIAWNSNNLDSKVGGNYNYLYRLFRKSNLKPFERDISTEIYQAGSTPCNGVEGFNCYFPLQSYGFQPTNGVGYQPYRVVVLSFELLHAPATVCGPKKSTNLVKNKCVNFNFNGLTGTGVLTESNKKFLPFQQFGRDIADTTDAVRDPQTLEILDITPCSFGGVSVITPGTNTSNQVAVLYQDVNCTEVPVAIHADQLTPTWRVYSTGSNVFQTRAGCLIGAEHVNNSYECDIPIGAGICASYQTQTNSPSGAGSVASQSIIAYTMSLGAENSVAYSNNSIAIPTNFTISVTTEILPVSMTKTSVDCTMYICGDSTECSNLLLQYGSFCTQLNRALRGIAVEQDKNTQEVFAQVKQIYKTPPIKDFGGFNFSQILPDPSKPSKRSFIEDLLFNKVTLADAGFIKQYGDCLGDIAARDLICAQKFNGLTVLPPLLTDEMIAQYTSALLAGTITSGWTFGAGAALQIPFAMQMAYRFNGIGVTQNVLYENQKLIANQFNSAIGKIQDSLSSTASALGKLQDVVNQNAQALNTLVKQLSSNFGAISSVLNDILSRLDPPEAEVQIDRLITGRLQSLQTYVTQQLIRAAEIRASANLAATKMSECVLGQSKRVDFCGKGYHLMSFPQSAPHGVVFLHVTYVPAQEKNFTTAPAICHDGKAHFPREGVFVSNGTHWFVTQRNFYEPQIITTDNTFVSGNCDVVIGIVNNTVYDPLQPELDSFKEELDKYFKNHTSPDVDLGDISGINASVVNIQKEIDRLNEVAKNLNESLIDLQELGKYEQYIKGSGRENLYFQGGGGSGYIPEAPRDGQAYVRKDGEWVLLSTFLGHHHHHHHH

SEQ ID NO: 2387 - protein, 1281 aa, Artificial Sequence
  Description of Artificial Sequence: Synthetic polypeptide
MGILPSPGMPALLSLVSLLSVLLMGCVAETGTQCVNLTTRTQLPPAYTNSFTRGVYYPDKVFRSSVLHSTQDLFLPFFSNVTWFHAIHVSGTNGTKRFDNPVLPFNDGVYFASTEKSNIIRGWIFGTTLDSKTQSLLIVNNATNVVIKVCEFQFCNDPFLGVYYHKNNKSWMESEFRVYSSANNCTFEYVSQPFLMDLEGKQGNFKNLREFVFKNIDGYFKIYSKHTPINLVRDLPQGFSALEPLVDLPIGINITRFQTLLALHRSYLTPGDSSSGWTAGAAAYYVGYLQPRTFLLKYNENGTITDAVDCALDPLSETKCTLKSFTVEKGIYQTSNFRVQPTESIVRFPNITNLCPFGEVFNATRFASVYAWNRKRISNCVADYSVLYNSASFSTFKCYGVSPTKLNDLCFTNVYADSFVIRGDEVRQIAPGQTGKIADYNYKLPDDFTGCVIAWNSNNLDSKVGGNYNYLYRLFRKSNLKPFERDISTEIYQAGSTPCNGVEGFNCYFPLQSYGFQPTNGVGYQPYRVVVLSFELLHAPATVCGPKKSTNLVKNKCVNFNFNGLTGTGVLTESNKKFLPFQQFGRDVADTTDAVRDPQTLEILDITPCSFGGVSVITPGTNTSNQVAVLYQDVNCTEVPVAIHADQLTPTWRVYSTGSNVFQTRAGCLIGAEHVNNSYECDIPIGAGICASYQTQTNSPSGAGSVASQSIIAYTMSLGAENSVAYSNNSIAIPTNFTISVTTEILPVSMTKTSVDCTMYICGDSTECSNLLLQYGSFCTQLNRALTGIAVEQDKNTQEVFAQVKQIYKTPPIKDFGGFNFSQILPDPSKPSKRSFIEDLLFNKVTLADAGFIKQYGDCLGDIAARDLICAQKFNGLTVLPPLLTDEMIAQYTSALLAGTITSGWTFGAGAALQIPFAMQMAYRFNGIGVTQNVLYENQKLIANQFNSAIGKIQDSLSSTASALGKLQDVVNQNAQALNTLVKQLSSNFGAISSVLNDILSRLDPPEAEVQIDRLITGRLQSLQTYVTQQLIRAAEIRASANLAATKMSECVLGQSKRVDFCGKGYHLMSFPQSAPHGVVFLHVTYVPAQEKNFTTAPAICHDGKAHFPREGVFVSNGTHWFVTQRNFYEPQIITTDNTFVSGNCDVVIGIVNNTVYDPLQPELDSFKEELDKYFKNHTSPDVDLGDISGINASVVNIQKEIDRLNEVAKNLNESLIDLQELGKYEQYIKGSGRENLYFQGGGGSGYIPEAPRDGQAYVRKDGEWVLLSTFLGHHHHHHHH

SEQ ID NO: 2388 - protein, 1281 aa, Artificial Sequence
  Description of Artificial Sequence: Synthetic polypeptide
MGILPSPGMPALLSLVSLLSVLLMGCVAETGTQCVNLTTRTQLPPAYTNSFTRGVYYPDKVFRSSVLHSTQDLFLPFFSNVTWFHAIHVSGTNGTKRFDNPVLPFNDGVYFASTEKSNIIRGWIFGTTLDGKTQSLLIVNNATNVVIKVCEFQFCNDPFLGVYYHKNNKSWMESEFRVYSSANNCTFEYVSQPFLMDLEGKQGNFKNLREFVFKNIDGYFKIYSKHTPINLVRDLPQGFSALEPLVDLPIGINITRFQTLLALHRSYLTPGDSSSGWTAGAAAYYVGYLQPRTFLLKYNENGTITDAVDCALDPLSETKCTLKSFTVEKGIYQTSNFRVQPTESIVRFPNITNLCPFGEVFNATRFASVYAWNRKRISNCVADYSVLYNSASFSTFKCYGVSPTKLNDLCFTNVYADSFVIRGDEVRQIAPGQTGKIADYNYKLPDDFTGCVIAWNSNNLDSKVGGNYNYLYRLFRKSNLKPFERDISTEIYQAGSTPCNGVEGFNCYFPLQSYGFQPTNGVGYQPYRVVVLSFELLHAPATVCGPKKSTNLVKNKCVNFNFNGLTGTGVLTESNKKFLPFQQFGRDIADTTDAVRDPQTLEILDITPCSFGGVSVITPGTNTSNQVAVLYQDVNCTEVPVAIHADQLTPTWRVYSTGSNVFQTRAGCLIGAEHVNNSYECDIPIGAGICASYQTQTNSPSGAGSVASQSIIAYTMSLGAENSVAYSNNSIAIPTNFTISVTTEILPVSMTKTSVDCTMYICGDSTECSNLLLQYGSFCTQLNRALTGIAVEQDKNTQEVFAQVKQIYKTPPIKDFGGFNFSQILPDPSKPSKRSFIEDLLFNKVTLADAGFIKQYGDCLGDIAARDLICAQKFNGLTVLPPLLTDEMIAQYTSALLAGTITSGWTFGAGAALQIPFAMQMAYRFNGIGVTQNVLYENQKLIANQFNSAIGKIQDSLSSTASALGKLQDVVNQNAQALNTLVKQLSSNFGAISSVLNDILSRLDPPEAEVQIDRLITGRLQSLQTYVTQQLIRAAEIRASANLAATKMSECVLGQSKRVDFCGKGYHLMSFPQSAPHGVVFLHVTYVPAQEKNFTTAPAICHDGKAHFPREGVFVSNGTHWFVTQRNFYEPQIITTDNTFVSGNCDVVIGIVNNTVYDPLQPELDSFKEELDKYFKNHTSPDVDLGDISGINASVVNIQKEIDRLNEVAKNLNESLIDLQELGKYEQYIKGSGRENLYFQGGGGSGYIPEAPRDGQAYVRKDGEWVLLSTFLGHHHHHHHH

SEQ ID NO: 2389 - protein, 1281 aa, Artificial Sequence
  Description of Artificial Sequence: Synthetic polypeptide
MGILPSPGMPALLSLVSLLSVLLMGCVAETGTQCVNLTTRTQLPPAYTNSFTRGVYYPDKVFRSSVLHSTQDLFLPFFSNVTWFHAIHVSGTNGTKRFDNPVLPFNDGVYFASTEKSNIIRGWIFGTTLDSKTQSLLIVNNATNVVIKVCEFQFCNDPFLGVYYHKNNKSWMESEFRVYSSANNCTFEYVSQPFLMDLEGKQGNFKNLREFVFKNIDGYFKIYSKHTPINLVRDLPQGFSALEPLVDLPIGINITRFQTLLALHRSYLTPGDSSSGWTAGAAAYYVGYLQPRTFLLKYNENGTITDAVDCALDPLSETKCTLKSFTVEKGIYQTSNFRVQPTESIVRFPNITNLCPFGEVFNATRFASVYAWNRKRISNCVADYSVLYNSASFSTFKCYGVSPTKLNDLCFTNVYADSFVIRGDEVRQIAPGQTGKIADYNYKLPDDFTGCVIAWNSNNLDSKVGGNYNYLYRLFRKSNLKPFERDISTEIYQAGSTPCNGVEGFNCYFPLQSYGFQPTNGVGYQPYRVVVLSFELLHAPATVCGPKKSTNLVKNKCVNFNFNGLTGTGVLTESNKKFLPFQQFGRDIADTTDAVRDPQTLEILDITPCSFGGVSVITPGTNTSNQVAVLYQDVNCTEVPVAIHADQLRPTWRVYSTGSNVFQTRAGCLIGAEHVNNSYECDIPIGAGICASYQTQTNSPSGAGSVASQSIIAYTMSLGAENSVAYSNNSIAIPTNFTISVTTEILPVSMTKTSVDCTMYICGDSTECSNLLLQYGSFCTQLNRALTGIAVEQDKNTQEVFAQVKQIYKTPPIKDFGGFNFSQILPDPSKPSKRSFIEDLLFNKVTLADAGFIKQYGDCLGDIAARDLICAQKFNGLTVLPPLLTDEMIAQYTSALLAGTITSGWTFGAGAALQIPFAMQMAYRFNGIGVTQNVLYENQKLIANQFNSAIGKIQDSLSSTASALGKLQDVVNQNAQALNTLVKQLSSNFGAISSVLNDILSRLDPPEAEVQIDRLITGRLQSLQTYVTQQLIRAAEIRASANLAATKMSECVLGQSKRVDFCGKGYHLMSFPQSAPHGVVFLHVTYVPAQEKNFTTAPAICHDGKAHFPREGVFVSNGTHWFVTQRNFYEPQIITTDNTFVSGNCDVVIGIVNNTVYDPLQPELDSFKEELDKYFKNHTSPDVDLGDISGINASVVNIQKEIDRLNEVAKNLNESLIDLQELGKYEQYIKGSGRENLYFQGGGGSGYIPEAPRDGQAYVRKDGEWVLLSTFLGHHHHHHHH

SEQ ID NO: 2390 - protein, 1281 aa, Artificial Sequence
  Description of Artificial Sequence: Synthetic polypeptide
MGILPSPGMPALLSLVSLLSVLLMGCVAETGTQCVNLTTRTQLPPAYTNSFTRGVYYPDKVFRSSVLHSTQDLFLPFFSNVTWFHAIHVSGTNGTKRFDNPVLPFNDGVYFASTEKSNIIRGWIFGTTLDSKTQSLLIVNNATNVVIKVCEFQFCNDPFLGVYYHKNNKSWMESEFRVYSSANNCTFEYVSQPFLMDLEGKQGNFKNLREFVFKNIDGYFKIYSKHTPINLVRDLPQGFSALEPLVDLPIGINITRFQTLLALHRSYLTPGDSSSGWTAGAAAYYVGYLQPRTFLLKYNENGTITDAVDCAHDPLSETKCTLKSFTVEKGIYQTSNFRVQPTESIVRFPNITNLCPFGEVFNATRFASVYAWNRKRISNCVADYSVLYNSASFSTFKCYGVSPTKLNDLCFTNVYADSFVIRGDEVRQIAPGQTGKIADYNYKLPDDFTGCVIAWNSNNLDSKVGGNYNYLYRLFRKSNLKPFERDISTEIYQAGSTPCNGVEGFNCYFPLQSYGFQPTNGVGYQPYRVVVLSFELLHAPATVCGPKKSTNLVKNKCVNFNFNGLTGTGVLTESNKKFLPFQQFGRDIADTTDAVRDPQTLEILDITPCSFGGVSVITPGTNTSNQVAVLYQDVNCTEVPVAIHADQLTPTWRVYSTGSNVFQTRAGCLIGAEHVNNSYECDIPIGAGICASYQTQTNSPSGAGSVASQSIIAYTMSLGAENSVAYSNNSIAIPTNFTISVTTEILPVSMTKTSVDCTMYICGDSTECSNLLLQYGSFCTQLNRALTGIAVEQDKNTQEVFAQVKQIYKTPPIKDFGGFNFSQILPDPSKPSKRSFIEDLLFNKVTLADAGFIKQYGDCLGDIAARDLICAQKFNGLTVLPPLLTDEMIAQYTSALLAGTITSGWTFGAGAALQIPFAMQMAYRFNGIGVTQNVLYENQKLIANQFNSAIGKIQDSLSSTASALGKLQDVVNQNAQALNTLVKQLSSNFGAISSVLNDILSRLDPPEAEVQIDRLITGRLQSLQTYVTQQLIRAAEIRASANLAATKMSECVLGQSKRVDFCGKGYHLMSFPQSAPHGVVFLHVTYVPAQEKNFTTAPAICHDGKAHFPREGVFVSNGTHWFVTQRNFYEPQIITTDNTFVSGNCDVVIGIVNNTVYDPLQPELDSFKEELDKYFKNHTSPDVDLGDISGINASVVNIQKEIDRLNEVAKNLNESLIDLQELGKYEQYIKGSGRENLYFQGGGGSGYIPEAPRDGQAYVRKDGEWVLLSTFLGHHHHHHHH

SEQ ID NO: 2391 - protein, 1281 aa, Artificial Sequence
  Description of Artificial Sequence: Synthetic polypeptide
MGILPSPGMPALLSLVSLLSVLLMGCVAETGTQCVNLTTRTQLPPAYTNSFTRGVYYPDKVFRSSVLHSTQDLFLPFFSNVTWFHAIHVSGTNGTKRFDNPVLPFNDGVYFASTEKSNIIRGWIFGTTLDSKTQSLLIVNNATNVVIKVCEFQFCNDPFLGVYYHKNNKSWMESEFRVYSSANNCTFEYVSQPFLMDLEGKQGNFKNLREFVFKNIDGYFKIYSKHTPINLVRDLPQGFSALEPLVDLPIGINITRFQTLLALHRSYLTPGDSSSGWTAGAAAYYVGYLQPRTFLLKYNENGTITDAVDCALDPLSETKCTLKSFTVEKGIYQTSNFRVQPTESIVRFPNITNLCPFGEVFNATRFASVYAWNRKRISNCVADYSVLYNSASFSTFKCYGVSPTKLNDLCFTNVYADSFVIRGDEVRQIAPGQTGKIADYNYKLPDDFTGCVIAWNSNNLDSKVGGNYNYLYRLFRKSNLKPFERDISTEIYQAGSTPCNGVEGFNCYFPLQSYGFQPTNGVGYQPYRVVVLSFELLHAPATVCGPKKSTNLVKNKCVNFNFNGLTGTGVLTESNKKFLPFQQFGRDIADTTDAVRDPQTLEILDITPCSFGGVSVITPGTNTSNQVAVLYQDVNCTEVPHAIHADQLTPTWRVYSTGSNVFQTRAGCLIGAEHVNNSYECDIPIGAGICASYQTQTNSPSGAGSVASQSIIAYTMSLGAENSVAYSNNSIAIPTNFTISVTTEILPVSMTKTSVDCTMYICGDSTECSNLLLQYGSFCTQLNRALTGIAVEQDKNTQEVFAQVKQIYKTPPIKDFGGFNFSQILPDPSKPSKRSFIEDLLFNKVTLADAGFIKQYGDCLGDIAARDLICAQKFNGLTVLPPLLTDEMIAQYTSALLAGTITSGWTFGAGAALQIPFAMQMAYRFNGIGVTQNVLYENQKLIANQFNSAIGKIQDSLSSTASALGKLQDVVNQNAQALNTLVKQLSSNFGAISSVLNDILSRLDPPEAEVQIDRLITGRLQSLQTYVTQQLIRAAEIRASANLAATKMSECVLGQSKRVDFCGKGYHLMSFPQSAPHGVVFLHVTYVPAQEKNFTTAPAICHDGKAHFPREGVFVSNGTHWFVTQRNFYEPQIITTDNTFVSGNCDVVIGIVNNTVYDPLQPELDSFKEELDKYFKNHTSPDVDLGDISGINASVVNIQKEIDRLNEVAKNLNESLIDLQELGKYEQYIKGSGRENLYFQGGGGSGYIPEAPRDGQAYVRKDGEWVLLSTFLGHHHHHHHH

SEQ ID NO: 2392 - protein, 1281 aa, Artificial Sequence
  Description of Artificial Sequence: Synthetic polypeptide
MGILPSPGMPALLSLVSLLSVLLMGCVAETGTQCVNLTTRTQLPPAYTNSFTRGVYYPDKVFRSSVLHSTQDLFLPFFSNVTWFHAIHVSGTNGTKRFDNPVLPFNDGVYFASTEKSNIIRGWIFGTTLDSKTQSLLIVNNATNVVIKVCEFQFCNDPFLGVYYHKNNKSWMESEFRVYSSANNCTFEYVSQPFLMDLEGKQGNFKNLREFVFKNIDGYFKIYSKHTPINLVRDLPQGFSALEPLVNLPIGINITRFQTLLALHRSYLTPGDSSSGWTAGAAAYYVGYLQPRTFLLKYNENGTITDAVDCALDPLSETKCTLKSFTVEKGIYQTSNFRVQPTESIVRFPNITNLCPFGEVFNATRFASVYAWNRKRISNCVADYSVLYNSASFSTFKCYGVSPTKLNDLCFTNVYADSFVIRGDEVRQIAPGQTGKIADYNYKLPDDFTGCVIAWNSNNLDSKVGGNYNYLYRLFRKSNLKPFERDISTEIYQAGSTPCNGVEGFNCYFPLQSYGFQPTNGVGYQPYRVVVLSFELLHAPATVCGPKKSTNLVKNKCVNFNFNGLTGTGVLTESNKKFLPFQQFGRDIADTTDAVRDPQTLEILDITPCSFGGVSVITPGTNTSNQVAVLYQDVNCTEVPVAIHADQLTPTWRVYSTGSNVFQTRAGCLIGAEHVNNSYECDIPIGAGICASYQTQTNSPSGAGSVASQSIIAYTMSLGAENSVAYSNNSIAIPTNFTISVTTEILPVSMTKTSVDCTMYICGDSTECSNLLLQYGSFCTQLNRALTGIAVEQDKNTQEVFAQVKQIYKTPPIKDFGGFNFSQILPDPSKPSKRSFIEDLLFNKVTLADAGFIKQYGDCLGDIAARDLICAQKFNGLTVLPPLLTDEMIAQYTSALLAGTITSGWTFGAGAALQIPFAMQMAYRFNGIGVTQNVLYENQKLIANQFNSAIGKIQDSLSSTASALGKLQDVVNQNAQALNTLVKQLSSNFGAISSVLNDILSRLDPPEAEVQIDRLITGRLQSLQTYVTQQLIRAAEIRASANLAATKMSECVLGQSKRVDFCGKGYHLMSFPQSAPHGVVFLHVTYVPAQEKNFTTAPAICHDGKAHFPREGVFVSNGTHWFVTQRNFYEPQIITTDNTFVSGNCDVVIGIVNNTVYDPLQPELDSFKEELDKYFKNHTSPDVDLGDISGINASVVNIQKEIDRLNEVAKNLNESLIDLQELGKYEQYIKGSGRENLYFQGGGGSGYIPEAPRDGQAYVRKDGEWVLLSTFLGHHHHHHHH

SEQ ID NO: 2393 - protein, 1281 aa, Artificial Sequence
  Description of Artificial Sequence: Synthetic polypeptide
MGILPSPGMPALLSLVSLLSVLLMGCVAETGTQCVNLTTRTQLPPAYTNSFTRGVYYPDKVFRSSVLHSTQDLFLPFFSNVTWFHAIHVSGTNGTKRFDNPVLPFNDGVYFASTEKSNIIRGWIFGTTLDSKTQSLLIVNNATNVVIKVCEFQFCNDPFLGVYYHKNNKSWMESEFRVYSSANNCTFEYVSQPFLMDLEGKQGNFKNLREFVFKNIDGYFKIYSKHTPINLVRDLPQGFSALEPLVDLPIGINITRFQTLLALHRSYLTPGDSSSGWTAGSAAYYVGYLQPRTFLLKYNENGTITDAVDCALDPLSETKCTLKSFTVEKGIYQTSNFRVQPTESIVRFPNITNLCPFGEVFNATRFASVYAWNRKRISNCVADYSVLYNSASFSTFKCYGVSPTKLNDLCFTNVYADSFVIRGDEVRQIAPGQTGKIADYNYKLPDDFTGCVIAWNSNNLDSKVGGNYNYLYRLFRKSNLKPFERDISTEIYQAGSTPCNGVEGFNCYFPLQSYGFQPTNGVGYQPYRVVVLSFELLHAPATVCGPKKSTNLVKNKCVNFNFNGLTGTGVLTESNKKFLPFQQFGRDIADTTDAVRDPQTLEILDITPCSFGGVSVITPGTNTSNQVAVLYQDVNCTEVPVAIHADQLTPTWRVYSTGSNVFQTRAGCLIGAEHVNNSYECDIPIGAGICASYQTQTNSPSGAGSVASQSIIAYTMSLGAENSVAYSNNSIAIPTNFTISVTTEILPVSMTKTSVDCTMYICGDSTECSNLLLQYGSFCTQLNRALTGIAVEQDKNTQEVFAQVKQIYKTPPIKDFGGFNFSQILPDPSKPSKRSFIEDLLFNKVTLADAGFIKQYGDCLGDIAARDLICAQKFNGLTVLPPLLTDEMIAQYTSALLAGTITSGWTFGAGAALQIPFAMQMAYRFNGIGVTQNVLYENQKLIANQFNSAIGKIQDSLSSTASALGKLQDVVNQNAQALNTLVKQLSSNFGAISSVLNDILSRLDPPEAEVQIDRLITGRLQSLQTYVTQQLIRAAEIRASANLAATKMSECVLGQSKRVDFCGKGYHLMSFPQSAPHGVVFLHVTYVPAQEKNFTTAPAICHDGKAHFPREGVFVSNGTHWFVTQRNFYEPQIITTDNTFVSGNCDVVIGIVNNTVYDPLQPELDSFKEELDKYFKNHTSPDVDLGDISGINASVVNIQKEIDRLNEVAKNLNESLIDLQELGKYEQYIKGSGRENLYFQGGGGSGYIPEAPRDGQAYVRKDGEWVLLSTFLGHHHHHHHH

SEQ ID NO: 2394 - protein, 1281 aa, Artificial Sequence
  Description of Artificial Sequence: Synthetic polypeptide
MGILPSPGMPALLSLVSLLSVLLMGCVAETGTQCVNLTTRTQLPPAYTNSFTRGVYYPDKVFRSSVLHSTQDLFLPFFSNVTWFHAIHVSGTNGTKRFDNPVLPFNDGVYFASTEKSNIIRGWIFGTTLDSKTQSLLIVNNATNVVIKVCEFQFCNDPFLGVYYHKNNKSWMESEFRVYSSANNCTFEYVSDPFLMDLEGKQGNFKNLREFVFKNIDGYFKIYSKHTPINLVRDLPQGFSALEPLVDLPIGINITRFQTLLALHRSYLTPGDSSSGWTAGAAAYYVGYLQPRTFLLKYNENGTITDAVDCALDPLSETKCTLKSFTVEKGIYQTSNFRVQPTESIVRFPNITNLCPFGEVFNATRFASVYAWNRKRISNCVADYSVLYNSASFSTFKCYGVSPTKLNDLCFTNVYADSFVIRGDEVRQIAPGQTGKIADYNYKLPDDFTGCVIAWNSNNLDSKVGGNYNYLYRLFRKSNLKPFERDISTEIYQAGSTPCNGVEGFNCYFPLQSYGFQPTNGVGYQPYRVVVLSFELLHAPATVCGPKKSTNLVKNKCVNFNFNGLTGTGVLTESNKKFLPFQQFGRDIADTTDAVRDPQTLEILDITPCSFGGVSVITPGTNTSNQVAVLYQDVNCTEVPVAIHADQLTPTWRVYSTGSNVFQTRAGCLIGAEHVNNSYECDIPIGAGICASYQTQTNSPSGAGSVASQSIIAYTMSLGAENSVAYSNNSIAIPTNFTISVTTEILPVSMTKTSVDCTMYICGDSTECSNLLLQYGSFCTQLNRALTGIAVEQDKNTQEVFAQVKQIYKTPPIKDFGGFNFSQILPDPSKPSKRSFIEDLLFNKVTLADAGFIKQYGDCLGDIAARDLICAQKFNGLTVLPPLLTDEMIAQYTSALLAGTITSGWTFGAGAALQIPFAMQMAYRFNGIGVTQNVLYENQKLIANQFNSAIGKIQDSLSSTASALGKLQDVVNQNAQALNTLVKQLSSNFGAISSVLNDILSRLDPPEAEVQIDRLITGRLQSLQTYVTQQLIRAAEIRASANLAATKMSECVLGQSKRVDFCGKGYHLMSFPQSAPHGVVFLHVTYVPAQEKNFTTAPAICHDGKAHFPREGVFVSNGTHWFVTQRNFYEPQIITTDNTFVSGNCDVVIGIVNNTVYDPLQPELDSFKEELDKYFKNHTSPDVDLGDISGINASVVNIQKEIDRLNEVAKNLNESLIDLQELGKYEQYIKGSGRENLYFQGGGGSGYIPEAPRDGQAYVRKDGEWVLLSTFLGHHHHHHHH

SEQ ID NO: 2395 - DNA, 735 bp, Artificial Sequence
  Description of Artificial Sequence: Synthetic polynucleotide
atgggcatcctgccaagcccaggaatgcccgccctgctgtctctggtgagcctgctgtccgtgctgctgatgggatgcgtggcagagacaggcacaaggttccctaacatcaccaatctgtgcccattcgacgaggtgtttaacgccacacgctttgcctccgtgtatgcctggaaccggaagagaatctctaattgcgtggccgactatagcgtgctgtacaatagcgcctccttctctacctttaagtgctatggcgtgagccccaccaagctgaacgatctgtgcttcacaaacgtgtacgccgactcctttgtgatccggggcgatgaagtgagacagatcgcaccaggacagaccggaaagatcgcagactacaactataagctgcctgacgatttcacaggctgcgtgatcgcctggaatagcaacaatctggattccaaagtgggcggcaactacaattatctgtacaggctgttccgcaagtccaacctgaagccatttgagcgggacatctccaccgagatctaccaggccggctctacaccctgcaacggcgtggagggcttcaattgttattttcccctgcagtcttacggcttccagcctacaaatggcgtgggctatcagccataccgggtggtggtgctgtcttttgagctgctgcacgcaccagcaaccgtgtgcggccccaagaagagcacacatcatcaccaccaccaccaccactga

SEQ ID NO: 2396 - DNA, 735 bp, Artificial Sequence
  Description of Artificial Sequence: Synthetic polynucleotide
atgggcatcctgccaagcccaggaatgcccgccctgctgtctctggtgagcctgctgtccgtgctgctgatgggatgcgtggcagagacaggcacaaggttccctaacatcaccaatctgtgcccattcggcgaggtgtttaacgccacacgctttgcctccgtgtatgcctggaaccggaagagaatctctaattgcgtggccgactatagcgtgctgtacaatagcgcctccttctctacctttaagtgctatggcgtgagccccaccaagctgaacgatctgtgcttcacaaacgtgtacgccgactcctttgtgatccggggcgatgaagtgagacagatcgcaccaggacagaccggaaagatcgcagactacaactataagctgcctgacgatttcacaggctgcgtgatcgcctggaatagcaacaatctggattccaaagtgggcggcaactaccaatatctgtacaggctgttccgcaagtccaacctgaagccatttgagcgggacatctccaccgagatctaccaggccggctctacaccctgcaacggcgtggagggcttcaattgttattttcccctgcagtcttacggcttccagcctacaaatggcgtgggctatcagccataccgggtggtggtgctgtcttttgagctgctgcacgcaccagcaaccgtgtgcggccccaagaagagcacacatcatcaccaccaccaccaccactga

SEQ ID NO: 2397 - DNA, 735 bp, Artificial Sequence
  Description of Artificial Sequence: Synthetic polynucleotide
atgggcatcctgccaagcccaggaatgcccgccctgctgtctctggtgagcctgctgtccgtgctgctgatgggatgcgtggcagagacaggcacaaggttccctaacatcaccaatctgtgcccattcggcgaggtgtttaacgccacacgctttgcctccgtgtatgcctggaaccggaagagaatctctaattgcgtggccgactatagcgtgctgtacaatagcgcctccttctctacctttaagtgctatggcgtgagccccaccaagctgaacgatctgtgcttcacaaacgtgtacgccgactcctttgtgatccggggcgatgaagtgagacagatcgcaccaggacagaccggaaagatcgcagactacaactataagctgcctgacgatttcacaggctgcgtgatcgcctggaatagcaacaatctggattccaaagtgggcggcaactacaattatctgtacaggctgttccgcaagtccaacctgaagccatttgagcgggacatctccaccgagatctaccaggccggctctacaccctgcaacggcgtggagggcttcaattgttatgttcccctgcagtcttacggcttccagcctacaaatggcgtgggctatcagccataccgggtggtggtgctgtcttttgagctgctgcacgcaccagcaaccgtgtgcggccccaagaagagcacacatcatcaccaccaccaccaccactga

SEQ ID NO: 2398 - DNA, 735 bp, Artificial Sequence
  Description of Artificial Sequence: Synthetic polynucleotide
atgggcatcctgccaagcccaggaatgcccgccctgctgtctctggtgagcctgctgtccgtgctgctgatgggatgcgtggcagagacaggcacaaggttccctaacatcaccaatctgtgcccattcggcgaggtgtttaacgccacacgctttgcctccgtgtatgcctggaaccggaagagaatctctaattgcgtggccgactatagcgtgctgtacaatagcgcctccttctctacctttaagtgctatggcgtgagccccaccaagctgaacgatctgtgcttcacaaacgtgtacgccgactcctttgtgatccggggcgatgaagtgagacagatcgcaccaggacagaccggaaagatcgcagactacaactataagctgcctgacgatttcacaggctgcgtgatcgcctggaatagcaacaatctggattccaaagtgggcggcaactacaattatctgtacaggctgttccgcaagtccaacctgaagccatttgagcgggacatctccaccgagatctaccaggccggctctacaccctgcaacggcgtggagggcttcaattgttataatcccctgcagtcttacggcttccagcctacaaatggcgtgggctatcagccataccgggtggtggtgctgtcttttgagctgctgcacgcaccagcaaccgtgtgcggccccaagaagagcacacatcatcaccaccaccaccaccactga

SEQ ID NO: 2399 - DNA, 735 bp, Artificial Sequence
  Description of Artificial Sequence: Synthetic polynucleotide
atgggcatcctgccaagcccaggaatgcccgccctgctgtctctggtgagcctgctgtccgtgctgctgatgggatgcgtggcagagacaggcacaaggttccctaacatcaccaatctgtgcccattcggcgaggtgtttaacgccacacgctttgcctccgtgtatgcctggaaccggaagagaatctctaattgcgtggccgactatagcgtgctgtacaatagcgcctccttctctacctttaagtgctatggcgtgagccccaccaagctgaacgatctgtgcttcacaaacgtgtacgccgactcctttgtgatccggggcgatgaagtgagacagatcgcaccaggacagaccggaaagatcgcagactacaactataagctgcctgacgatttcacaggctgcgtgatcgcctggaatagcaacaatctggattccaaagtgggcggcaactacaattatctgtacaggctgttccgcaagtccaacctgaagccatttgagcgggacatctccaccgagatctaccaggccggctctgcgccctgcaacggcgtggagggcttcaattgttattttcccctgcagtcttacggcttccagcctacaaatggcgtgggctatcagccataccgggtggtggtgctgtcttttgagctgctgcacgcaccagcaaccgtgtgcggccccaagaagagcacacatcatcaccaccaccaccaccactga

SEQ ID NO: 2400 - DNA, 735 bp, Artificial Sequence
  Description of Artificial Sequence: Synthetic polynucleotide
atgggcatcctgccaagcccaggaatgcccgccctgctgtctctggtgagcctgctgtccgtgctgctgatgggatgcgtggcagagacaggcacaaggttccctaacatcaccaatctgtgcccattcggcgaggtgtttaacgccacacgctttgcctccgtgtatgcctggaaccggaagagaatctctaattgcgtggccgactatagcgtgctgtacaatagcgcctccttctctacctttaagtgctatggcgtgagccccaccaagctgaacgatctgtgcttctcgaacgtgtacgccgactcctttgtgatccggggcgatgaagtgagacagatcgcaccaggacagaccggaaagatcgcagactacaactataagctgcctgacgatttcacaggctgcgtgatcgcctggaatagcaacaatctggattccaaagtgggcggcaactacaattatctgtacaggctgttccgcaagtccaacctgaagccatttgagcgggacatctccaccgagatctaccaggccggctctacaccctgcaacggcgtggagggcttcaattgttattttcccctgcagtcttacggcttccagcctacaaatggcgtgggctatcagccataccgggtggtggtgctgtcttttgagctgctgcacgcaccagcaaccgtgtgcggccccaagaagagcacacatcatcaccaccaccaccaccactga

SEQ ID NO: 2401 - DNA, 735 bp, Artificial Sequence
  Description of Artificial Sequence: Synthetic polynucleotide
atgggcatcctgccaagcccaggaatgcccgccctgctgtctctggtgagcctgctgtccgtgctgctgatgggatgcgtggcagagacaggcacaaggttccctaacatcaccaatctgtgcccattcggcgaggtgtttaacgccacacgctttgcctccgtgtatgcctggaaccggaagagaatctctaattgcgtggccgactatagcgtgctgtacaatagcgcctccttctctacctttaagtgctatggcgtgagccccaccaagctgaacgatctgtgcttcacaaacgtgtacgccgactcctttgtgatccggggcgatgaagtgagacagatcgcaccaggacagaccggaaagatcgcagactacaactataagctgcctgacgatttcacaggctgcgtgatcgcctggaatagcaacaatctggattccaaagtgggcggcaactacaattatctgtacaggctgttccgcaagtccaacctgaagccatttgagcgggacatctccaccgagatctaccaggccggctctacaccctgcaacggcgtggagggcttcaattgttatgcgcccctgcagtcttacggcttccagcctacaaatggcgtgggctatcagccataccgggtggtggtgctgtcttttgagctgctgcacgcaccagcaaccgtgtgcggccccaagaagagcacacatcatcaccaccaccaccaccactga

SEQ ID NO: 2402 - DNA, 735 bp, Artificial Sequence
  Description of Artificial Sequence: Synthetic polynucleotide
atgggcatcctgccaagcccaggaatgcccgccctgctgtctctggtgagcctgctgtccgtgctgctgatgggatgcgtggcagagacaggcacaaggttccctaacatcaccaatctgtgcccattcggcgaggtgtttaacgccacacgctttgcctccgtgtatgcctggaaccggaagagaatctctaattgcgtggccgactatagcgtgctgtacaatagcgcctccttctctacctttaagtgctatggcgtgagccccaccaagctgaacgatctgtgcttcacaaacgtgtacgccgactcctttgtgatccggggcgatgaagtgagacaggtcgcaccaggacagaccggaaagatcgcagactacaactataagctgcctgacgatttcacaggctgcgtgatcgcctggaatagcaacaatctggattccaaagtgggcggcaactacaattatctgtacaggctgttccgcaagtccaacctgaagccatttgagcgggacatctccaccgagatctaccaggccggctctacaccctgcaacggcgtggagggcttcaattgttattttcccctgcagtcttacggcttccagcctacaaatggcgtgggctatcagccataccgggtggtggtgctgtcttttgagctgctgcacgcaccagcaaccgtgtgcggccccaagaagagcacacatcatcaccaccaccaccaccactga

SEQ ID NO: 2403 - DNA, 735 bp, Artificial Sequence
  Description of Artificial Sequence: Synthetic polynucleotide
atgggcatcctgccaagcccaggaatgcccgccctgctgtctctggtgagcctgctgtccgtgctgctgatgggatgcgtggcagagacaggcacaaggttccctaacatcaccaatctgtgcccattcggcgaggtgtttaacgccacacgctttgcctccgtgtatgcctggaaccggaaggttatctctaattgcgtggccgactatagcgtgctgtacaatagcgcctccttctctacctttaagtgctatggcgtgagccccaccaagctgaacgatctgtgcttcacaaacgtgtacgccgactcctttgtgatccggggcgatgaagtgagacagatcgcaccaggacagaccggaaagatcgcagactacaactataagctgcctgacgatttcacaggctgcgtgatcgcctggaatagcaacaatctggattccaaagtgggcggcaactacaattatctgtacaggctgttccgcaagtccaacctgaagccatttgagcgggacatctccaccgagatctaccaggccggctctacaccctgcaacggcgtggagggcttcaattgttattttcccctgcagtcttacggcttccagcctacaaatggcgtgggctatcagccataccgggtggtggtgctgtcttttgagctgctgcacgcaccagcaaccgtgtgcggccccaagaagagcacacatcatcaccaccaccaccaccactga

SEQ ID NO: 2404 - DNA, 735 bp, Artificial Sequence
  Description of Artificial Sequence: Synthetic polynucleotide
atgggcatcctgccaagcccaggaatgcccgccctgctgtctctggtgagcctgctgtccgtgctgctgatgggatgcgtggcagagacaggcacaaggttccctaacatcaccaatctgtgcccattcggcgaggtgtttaacgccacacgctttgcctccgtgtatgcctggaaccggaagagaatctctaattgcgtggccgactatagcgtgctgtacaatagcgcctccttctctacctttaagtgctatggcgtgagccccaccaagctgaacgatctgtgcttcacaaacgtgtacgccgactcctttgtgatccggggcgatgaagtgagacagatcgcaccaggacagaccggaaagatcgcagactacaactataagctgcctgacgatttcacaggctgcgtgatcgcctggaatagcaacaatctggattccaaagtgggcggcaactacaattatctgtacaggctgttccgcaagtccaacctgaagccatttgagcgggacatctccaccgagatctaccaggccggctctacaccctgcaacggcgtgcgtggcttcaattgttattttcccctgcagtcttacggcttccagcctacaaatggcgtgggctatcagccataccgggtggtggtgctgtcttttgagctgctgcacgcaccagcaaccgtgtgcggccccaagaagagcacacatcatcaccaccaccaccaccactga

SEQ ID NO: 2405 - DNA, 735 bp, Artificial Sequence
  Description of Artificial Sequence: Synthetic polynucleotide
atgggcatcctgccaagcccaggaatgcccgccctgctgtctctggtgagcctgctgtccgtgctgctgatgggatgcgtggcagagacaggcacaaggttccctaacatcaccaatctgtgcccattcggcgaggtgtttaacgccacacgctttgcctccgtgtatgcctggaaccggaagagaatctctaattgcgtggccgactatagcgtgctgtacaatagcgcctccttctctacctttaagtgctatggcgtgagccccaccaagctgaacgatctgtgcttcacaaacgtgtacgccgactcctttgtgatccggggcgatgaagtgagacagatcgcaccaggacagaccggaaagatcgcagactacaactataagctgcctgacgatttcacaggctgcgtgatcgcctggaatagcaacaatctggattccaaagtgggcggcaactacaattatctgtacaggctgttccgcaagtccaacctgaagccatttgagcgggacatctccaccgagatctaccaggccggctctaatccctgcaacggcgtggagggcttcaattgttattttcccctgcagtcttacggcttccagcctacaaatggcgtgggctatcagccataccgggtggtggtgctgtcttttgagctgctgcacgcaccagcaaccgtgtgcggccccaagaagagcacacatcatcaccaccaccaccaccactga

SEQ ID NO: 2406 - DNA, 735 bp, Artificial Sequence
  Description of Artificial Sequence: Synthetic polynucleotide
atgggcatcctgccaagcccaggaatgcccgccctgctgtctctggtgagcctgctgtccgtgctgctgatgggatgcgtggcagagacaggcacaaggttccctaacatcaccaatctgtgcccattcggcgaggtgtttaacgccacacgctttgcctccgtgtatgcctggaaccggaagagaatctctaattgcgtggccgactatagcgtgctgtacaatagccactccttctctacctttaagtgctatggcgtgagccccaccaagctgaacgatctgtgcttcacaaacgtgtacgccgactcctttgtgatccggggcgatgaagtgagacagatcgcaccaggacagaccggaaagatcgcagactacaactataagctgcctgacgatttcacaggctgcgtgatcgcctggaatagcaacaatctggattccaaagtgggcggcaactacaattatctgtacaggctgttccgcaagtccaacctgaagccatttgagcgggacatctccaccgagatctaccaggccggctctacaccctgcaacggcgtggagggcttcaattgttattttcccctgcagtcttacggcttccagcctacaaatggcgtgggctatcagccataccgggtggtggtgctgtcttttgagctgctgcacgcaccagcaaccgtgtgcggccccaagaagagcacacatcatcaccaccaccaccaccactga

SEQ ID NO: 2407 - DNA, 735 bp, Artificial Sequence
  Description of Artificial Sequence: Synthetic polynucleotide
atgggcatcctgccaagcccaggaatgcccgccctgctgtctctggtgagcctgctgtccgtgctgctgatgggatgcgtggcagagacaggcacaaggttccctaacatcaccaatctgtgcccattcggcgaggtgtttaacgccacacgctttgcctccgtgtatgcctggaaccggaagagaatctctaattgcgtggccgactatagcgtgctgtacaatagcgcctccttctctacctttaagtgctatggcgtgagccccaccaagctgaacgatctgtgcttcacaaacgtgtacgccgactcctttgtgatccggggcgatgaagtgagacagatcgcaccaggacagaccggaacgatcgcagactacaactataagctgcctgacgatttcacaggctgcgtgatcgcctggaatagcaacaatctggattccaaagtgggcggcaactacaattatctgtacaggctgttccgcaagtccaacctgaagccatttgagcgggacatctccaccgagatctaccaggccggctctacaccctgcaacggcgtggagggcttcaattgttattttcccctgcagtcttacggcttccagcctacaaatggcgtgggctatcagccataccgggtggtggtgctgtcttttgagctgctgcacgcaccagcaaccgtgtgcggccccaagaagagcacacatcatcaccaccaccaccaccactga

SEQ ID NO: 2408 - DNA, 735 bp, Artificial Sequence
  Description of Artificial Sequence: Synthetic polynucleotide
atgggcatcctgccaagcccaggaatgcccgccctgctgtctctggtgagcctgctgtccgtgctgctgatgggatgcgtggcagagacaggcacaaggttccctaacatcaccaatctgtgcccattcggcgaggtgtttaacgccacacgctttgcctccgtgtatgcctggaaccggaagagaatctctaattgcgtggccgactatagcgtgctgtacaatagcgcctccttctctacctttaagtgctatggcgtgagccccaccaagctgaacgatctgtgcttcacaaacgtgtacgccgactcctttgtgatccggggcgatgaagtgagacagatcgcaccaggacagaccggaaagatcgcagactacaactataagctgcctgacgatttcacaggctgcgtgatcgcctggaatagcaacaatctggattccaaagtgggcggcaactacaattatctgtacaggctgttccgcaagtccaacctgaagccatttgagcgggacatctccaccgagatctaccaggccggctctacaccctgcaacggcgtgcaaggcttcaattgttattttcccctgcagtcttacggcttccagcctacaaatggcgtgggctatcagccataccgggtggtggtgctgtcttttgagctgctgcacgcaccagcaaccgtgtgcggccccaagaagagcacacatcatcaccaccaccaccaccactga

SEQ ID NO: 2409 - DNA, 735 bp, Artificial Sequence
  Description of Artificial Sequence: Synthetic polynucleotide
atgggcatcctgccaagcccaggaatgcccgccctgctgtctctggtgagcctgctgtccgtgctgctgatgggatgcgtggcagagacaggcacaaggttccctaacatcaccaatctgtgcccattcggcgaggtgtttaacgccacacgctttgcctccgtgtatgcctggaaccggaagagaatctctaattgcgtggccgactatagcgtgctgtacaatagcgcctccttctctacctttaagtgctatggcgtgagccccaccaagctgaacgatctgtgcttcacaaacgtgtacgccgactcctttgtgatcccgggcgatgaagtgagacagatcgcaccaggacagaccggaaagatcgcagactacaactataagctgcctgacgatttcacaggctgcgtgatcgcctggaatagcaacaatctggattccaaagtgggcggcaactacaattatctgtacaggctgttccgcaagtccaacctgaagccatttgagcgggacatctccaccgagatctaccaggccggctctacaccctgcaacggcgtggagggcttcaattgttattttcccctgcagtcttacggcttccagcctacaaatggcgtgggctatcagccataccgggtggtggtgctgtcttttgagctgctgcacgcaccagcaaccgtgtgcggccccaagaagagcacacatcatcaccaccaccaccaccactga

SEQ ID NO: 2410 - DNA, 735 bp, Artificial Sequence
  Description of Artificial Sequence: Synthetic polynucleotide
atgggcatcctgccaagcccaggaatgcccgccctgctgtctctggtgagcctgctgtccgtgctgctgatgggatgcgtggcagagacaggcacaaggttccctaacatcaccaatctgtgcccattcggcgaggtgtttaacgccacacgctttgcctccgtgtatgcctggaaccggaagagaatctctaattgcgtggccgactatagcgtgctgtacaatagcgcctccttctctacctttaagtgctatggcgtgagccccaccaagctgaacgatctgtgcttcacaaacgtgtacgccgactcctttgtgatccggggcgatgaagtgagacagatcgcaccaggacagaccggaaagatcgcagactacaactataagctgcctgacgatttcacaggctgcgtgatcgcctggaatagcaacaatctggattccaaagtgggcggcaactacaattatctgtacaggctgttccgcaagtccaacctgaagccatttgagcgggacatctccaccgagatctaccaggccggctctacaccctgcaacggccaagagggcttcaattgttattttcccctgcagtcttacggcttccagcctacaaatggcgtgggctatcagccataccgggtggtggtgctgtcttttgagctgctgcacgcaccagcaaccgtgtgcggccccaagaagagcacacatcatcaccaccaccaccaccactga

SEQ ID NO: 2411 - DNA, 735 bp, Artificial Sequence
  Description of Artificial Sequence: Synthetic polynucleotide
atgggcatcctgccaagcccaggaatgcccgccctgctgtctctggtgagcctgctgtccgtgctgctgatgggatgcgtggcagagacaggcacaaggttccctaacatcaccaatgtgtgcccattcggcgaggtgtttaacgccacacgctttgcctccgtgtatgcctggaaccggaagagaatctctaattgcgtggccgactatagcgtgctgtacaatagcgcctccttctctacctttaagtgctatggcgtgagccccaccaagctgaacgatctgtgcttcacaaacgtgtacgccgactcctttgtgatccggggcgatgaagtgagacagatcgcaccaggacagaccggaaagatcgcagactacaactataagctgcctgacgatttcacaggctgcgtgatcgcctggaatagcaacaatctggattccaaagtgggcggcaactacaattatctgtacaggctgttccgcaagtccaacctgaagccatttgagcgggacatctccaccgagatctaccaggccggctctacaccctgcaacggcgtggagggcttcaattgttattttcccctgcagtcttacggcttccagcctacaaatggcgtgggctatcagccataccgggtggtggtgctgtcttttgagctgctgcacgcaccagcaaccgtgtgcggccccaagaagagcacacatcatcaccaccaccaccaccactga

SEQ ID NO: 2412 - DNA, 735 bp, Artificial Sequence
  Description of Artificial Sequence: Synthetic polynucleotide
atgggcatcctgccaagcccaggaatgcccgccctgctgtctctggtgagcctgctgtccgtgctgctgatgggatgcgtggcagagacaggcacaaggttccctaacatcaccaatctgtgcccattcggcgaggtgtttaacgccacacgctttgcctccgtgtatgcctggaaccggaagagaatctctaattgcgtggccgactatagcgtgctgtacaatagcgcctccttctctacctttaagtgctatggcgtgagccccaccaagctgaacgatctgtgcttcacaaacgtgtacgccgactcctttgtgatccggggcgatgaagtgagacagatcgcaccaggacagaccggaaagatcgcagactacaactataagctgcctgacgatttcacaggctgcgtgatcgcctggaatagcaacaatctggattccaaagtgggcggcaactacaattatctgtacaggctgttccgcaagtccaacctgaagccatttgagcgggacatctccaccgagatctaccaggccggctctacaccctgcaacggcgtggagggcttcaattgttatcctcccctgcagtcttacggcttccagcctacaaatggcgtgggctatcagccataccgggtggtggtgctgtcttttgagctgctgcacgcaccagcaaccgtgtgcggccccaagaagagcacacatcatcaccaccaccaccaccactga

SEQ ID NO: 2413 - DNA, 735 bp, Artificial Sequence
  Description of Artificial Sequence: Synthetic polynucleotide
atgggcatcctgccaagcccaggaatgcccgccctgctgtctctggtgagcctgctgtccgtgctgctgatgggatgcgtggcagagacaggcacaaggttccctaacatcaccaatctgtgcccattcggcgaggtgtttaacgccacacgctttgcctccgtgtatgcctggaaccggaagagaatctctaattgcgtggccgactatagcgtgctgtacaatagcgcctccttctctacctttaagtgctatggcgtgagccccaccaagctgaacgatctgtgcttcacaaacgtgtacgccgactcctttgtgatccggggcgatgaagtgagacagatcgcaccaggacagaccggaaagatcgcagactacaactataagctgcctgacgatttcacaggctgcgtgatcgcctggaatagcaacaatctggattccaaagtgggcggcaactacaattatctgtacaggctgttccgcaagtccaacctgaagccatttgagcgggacatctccaccgagatctaccaggccggctctgatccctgcaacggcgtggagggcttcaattgttattttcccctgcagtcttacggcttccagcctacaaatggcgtgggctatcagccataccgggtggtggtgctgtcttttgagctgctgcacgcaccagcaaccgtgtgcggccccaagaagagcacacatcatcaccaccaccaccaccactga

SEQ ID NO: 2414 - DNA, 735 bp, Artificial Sequence
  Description of Artificial Sequence: Synthetic polynucleotide
atgggcatcctgccaagcccaggaatgcccgccctgctgtctctggtgagcctgctgtccgtgctgctgatgggatgcgtggcagagacaggcacaaggttccctaacatcaccaatctgtgcccattcggcgaggtgtttaacgccacacgctttgcctccgtgtatgcctggaaccggaagagaatctctaattgcgtggccgactatagcgtgctgtacaatagcgcctccttctctacctttaagtgctatggcgtgagccccaccaagctgaacgatctgtgcttcacaaacgtgtacgccgactcctttgtgatccggggcgatgaagtgagacagatcgcaccaggacagaccggaaagatcgcagactacaactataagctgcctgacgatttcacaggctgcgtgatcgcctggaatagcaacaatctggattccaaagtgggcggcaactacaattatctgtacaggctgttccgcaagtccaacctgaagccatttgagcgggacatctccaccgagatctaccaggccggctctacaccctgcaacggcgtggagggcttcaattgttattttcccctgcagtcttacggcttccagcctacaaatggcgtggaatatcagccataccgggtggtggtgctgtcttttgagctgctgcacgcaccagcaaccgtgtgcggccccaagaagagcacacatcatcaccaccaccaccaccactga

SEQ ID NO: 2415 - DNA, 735 bp, Artificial Sequence
  Description of Artificial Sequence: Synthetic polynucleotide
atgggcatcctgccaagcccaggaatgcccgccctgctgtctctggtgagcctgctgtccgtgctgctgatgggatgcgtggcagagacaggcacaaggttccctaacatcaccaatctgtgcccattccatgaggtgtttaacgccacacgctttgcctccgtgtatgcctggaaccggaagagaatctctaattgcgtggccgactatagcgtgctgtacaatagcgcctccttctctacctttaagtgctatggcgtgagccccaccaagctgaacgatctgtgcttcacaaacgtgtacgccgactcctttgtgatccggggcgatgaagtgagacagatcgcaccaggacagaccggaaagatcgcagactacaactataagctgcctgacgatttcacaggctgcgtgatcgcctggaatagcaacaatctggattccaaagtgggcggcaactacaattatctgtacaggctgttccgcaagtccaacctgaagccatttgagcgggacatctccaccgagatctaccaggccggctctacaccctgcaacggcgtggagggcttcaattgttattttcccctgcagtcttacggcttccagcctacaaatggcgtgggctatcagccataccgggtggtggtgctgtcttttgagctgctgcacgcaccagcaaccgtgtgcggccccaagaagagcacacatcatcaccaccaccaccaccactga

SEQ ID NO: 2416 - DNA, 735 bp, Artificial Sequence
  Description of Artificial Sequence: Synthetic polynucleotide
atgggcatcctgccaagcccaggaatgcccgccctgctgtctctggtgagcctgctgtccgtgctgctgatgggatgcgtggcagagacaggcacaaggttccctaacatcaccaatctgtgcccattcggcgaggtgtttaacgccacacgctttgcctccgtgtatgcctggaaccggaagagaatctctaattgcgtggccgactatagcgtgctgtacaatagcgcctccttctctacctttaagtgctatggcgtgagccccaccaagctgaacgatctgtgcttcacaaacgtgtacgccgactcctttgtgatccggtttgatgaagtgagacagatcgcaccaggacagaccggaaagatcgcagactacaactataagctgcctgacgatttcacaggctgcgtgatcgcctggaatagcaacaatctggattccaaagtgggcggcaactacaattatctgtacaggctgttccgcaagtccaacctgaagccatttgagcgggacatctccaccgagatctaccaggccggctctacaccctgcaacggcgtggagggcttcaattgttattttcccctgcagtcttacggcttccagcctacaaatggcgtgggctatcagccataccgggtggtggtgctgtcttttgagctgctgcacgcaccagcaaccgtgtgcggccccaagaagagcacacatcatcaccaccaccaccaccactga

SEQ ID NO: 2417 - DNA, 735 bp, Artificial Sequence
  Description of Artificial Sequence: Synthetic polynucleotide
atgggcatcctgccaagcccaggaatgcccgccctgctgtctctggtgagcctgctgtccgtgctgctgatgggatgcgtggcagagacaggcacaaggttccctaacatcaccaatctgtgcccattcggcgaggtgtttaacgccacacgctttgcctccgtgtatgcctggaaccggaagagaatctctaattgcgtggccgactatagcgtgctgtacaatagcgcctccttctctacctttaagtgctatggcgtgagccccaccaagctgaacgatctgtgcttcacaaacgtgtacgccgactcctttgtgatccggggcgatgaagtgagacagatcgcaccaggacagaccggaaagatcgcagactacaactataagctgcctgacgatttcacaggctgcgtgatcgcctggaatagcaacaatctggattccaaagtgggcggcaactacaattatctgtacaggctgttccgcaagtccaacctgaagccatttgagcgggacatctccaccgagatctaccaggccggccaaacaccctgcaacggcgtggagggcttcaattgttattttcccctgcagtcttacggcttccagcctacaaatggcgtgggctatcagccataccgggtggtggtgctgtcttttgagctgctgcacgcaccagcaaccgtgtgcggccccaagaagagcacacatcatcaccaccaccaccaccactga

SEQ ID NO: 2418 - DNA, 735 bp, Artificial Sequence
  Description of Artificial Sequence: Synthetic polynucleotide
atgggcatcctgccaagcccaggaatgcccgccctgctgtctctggtgagcctgctgtccgtgctgctgatgggatgcgtggcagagacaggcacaaggttccctaacatcaccaatctgtgcccattcggcgaggtgtttaacgccacacgctttgcctccgtgtatgcctggaaccggaagagaatctctaattgcgtggccgactatagcgtgctgtacaatagccagtccttctctacctttaagtgctatggcgtgagccccaccaagctgaacgatctgtgcttcacaaacgtgtacgccgactcctttgtgatccggggcgatgaagtgagacagatcgcaccaggacagaccggaaagatcgcagactacaactataagctgcctgacgatttcacaggctgcgtgatcgcctggaatagcaacaatctggattccaaagtgggcggcaactacaattatctgtacaggctgttccgcaagtccaacctgaagccatttgagcgggacatctccaccgagatctaccaggccggctctacaccctgcaacggcgtggagggcttcaattgttattttcccctgcagtcttacggcttccagcctacaaatggcgtgggctatcagccataccgggtggtggtgctgtcttttgagctgctgcacgcaccagcaaccgtgtgcggccccaagaagagcacacatcatcaccaccaccaccaccactga

SEQ ID NO: 2419 - DNA, 735 bp, Artificial Sequence
  Description of Artificial Sequence: Synthetic polynucleotide
atgggcatcctgccaagcccaggaatgcccgccctgctgtctctggtgagcctgctgtccgtgctgctgatgggatgcgtggcagagacaggcacaaggttccctaacatcaccaatctgtgcccattcggcgaggtgtttaacgccacacgctttgcctccgtgtatgcctggaaccggaagagaatctctaattgcgtggccgactatagcgtgctgtacaatagcgcctccttctctacctttaagtgctatggcgtgagccccaccaagctgaacgatctgtgcttcacaaacgtgtacgccgactcctttgtgatccggggcgatgaagtgagacagatcgcaccaggacagaccggaaagatcgcagactacaactataagctgcctgacgatttcacaggctgcgtgatcgcctggaatagcaacaatctggattccaaagtgggcggcaactacaattatctgtacaggctgttccgcaagtccaacctgaagccatttgagcgggacatctccaccgagatctaccaggccggctctagtccctgcaacggcgtggagggcttcaattgttattttcccctgcagtcttacggcttccagcctacaaatggcgtgggctatcagccataccgggtggtggtgctgtcttttgagctgctgcacgcaccagcaaccgtgtgcggccccaagaagagcacacatcatcaccaccaccaccaccactga

SEQ ID NO: 2420 - DNA, 735 bp, Artificial Sequence
  Description of Artificial Sequence: Synthetic polynucleotide
atgggcatcctgccaagcccaggaatgcccgccctgctgtctctggtgagcctgctgtccgtgctgctgatgggatgcgtggcagagacaggcacaaggttccctaacatcaccaatctgtgcccattcggcgaggtgtttaacgccacacgctttgcctccgtgtatgcctggaaccggaagagaatctctaattgcgtggccgactatagcgtgctgtacaatagcgcctccttctctacctttaagtgctatggcgtgagccccaccaagctgaacgatctgtgcttcacaaacgtgtacgccgactcctttgtgatccggggcgatgaagtgagacagatcgcaccaggacagaccggaaagatcgcagactacaactataagctgcctgacgatttcacaggctgcgtgatcgcctggaatagcaacaatctggattccaaagtgggcggcaactacaattatctgtacaggctgttccgcaagtccaacctgaagccatttgagcgggacatctccaccgagatctaccaggccggctctgaaccctgcaacggcgtggagggcttcaattgttattttcccctgcagtcttacggcttccagcctacaaatggcgtgggctatcagccataccgggtggtggtgctgtcttttgagctgctgcacgcaccagcaaccgtgtgcggccccaagaagagcacacatcatcaccaccaccaccaccactga

SEQ ID NO: 2421 - DNA, 735 bp, Artificial Sequence
  Description of Artificial Sequence: Synthetic polynucleotide
atgggcatcctgccaagcccaggaatgcccgccctgctgtctctggtgagcctgctgtccgtgctgctgatgggatgcgtggcagagacaggcacaaggttccctaacatcaccaatctgtgcccattcggcgaggtgtttaacgccacacgctttgcctccgtgtatgcctggaaccggaagagaatctctaattgcgtggccgactatagcgtgctgtacaatagcgcctccttctctacctttaagtgctatggcgtgagccccaccaagctgaacgatctgtgcttcacaaacgtgtacgccgactcctttgtgatccggggcgatgaagtgagacagatcgcaccaggacagaccggaaagatcgcagactacaactataagctgcctgacgatttcacaggctgcgtgatcgcctggaatagcaacaatctggattccaaagtgggcggcaactacaattatctgtacaggctgttccgcaagtccaacctgaagccatttgagcgggacatctccaccgagatctaccaggccggctctacaccctgcaacggcgtggcgggcttcaattgttattttcccctgcagtcttacggcttccagcctacaaatggcgtgggctatcagccataccgggtggtggtgctgtcttttgagctgctgcacgcaccagcaaccgtgtgcggccccaagaagagcacacatcatcaccaccaccaccaccactga

SEQ ID NO: 2422 - DNA, 735 bp, Artificial Sequence
  Description of Artificial Sequence: Synthetic polynucleotide
atgggcatcctgccaagcccaggaatgcccgccctgctgtctctggtgagcctgctgtccgtgctgctgatgggatgcgtggcagagacaggcacaaggttccctaacatcaccaatctgtgcccattcggcgaggtgtttaacgccacacgctttgcctccgtgtatgcctggaaccggaagagaatctctaattgcgtggccgactatagcgtgctgtacaatagcacgtccttctctacctttaagtgctatggcgtgagccccaccaagctgaacgatctgtgcttcacaaacgtgtacgccgactcctttgtgatccggggcgatgaagtgagacagatcgcaccaggacagaccggaaagatcgcagactacaactataagctgcctgacgatttcacaggctgcgtgatcgcctggaatagcaacaatctggattccaaagtgggcggcaactacaattatctgtacaggctgttccgcaagtccaacctgaagccatttgagcgggacatctccaccgagatctaccaggccggctctacaccctgcaacggcgtggagggcttcaattgttattttcccctgcagtcttacggcttccagcctacaaatggcgtgggctatcagccataccgggtggtggtgctgtcttttgagctgctgcacgcaccagcaaccgtgtgcggccccaagaagagcacacatcatcaccaccaccaccaccactga

SEQ ID NO: 2423 - DNA, 735 bp, Artificial Sequence
  Description of Artificial Sequence: Synthetic polynucleotide
atgggcatcctgccaagcccaggaatgcccgccctgctgtctctggtgagcctgctgtccgtgctgctgatgggatgcgtggcagagacaggcacaaggttccctaacatcaccaatctgtgcccattcggcgaggtgtttaacgccacacgctttgcctccgtgtatgcctggaaccggaagagaatctctaattgcgtggccgactatagcgtgctgtacaatagcgcctccttctctacctttaagtgctatggcgtgagccccaccaagctgaacgatctgtgcttcacaaacgtgtacgccgactcctttgtgatccggggcagtgaagtgagacagatcgcaccaggacagaccggaaagatcgcagactacaactataagctgcctgacgatttcacaggctgcgtgatcgcctggaatagcaacaatctggattccaaagtgggcggcaactacaattatctgtacaggctgttccgcaagtccaacctgaagccatttgagcgggacatctccaccgagatctaccaggccggctctacaccctgcaacggcgtggagggcttcaattgttattttcccctgcagtcttacggcttccagcctacaaatggcgtgggctatcagccataccgggtggtggtgctgtcttttgagctgctgcacgcaccagcaaccgtgtgcggccccaagaagagcacacatcatcaccaccaccaccaccactga

SEQ ID NO: 2424 - DNA, 735 bp, Artificial Sequence
  Description of Artificial Sequence: Synthetic polynucleotide
atgggcatcctgccaagcccaggaatgcccgccctgctgtctctggtgagcctgctgtccgtgctgctgatgggatgcgtggcagagacaggcacaaggttccctaacatcaccaatctgtgcccattcggcgaggtgtttaacgccacacgctttgcctccgtgtatgcctggaaccggaagagaatctctaattgcgtggccgactatagcgtgctgtacaatagcgtctccttctctacctttaagtgctatggcgtgagccccaccaagctgaacgatctgtgcttcacaaacgtgtacgccgactcctttgtgatccggggcgatgaagtgagacagatcgcaccaggacagaccggaaagatcgcagactacaactataagctgcctgacgatttcacaggctgcgtgatcgcctggaatagcaacaatctggattccaaagtgggcggcaactacaattatctgtacaggctgttccgcaagtccaacctgaagccatttgagcgggacatctccaccgagatctaccaggccggctctacaccctgcaacggcgtggagggcttcaattgttattttcccctgcagtcttacggcttccagcctacaaatggcgtgggctatcagccataccgggtggtggtgctgtcttttgagctgctgcacgcaccagcaaccgtgtgcggccccaagaagagcacacatcatcaccaccaccaccaccactga

SEQ ID NO: 2425 - DNA, 735 bp, Artificial Sequence
  Description of Artificial Sequence: Synthetic polynucleotide
atgggcatcctgccaagcccaggaatgcccgccctgctgtctctggtgagcctgctgtccgtgctgctgatgggatgcgtggcagagacaggcacaaggttccctaacatcaccaatctgtgcccattcggcgaggtgtttaacgccacacgctttgcctccgtgtatgcctggaaccggaagagaatctctaattgcgtggccgactatagcgtgctgtacaatagcgcctccttctctacctttaagtgctatggcgtgagccccaccaagctgaacgatctgtgcttcacaaacgtgtacgccgactcctttgtgatccggggcgatgaagtgagacagatcgcaccaggacagaccggagctatcgcagactacaactataagctgcctgacgatttcacaggctgcgtgatcgcctggaatagcaacaatctggattccaaagtgggcggcaactacaattatctgtacaggctgttccgcaagtccaacctgaagccatttgagcgggacatctccaccgagatctaccaggccggctctacaccctgcaacggcgtggagggcttcaattgttattttcccctgcagtcttacggcttccagcctacaaatggcgtgggctatcagccataccgggtggtggtgctgtcttttgagctgctgcacgcaccagcaaccgtgtgcggccccaagaagagcacacatcatcaccaccaccaccaccactga

SEQ ID NO: 2426 - DNA, 735 bp, Artificial Sequence
  Description of Artificial Sequence: Synthetic polynucleotide
atgggcatcctgccaagcccaggaatgcccgccctgctgtctctggtgagcctgctgtccgtgctgctgatgggatgcgtggcagagacaggcacaaggttccctaacatcaccaatctgtgcccattcggcgaggtgtttaacgccacacgctttgcctccgtgtatgcctggaaccggaagagaatctctaattgcgtggccgactatagcgtgctgtacaatagcgcctccttctctacctttaagtgctatggcgtgagccccaccaagctgaacgatctgtgcttcacaaacgtgtacgccgactcctttgtgatccggggcgatgaagtgagacagatcgcaccaggacagaccggaaagatcgcagactacaactataagctgcctgacgatttcacaggctgcgtgatcgcctggaatagcaacaatctggattccaaagtgggcggcaactacaattatctgtacaggctgttccgcaagtccaacctgaagccatttgagcgggacatctccaccgagatctaccaggccggctctacaccctgcaacggcgtgaaaggcttcaattgttattttcccctgcagtcttacggcttccagcctacaaatggcgtgggctatcagccataccgggtggtggtgctgtcttttgagctgctgcacgcaccagcaaccgtgtgcggccccaagaagagcacacatcatcaccaccaccaccaccactga

SEQ ID NO: 2427 - DNA, 735 bp, Artificial Sequence
  Description of Artificial Sequence: Synthetic polynucleotide
atgggcatcctgccaagcccaggaatgcccgccctgctgtctctggtgagcctgctgtccgtgctgctgatgggatgcgtggcagagacaggcacaaggttccctaacatcaccaatctgtgcccattcggcgaggtgtttaacgccacacgctttgcctccgtgtatgcctggaaccggaagagaatctctaattgcattgccgactatagcgtgctgtacaatagcgcctccttctctacctttaagtgctatggcgtgagccccaccaagctgaacgatctgtgcttcacaaacgtgtacgccgactcctttgtgatccggggcgatgaagtgagacagatcgcaccaggacagaccggaaagatcgcagactacaactataagctgcctgacgatttcacaggctgcgtgatcgcctggaatagcaacaatctggattccaaagtgggcggcaactacaattatctgtacaggctgttccgcaagtccaacctgaagccatttgagcgggacatctccaccgagatctaccaggccggctctacaccctgcaacggcgtggagggcttcaattgttattttcccctgcagtcttacggcttccagcctacaaatggcgtgggctatcagccataccgggtggtggtgctgtcttttgagctgctgcacgcaccagcaaccgtgtgcggccccaagaagagcacacatcatcaccaccaccaccaccactga

SEQ ID NO: 2428 - DNA, 735 bp, Artificial Sequence
  Description of Artificial Sequence: Synthetic polynucleotide
atgggcatcctgccaagcccaggaatgcccgccctgctgtctctggtgagcctgctgtccgtgctgctgatgggatgcgtggcagagacaggcacaaggttccctaacatcaccaatctgtgcccattcggcgaggtgtttaacgccacacgctttgcctccgtgtatgcctggaaccggaagagaatctctaattgcgtggccgactatagcgtgttttacaatagcgcctccttctctacctttaagtgctatggcgtgagccccaccaagctgaacgatctgtgcttcacaaacgtgtacgccgactcctttgtgatccggggcgatgaagtgagacagatcgcaccaggacagaccggaaagatcgcagactacaactataagctgcctgacgatttcacaggctgcgtgatcgcctggaatagcaacaatctggattccaaagtgggcggcaactacaattatctgtacaggctgttccgcaagtccaacctgaagccatttgagcgggacatctccaccgagatctaccaggccggctctacaccctgcaacggcgtggagggcttcaattgttattttcccctgcagtcttacggcttccagcctacaaatggcgtgggctatcagccataccgggtggtggtgctgtcttttgagctgctgcacgcaccagcaaccgtgtgcggccccaagaagagcacacatcatcaccaccaccaccaccactga

SEQ ID NO: 2429 - DNA, 735 bp, Artificial Sequence
  Description of Artificial Sequence: Synthetic polynucleotide
atgggcatcctgccaagcccaggaatgcccgccctgctgtctctggtgagcctgctgtccgtgctgctgatgggatgcgtggcagagacaggcacaaggttccctaacatcaccaatctgtgcccattcggcgaggtgtttaacgccacacgctttgcctccgtgtatgcctggaaccggaagagaatctctaattgcgtggccgactatagcgtgctgtacaatagcgcctccttctctacctttaagtgctatggcgtgagccccaccaagctgaacgatctgtgcttcacaaacgtgtacgccgactcctttgtgatccggggcgatgaagtgagacagatcgcaccaggacagaccggaaagatcgcagactacaactataagctgcctgacgatttcacaggctgcgtgatcgcctggaatagcaacaatctggattccaaagtgggcggcaactacaattatctgtacaggctgttccgcaagtccaacctgaagccatttgagcgggacatctccaccgagatctaccaggccggctctacaccctgcaacggcgtggagggcgttaattgttattttcccctgcagtcttacggcttccagcctacaaatggcgtgggctatcagccataccgggtggtggtgctgtcttttgagctgctgcacgcaccagcaaccgtgtgcggccccaagaagagcacacatcatcaccaccaccaccaccactga

SEQ ID NO: 2430 - DNA, 735 bp, Artificial Sequence
  Description of Artificial Sequence: Synthetic polynucleotide
atgggcatcctgccaagcccaggaatgcccgccctgctgtctctggtgagcctgctgtccgtgctgctgatgggatgcgtggcagagacaggcacaaggttccctaacatcaccaatctgtgcccattcggcgaggtgtttaacgccacacgctttgcctccgtgtatgcctggaaccggaagagaatctctaattgcgtggccgactatagcgtgctgtacaatagcgcctccttctctacctttaagtgctatggcgtgagccccaccaagctgaacgatctgtgcttcacaaacgtgtacgccgactcctttgtgatccggggcgatgaagtgagacagatcgcaccaggacagaccggaaagatcgcagactacaactataagctgcctgacgatttcacaggctgcgtgatcgcctggaatagcaacaatctggattccaaagtgggcggcaactacaattatctgtacaggctgttccgcaagtccaacctgaagccatttgagcgggacatctccaccgagatctaccaggccggcgcgacaccctgcaacggcgtggagggcttcaattgttattttcccctgcagtcttacggcttccagcctacaaatggcgtgggctatcagccataccgggtggtggtgctgtcttttgagctgctgcacgcaccagcaaccgtgtgcggccccaagaagagcacacatcatcaccaccaccaccaccactga

SEQ ID NO: 2431 - DNA, 735 bp, Artificial Sequence
  Description of Artificial Sequence: Synthetic polynucleotide
atgggcatcctgccaagcccaggaatgcccgccctgctgtctctggtgagcctgctgtccgtgctgctgatgggatgcgtggcagagacaggcacaaggttccctaacatcaccaatctgtgcccattcggcgaggtgtttaacgccacacgctttgcctccgtgtatgcctggaaccggaagagaatctctaattgcgtggccgactatagcgtgctgtacaatagcgcctccttctctacctttaagtgctatggcgtgagccccaccaagctgaacgatctgtgcttcacaaacgtgtacgccgactcctttgtgatccggggcgatgaagtgagacagatcgcaccaggacagaccggaaagatcgcagactacaactataagctgcctgacgatttcacaggctgcgtgatcgcctggaatagcaacaatctggattccaaagtgggcggcaactacaattatctgtacaggctgttccgcaagtccaacctgaagccatttgagcgggacatctccaccgagatctaccaggccggctctacaccctgcaacggcgtgagtggcttcaattgttattttcccctgcagtcttacggcttccagcctacaaatggcgtgggctatcagccataccgggtggtggtgctgtcttttgagctgctgcacgcaccagcaaccgtgtgcggccccaagaagagcacacatcatcaccaccaccaccaccactga

SEQ ID NO: 2432 - DNA, 735 bp, Artificial Sequence
  Description of Artificial Sequence: Synthetic polynucleotide
atgggcatcctgccaagcccaggaatgcccgccctgctgtctctggtgagcctgctgtccgtgctgctgatgggatgcgtggcagagacaggcacaaggttccctaacatcaccaatctgtgcccattcggcgaggtgtttaacgccacacgctttgcctccgtgtatgcctggaaccggaagagaatctctaattgcgtggccgactatagcgtgctgtacaatagcgcctccttctctacctttaagtgctatggcgtgagccccaccaagctgaacgatctgtgcttcacaaacgtgtacgccgactcctttgtgatccggggcgatgaagtgagacagatcgcaccaggacagaccggaaagatcgcagactacaactataagctgcctgacgatttcacaggctgcgtgatcgcctggaatgctaacaatctggattccaaagtgggcggcaactacaattatctgtacaggctgttccgcaagtccaacctgaagccatttgagcgggacatctccaccgagatctaccaggccggctctacaccctgcaacggcgtggagggcttcaattgttattttcccctgcagtcttacggcttccagcctacaaatggcgtgggctatcagccataccgggtggtggtgctgtcttttgagctgctgcacgcaccagcaaccgtgtgcggccccaagaagagcacacatcatcaccaccaccaccaccactga

SEQ ID NO: 2433 - DNA, 735 bp, Artificial Sequence
  Description of Artificial Sequence: Synthetic polynucleotide
atgggcatcctgccaagcccaggaatgcccgccctgctgtctctggtgagcctgctgtccgtgctgctgatgggatgcgtggcagagacaggcacaaggttccctaacatcaccaatctgtgcccattcggcgaggtgtttaacgccacacgctttgcctccgtgtatgcctggaaccggcttagaatctctaattgcgtggccgactatagcgtgctgtacaatagcgcctccttctctacctttaagtgctatggcgtgagccccaccaagctgaacgatctgtgcttcacaaacgtgtacgccgactcctttgtgatccggggcgatgaagtgagacagatcgcaccaggacagaccggaaagatcgcagactacaactataagctgcctgacgatttcacaggctgcgtgatcgcctggaatagcaacaatctggattccaaagtgggcggcaactacaattatctgtacaggctgttccgcaagtccaacctgaagccatttgagcgggacatctccaccgagatctaccaggccggctctacaccctgcaacggcgtggagggcttcaattgttattttcccctgcagtcttacggcttccagcctacaaatggcgtgggctatcagccataccgggtggtggtgctgtcttttgagctgctgcacgcaccagcaaccgtgtgcggccccaagaagagcacacatcatcaccaccaccaccaccactga

SEQ ID NO: 2434 - DNA, 735 bp, Artificial Sequence
  Description of Artificial Sequence: Synthetic polynucleotide
atgggcatcctgccaagcccaggaatgcccgccctgctgtctctggtgagcctgctgtccgtgctgctgatgggatgcgtggcagagacaggcacaaggttccctaacatcaccaatctgtgcccattcggcgaggtgtttaacgccacacgctttgcctccgtgtatgcctggaaccgggtcagaatctctaattgcgtggccgactatagcgtgctgtacaatagcgcctccttctctacctttaagtgctatggcgtgagccccaccaagctgaacgatctgtgcttcacaaacgtgtacgccgactcctttgtgatccggggcgatgaagtgagacagatcgcaccaggacagaccggaaagatcgcagactacaactataagctgcctgacgatttcacaggctgcgtgatcgcctggaatagcaacaatctggattccaaagtgggcggcaactacaattatctgtacaggctgttccgcaagtccaacctgaagccatttgagcgggacatctccaccgagatctaccaggccggctctacaccctgcaacggcgtggagggcttcaattgttattttcccctgcagtcttacggcttccagcctacaaatggcgtgggctatcagccataccgggtggtggtgctgtcttttgagctgctgcacgcaccagcaaccgtgtgcggccccaagaagagcacacatcatcaccaccaccaccaccactga

SEQ ID NO: 2435 - DNA, 735 bp, Artificial Sequence
  Description of Artificial Sequence: Synthetic polynucleotide
atgggcatcctgccaagcccaggaatgcccgccctgctgtctctggtgagcctgctgtccgtgctgctgatgggatgcgtggcagagacaggcacaaggttccctaacatcaccaatctgtgcccattcggcgaggtgtttaacgccacacgctttgcctccgtgtatgcctggaaccggaagagaatctctaattgcgtggccgactatagcgtgctgtacaatagcgcctccttctctacctttaagtgctatggcgtgagccccaccaagctgaacgatctgtgcttcacaaacgtgtacgccgactcctttgtgatccggggcgatgaagtgagacagatcgcaccaggacagaccggaaagatcgcagactacaactataagctgcctgacgatttcacaggctgcgtgatcgcctggaatagcaacaatctggattccaaagtgggcggcaactacaattatctgtacaggctgttccgcaagtccaacctgaagccatttgagcgggacatctccaccgagatctaccaggccggctctacaccctgcaacggcgtggagggcttcaattgttatcttcccctgcagtcttacggcttccagcctacaaatggcgtgggctatcagccataccgggtggtggtgctgtcttttgagctgctgcacgcaccagcaaccgtgtgcggccccaagaagagcacacatcatcaccaccaccaccaccactga

SEQ ID NO: 2436 - DNA, 735 bp, Artificial Sequence
  Description of Artificial Sequence: Synthetic polynucleotide
atgggcatcctgccaagcccaggaatgcccgccctgctgtctctggtgagcctgctgtccgtgctgctgatgggatgcgtggcagagacaggcacaaggttccctaacatcaccaatctgtgcccattcggcgaggtgtttaacgccacacgctttgcctccgtgtatgcctggaaccggaagagaatctctaattgcgtggccgactatagcgtgctgtacaatagcgcctccttctctacctttaagtgctatggcgtgagccccaccaagctgaacgatctgtgcttcacaaacgtgtacgccgactactttgtgatccggggcgatgaagtgagacagatcgcaccaggacagaccggaaagatcgcagactacaactataagctgcctgacgatttcacaggctgcgtgatcgcctggaatagcaacaatctggattccaaagtgggcggcaactacaattatctgtacaggctgttccgcaagtccaacctgaagccatttgagcgggacatctccaccgagatctaccaggccggctctacaccctgcaacggcgtggagggcttcaattgttattttcccctgcagtcttacggcttccagcctacaaatggcgtgggctatcagccataccgggtggtggtgctgtcttttgagctgctgcacgcaccagcaaccgtgtgcggccccaagaagagcacacatcatcaccaccaccaccaccactga

SEQ ID NO: 2437 - DNA, 735 bp, Artificial Sequence
  Description of Artificial Sequence: Synthetic polynucleotide
atgggcatcctgccaagcccaggaatgcccgccctgctgtctctggtgagcctgctgtccgtgctgctgatgggatgcgtggcagagacaggcacaaggttccctaacatcaccaatcgttgcccattcggcgaggtgtttaacgccacacgctttgcctccgtgtatgcctggaaccggaagagaatctctaattgcgtggccgactatagcgtgctgtacaatagcgcctccttctctacctttaagtgctatggcgtgagccccaccaagctgaacgatctgtgcttcacaaacgtgtacgccgactcctttgtgatccggggcgatgaagtgagacagatcgcaccaggacagaccggaaagatcgcagactacaactataagctgcctgacgatttcacaggctgcgtgatcgcctggaatagcaacaatctggattccaaagtgggcggcaactacaattatctgtacaggctgttccgcaagtccaacctgaagccatttgagcgggacatctccaccgagatctaccaggccggctctacaccctgcaacggcgtggagggcttcaattgttattttcccctgcagtcttacggcttccagcctacaaatggcgtgggctatcagccataccgggtggtggtgctgtcttttgagctgctgcacgcaccagcaaccgtgtgcggccccaagaagagcacacatcatcaccaccaccaccaccactga

SEQ ID NO: 2438 - DNA, 735 bp, Artificial Sequence
  Description of Artificial Sequence: Synthetic polynucleotide
atgggcatcctgccaagcccaggaatgcccgccctgctgtctctggtgagcctgctgtccgtgctgctgatgggatgcgtggcagagacaggcacaaggttccctaacatcaccaatctgtgcccattcggcgaggtgtttaacgccacacgctttgcctccgtgtatgcctggaaccggaagagaatctctaattgcgtggccgactatagcgtgctgtacaatagcgcctccttctctacctttaagtgctatggcgtgagccccaccaagctgaacgatctgtgcttcacaaacgtgtacgccgactcctttgtgatccggggcgatgaagtgagacagatcgcaccaggacagaccggaaagatcgcagactacaactataagctgcctgacgatttcacaggctgcgtgatcgcctggaatagcaacaatctggattccaaagtgggcggcaactacaattatctgtacaggctgttccgcaagtccaacctgaagccatttgagcgggacatctccaccgagatctaccaggccggctctacaccctgcaacggcgtggagggcttcaattgttatcaccccctgcagtcttacggcttccagcctacaaatggcgtgggctatcagccataccgggtggtggtgctgtcttttgagctgctgcacgcaccagcaaccgtgtgcggccccaagaagagcacacatcatcaccaccaccaccaccactga

SEQ ID NO: 2439 - DNA, 735 bp, Artificial Sequence
  Description of Artificial Sequence: Synthetic polynucleotide
atgggcatcctgccaagcccaggaatgcccgccctgctgtctctggtgagcctgctgtccgtgctgctgatgggatgcgtggcagagacaggcacaaggttccctaacatcaccaatctgtgcccattcggcgaggtgtttaacgccacacgctttgcctccgtgtatgcctggaaccggaagagaatctctaattgcgtggccgactatagcgtgctgtacaatagcttctccttctctacctttaagtgctatggcgtgagccccaccaagctgaacgatctgtgcttcacaaacgtgtacgccgactcctttgtgatccggggcgatgaagtgagacagatcgcaccaggacagaccggaaagatcgcagactacaactataagctgcctgacgatttcacaggctgcgtgatcgcctggaatagcaacaatctggattccaaagtgggcggcaactacaattatctgtacaggctgttccgcaagtccaacctgaagccatttgagcgggacatctccaccgagatctaccaggccggctctacaccctgcaacggcgtggagggcttcaattgttattttcccctgcagtcttacggcttccagcctacaaatggcgtgggctatcagccataccgggtggtggtgctgtcttttgagctgctgcacgcaccagcaaccgtgtgcggccccaagaagagcacacatcatcaccaccaccaccaccactga

SEQ ID NO: 2440 - DNA, 735 bp, Artificial Sequence
  Description of Artificial Sequence: Synthetic polynucleotide
atgggcatcctgccaagcccaggaatgcccgccctgctgtctctggtgagcctgctgtccgtgctgctgatgggatgcgtggcagagacaggcacaaggttccctaacatcaccaatctgtgcccattcggcgaggtgtttaacgccacacgctttgcctccgtgtatgcctggaaccggaagagaatctctaattgcgtggccgactatagcgtgctgtacaatagcgcctccttctctacctttaagtgctatggcgtgagccccaccaagctgaacgatctgtgcttcacaaacgtgtacgccgactcctttgtgatccggggcgatgaagtgagacagatcgcaccaggacagaccggaaagatcgcagactacaactataagctgcctgacgatttcacaggctgcgtgatcgcctggaatagcaacaatctggattccaaagtgggcggcaactacaattatctgtacaggctgttccgcaagtccaacctgaagccatttgagcgggacatctccaccgagatctaccaggccggcggtacaccctgcaacggcgtggagggcttcaattgttattttcccctgcagtcttacggcttccagcctacaaatggcgtgggctatcagccataccgggtggtggtgctgtcttttgagctgctgcacgcaccagcaaccgtgtgcggccccaagaagagcacacatcatcaccaccaccaccaccactga

SEQ ID NO: 2441 - DNA, 735 bp, Artificial Sequence
  Description of Artificial Sequence: Synthetic polynucleotide
atgggcatcctgccaagcccaggaatgcccgccctgctgtctctggtgagcctgctgtccgtgctgctgatgggatgcgtggcagagacaggcacaaggttccctaacatcaccaatctgtgcccattcggcgaggtgtttaacgccacacgctttgcctccgtgtatgcctggaaccggaagagaatctctaattgcgtggccgactatagcgtgctgtacaatagcgcctccttctctacctttaagtgctatggcgtgagccccaccaagctgaacgatctgtgcttcacaaacgtgtacgccgactcctttgtgatccggggcgatgaagtgagacagatcgcaccaggacagaccggaaagatcgcagactacaactataagctgcctgacgatttcacaggctgcgtgatcgcctggaatagcaacaatctggattccaaagtgggcggcaactacaattatctgtacaggctgttccgcaagtccaacctgaagccatttgagcgggacatctccaccgagatctaccaggccggctctacaccctgcaacggcgtggagggcttcaattgttattcacccctgcagtcttacggcttccagcctacaaatggcgtgggctatcagccataccgggtggtggtgctgtcttttgagctgctgcacgcaccagcaaccgtgtgcggccccaagaagagcacacatcatcaccaccaccaccaccactga

SEQ ID NO: 2442 - DNA, 735 bp, Artificial Sequence
  Description of Artificial Sequence: Synthetic polynucleotide
atgggcatcctgccaagcccaggaatgcccgccctgctgtctctggtgagcctgctgtccgtgctgctgatgggatgcgtggcagagacaggcacaaggttccctaacatcaccaatctgtgcccattcggcgaggtgtttaacgccacacgctttgcctccgtgtatgcctggaaccggaagagaatctctaattgcgtggccgactatagcgtgctgtacaatagcgcctccttctctacctttaagtgctatggcgtgagccccaccaagctgaacgatctgtgcttcacaaacgtgtacgccgactcctttgtgatccggggcgatgatgtgagacagatcgcaccaggacagaccggaaagatcgcagactacaactataagctgcctgacgatttcacaggctgcgtgatcgcctggaatagcaacaatctggattccaaagtgggcggcaactacaattatctgtacaggctgttccgcaagtccaacctgaagccatttgagcgggacatctccaccgagatctaccaggccggctctacaccctgcaacggcgtggagggcttcaattgttattttcccctgcagtcttacggcttccagcctacaaatggcgtgggctatcagccataccgggtggtggtgctgtcttttgagctgctgcacgcaccagcaaccgtgtgcggccccaagaagagcacacatcatcaccaccaccaccaccactga

SEQ ID NO: 2443 - DNA, 735 bp, Artificial Sequence
  Description of Artificial Sequence: Synthetic polynucleotide
atgggcatcctgccaagcccaggaatgcccgccctgctgtctctggtgagcctgctgtccgtgctgctgatgggatgcgtggcagagacaggcacaaggttccctaacatcaccaatctgtgcccattcggcgaggtgtttaacgccacacgctttgcctccgtgtatgcctggaaccggaagagaatctctaattgcgtggccgactatagcgtgctgtacaatagcgcctccttctctacctttaagtgctatggcgtgagccccaccaagctgaacgatctgtgcttcacaaacgtgtacgccgactcctttgtgatccggggcgatgaagtgagacagatcgcaccaggacagaccggaaagatcgcagactacaactataagctgcctgacgatttcacaggctgcgtgatcgcctggaatagcaacaatctggattccaaagtgggcggcaactacaattatctgtacaggctgttccgcaagtccaacctgaagccatttgagcgggacatctccaccgagatctaccaggccggctctcaaccctgcaacggcgtggagggcttcaattgttattttcccctgcagtcttacggcttccagcctacaaatggcgtgggctatcagccataccgggtggtggtgctgtcttttgagctgctgcacgcaccagcaaccgtgtgcggccccaagaagagcacacatcatcaccaccaccaccaccactga

SEQ ID NO: 2444 - DNA, 735 bp, Artificial Sequence
  Description of Artificial Sequence: Synthetic polynucleotide
atgggcatcctgccaagcccaggaatgcccgccctgctgtctctggtgagcctgctgtccgtgctgctgatgggatgcgtggcagagacaggcacaaggttccctaacatcaccaatctgtgcccattcggcgaggtgtttaacgccacacgctttgcctccgtgtatgcctggaaccggaagagaatctctaattgcgtggccgactatagcgtgctgtacaatagcggatccttctctacctttaagtgctatggcgtgagccccaccaagctgaacgatctgtgcttcacaaacgtgtacgccgactcctttgtgatccggggcgatgaagtgagacagatcgcaccaggacagaccggaaagatcgcagactacaactataagctgcctgacgatttcacaggctgcgtgatcgcctggaatagcaacaatctggattccaaagtgggcggcaactacaattatctgtacaggctgttccgcaagtccaacctgaagccatttgagcgggacatctccaccgagatctaccaggccggctctacaccctgcaacggcgtggagggcttcaattgttattttcccctgcagtcttacggcttccagcctacaaatggcgtgggctatcagccataccgggtggtggtgctgtcttttgagctgctgcacgcaccagcaaccgtgtgcggccccaagaagagcacacatcatcaccaccaccaccaccactga

SEQ ID NO: 2445 - DNA, 735 bp, Artificial Sequence
  Description of Artificial Sequence: Synthetic polynucleotide
atgggcatcctgccaagcccaggaatgcccgccctgctgtctctggtgagcctgctgtccgtgctgctgatgggatgcgtggcagagacaggcacaaggttccctaacatcaccaatctgtgcccattcggcgaggtgtttaacgccacacgctttgcctccgtgtatgcctggaaccggaagagaatctctaattgcgtggccgactatagcgtgctgtacaatagcgcctccttctctacctttaagtgctatggcgtgagccccaccaagctgaacgatctgtgcttcacaaacgtgtacgccgactcctttgtgatccggggcgatgaagtgagacagatcgcaccaggacagaccggaaagatcgcagactacaactataagctgcctgacgatttcacaggctgcgtgatcgcctggaatagcaacaatctggattccaaagtgggcggcaactacaattatctgtacaggctgttccgcaagtccaacctgaagccatttgagcgggacatctccaccgagatctaccaggccggctctataccctgcaacggcgtggagggcttcaattgttattttcccctgcagtcttacggcttccagcctacaaatggcgtgggctatcagccataccgggtggtggtgctgtcttttgagctgctgcacgcaccagcaaccgtgtgcggccccaagaagagcacacatcatcaccaccaccaccaccactga

SEQ ID NO: 2446 - DNA, 735 bp, Artificial Sequence
  Description of Artificial Sequence: Synthetic polynucleotide
atgggcatcctgccaagcccaggaatgcccgccctgctgtctctggtgagcctgctgtccgtgctgctgatgggatgcgtggcagagacaggcacaaggttccctaacatcaccaatctgtgcccattcggcgaggtgtttaacgccacacgctttgcctccgtgtatgcctggaaccggaagagaatctctaattgcgtggccgactatagcgtgctgtacaatagcgcctccttctctacctttaagtgctatggcgtgagccccaccaagctgaacgatctgtgcttcacaaacgtgtacgccgactcctttgtgatccggggcgatgaagtgagacagatcgcaccaggacagaccggaaagatcgcagactacaactataagctgcctgacgatttcacaggctgcgtgatcgcctggaatagcaacaatctggattccaaagtgggcggcaactacaattatctgtacaggctgttccgcaagtccaacctgaagccatttgagcgggacatctccaccgagatctaccaggccggctctacaccctgcaacggcgtggagggcttcaattgttattttcccctgcagtcttacggcttccagcctacaaatccggtgggctatcagccataccgggtggtggtgctgtcttttgagctgctgcacgcaccagcaaccgtgtgcggccccaagaagagcacacatcatcaccaccaccaccaccactga

SEQ ID NO: 2447 - DNA, 735 bp, Artificial Sequence
  Description of Artificial Sequence: Synthetic polynucleotide
atgggcatcctgccaagcccaggaatgcccgccctgctgtctctggtgagcctgctgtccgtgctgctgatgggatgcgtggcagagacaggcacaaggttccctaacatcaccaatctgtgcccattcggcgaggtgtttaacgccacacgctttgcctccgtgtatgcctggaaccggaagagaatctctaattgcgtggccgactatagcgtgctgtacaatagcgcctccttctctacctttaagtgctatggcgtgagccccaccaagctgaacgatctgtgcttcacaaacgtgtacgccgactcctttgtgatccggggcgatgaagtgagacagatcgcaccaggacagaccggagagatcgcagactacaactataagctgcctgacgatttcacaggctgcgtgatcgcctggaatagcaacaatctggattccaaagtgggcggcaactacaattatctgtacaggctgttccgcaagtccaacctgaagccatttgagcgggacatctccaccgagatctaccaggccggctctacaccctgcaacggcgtggagggcttcaattgttattttcccctgcagtcttacggcttccagcctacaaatggcgtgggctatcagccataccgggtggtggtgctgtcttttgagctgctgcacgcaccagcaaccgtgtgcggccccaagaagagcacacatcatcaccaccaccaccaccactga

SEQ ID NO: 2448 - DNA, 735 bp, Artificial Sequence
  Description of Artificial Sequence: Synthetic polynucleotide
atgggcatcctgccaagcccaggaatgcccgccctgctgtctctggtgagcctgctgtccgtgctgctgatgggatgcgtggcagagacaggcacaaggttccctaacatcaccaatctgtgcccattcggcgaggtgtttaacgccacacgctttgcctccgtgtatgcctggaaccggaagagaatctctaattgcgtggccgactatagcgtgctgtacaatagcgcctccttctctacctttaagtgctatggcgtgagccccaccaagctgaacgatctgtgcttcacaaacgtgtacgccgactcctttgtgatccggggcgatgaagtgagacagatcgcaccaggacagaccggaaagatcgcagactacaactataagctgcctgacgatttcacaggctgcgtgatcgcctggaatagcaacaatctggattccaaagtgggcggcaactacaattatctgtacaggctgttccgcaagtccaacctgaagccatttgagcgggacatctccaccgagatctaccaggccggctctacaccctgcaacggcgtggagggcttcaattgtagatttcccctgcagtcttacggcttccagcctacaaatggcgtgggctatcagccataccgggtggtggtgctgtcttttgagctgctgcacgcaccagcaaccgtgtgcggccccaagaagagcacacatcatcaccaccaccaccaccactga

SEQ ID NO: 2449 - DNA, 735 bp, Artificial Sequence
  Description of Artificial Sequence: Synthetic polynucleotide
atgggcatcctgccaagcccaggaatgcccgccctgctgtctctggtgagcctgctgtccgtgctgctgatgggatgcgtggcagagacaggcacaaggttccctaacatcaccaatctgtgcccattcggcgaggtgtttaacgccacacgctttgcctccgtgtatgcctggaaccggaagagaatctctaattgcgtggccgactatagcgtgctgtacaatagcgcctccttctctacctttaagtgctatggcgtgagccccaccaagctgaacgatctgtgcttcacaaacgtgtacgccgactcctttgtgatccggggcgatgaagtgagacagatcgcaccaggacagaccggaaagatcgcagactacaactataagctgcctgacgatttcacaggctgcgtgatcgcctggaatagcaacaatctggattccaaagtgggcggcaactacaattatctgtacaggctgttccgcaagtccaacctgaagccatttgagcgggacatctccaccgagatctaccaggccggctctacaccctgcaacggcgtggagggcttcaattgttattttcccctgcagtcttacggcttccagcctacaaatggcgtggactatcagccataccgggtggtggtgctgtcttttgagctgctgcacgcaccagcaaccgtgtgcggccccaagaagagcacacatcatcaccaccaccaccaccactga

SEQ ID NO: 2450 - DNA, 735 bp, Artificial Sequence
  Description of Artificial Sequence: Synthetic polynucleotide
atgggcatcctgccaagcccaggaatgcccgccctgctgtctctggtgagcctgctgtccgtgctgctgatgggatgcgtggcagagacaggcacaaggttccctaacatcaccaatctgtgcccattcggcgaggtgtttaacgccacacgctttgcctccgtgtatgcctggaaccggaagagaatctctaattgcgtggccgactatagcgtgctgtacaatagcaactccttctctacctttaagtgctatggcgtgagccccaccaagctgaacgatctgtgcttcacaaacgtgtacgccgactcctttgtgatccggggcgatgaagtgagacagatcgcaccaggacagaccggaaagatcgcagactacaactataagctgcctgacgatttcacaggctgcgtgatcgcctggaatagcaacaatctggattccaaagtgggcggcaactacaattatctgtacaggctgttccgcaagtccaacctgaagccatttgagcgggacatctccaccgagatctaccaggccggctctacaccctgcaacggcgtggagggcttcaattgttattttcccctgcagtcttacggcttccagcctacaaatggcgtgggctatcagccataccgggtggtggtgctgtcttttgagctgctgcacgcaccagcaaccgtgtgcggccccaagaagagcacacatcatcaccaccaccaccaccactga

SEQ ID NO: 2451 - DNA, 735 bp, Artificial Sequence
  Description of Artificial Sequence: Synthetic polynucleotide
atgggcatcctgccaagcccaggaatgcccgccctgctgtctctggtgagcctgctgtccgtgctgctgatgggatgcgtggcagagacaggcacaaggttccctaacatcaccaatctgtgcccattcggcgaggtgtttaacgccacacgctttgcctccgtgtatgcctggaaccggaagagaatctctaattgcgtggccgactatagcgtgctgtacaatagctgttccttctctacctttaagtgctatggcgtgagccccaccaagctgaacgatctgtgcttcacaaacgtgtacgccgactcctttgtgatccggggcgatgaagtgagacagatcgcaccaggacagaccggaaagatcgcagactacaactataagctgcctgacgatttcacaggctgcgtgatcgcctggaatagcaacaatctggattccaaagtgggcggcaactacaattatctgtacaggctgttccgcaagtccaacctgaagccatttgagcgggacatctccaccgagatctaccaggccggctctacaccctgcaacggcgtggagggcttcaattgttattttcccctgcagtcttacggcttccagcctacaaatggcgtgggctatcagccataccgggtggtggtgctgtcttttgagctgctgcacgcaccagcaaccgtgtgcggccccaagaagagcacacatcatcaccaccaccaccaccactga

SEQ ID NO: 2452 - DNA, 735 bp, Artificial Sequence
  Description of Artificial Sequence: Synthetic polynucleotide
atgggcatcctgccaagcccaggaatgcccgccctgctgtctctggtgagcctgctgtccgtgctgctgatgggatgcgtggcagagacaggcacaaggttccctaacatcaccaatctgtgcccattcggcgaggtgtttaacgccacacgctttgcctccgtgtatgcctggaaccggaagagaatctctaattgcgtggccgactatagcgtgctgtacaatagcgcctccttctctacctttaagtgctatggcgtgagccccaccaagctgaacgatctgtgcttcacaaacgtgtacgccgactcctttgtgatccggggcgatgaagtgagacagatcgcaccaggacagaccggaaagatcgcagactacaactataagctgcctgacgatttcacaggctgcgtgatcgcctggaatagcaacaatctggattccaaagtgggcggcaactacaattatctgtacaggctgttccgcaagtccaacctgaagccatttgagcgggacatctccaccgagatctaccaggccggctctacaccctgcaacggcgtggagggcattaattgttattttcccctgcagtcttacggcttccagcctacaaatggcgtgggctatcagccataccgggtggtggtgctgtcttttgagctgctgcacgcaccagcaaccgtgtgcggccccaagaagagcacacatcatcaccaccaccaccaccactga

SEQ ID NO: 2453 - DNA, 735 bp, Artificial Sequence
  Description of Artificial Sequence: Synthetic polynucleotide
atgggcatcctgccaagcccaggaatgcccgccctgctgtctctggtgagcctgctgtccgtgctgctgatgggatgcgtggcagagacaggcacaaggttccctaacatcaccaatctgtgcccattcggcgaggtgtttaacgccacacgctttgcctccgtgtatgcctggaaccggaagagaatctctaattgcgtggccgactatagcgtgctgtacaatagcgcctccttctctacctttaagtgctatggcgtgagccccaccaagctgaacgatctgtgcttcacatcagtgtacgccgactcctttgtgatccggggcgatgaagtgagacagatcgcaccaggacagaccggaaagatcgcagactacaactataagctgcctgacgatttcacaggctgcgtgatcgcctggaatagcaacaatctggattccaaagtgggcggcaactacaattatctgtacaggctgttccgcaagtccaacctgaagccatttgagcgggacatctccaccgagatctaccaggccggctctacaccctgcaacggcgtggagggcttcaattgttattttcccctgcagtcttacggcttccagcctacaaatggcgtgggctatcagccataccgggtggtggtgctgtcttttgagctgctgcacgcaccagcaaccgtgtgcggccccaagaagagcacacatcatcaccaccaccaccaccactga

SEQ ID NO: 2454 - DNA, 735 bp, Artificial Sequence
  Description of Artificial Sequence: Synthetic polynucleotide
atgggcatcctgccaagcccaggaatgcccgccctgctgtctctggtgagcctgctgtccgtgctgctgatgggatgcgtggcagagacaggcacaaggttccctaacatcaccaatctgtgcccattcggcgaggtgtttaacgccacacgctttgcctccgtgtatgcctggaaccggaagagaatctctaattgcgtggccgactatagcgtgctgtacaatagcgcctccttctctacctttaagtgctatggcgtgagccccaccaagctgaacgatctgtgcttcacaaacgtgtacgccgactcctttgtgatccggggcgatgaagtgagacagatcgcaccaggacagaccggaaagatcgcagactacaactataagctgcctgacgatttcacaggctgcgtgatcgcctggaatagctcgaatctggattccaaagtgggcggcaactacaattatctgtacaggctgttccgcaagtccaacctgaagccatttgagcgggacatctccaccgagatctaccaggccggctctacaccctgcaacggcgtggagggcttcaattgttattttcccctgcagtcttacggcttccagcctacaaatggcgtgggctatcagccataccgggtggtggtgctgtcttttgagctgctgcacgcaccagcaaccgtgtgcggccccaagaagagcacacatcatcaccaccaccaccaccactga

SEQ ID NO: 2455 - DNA, 735 bp, Artificial Sequence
  Description of Artificial Sequence: Synthetic polynucleotide
atgggcatcctgccaagcccaggaatgcccgccctgctgtctctggtgagcctgctgtccgtgctgctgatgggatgcgtggcagagacaggcacaaggttccctaacatcaccaatctgtgcccattcggcgaggtgtttaacgccacacgctttgcctccgtgtatgcctggaaccggaagagaatctctaattgcgtggccgactatagcgtgctgtacaatagcgcctccttctctacctttaagtgctatggcgtgagccccaccaagctgaacgatctgtgcttcacaaacgtgtacgccgactcctttgtgatccggggcgatgaagtgagacagatcgcaccaggacagaccggaaagatcgcagactacaactataagctgcctgacgatttcacaggctgcgtgatcgcctggaatagcaacaatctggattccaaagtgggcggcaactacaattatctgtacaggctgttccgcaagtccaacctgaagccatttgagcgggacatctccaccgagatctaccaggccggctctacaccctgcaacggcgtggagggcttcaattgttatggtcccctgcagtcttacggcttccagcctacaaatggcgtgggctatcagccataccgggtggtggtgctgtcttttgagctgctgcacgcaccagcaaccgtgtgcggccccaagaagagcacacatcatcaccaccaccaccaccactga

SEQ ID NO: 2456 - DNA, 735 bp, Artificial Sequence
  Description of Artificial Sequence: Synthetic polynucleotide
atgggcatcctgccaagcccaggaatgcccgccctgctgtctctggtgagcctgctgtccgtgctgctgatgggatgcgtggcagagacaggcacaaggttccctaacatcaccaatctgtgcccattcggcgaggtgtttaacgccacacgctttgcctccgtgtatgcctggaaccggaagagaatctctaattgcgtggccgactatagcgtgctgtacaatagcgcctccttctctacctttaagtgctatggcgtgagccccaccaagctgaacgatctgtgcttcacaaacgtgtacgccgactcctttgtgatccggggcgatgaagtgagacagatcgcaccaggacagaccggaaagatcgcagactacaactataagctgcctgacgatttcacaggctgcgtgatcgcctggaatagcaacaatctggattccaaagtgggcggcaactacaattatctgtacaggctgttccgcaagtccaacctgaagccatttgagcgggacatctccaccgagatctaccaggccggctctacaccctgcaacggcgtggagggcttcaattgttattttcccctgcagtcttacggcttccagcctacagaaggcgtgggctatcagccataccgggtggtggtgctgtcttttgagctgctgcacgcaccagcaaccgtgtgcggccccaagaagagcacacatcatcaccaccaccaccaccactga

SEQ ID NO: 2457 - DNA, 735 bp, Artificial Sequence
  Description of Artificial Sequence: Synthetic polynucleotide
atgggcatcctgccaagcccaggaatgcccgccctgctgtctctggtgagcctgctgtccgtgctgctgatgggatgcgtggcagagacaggcacaaggttccctaacatcaccaatctgtgcccattcggcgaggtgtttaacgccacacgctttgcctccgtgtatgcctggaaccggaagagaatctctaattgcgtggccgactatagcgtgctgtacaatagcgcctccttctctacctttaagtgctatggcgtgagccccaccaagctgaacgatctgtgcttcacaaacgtgtacgccgactcctttgtgatccggggcgatgaagtgagacagatcgcaccaggacagaccggaaagatcgcagactacaactataagctgcctgacgatttcacaggctgcgtgatcgcctggaatagcaacaatctggattccaaagtgggcggcaactacaattatctgtacaggctgttccgcaagtccaacctgaagccatttgagcgggacatctccaccgagatctaccaggccggctctacaccctgcaacggcgtggagggcttcaattgttatcgacccctgcagtcttacggcttccagcctacaaatggcgtgggctatcagccataccgggtggtggtgctgtcttttgagctgctgcacgcaccagcaaccgtgtgcggccccaagaagagcacacatcatcaccaccaccaccaccactga

SEQ ID NO: 2458 - DNA, 735 bp, Artificial Sequence
  Description of Artificial Sequence: Synthetic polynucleotide
atgggcatcctgccaagcccaggaatgcccgccctgctgtctctggtgagcctgctgtccgtgctgctgatgggatgcgtggcagagacaggcacaaggttccctaacatcaccaatctgtgcccattcggcgaggtgtttaacgccacacgctttgcctccgtgtatgcctggaaccggaagagaatctctaattgcgtggccgactatagcgtgctgtacaatagcgcctccttctctacctttaagtgctatggcgtgagccccaccaagctgaacgatctgtgcttcacaaacgtgtacgccgactcctttgtgatccggggcgatgaagtgagacagatcgcaccaggacagaccggaaagatcgcagactacaactataagctgcctgacgatttcacaggctgcgtgatcgcctggaatagcaacaatctggattccaaagtgggcggcaactacaattatctgtacaggctgttccgcaagtccaacctgaagccatttgagcgggacatctccaccgagatctaccaggccggctctacaccctgcaacggcgtggagggcttcaattgttattttcccctgcagtcttacggcttccagcctacagatggcgtgggctatcagccataccgggtggtggtgctgtcttttgagctgctgcacgcaccagcaaccgtgtgcggccccaagaagagcacacatcatcaccaccaccaccaccactga

SEQ ID NO: 2459 - DNA, 735 bp, Artificial Sequence
  Description of Artificial Sequence: Synthetic polynucleotide
atgggcatcctgccaagcccaggaatgcccgccctgctgtctctggtgagcctgctgtccgtgctgctgatgggatgcgtggcagagacaggcacaaggttccctaacatcaccaatctgtgcccattcggcgaggtgtttaacgccacacgctttgcctccgtgtatgcctggaaccggaagagaatctctaattgcgtggccgactatagcgtgctgtacaatagcgcctccttctctacctttaagtgctatggcgtgagccccaccaagctgaacgatctgtgcttcacaaacgtgtacgccgactcctttgtgatccggggcgatgaagtgagacagatcgcaccaggacagaccggaaagatcgcagactacaactataagctgcctgacgatttcacaggctgcgtgatcgcctggaatagcaacaatctggattccaaagtgggcggcaactacaattatctgtacaggctgttccgcaagtccaacctgaagccatttgagcgggacatctccaccgagatctaccaggccggctctacaccctgcaacggcgtggagggcttaaattgttattttcccctgcagtcttacggcttccagcctacaaatggcgtgggctatcagccataccgggtggtggtgctgtcttttgagctgctgcacgcaccagcaaccgtgtgcggccccaagaagagcacacatcatcaccaccaccaccaccactga

SEQ ID NO: 2460 - DNA, 735 bp, Artificial Sequence
  Description of Artificial Sequence: Synthetic polynucleotide
atgggcatcctgccaagcccaggaatgcccgccctgctgtctctggtgagcctgctgtccgtgctgctgatgggatgcgtggcagagacaggcacaaggttccctaacatcaccaatctgtgcccattcggcgaggtgtttaacgccacacgctttgcctccgtgtatgcctggaaccggaagagaatctctaattgcgtggccgactatagcgtgctgtacaatagcgcctccttctctacctttaagtgctatggcgtgagccccaccaagctgaacgatctgtgcttcacaaacgtgtacgccgactcctttgtgatccggggcgatgaagtgagacagatcgcaccaggacagaccggaaagatcgcagactacaactataagctgcctgacgatttcacaggctgcgtgatcgcctggaatagcaacaatctggattccaaagtgggcggcaactacaattatctgtacaggctgttccgcaagtccaacctgaagccatttgagcgggacatctccaccgagatctaccaggccggctctacaccctgcaacggcgtggagggcttcaattgttattttcccctgcagtcttacggcttccagcctacaaatggcgtggcttatcagccataccgggtggtggtgctgtcttttgagctgctgcacgcaccagcaaccgtgtgcggccccaagaagagcacacatcatcaccaccaccaccaccactga

SEQ ID NO: 2461 - DNA, 735 bp, Artificial Sequence
  Description of Artificial Sequence: Synthetic polynucleotide
atgggcatcctgccaagcccaggaatgcccgccctgctgtctctggtgagcctgctgtccgtgctgctgatgggatgcgtggcagagacaggcacaaggttccctaacatcaccaatctgtgcccattcggcgaggtgtttaacgccacacgctttgcctccgtgtatgcctggaaccggaagaaaatctctaattgcgtggccgactatagcgtgctgtacaatagcgcctccttctctacctttaagtgctatggcgtgagccccaccaagctgaacgatctgtgcttcacaaacgtgtacgccgactcctttgtgatccggggcgatgaagtgagacagatcgcaccaggacagaccggaaagatcgcagactacaactataagctgcctgacgatttcacaggctgcgtgatcgcctggaatagcaacaatctggattccaaagtgggcggcaactacaattatctgtacaggctgttccgcaagtccaacctgaagccatttgagcgggacatctccaccgagatctaccaggccggctctacaccctgcaacggcgtggagggcttcaattgttattttcccctgcagtcttacggcttccagcctacaaatggcgtgggctatcagccataccgggtggtggtgctgtcttttgagctgctgcacgcaccagcaaccgtgtgcggccccaagaagagcacacatcatcaccaccaccaccaccactga

SEQ ID NO: 2462 - DNA, 735 bp, Artificial Sequence
  Description of Artificial Sequence: Synthetic polynucleotide
atgggcatcctgccaagcccaggaatgcccgccctgctgtctctggtgagcctgctgtccgtgctgctgatgggatgcgtggcagagacaggcacaaggttccctaacatcaccaatctgtgcccattcggcgaggtgtttaacgccacacgctttgcctccgtgtatgcctggaaccggaagagaatctctaattgcgtggccgactatagcgtgctgtacaatagcgcctccttctctacctttaagtgctatggcgtgagccccaccaagctgaacgatctgtgcttcacaaacgtgtacgccgactcctttgtgatccggggcgatgaagtgagacagatcgcaccaggacagaccggaaagatcgcagactacaactataagctgcctgacgatttcacaggctgcgtgatcgcctggaatagcaacaatctggattccaaagtgggcggcaactacaattatctgtacaggctgttccgcaagtccaacctgaagccatttgagcgggacatctccaccgagatctaccaggccggctctacaccctgcaacggcgtggagggcttcaattgttataaacccctgcagtcttacggcttccagcctacaaatggcgtgggctatcagccataccgggtggtggtgctgtcttttgagctgctgcacgcaccagcaaccgtgtgcggccccaagaagagcacacatcatcaccaccaccaccaccactga

SEQ ID NO: 2463 - DNA, 735 bp, Artificial Sequence
  Description of Artificial Sequence: Synthetic polynucleotide
atgggcatcctgccaagcccaggaatgcccgccctgctgtctctggtgagcctgctgtccgtgctgctgatgggatgcgtggcagagacaggcacaaggttccctaacatcaccaatctgtgcccattcggcgaggtgtttaacgccacacgctttgcctccgtgtatgcctggaaccggaagagaatctctaattgcgtggccgactatagcgtgctgtacaatagcgcctccttctctacctttaagtgctatggcgtgagccccaccaagctgaacgatctgtgcttcacaaacgtgtacgccgactcctttgtgatccggggcgatgaagtgagacagatcgcaccaggacagaccggaaagatcgcagactacaactataagctgcctgacgatttcacaggctgcgtgatcgcctggaatagcaacaatctggattccaaagtgggcggcaactacaattatctgtacaggctgttccgcaagtccaacctgaagccatttgagcgggacatctccaccgagatctaccaggccggctctacaccctgcaacggcgtgccgggcttcaattgttattttcccctgcagtcttacggcttccagcctacaaatggcgtgggctatcagccataccgggtggtggtgctgtcttttgagctgctgcacgcaccagcaaccgtgtgcggccccaagaagagcacacatcatcaccaccaccaccaccactga

SEQ ID NO: 2464 - DNA, 735 bp, Artificial Sequence
  Description of Artificial Sequence: Synthetic polynucleotide
atgggcatcctgccaagcccaggaatgcccgccctgctgtctctggtgagcctgctgtccgtgctgctgatgggatgcgtggcagagacaggcacaaggttccctaacatcaccaatctgtgcccattcggcgaggtgtttaacgccacacgctttgcctccgtgtatgcctggaaccggaagagaatctctaattgcgtggccgactatagcgtgctgtacaatagcgcctccttctctacctttaagtgctatggcgtgagccccaccaagctgaacgatctgtgcttcacaaacgtgtacgccgactcctttgtgatccggggcgatgaagtgagacagatcgcaccaggacagaccggaaagatcgcagactacaactataagctgcctgacgatttcacaggctgcgtgatcgcctggaatagcaacaatctggattccaaagtgggcggcaactacaattatctgtacaggctgttccgcaagtccaacctgaagccatttgagcgggacatctccaccgagatctaccaggccggctctacaccctgcaacggcgctgagggcttcaattgttattttcccctgcagtcttacggcttccagcctacaaatggcgtgggctatcagccataccgggtggtggtgctgtcttttgagctgctgcacgcaccagcaaccgtgtgcggccccaagaagagcacacatcatcaccaccaccaccaccactga

SEQ ID NO: 2465 - DNA, 735 bp, Artificial Sequence
  Description of Artificial Sequence: Synthetic polynucleotide
atgggcatcctgccaagcccaggaatgcccgccctgctgtctctggtgagcctgctgtccgtgctgctgatgggatgcgtggcagagacaggcacaaggttccctaacatcaccaatctgtgcccattcggcgaggtgtttaacgccacacgctttgcctccgtgtatgcctggaaccggaagagaatctctaattgcgtggccgactatagcgtgctgtacaatagcgcctccttctctacctttaagtgctatggcgtgagccccaccaagctgaacgatctgtgcttcacaaacgtgtacgccgactcctttgtgatccggggcgatgaagtgagacagatcgcaccaggacagaccggaaagatcgcagactacaactataagctgcctgacgatttcacaggctgcgtgatcgcctggaatagcaacaatctggattccaaagtgggcggcaactacaattatctgtacaggctgttccgcaagtccaacctgaagccatttgagcgggacatctccaccgagatctaccaggccggctctacaccctgcaacggcgtggagggcttcaattgttatatgcccctgcagtcttacggcttccagcctacaaatggcgtgggctatcagccataccgggtggtggtgctgtcttttgagctgctgcacgcaccagcaaccgtgtgcggccccaagaagagcacacatcatcaccaccaccaccaccactga

SEQ ID NO: 2466 - DNA, 735 bp, Artificial Sequence
  Description of Artificial Sequence: Synthetic polynucleotide
atgggcatcctgccaagcccaggaatgcccgccctgctgtctctggtgagcctgctgtccgtgctgctgatgggatgcgtggcagagacaggcacaaggttccctaacatcaccaatctgtgcccattcggcgaggtgtttaacgccacacgctttgcctccgtgtatgcctggaaccggaagagaatctctaattgcgtggccgactatagcgtgctgtacaatagcgcctccttctctacctttaagtgctatggcgtgagccccaccaagctgaacgatctgtgcttcacaaacgtgtacgccgactcctttgtgatccggggcgatgaagtgagacagatcgcaccaggacagaccggaaagatcgcagactacaactataagctgcctgacgatttcacaggctgcgtgatcgcctggaatagcaacaatctggattccaaagtgggcggcaactacaattatctgtacaggctgttccgcaagtccaacctgaagccatttgagcgggacatctccaccgagatctaccaggccggctctacaccctgcaacggcgtggagggccccaattgttattttcccctgcagtcttacggcttccagcctacaaatggcgtgggctatcagccataccgggtggtggtgctgtcttttgagctgctgcacgcaccagcaaccgtgtgcggccccaagaagagcacacatcatcaccaccaccaccaccactga

SEQ ID NO: 2467 - DNA, 735 bp, Artificial Sequence
  Description of Artificial Sequence: Synthetic polynucleotide
atgggcatcctgccaagcccaggaatgcccgccctgctgtctctggtgagcctgctgtccgtgctgctgatgggatgcgtggcagagacaggcacaaggttccctaacatcaccaatctgtgcccattcggcgaggtgtttaacgccacacgctttgcctccgtgtatgcctggaaccggaagagaatctctaattgcgtggccgactatacggtgctgtacaatagcgcctccttctctacctttaagtgctatggcgtgagccccaccaagctgaacgatctgtgcttcacaaacgtgtacgccgactcctttgtgatccggggcgatgaagtgagacagatcgcaccaggacagaccggaaagatcgcagactacaactataagctgcctgacgatttcacaggctgcgtgatcgcctggaatagcaacaatctggattccaaagtgggcggcaactacaattatctgtacaggctgttccgcaagtccaacctgaagccatttgagcgggacatctccaccgagatctaccaggccggctctacaccctgcaacggcgtggagggcttcaattgttattttcccctgcagtcttacggcttccagcctacaaatggcgtgggctatcagccataccgggtggtggtgctgtcttttgagctgctgcacgcaccagcaaccgtgtgcggccccaagaagagcacacatcatcaccaccaccaccaccactga

SEQ ID NO: 2468 - DNA, 735 bp, Artificial Sequence
  Description of Artificial Sequence: Synthetic polynucleotide
atgggcatcctgccaagcccaggaatgcccgccctgctgtctctggtgagcctgctgtccgtgctgctgatgggatgcgtggcagagacaggcacaaggttccctaacatcaccaatctgtgcccattcggcgaggtgtttaacgccacacgctttgcctccgtgtatgcctggaaccggaagagaatctctaattgcgtggccgactatagcgtgctgtacaatagcgcctccttctctacctttaagtgctatggcgtgagccccaccaagctgaacgatctgtgcttcacaaacgtgtacgccgactcctttgtgatccggggcgatgaagtgagacagatcgcaccaggacagaccggaaagatcgcagactacaactataagctgcctgacgatttcacaggctgcgtgatcgcctggaatagcaacaatctggattccaaagtgggcggcaactacaattatctgtacaggctgttccgcaagtccaacctgaagccatttgagcgggacatctccaccgagatctaccaggccggctctacaccctgcaacggcgtggagggcttcaattgttattttcccctgcagtcttacggcttccagcctacattgggcgtgggctatcagccataccgggtggtggtgctgtcttttgagctgctgcacgcaccagcaaccgtgtgcggccccaagaagagcacacatcatcaccaccaccaccaccactga

SEQ ID NO: 2469 - DNA, 735 bp, Artificial Sequence
  Description of Artificial Sequence: Synthetic polynucleotide
atgggcatcctgccaagcccaggaatgcccgccctgctgtctctggtgagcctgctgtccgtgctgctgatgggatgcgtggcagagacaggcacaaggttccctaacatcaccaatctgtgcccattcggcgaggtgtttaacgccacacgctttgcctccgtgtatgcctggaaccggaagagaatctctaattgcgtggccgactatagcgtgctgtacaatagcgcctccttctctacctttaagtgctatggcgtgagccccaccaagctgaacgatctgtgcttcacaaacgtgtacgccgactcctttgtgatccggggcgatgaagtgagacagatcgcaccaggacagaccggaaagatcgcagactacaactataagctgcctgacgatttcacaggctgcgtgatcgcctggaatagcaacaatctggattccaaagtgggcggcaactacaattatctgtacaggctgttccgcaagtccaacctgaagccatttgagcgggacatctccaccgagatctaccaggccggctctacaccctgcaacggcgtgactggcttcaattgttattttcccctgcagtcttacggcttccagcctacaaatggcgtgggctatcagccataccgggtggtggtgctgtcttttgagctgctgcacgcaccagcaaccgtgtgcggccccaagaagagcacacatcatcaccaccaccaccaccactga

SEQ ID NO: 2470 - DNA, 735 bp, Artificial Sequence
  Description of Artificial Sequence: Synthetic polynucleotide
atgggcatcctgccaagcccaggaatgcccgccctgctgtctctggtgagcctgctgtccgtgctgctgatgggatgcgtggcagagacaggcacaaggttccctaacatcaccaatctgtgcccattcggcagagtgtttaacgccacacgctttgcctccgtgtatgcctggaaccggaagagaatctctaattgcgtggccgactatagcgtgctgtacaatagcgcctccttctctacctttaagtgctatggcgtgagccccaccaagctgaacgatctgtgcttcacaaacgtgtacgccgactcctttgtgatccggggcgatgaagtgagacagatcgcaccaggacagaccggaaagatcgcagactacaactataagctgcctgacgatttcacaggctgcgtgatcgcctggaatagcaacaatctggattccaaagtgggcggcaactacaattatctgtacaggctgttccgcaagtccaacctgaagccatttgagcgggacatctccaccgagatctaccaggccggctctacaccctgcaacggcgtggagggcttcaattgttattttcccctgcagtcttacggcttccagcctacaaatggcgtgggctatcagccataccgggtggtggtgctgtcttttgagctgctgcacgcaccagcaaccgtgtgcggccccaagaagagcacacatcatcaccaccaccaccaccactga

SEQ ID NO: 2471 - DNA, 735 bp, Artificial Sequence
  Description of Artificial Sequence: Synthetic polynucleotide
atgggcatcctgccaagcccaggaatgcccgccctgctgtctctggtgagcctgctgtccgtgctgctgatgggatgcgtggcagagacaggcacaaggttccctaacatcaccaatctgtgcccattcggcgaggtgtttaacgccacacgctttgcctccgtgtatgcctggaaccggaagagaatctctaattgcgtggccgactatagcgtgctgtacaatagcgcctccttctctacctttaagtgctatggcgtgagccccaccaagctgaacgatctgtgcttcacaaacgtgtacgccgactcctttgtgatccggggcgatgaagtgagacagatcgcaccaggacagaccggaaagatcgcagactacaactataagctgcctgacgatttcacaggctgcgtgatcgcctggaatagcaacaatctggattccaaagtgggcggcaactacaattatctgtacaggctgttccgcaagtccaacctgaagccatttgagcgggacatctccaccgagatctaccaggccggctctacaccctgcaacggcgtggagggcttcaattgttatgatcccctgcagtcttacggcttccagcctacaaatggcgtgggctatcagccataccgggtggtggtgctgtcttttgagctgctgcacgcaccagcaaccgtgtgcggccccaagaagagcacacatcatcaccaccaccaccaccactga

SEQ ID NO: 2472 - DNA, 735 bp, Artificial Sequence
  Description of Artificial Sequence: Synthetic polynucleotide
atgggcatcctgccaagcccaggaatgcccgccctgctgtctctggtgagcctgctgtccgtgctgctgatgggatgcgtggcagagacaggcacaaggttccctaacatcaccaatctgtgcccattcggcgaggtgtttaacgccacacgctttgcctccgtgtatgcctggaaccggaagagaatctctaattgcgtggccgactatagcgtgctgtacaatagcgcctccttctctacctttaagtgctatggcgtgagccccaccaagctgaacgatctgtgcttcacaaacgtgtacgccgactcctttgtgatccggggcgatgaagtgagacagatcgcaccaggacagaccggaaagatcgcagactacaactataagctgcctgacgatttcacaggctgcgtgatcgcctggaatagcaacaatctggattccaaagtgggcggcaactacaattatctgtacaggctgttccgcaagtccaacctgaagccatttgagcgggacatctccaccgagatctaccaggccggctctacaccctgcaacggcgtggagggcttcaattgttattggcccctgcagtcttacggcttccagcctacaaatggcgtgggctatcagccataccgggtggtggtgctgtcttttgagctgctgcacgcaccagcaaccgtgtgcggccccaagaagagcacacatcatcaccaccaccaccaccactga

SEQ ID NO: 2473 - DNA, 735 bp, Artificial Sequence
  Description of Artificial Sequence: Synthetic polynucleotide
atgggcatcctgccaagcccaggaatgcccgccctgctgtctctggtgagcctgctgtccgtgctgctgatgggatgcgtggcagagacaggcacaaggttccctaacatcaccaatctgtgcccattcggcgaggtgtttaacgccacacgctttgcctccgtgtatgcctggaaccggaagagaatctctaattgcgtggccgactatagcgtgctgtacaatagcgcctccttctctacctttaagtgctatggcgtgagccccaccaagctgaacgatctgtgcttcacaaacgtgtacgccgactcctttgtgatccggggcgatgaagtgagacagatcgcaccaggacagaccggaaagatcgcagactacaactataagctgcctgacgatttcacaggctgcgtgatcgcctggaatagcaacaatctggattccaaagtgggcggcaactacaattatctgtacaggctgttccgcaagtccaacctgaagccatttgagcgggacatctccaccgagatctaccaggccggctctacaccctgcaacggcgtggagggcttcaattgttatgaacccctgcagtcttacggcttccagcctacaaatggcgtgggctatcagccataccgggtggtggtgctgtcttttgagctgctgcacgcaccagcaaccgtgtgcggccccaagaagagcacacatcatcaccaccaccaccaccactga

SEQ ID NO: 2474 - DNA, 735 bp, Artificial Sequence
  Description of Artificial Sequence: Synthetic polynucleotide
atgggcatcctgccaagcccaggaatgcccgccctgctgtctctggtgagcctgctgtccgtgctgctgatgggatgcgtggcagagacaggcacaaggttccctaacatcaccaatctgtgcccattcggcaaagtgtttaacgccacacgctttgcctccgtgtatgcctggaaccggaagagaatctctaattgcgtggccgactatagcgtgctgtacaatagcgcctccttctctacctttaagtgctatggcgtgagccccaccaagctgaacgatctgtgcttcacaaacgtgtacgccgactcctttgtgatccggggcgatgaagtgagacagatcgcaccaggacagaccggaaagatcgcagactacaactataagctgcctgacgatttcacaggctgcgtgatcgcctggaatagcaacaatctggattccaaagtgggcggcaactacaattatctgtacaggctgttccgcaagtccaacctgaagccatttgagcgggacatctccaccgagatctaccaggccggctctacaccctgcaacggcgtggagggcttcaattgttattttcccctgcagtcttacggcttccagcctacaaatggcgtgggctatcagccataccgggtggtggtgctgtcttttgagctgctgcacgcaccagcaaccgtgtgcggccccaagaagagcacacatcatcaccaccaccaccaccactga

SEQ ID NO: 2475 - DNA, 735 bp, Artificial Sequence
  Description of Artificial Sequence: Synthetic polynucleotide
atgggcatcctgccaagcccaggaatgcccgccctgctgtctctggtgagcctgctgtccgtgctgctgatgggatgcgtggcagagacaggcacaaggttccctaacatcaccaatctgtgcccattcggcgaggtgtttaacgccacacgctttgcctccgtgtatgcctggaaccggaagagaatctctaattgcgtggccgactatagcgtgctgtacaatagcgcctccttctctacctttaagtgctatggcgtgagccccaccaagctgaacgatctgtgcttcacaaacgtgtacgccgactcctttgtgatccggggcgatgaagtgagacagatcgcaccaggacagaccggacttatcgcagactacaactataagctgcctgacgatttcacaggctgcgtgatcgcctggaatagcaacaatctggattccaaagtgggcggcaactacaattatctgtacaggctgttccgcaagtccaacctgaagccatttgagcgggacatctccaccgagatctaccaggccggctctacaccctgcaacggcgtggagggcttcaattgttattttcccctgcagtcttacggcttccagcctacaaatggcgtgggctatcagccataccgggtggtggtgctgtcttttgagctgctgcacgcaccagcaaccgtgtgcggccccaagaagagcacacatcatcaccaccaccaccaccactga

SEQ ID NO: 2476 - DNA, 735 bp, Artificial Sequence
  Description of Artificial Sequence: Synthetic polynucleotide
atgggcatcctgccaagcccaggaatgcccgccctgctgtctctggtgagcctgctgtccgtgctgctgatgggatgcgtggcagagacaggcacaaggttccctaacatcaccaatctgtgcccattcggcgaggtgtttaacgccacacgctttgcctccgtgtatgcctggaaccggaagagaatctctaattgcgtggccgactatagcgtgctgtacaatagcgcctccttctctacctttaagtgctatggcgtgagccccaccaagctgaacgatctgtgcttcacaaacgtgtacgccgactcctttgtgatccggggcgatgaagtgagacagatcgcaccaggacagaccggaaagatcgcagactacaactataagctgcctgacgatttcacaggctgcgtgatcgcctggaatagcaacaatctggattccaaagtgggcggcaactacagttatctgtacaggctgttccgcaagtccaacctgaagccatttgagcgggacatctccaccgagatctaccaggccggctctacaccctgcaacggcgtggagggcttcaattgttattttcccctgcagtcttacggcttccagcctacaaatggcgtgggctatcagccataccgggtggtggtgctgtcttttgagctgctgcacgcaccagcaaccgtgtgcggccccaagaagagcacacatcatcaccaccaccaccaccactga

SEQ ID NO: 2477 - DNA, 735 bp, Artificial Sequence
  Description of Artificial Sequence: Synthetic polynucleotide
atgggcatcctgccaagcccaggaatgcccgccctgctgtctctggtgagcctgctgtccgtgctgctgatgggatgcgtggcagagacaggcacaaggttccctaacatcaccaatctgtgcccattcggcgaggtgtttaacgccacacgctttgcctccgtgtatgcctggaaccggaagagaatctctaattgcgtggccgactatagcgtgctgtacaatagcgcctccttctctacctttaagtgctatggcgtgagccccaccaagctgaacgatctgtgcttcacaaacgtgtacgccgactcctttgtgatccggggcgatgaagtgagacagatcgcaccaggacagaccggaaagatcgcagactacaactataagctgcctgacgatttcacaggctgcgtgatcgcctggaatagcaacaatctggattccaaagtgggcggcaactacaattatctgtacaggctgttccgcaagtccaacctgaagccatttgagcgggacatctccaccgagatctaccaggccggctctacaccctgcaacggcgtggagggctataattgttattttcccctgcagtcttacggcttccagcctacaaatggcgtgggctatcagccataccgggtggtggtgctgtcttttgagctgctgcacgcaccagcaaccgtgtgcggccccaagaagagcacacatcatcaccaccaccaccaccactga

SEQ ID NO: 2478 - DNA, 735 bp, Artificial Sequence
  Description of Artificial Sequence: Synthetic polynucleotide
atgggcatcctgccaagcccaggaatgcccgccctgctgtctctggtgagcctgctgtccgtgctgctgatgggatgcgtggcagagacaggcacaaggttccctaacatcaccaatctgtgcccattcggcgaggtgtttaacgccacacgctttgcctccgtgtatgcctggaaccggaagagaatctctaattgcgtggccgactatagcgtgctgtacaatagcgcctccttctctacctttaagtgctatggcgtgagccccaccaagctgaacgatctgtgcttcacaaacgtgtacgccgactcctttgtgatccggggcgatgaagtgagacagatcgcaccaggagaaaccggaaagatcgcagactacaactataagctgcctgacgatttcacaggctgcgtgatcgcctggaatagcaacaatctggattccaaagtgggcggcaactacaattatctgtacaggctgttccgcaagtccaacctgaagccatttgagcgggacatctccaccgagatctaccaggccggctctacaccctgcaacggcgtggagggcttcaattgttattttcccctgcagtcttacggcttccagcctacaaatggcgtgggctatcagccataccgggtggtggtgctgtcttttgagctgctgcacgcaccagcaaccgtgtgcggccccaagaagagcacacatcatcaccaccaccaccaccactga

SEQ ID NO: 2479 - DNA, 735 bp, Artificial Sequence
  Description of Artificial Sequence: Synthetic polynucleotide
atgggcatcctgccaagcccaggaatgcccgccctgctgtctctggtgagcctgctgtccgtgctgctgatgggatgcgtggcagagacaggcacaaggttccctaacatcaccaatctgtgcccattcggcgaggtgtttaacgccacacgctttgcctccgtgtatgcctggaaccggaagagaatctctaattgcgtggccgactatagcgtgctgtacaatagcgattccttctctacctttaagtgctatggcgtgagccccaccaagctgaacgatctgtgcttcacaaacgtgtacgccgactcctttgtgatccggggcgatgaagtgagacagatcgcaccaggacagaccggaaagatcgcagactacaactataagctgcctgacgatttcacaggctgcgtgatcgcctggaatagcaacaatctggattccaaagtgggcggcaactacaattatctgtacaggctgttccgcaagtccaacctgaagccatttgagcgggacatctccaccgagatctaccaggccggctctacaccctgcaacggcgtggagggcttcaattgttattttcccctgcagtcttacggcttccagcctacaaatggcgtgggctatcagccataccgggtggtggtgctgtcttttgagctgctgcacgcaccagcaaccgtgtgcggccccaagaagagcacacatcatcaccaccaccaccaccactga

SEQ ID NO: 2480 - DNA, 735 bp, Artificial Sequence
  Description of Artificial Sequence: Synthetic polynucleotide
atgggcatcctgccaagcccaggaatgcccgccctgctgtctctggtgagcctgctgtccgtgctgctgatgggatgcgtggcagagacaggcacaaggttccctaacatcaccaatctgtgcccattcaatgaggtgtttaacgccacacgctttgcctccgtgtatgcctggaaccggaagagaatctctaattgcgtggccgactatagcgtgctgtacaatagcgcctccttctctacctttaagtgctatggcgtgagccccaccaagctgaacgatctgtgcttcacaaacgtgtacgccgactcctttgtgatccggggcgatgaagtgagacagatcgcaccaggacagaccggaaagatcgcagactacaactataagctgcctgacgatttcacaggctgcgtgatcgcctggaatagcaacaatctggattccaaagtgggcggcaactacaattatctgtacaggctgttccgcaagtccaacctgaagccatttgagcgggacatctccaccgagatctaccaggccggctctacaccctgcaacggcgtggagggcttcaattgttattttcccctgcagtcttacggcttccagcctacaaatggcgtgggctatcagccataccgggtggtggtgctgtcttttgagctgctgcacgcaccagcaaccgtgtgcggccccaagaagagcacacatcatcaccaccaccaccaccactga

SEQ ID NO: 2481 - DNA, 735 bp, Artificial Sequence
  Description of Artificial Sequence: Synthetic polynucleotide
atgggcatcctgccaagcccaggaatgcccgccctgctgtctctggtgagcctgctgtccgtgctgctgatgggatgcgtggcagagacaggcacaaggttccctaacatcaccaatctgtgcccattcggcgaggtgtttaacgccacacgctttgcctccgtgtatgcctggaaccggaagagaatctctaattgcgtggccgactatagcgtgctgtacaatagcgcctccttctctacctttaagtgctatggcgtgagccccaccaagctgaacgatctgtgcttcacaaacgtgtacgccgactcctttgtgatccggggcgatgaagtgagacagatcgcaccaggacagaccggaaagatcgcagactacaactataagctgcctgacgatttcacaggctgcgtgatcgcctggaatagcaacaatctggattccaaagtgggcggcaactacaattatctgtacaggctgttccgcaagtccaacctgaagccatttgagcgggacatctccaccgagatctaccaggccggctctacaccctgcaacggcgtggagggcactaattgttattttcccctgcagtcttacggcttccagcctacaaatggcgtgggctatcagccataccgggtggtggtgctgtcttttgagctgctgcacgcaccagcaaccgtgtgcggccccaagaagagcacacatcatcaccaccaccaccaccactga

SEQ ID NO: 2482 - DNA, 735 bp, Artificial Sequence
  Description of Artificial Sequence: Synthetic polynucleotide
atgggcatcctgccaagcccaggaatgcccgccctgctgtctctggtgagcctgctgtccgtgctgctgatgggatgcgtggcagagacaggcacaaggttccctaacatcaccaatctgtgcccattcggcgaggtgtttaacgccacacgctttgcctccgtgtatgcctggaaccggaagagaatctctaattgcgtggccgactatagcgtgctgtacaatagcgcctccttctctacctttaagtgctatggcgtgagccccaccaagctgaacgatctgtgcttcacaaacgtgtacgccgactcctttgtgatccggggcgatgaagtgagacagatcgcaccaggacagaccggaaagatcgcagactacaactataagctgcctgacgatttcacaggctgcgtgatcgcctggaatagcgcgaatctggattccaaagtgggcggcaactacaattatctgtacaggctgttccgcaagtccaacctgaagccatttgagcgggacatctccaccgagatctaccaggccggctctacaccctgcaacggcgtggagggcttcaattgttattttcccctgcagtcttacggcttccagcctacaaatggcgtgggctatcagccataccgggtggtggtgctgtcttttgagctgctgcacgcaccagcaaccgtgtgcggccccaagaagagcacacatcatcaccaccaccaccaccactga

SEQ ID NO: 2483 - DNA, 735 bp, Artificial Sequence
  Description of Artificial Sequence: Synthetic polynucleotide
atgggcatcctgccaagcccaggaatgcccgccctgctgtctctggtgagcctgctgtccgtgctgctgatgggatgcgtggcagagacaggcacaaggttccctaacatcaccaatctgtgcccattcggcgaggtgtttaacgccacacgctttgcctccgtgtatgcctggaaccggaagagaatctctaattgcgtggccgactatagcgtgctgtacaatagcgcctccttctctacctttaagtgctatggcgtgagccccaccaagctgaacgatctgtgcttcacaaacgtgtacgccgactcctttgtgatccggggcgatgaagtgagacagatcgcaccaggacagaccggattcatcgcagactacaactataagctgcctgacgatttcacaggctgcgtgatcgcctggaatagcaacaatctggattccaaagtgggcggcaactacaattatctgtacaggctgttccgcaagtccaacctgaagccatttgagcgggacatctccaccgagatctaccaggccggctctacaccctgcaacggcgtggagggcttcaattgttattttcccctgcagtcttacggcttccagcctacaaatggcgtgggctatcagccataccgggtggtggtgctgtcttttgagctgctgcacgcaccagcaaccgtgtgcggccccaagaagagcacacatcatcaccaccaccaccaccactga

SEQ ID NO: 2484 - DNA, 735 bp, Artificial Sequence
  Description of Artificial Sequence: Synthetic polynucleotide
atgggcatcctgccaagcccaggaatgcccgccctgctgtctctggtgagcctgctgtccgtgctgctgatgggatgcgtggcagagacaggcacaaggttccctaacatcaccaatctgtgcccattcggcgaggtgtttaacgccacacgctttgcctccgtgtatgcctggaaccggactagaatctctaattgcgtggccgactatagcgtgctgtacaatagcgcctccttctctacctttaagtgctatggcgtgagccccaccaagctgaacgatctgtgcttcacaaacgtgtacgccgactcctttgtgatccggggcgatgaagtgagacagatcgcaccaggacagaccggaaagatcgcagactacaactataagctgcctgacgatttcacaggctgcgtgatcgcctggaatagcaacaatctggattccaaagtgggcggcaactacaattatctgtacaggctgttccgcaagtccaacctgaagccatttgagcgggacatctccaccgagatctaccaggccggctctacaccctgcaacggcgtggagggcttcaattgttattttcccctgcagtcttacggcttccagcctacaaatggcgtgggctatcagccataccgggtggtggtgctgtcttttgagctgctgcacgcaccagcaaccgtgtgcggccccaagaagagcacacatcatcaccaccaccaccaccactga

SEQ ID NO: 2485 - DNA, 735 bp, Artificial Sequence
  Description of Artificial Sequence: Synthetic polynucleotide
atgggcatcctgccaagcccaggaatgcccgccctgctgtctctggtgagcctgctgtccgtgctgctgatgggatgcgtggcagagacaggcacaaggttccctaacatcaccaatctgtgcccattcggcgaggtgtttaacgccacacgctttgcctccgtgtatgcctggaaccggaagagaatctctaattgcgtggccgactatagcgtgctgtacaatagcgcctccttctctacctttaagtgctatggcgtgagccccaccaagctgaacgatctgtgcttcacaaacgtgtacgccgactcctttgtgatccggggcgatgaagtgagacagatcgcaccaggacagaccggaaagatcgcagactacaactataagctgcctgacgatttcacaggctgcgtgatcgcctggaatagcaacaatctggattccaaagtgggcggcaactacaattatctgtacaggctgttccgcaagtccaacctgaagccatttgagcgggacatctccaccgagatctaccaggccggctctacaccctgcaacggcgtggtcggcttcaattgttattttcccctgcagtcttacggcttccagcctacaaatggcgtgggctatcagccataccgggtggtggtgctgtcttttgagctgctgcacgcaccagcaaccgtgtgcggccccaagaagagcacacatcatcaccaccaccaccaccactga

SEQ ID NO: 2486 - DNA, 735 bp, Artificial Sequence
  Description of Artificial Sequence: Synthetic polynucleotide
atgggcatcctgccaagcccaggaatgcccgccctgctgtctctggtgagcctgctgtccgtgctgctgatgggatgcgtggcagagacaggcacaaggttccctaacatcaccaatctgtgcccattcggcgaggtgtttaacgccacacgctttgcctccgtgtatgcctggaaccggaagagaatctctaattgcgtggccgactatagcgtgctgtacaatagcgcctccttctctacctttaagtgctatggcgtgagccccaccaagctgaacgatctgtgcttcacaaacgtgtacgccgactcctttgtgatccggggcgatgaagtgagacagatcgcaccaggacagaccggaaagatcgcagactacaactataagctgcctgacgatttcacaggctgcgtgatcgcctggaatagcaacaatctggattccaaagtgggcggcaactacaattatctgtacaggctgttccgcaagtccaacctgaagccatttgagcgggacatctccaccgagatctaccaggccggctctacaccctgcaacggcgtgtatggcttcaattgttattttcccctgcagtcttacggcttccagcctacaaatggcgtgggctatcagccataccgggtggtggtgctgtcttttgagctgctgcacgcaccagcaaccgtgtgcggccccaagaagagcacacatcatcaccaccaccaccaccactga

SEQ ID NO: 2487 - DNA, 735 bp, Artificial Sequence
  Description of Artificial Sequence: Synthetic polynucleotide
atgggcatcctgccaagcccaggaatgcccgccctgctgtctctggtgagcctgctgtccgtgctgctgatgggatgcgtggcagagacaggcacaaggttccctaacatcaccaatctgtgcccattcggcgaggtgtttaacgccacacgctttgcctccgtgtatgcctggaaccggaagagaatctctaattgcgtggccgactatagcgtgctgtacaatagcgcctccttctctacctttaagtgctatggcgtgagccccaccaagctgaacgatctgtgcttcacaaacgtgtacgccgactcctttgtgatccggggcgatgaagtgagacagatcgcaccaggacagaccggaaagatcgcagactacaactataagctgcctgacgatttcacaggctgcgtgatcgcctggaatagcaacaatctggattccaaagtgggcggcaactacaattatctgtacaggctgttccgcaagtccaacctgaagccatttgagcgggacatctccaccgagatctaccaggccggctctacaccctgcaacggcgtggagggcttcaattgttatacgcccctgcagtcttacggcttccagcctacaaatggcgtgggctatcagccataccgggtggtggtgctgtcttttgagctgctgcacgcaccagcaaccgtgtgcggccccaagaagagcacacatcatcaccaccaccaccaccactga

SEQ ID NO: 2488 - DNA, 735 bp, Artificial Sequence
  Description of Artificial Sequence: Synthetic polynucleotide
atgggcatcctgccaagcccaggaatgcccgccctgctgtctctggtgagcctgctgtccgtgctgctgatgggatgcgtggcagagacaggcacaaggttccctaacatcaccaatctgtgcccattcggcgaggtgtttaacgccacacgctttgcctccgtgtatgcctggaaccggaagagaatctctaattgcgtggccgactatagcgtgctgtacaatagcgcctccttctctacctttaagtgctatggcgtgagccccaccaagctgaacgatctgtgcttcacaaacgtgtacgccgactcctttgtgatccggggcgatgaagtgagacagatcgcaccaggacagaccggaaagatcgcagactacaactataagctgcctgacgatttcacaggctgcgtgatcgcctggaatagcaacaatctggattccaaagtgggcggcaactacaattatctgtacaggctgttccgcaagtccaacctgaagccatttgagcgggacatctccaccgagatctaccaggccggctctacaccctgcaacggcgtggagggcttcaattgttattatcccctgcagtcttacggcttccagcctacaaatggcgtgggctatcagccataccgggtggtggtgctgtcttttgagctgctgcacgcaccagcaaccgtgtgcggccccaagaagagcacacatcatcaccaccaccaccaccactga

SEQ ID NO: 2489 - DNA, 735 bp, Artificial Sequence
  Description of Artificial Sequence: Synthetic polynucleotide
atgggcatcctgccaagcccaggaatgcccgccctgctgtctctggtgagcctgctgtccgtgctgctgatgggatgcgtggcagagacaggcacaaggttccctaacatcaccaatctgtgcccattcggcgaggtgtttaacgccacacgctttgcctccgtgtatgcctggaaccggaagagaatctctaattgcgtggccgactatagcgtgctgtacaatagcgcctccttctctacctttaagtgctatggcgtgagccccaccaagctgaacgatctgtgcttcacaaacgtgtacgccgactcctttgtgatccggggcgatgaagtgagacagatcgcaccaggacagaccggagtcatcgcagactacaactataagctgcctgacgatttcacaggctgcgtgatcgcctggaatagcaacaatctggattccaaagtgggcggcaactacaattatctgtacaggctgttccgcaagtccaacctgaagccatttgagcgggacatctccaccgagatctaccaggccggctctacaccctgcaacggcgtggagggcttcaattgttattttcccctgcagtcttacggcttccagcctacaaatggcgtgggctatcagccataccgggtggtggtgctgtcttttgagctgctgcacgcaccagcaaccgtgtgcggccccaagaagagcacacatcatcaccaccaccaccaccactga

SEQ ID NO: 2490 - DNA, 735 bp, Artificial Sequence
  Description of Artificial Sequence: Synthetic polynucleotide
atgggcatcctgccaagcccaggaatgcccgccctgctgtctctggtgagcctgctgtccgtgctgctgatgggatgcgtggcagagacaggcacaaggttccctaacatcaccaatctgtgcccattcggcgaggtgtttaacgccacacgctttgcctccgtgtatgcctggaaccggaagagaatctctaattgcgtggccgactatagcgtgctgtacaatagctcatccttctctacctttaagtgctatggcgtgagccccaccaagctgaacgatctgtgcttcacaaacgtgtacgccgactcctttgtgatccggggcgatgaagtgagacagatcgcaccaggacagaccggaaagatcgcagactacaactataagctgcctgacgatttcacaggctgcgtgatcgcctggaatagcaacaatctggattccaaagtgggcggcaactacaattatctgtacaggctgttccgcaagtccaacctgaagccatttgagcgggacatctccaccgagatctaccaggccggctctacaccctgcaacggcgtggagggcttcaattgttattttcccctgcagtcttacggcttccagcctacaaatggcgtgggctatcagccataccgggtggtggtgctgtcttttgagctgctgcacgcaccagcaaccgtgtgcggccccaagaagagcacacatcatcaccaccaccaccaccactga

SEQ ID NO: 2491 - DNA, 735 bp, Artificial Sequence
  Description of Artificial Sequence: Synthetic polynucleotide
atgggcatcctgccaagcccaggaatgcccgccctgctgtctctggtgagcctgctgtccgtgctgctgatgggatgcgtggcagagacaggcacaaggttccctaacatcaccaatctgtgcccattcggcgaggtgtttaacgccacacgctttgcctccgtgtatgcctggaaccggaagagaatctctaattgcgtggccgactatagcgtgctgtacaatagcgcctccttctctacctttaagtgctatggcgtgagccccaccaagctgaacgatctgtgcttcacaaacgtgtacgccgactcctttgtggttcggggcgatgaagtgagacagatcgcaccaggacagaccggaaagatcgcagactacaactataagctgcctgacgatttcacaggctgcgtgatcgcctggaatagcaacaatctggattccaaagtgggcggcaactacaattatctgtacaggctgttccgcaagtccaacctgaagccatttgagcgggacatctccaccgagatctaccaggccggctctacaccctgcaacggcgtggagggcttcaattgttattttcccctgcagtcttacggcttccagcctacaaatggcgtgggctatcagccataccgggtggtggtgctgtcttttgagctgctgcacgcaccagcaaccgtgtgcggccccaagaagagcacacatcatcaccaccaccaccaccactga

SEQ ID NO: 2492 - DNA, 735 bp, Artificial Sequence
  Description of Artificial Sequence: Synthetic polynucleotide
atgggcatcctgccaagcccaggaatgcccgccctgctgtctctggtgagcctgctgtccgtgctgctgatgggatgcgtggcagagacaggcacaaggttccctaacatcaccaatctgtgcccattcggcgaggtgtttaacgccacacgctttgcctccgtgtatgcctggaaccggaagagaatctctaattgcgtggccgactatagcgtgctgtacaatagcgcctccttctctacctttaagtgctatggcgtgagccccaccaagctgaacgatctgtgcttcacaaacgtgtacgccgactcctttgtgatccggggcgatgaagtgagacagatcgcaccaggacagaccggaaagatcgcagactacaactataagctgcctgacgatttcacaggctgcgtgatcgcctggaatagcaacaatctggattccaaagtgggcggcaactacaattatctgtacaggctgttccgcaagtccaacctgaagccatttgagcgggacatctccaccgagatctaccaggccggctctacaccctgcaacggccgagagggcttcaattgttattttcccctgcagtcttacggcttccagcctacaaatggcgtgggctatcagccataccgggtggtggtgctgtcttttgagctgctgcacgcaccagcaaccgtgtgcggccccaagaagagcacacatcatcaccaccaccaccaccactga

SEQ ID NO: 2493 - DNA, 735 bp, Artificial Sequence
  Description of Artificial Sequence: Synthetic polynucleotide
atgggcatcctgccaagcccaggaatgcccgccctgctgtctctggtgagcctgctgtccgtgctgctgatgggatgcgtggcagagacaggcacaaggttccctaacatcaccaatctgtgcccattcggcgaggtgtttaacgccacacgctttgcctccgtgtatgcctggaaccggaagagaatctctaattgcgtggccgactatagcgtgctgtacaatagcgcctccttctctacctttaagtgctatggcgtgagccccaccaagctgaacgatctgtgcttcacaaacgtgtacgccgactcctttgtgatccggggcgatgaagtgagacagatcgcaccaggacagaccggaaagatcgcagactacaactataagctgcctgacgatttcacaggctgcgtgatcgcctggaatagcaacaatctggattccaaagtgggcggcaactacaattatctgtacaggctgttccgcaagtccaacctgaagccatttgagcgggacatctccaccgagatctaccaggccggctctaaaccctgcaacggcgtggagggcttcaattgttattttcccctgcagtcttacggcttccagcctacaaatggcgtgggctatcagccataccgggtggtggtgctgtcttttgagctgctgcacgcaccagcaaccgtgtgcggccccaagaagagcacacatcatcaccaccaccaccaccactga

SEQ ID NO: 2494 - protein, 244 aa, Artificial Sequence
  Description of Artificial Sequence: Synthetic polypeptide
MGILPSPGMPALLSLVSLLSVLLMGCVAETGTRFPNITNLCPFDEVFNATRFASVYAWNRKRISNCVADYSVLYNSASFSTFKCYGVSPTKLNDLCFTNVYADSFVIRGDEVRQIAPGQTGKIADYNYKLPDDFTGCVIAWNSNNLDSKVGGNYNYLYRLFRKSNLKPFERDISTEIYQAGSTPCNGVEGFNCYFPLQSYGFQPTNGVGYQPYRVVVLSFELLHAPATVCGPKKSTHHHHHHHH

SEQ ID NO: 2495 - protein, 244 aa, Artificial Sequence
  Description of Artificial Sequence: Synthetic polypeptide
MGILPSPGMPALLSLVSLLSVLLMGCVAETGTRFPNITNLCPFGEVFNATRFASVYAWNRKRISNCVADYSVLYNSASFSTFKCYGVSPTKLNDLCFTNVYADSFVIRGDEVRQIAPGQTGKIADYNYKLPDDFTGCVIAWNSNNLDSKVGGNYQYLYRLFRKSNLKPFERDISTEIYQAGSTPCNGVEGFNCYFPLQSYGFQPTNGVGYQPYRVVVLSFELLHAPATVCGPKKSTHHHHHHHH

SEQ ID NO: 2496 - protein, 244 aa, Artificial Sequence
  Description of Artificial Sequence: Synthetic polypeptide
MGILPSPGMPALLSLVSLLSVLLMGCVAETGTRFPNITNLCPFGEVFNATRFASVYAWNRKRISNCVADYSVLYNSASFSTFKCYGVSPTKLNDLCFTNVYADSFVIRGDEVRQIAPGQTGKIADYNYKLPDDFTGCVIAWNSNNLDSKVGGNYNYLYRLFRKSNLKPFERDISTEIYQAGSTPCNGVEGFNCYVPLQSYGFQPTNGVGYQPYRVVVLSFELLHAPATVCGPKKSTHHHHHHHH

SEQ ID NO: 2497 - protein, 244 aa, Artificial Sequence
  Description of Artificial Sequence: Synthetic polypeptide
MGILPSPGMPALLSLVSLLSVLLMGCVAETGTRFPNITNLCPFGEVFNATRFASVYAWNRKRISNCVADYSVLYNSASFSTFKCYGVSPTKLNDLCFTNVYADSFVIRGDEVRQIAPGQTGKIADYNYKLPDDFTGCVIAWNSNNLDSKVGGNYNYLYRLFRKSNLKPFERDISTEIYQAGSTPCNGVEGFNCYNPLQSYGFQPTNGVGYQPYRVVVLSFELLHAPATVCGPKKSTHHHHHHHH

SEQ ID NO: 2498 - protein, 244 aa, Artificial Sequence
  Description of Artificial Sequence: Synthetic polypeptide
MGILPSPGMPALLSLVSLLSVLLMGCVAETGTRFPNITNLCPFGEVFNATRFASVYAWNRKRISNCVADYSVLYNSASFSTFKCYGVSPTKLNDLCFTNVYADSFVIRGDEVRQIAPGQTGKIADYNYKLPDDFTGCVIAWNSNNLDSKVGGNYNYLYRLFRKSNLKPFERDISTEIYQAGSAPCNGVEGFNCYFPLQSYGFQPTNGVGYQPYRVVVLSFELLHAPATVCGPKKSTHHHHHHHH

SEQ ID NO: 2499 - protein, 244 aa, Artificial Sequence
  Description of Artificial Sequence: Synthetic polypeptide
MGILPSPGMPALLSLVSLLSVLLMGCVAETGTRFPNITNLCPFGEVFNATRFASVYAWNRKRISNCVADYSVLYNSASFSTFKCYGVSPTKLNDLCFSNVYADSFVIRGDEVRQIAPGQTGKIADYNYKLPDDFTGCVIAWNSNNLDSKVGGNYNYLYRLFRKSNLKPFERDISTEIYQAGSTPCNGVEGFNCYFPLQSYGFQPTNGVGYQPYRVVVLSFELLHAPATVCGPKKSTHHHHHHHH

SEQ ID NO: 2500 - protein, 244 aa, Artificial Sequence
  Description of Artificial Sequence: Synthetic polypeptide
MGILPSPGMPALLSLVSLLSVLLMGCVAETGTRFPNITNLCPFGEVFNATRFASVYAWNRKRISNCVADYSVLYNSASFSTFKCYGVSPTKLNDLCFTNVYADSFVIRGDEVRQIAPGQTGKIADYNYKLPDDFTGCVIAWNSNNLDSKVGGNYNYLYRLFRKSNLKPFERDISTEIYQAGSTPCNGVEGFNCYAPLQSYGFQPTNGVGYQPYRVVVLSFELLHAPATVCGPKKSTHHHHHHHH

SEQ ID NO: 2501 - protein, 244 aa, Artificial Sequence
  Description of Artificial Sequence: Synthetic polypeptide
MGILPSPGMPALLSLVSLLSVLLMGCVAETGTRFPNITNLCPFGEVFNATRFASVYAWNRKRISNCVADYSVLYNSASFSTFKCYGVSPTKLNDLCFTNVYADSFVIRGDEVRQVAPGQTGKIADYNYKLPDDFTGCVIAWNSNNLDSKVGGNYNYLYRLFRKSNLKPFERDISTEIYQAGSTPCNGVEGFNCYFPLQSYGFQPTNGVGYQPYRVVVLSFELLHAPATVCGPKKSTHHHHHHHH

SEQ ID NO: 2502 - protein, 244 aa, Artificial Sequence
  Description of Artificial Sequence: Synthetic polypeptide
MGILPSPGMPALLSLVSLLSVLLMGCVAETGTRFPNITNLCPFGEVFNATRFASVYAWNRKVISNCVADYSVLYNSASFSTFKCYGVSPTKLNDLCFTNVYADSFVIRGDEVRQIAPGQTGKIADYNYKLPDDFTGCVIAWNSNNLDSKVGGNYNYLYRLFRKSNLKPFERDISTEIYQAGSTPCNGVEGFNCYFPLQSYGFQPTNGVGYQPYRVVVLSFELLHAPATVCGPKKSTHHHHHHHH

SEQ ID NO: 2503 - protein, 244 aa, Artificial Sequence
  Description of Artificial Sequence: Synthetic polypeptide
MGILPSPGMPALLSLVSLLSVLLMGCVAETGTRFPNITNLCPFGEVFNATRFASVYAWNRKRISNCVADYSVLYNSASFSTFKCYGVSPTKLNDLCFTNVYADSFVIRGDEVRQIAPGQTGKIADYNYKLPDDFTGCVIAWNSNNLDSKVGGNYNYLYRLFRKSNLKPFERDISTEIYQAGSTPCNGVRGFNCYFPLQSYGFQPTNGVGYQPYRVVVLSFELLHAPATVCGPKKSTHHHHHHHH

SEQ ID NO: 2504 - protein, 244 aa, Artificial Sequence
  Description of Artificial Sequence: Synthetic polypeptide
MGILPSPGMPALLSLVSLLSVLLMGCVAETGTRFPNITNLCPFGEVFNATRFASVYAWNRKRISNCVADYSVLYNSASFSTFKCYGVSPTKLNDLCFTNVYADSFVIRGDEVRQIAPGQTGKIADYNYKLPDDFTGCVIAWNSNNLDSKVGGNYNYLYRLFRKSNLKPFERDISTEIYQAGSNPCNGVEGFNCYFPLQSYGFQPTNGVGYQPYRVVVLSFELLHAPATVCGPKKSTHHHHHHHH

SEQ ID NO: 2505 - protein, 244 aa, Artificial Sequence
  Description of Artificial Sequence: Synthetic polypeptide
MGILPSPGMPALLSLVSLLSVLLMGCVAETGTRFPNITNLCPFGEVFNATRFASVYAWNRKRISNCVADYSVLYNSHSFSTFKCYGVSPTKLNDLCFTNVYADSFVIRGDEVRQIAPGQTGKIADYNYKLPDDFTGCVIAWNSNNLDSKVGGNYNYLYRLFRKSNLKPFERDISTEIYQAGSTPCNGVEGFNCYFPLQSYGFQPTNGVGYQPYRVVVLSFELLHAPATVCGPKKSTHHHHHHHH

SEQ ID NO: 2506 - protein, 244 aa, Artificial Sequence
  Description of Artificial Sequence: Synthetic polypeptide
MGILPSPGMPALLSLVSLLSVLLMGCVAETGTRFPNITNLCPFGEVFNATRFASVYAWNRKRISNCVADYSVLYNSASFSTFKCYGVSPTKLNDLCFTNVYADSFVIRGDEVRQIAPGQTGTIADYNYKLPDDFTGCVIAWNSNNLDSKVGGNYNYLYRLFRKSNLKPFERDISTEIYQAGSTPCNGVEGFNCYFPLQSYGFQPTNGVGYQPYRVVVLSFELLHAPATVCGPKKSTHHHHHHHH

SEQ ID NO: 2507 - protein, 244 aa, Artificial Sequence
  Description of Artificial Sequence: Synthetic polypeptide
MGILPSPGMPALLSLVSLLSVLLMGCVAETGTRFPNITNLCPFGEVFNATRFASVYAWNRKRISNCVADYSVLYNSASFSTFKCYGVSPTKLNDLCFTNVYADSFVIRGDEVRQIAPGQTGKIADYNYKLPDDFTGCVIAWNSNNLDSKVGGNYNYLYRLFRKSNLKPFERDISTEIYQAGSTPCNGVQGFNCYFPLQSYGFQPTNGVGYQPYRVVVLSFELLHAPATVCGPKKSTHHHHHHHH

SEQ ID NO: 2508 - protein, 244 aa, Artificial Sequence
  Description of Artificial Sequence: Synthetic polypeptide
MGILPSPGMPALLSLVSLLSVLLMGCVAETGTRFPNITNLCPFGEVFNATRFASVYAWNRKRISNCVADYSVLYNSASFSTFKCYGVSPTKLNDLCFTNVYADSFVIPGDEVRQIAPGQTGKIADYNYKLPDDFTGCVIAWNSNNLDSKVGGNYNYLYRLFRKSNLKPFERDISTEIYQAGSTPCNGVEGFNCYFPLQSYGFQPTNGVGYQPYRVVVLSFELLHAPATVCGPKKSTHHHHHHHH

SEQ ID NO: 2509 - protein, 244 aa, Artificial Sequence
  Description of Artificial Sequence: Synthetic polypeptide
MGILPSPGMPALLSLVSLLSVLLMGCVAETGTRFPNITNLCPFGEVFNATRFASVYAWNRKRISNCVADYSVLYNSASFSTFKCYGVSPTKLNDLCFTNVYADSFVIRGDEVRQIAPGQTGKIADYNYKLPDDFTGCVIAWNSNNLDSKVGGNYNYLYRLFRKSNLKPFERDISTEIYQAGSTPCNGQEGFNCYFPLQSYGFQPTNGVGYQPYRVVVLSFELLHAPATVCGPKKSTHHHHHHHH

SEQ ID NO: 2510 - protein, 244 aa, Artificial Sequence
  Description of Artificial Sequence: Synthetic polypeptide
MGILPSPGMPALLSLVSLLSVLLMGCVAETGTRFPNITNVCPFGEVFNATRFASVYAWNRKRISNCVADYSVLYNSASFSTFKCYGVSPTKLNDLCFTNVYADSFVIRGDEVRQIAPGQTGKIADYNYKLPDDFTGCVIAWNSNNLDSKVGGNYNYLYRLFRKSNLKPFERDISTEIYQAGSTPCNGVEGFNCYFPLQSYGFQPTNGVGYQPYRVVVLSFELLHAPATVCGPKKSTHHHHHHHH

SEQ ID NO: 2511 - protein, 244 aa, Artificial Sequence
  Description of Artificial Sequence: Synthetic polypeptide
MGILPSPGMPALLSLVSLLSVLLMGCVAETGTRFPNITNLCPFGEVFNATRFASVYAWNRKRISNCVADYSVLYNSASFSTFKCYGVSPTKLNDLCFTNVYADSFVIRGDEVRQIAPGQTGKIADYNYKLPDDFTGCVIAWNSNNLDSKVGGNYNYLYRLFRKSNLKPFERDISTEIYQAGSTPCNGVEGFNCYPPLQSYGFQPTNGVGYQPYRVVVLSFELLHAPATVCGPKKSTHHHHHHHH

SEQ ID NO: 2512 - protein, 244 aa, Artificial Sequence
  Description of Artificial Sequence: Synthetic polypeptide
MGILPSPGMPALLSLVSLLSVLLMGCVAETGTRFPNITNLCPFGEVFNATRFASVYAWNRKRISNCVADYSVLYNSASFSTFKCYGVSPTKLNDLCFTNVYADSFVIRGDEVRQIAPGQTGKIADYNYKLPDDFTGCVIAWNSNNLDSKVGGNYNYLYRLFRKSNLKPFERDISTEIYQAGSDPCNGVEGFNCYFPLQSYGFQPTNGVGYQPYRVVVLSFELLHAPATVCGPKKSTHHHHHHHH

SEQ ID NO: 2513 - protein, 244 aa, Artificial Sequence
  Description of Artificial Sequence: Synthetic polypeptide
MGILPSPGMPALLSLVSLLSVLLMGCVAETGTRFPNITNLCPFGEVFNATRFASVYAWNRKRISNCVADYSVLYNSASFSTFKCYGVSPTKLNDLCFTNVYADSFVIRGDEVRQIAPGQTGKIADYNYKLPDDFTGCVIAWNSNNLDSKVGGNYNYLYRLFRKSNLKPFERDISTEIYQAGSTPCNGVEGFNCYFPLQSYGFQPTNGVEYQPYRVVVLSFELLHAPATVCGPKKSTHHHHHHHH

SEQ ID NO: 2514 - protein, 244 aa, Artificial Sequence
  Description of Artificial Sequence: Synthetic polypeptide
MGILPSPGMPALLSLVSLLSVLLMGCVAETGTRFPNITNLCPFHEVFNATRFASVYAWNRKRISNCVADYSVLYNSASFSTFKCYGVSPTKLNDLCFTNVYADSFVIRGDEVRQIAPGQTGKIADYNYKLPDDFTGCVIAWNSNNLDSKVGGNYNYLYRLFRKSNLKPFERDISTEIYQAGSTPCNGVEGFNCYFPLQSYGFQPTNGVGYQPYRVVVLSFELLHAPATVCGPKKSTHHHHHHHH

SEQ ID NO: 2515 - protein, 244 aa, Artificial Sequence
  Description of Artificial Sequence: Synthetic polypeptide
MGILPSPGMPALLSLVSLLSVLLMGCVAETGTRFPNITNLCPFGEVFNATRFASVYAWNRKRISNCVADYSVLYNSASFSTFKCYGVSPTKLNDLCFTNVYADSFVIRFDEVRQIAPGQTGKIADYNYKLPDDFTGCVIAWNSNNLDSKVGGNYNYLYRLFRKSNLKPFERDISTEIYQAGSTPCNGVEGFNCYFPLQSYGFQPTNGVGYQPYRVVVLSFELLHAPATVCGPKKSTHHHHHHHH

SEQ ID NO: 2516 - protein, 244 aa, Artificial Sequence
  Description of Artificial Sequence: Synthetic polypeptide
MGILPSPGMPALLSLVSLLSVLLMGCVAETGTRFPNITNLCPFGEVFNATRFASVYAWNRKRISNCVADYSVLYNSASFSTFKCYGVSPTKLNDLCFTNVYADSFVIRGDEVRQIAPGQTGKIADYNYKLPDDFTGCVIAWNSNNLDSKVGGNYNYLYRLFRKSNLKPFERDISTEIYQAGQTPCNGVEGFNCYFPLQSYGFQPTNGVGYQPYRVVVLSFELLHAPATVCGPKKSTHHHHHHHH

SEQ ID NO: 2517 - protein, 244 aa, Artificial Sequence
  Description of Artificial Sequence: Synthetic polypeptide
MGILPSPGMPALLSLVSLLSVLLMGCVAETGTRFPNITNLCPFGEVFNATRFASVYAWNRKRISNCVADYSVLYNSQSFSTFKCYGVSPTKLNDLCFTNVYADSFVIRGDEVRQIAPGQTGKIADYNYKLPDDFTGCVIAWNSNNLDSKVGGNYNYLYRLFRKSNLKPFERDISTEIYQAGSTPCNGVEGFNCYFPLQSYGFQPTNGVGYQPYRVVVLSFELLHAPATVCGPKKSTHHHHHHHH

SEQ ID NO: 2518 - protein, 244 aa, Artificial Sequence
  Description of Artificial Sequence: Synthetic polypeptide
MGILPSPGMPALLSLVSLLSVLLMGCVAETGTRFPNITNLCPFGEVFNATRFASVYAWNRKRISNCVADYSVLYNSASFSTFKCYGVSPTKLNDLCFTNVYADSFVIRGDEVRQIAPGQTGKIADYNYKLPDDFTGCVIAWNSNNLDSKVGGNYNYLYRLFRKSNLKPFERDISTEIYQAGSSPCNGVEGFNCYFPLQSYGFQPTNGVGYQPYRVVVLSFELLHAPATVCGPKKSTHHHHHHHH

SEQ ID NO: 2519 - protein, 244 aa, Artificial Sequence
  Description of Artificial Sequence: Synthetic polypeptide
MGILPSPGMPALLSLVSLLSVLLMGCVAETGTRFPNITNLCPFGEVFNATRFASVYAWNRKRISNCVADYSVLYNSASFSTFKCYGVSPTKLNDLCFTNVYADSFVIRGDEVRQIAPGQTGKIADYNYKLPDDFTGCVIAWNSNNLDSKVGGNYNYLYRLFRKSNLKPFERDISTEIYQAGSEPCNGVEGFNCYFPLQSYGFQPTNGVGYQPYRVVVLSFELLHAPATVCGPKKSTHHHHHHHH

SEQ ID NO: 2520 - protein, 244 aa, Artificial Sequence
  Description of Artificial Sequence: Synthetic polypeptide
MGILPSPGMPALLSLVSLLSVLLMGCVAETGTRFPNITNLCPFGEVFNATRFASVYAWNRKRISNCVADYSVLYNSASFSTFKCYGVSPTKLNDLCFTNVYADSFVIRGDEVRQIAPGQTGKIADYNYKLPDDFTGCVIAWNSNNLDSKVGGNYNYLYRLFRKSNLKPFERDISTEIYQAGSTPCNGVAGFNCYFPLQSYGFQPTNGVGYQPYRVVVLSFELLHAPATVCGPKKSTHHHHHHHH

SEQ ID NO: 2521 - protein, 244 aa, Artificial Sequence
  Description of Artificial Sequence: Synthetic polypeptide
MGILPSPGMPALLSLVSLLSVLLMGCVAETGTRFPNITNLCPFGEVFNATRFASVYAWNRKRISNCVADYSVLYNSTSFSTFKCYGVSPTKLNDLCFTNVYADSFVIRGDEVRQIAPGQTGKIADYNYKLPDDFTGCVIAWNSNNLDSKVGGNYNYLYRLFRKSNLKPFERDISTEIYQAGSTPCNGVEGFNCYFPLQSYGFQPTNGVGYQPYRVVVLSFELLHAPATVCGPKKSTHHHHHHHH

SEQ ID NO: 2522 - protein, 244 aa, Artificial Sequence
  Description of Artificial Sequence: Synthetic polypeptide
MGILPSPGMPALLSLVSLLSVLLMGCVAETGTRFPNITNLCPFGEVFNATRFASVYAWNRKRISNCVADYSVLYNSASFSTFKCYGVSPTKLNDLCFTNVYADSFVIRGSEVRQIAPGQTGKIADYNYKLPDDFTGCVIAWNSNNLDSKVGGNYNYLYRLFRKSNLKPFERDISTEIYQAGSTPCNGVEGFNCYFPLQSYGFQPTNGVGYQPYRVVVLSFELLHAPATVCGPKKSTHHHHHHHH

SEQ ID NO: 2523 - protein, 244 aa, Artificial Sequence
  Description of Artificial Sequence: Synthetic polypeptide
MGILPSPGMPALLSLVSLLSVLLMGCVAETGTRFPNITNLCPFGEVFNATRFASVYAWNRKRISNCVADYSVLYNSVSFSTFKCYGVSPTKLNDLCFTNVYADSFVIRGDEVRQIAPGQTGKIADYNYKLPDDFTGCVIAWNSNNLDSKVGGNYNYLYRLFRKSNLKPFERDISTEIYQAGSTPCNGVEGFNCYFPLQSYGFQPTNGVGYQPYRVVVLSFELLHAPATVCGPKKSTHHHHHHHH

SEQ ID NO: 2524 - protein, 244 aa, Artificial Sequence
  Description of Artificial Sequence: Synthetic polypeptide
MGILPSPGMPALLSLVSLLSVLLMGCVAETGTRFPNITNLCPFGEVFNATRFASVYAWNRKRISNCVADYSVLYNSASFSTFKCYGVSPTKLNDLCFTNVYADSFVIRGDEVRQIAPGQTGAIADYNYKLPDDFTGCVIAWNSNNLDSKVGGNYNYLYRLFRKSNLKPFERDISTEIYQAGSTPCNGVEGFNCYFPLQSYGFQPTNGVGYQPYRVVVLSFELLHAPATVCGPKKSTHHHHHHHH

SEQ ID NO: 2525 - protein, 244 aa, Artificial Sequence
  Description of Artificial Sequence: Synthetic polypeptide
MGILPSPGMPALLSLVSLLSVLLMGCVAETGTRFPNITNLCPFGEVFNATRFASVYAWNRKRISNCVADYSVLYNSASFSTFKCYGVSPTKLNDLCFTNVYADSFVIRGDEVRQIAPGQTGKIADYNYKLPDDFTGCVIAWNSNNLDSKVGGNYNYLYRLFRKSNLKPFERDISTEIYQAGSTPCNGVKGFNCYFPLQSYGFQPTNGVGYQPYRVVVLSFELLHAPATVCGPKKSTHHHHHHHH

SEQ ID NO: 2526 - protein, 244 aa, Artificial Sequence
  Description of Artificial Sequence: Synthetic polypeptide
MGILPSPGMPALLSLVSLLSVLLMGCVAETGTRFPNITNLCPFGEVFNATRFASVYAWNRKRISNCIADYSVLYNSASFSTFKCYGVSPTKLNDLCFTNVYADSFVIRGDEVRQIAPGQTGKIADYNYKLPDDFTGCVIAWNSNNLDSKVGGNYNYLYRLFRKSNLKPFERDISTEIYQAGSTPCNGVEGFNCYFPLQSYGFQPTNGVGYQPYRVVVLSFELLHAPATVCGPKKSTHHHHHHHH

SEQ ID NO: 2527 - protein, 244 aa, Artificial Sequence
  Description of Artificial Sequence: Synthetic polypeptide
MGILPSPGMPALLSLVSLLSVLLMGCVAETGTRFPNITNLCPFGEVFNATRFASVYAWNRKRISNCVADYSVFYNSASFSTFKCYGVSPTKLNDLCFTNVYADSFVIRGDEVRQIAPGQTGKIADYNYKLPDDFTGCVIAWNSNNLDSKVGGNYNYLYRLFRKSNLKPFERDISTEIYQAGSTPCNGVEGFNCYFPLQSYGFQPTNGVGYQPYRVVVLSFELLHAPATVCGPKKSTHHHHHHHH

SEQ ID NO: 2528 - protein, 244 aa, Artificial Sequence
  Description of Artificial Sequence: Synthetic polypeptide
MGILPSPGMPALLSLVSLLSVLLMGCVAETGTRFPNITNLCPFGEVFNATRFASVYAWNRKRISNCVADYSVLYNSASFSTFKCYGVSPTKLNDLCFTNVYADSFVIRGDEVRQIAPGQTGKIADYNYKLPDDFTGCVIAWNSNNLDSKVGGNYNYLYRLFRKSNLKPFERDISTEIYQAGSTPCNGVEGVNCYFPLQSYGFQPTNGVGYQPYRVVVLSFELLHAPATVCGPKKSTHHHHHHHH

SEQ ID NO: 2529 - protein, 244 aa, Artificial Sequence
  Description of Artificial Sequence: Synthetic polypeptide
MGILPSPGMPALLSLVSLLSVLLMGCVAETGTRFPNITNLCPFGEVFNATRFASVYAWNRKRISNCVADYSVLYNSASFSTFKCYGVSPTKLNDLCFTNVYADSFVIRGDEVRQIAPGQTGKIADYNYKLPDDFTGCVIAWNSNNLDSKVGGNYNYLYRLFRKSNLKPFERDISTEIYQAGATPCNGVEGFNCYFPLQSYGFQPTNGVGYQPYRVVVLSFELLHAPATVCGPKKSTHHHHHHHH

SEQ ID NO: 2530 - protein, 244 aa, Artificial Sequence
  Description of Artificial Sequence: Synthetic polypeptide
MGILPSPGMPALLSLVSLLSVLLMGCVAETGTRFPNITNLCPFGEVFNATRFASVYAWNRKRISNCVADYSVLYNSASFSTFKCYGVSPTKLNDLCFTNVYADSFVIRGDEVRQIAPGQTGKIADYNYKLPDDFTGCVIAWNSNNLDSKVGGNYNYLYRLFRKSNLKPFERDISTEIYQAGSTPCNGVSGFNCYFPLQSYGFQPTNGVGYQPYRVVVLSFELLHAPATVCGPKKSTHHHHHHHH

SEQ ID NO: 2531 - protein, 244 aa, Artificial Sequence
  Description of Artificial Sequence: Synthetic polypeptide
MGILPSPGMPALLSLVSLLSVLLMGCVAETGTRFPNITNLCPFGEVFNATRFASVYAWNRKRISNCVADYSVLYNSASFSTFKCYGVSPTKLNDLCFTNVYADSFVIRGDEVRQIAPGQTGKIADYNYKLPDDFTGCVIAWNANNLDSKVGGNYNYLYRLFRKSNLKPFERDISTEIYQAGSTPCNGVEGFNCYFPLQSYGFQPTNGVGYQPYRVVVLSFELLHAPATVCGPKKSTHHHHHHHH

SEQ ID NO: 2532 - protein, 244 aa, Artificial Sequence
  Description of Artificial Sequence: Synthetic polypeptide
MGILPSPGMPALLSLVSLLSVLLMGCVAETGTRFPNITNLCPFGEVFNATRFASVYAWNRLRISNCVADYSVLYNSASFSTFKCYGVSPTKLNDLCFTNVYADSFVIRGDEVRQIAPGQTGKIADYNYKLPDDFTGCVIAWNSNNLDSKVGGNYNYLYRLFRKSNLKPFERDISTEIYQAGSTPCNGVEGFNCYFPLQSYGFQPTNGVGYQPYRVVVLSFELLHAPATVCGPKKSTHHHHHHHH

SEQ ID NO: 2533 - protein, 244 aa, Artificial Sequence
  Description of Artificial Sequence: Synthetic polypeptide
MGILPSPGMPALLSLVSLLSVLLMGCVAETGTRFPNITNLCPFGEVFNATRFASVYAWNRVRISNCVADYSVLYNSASFSTFKCYGVSPTKLNDLCFTNVYADSFVIRGDEVRQIAPGQTGKIADYNYKLPDDFTGCVIAWNSNNLDSKVGGNYNYLYRLFRKSNLKPFERDISTEIYQAGSTPCNGVEGFNCYFPLQSYGFQPTNGVGYQPYRVVVLSFELLHAPATVCGPKKSTHHHHHHHH

SEQ ID NO: 2534 - protein, 244 aa, Artificial Sequence
  Description of Artificial Sequence: Synthetic polypeptide
MGILPSPGMPALLSLVSLLSVLLMGCVAETGTRFPNITNLCPFGEVFNATRFASVYAWNRKRISNCVADYSVLYNSASFSTFKCYGVSPTKLNDLCFTNVYADSFVIRGDEVRQIAPGQTGKIADYNYKLPDDFTGCVIAWNSNNLDSKVGGNYNYLYRLFRKSNLKPFERDISTEIYQAGSTPCNGVEGFNCYLPLQSYGFQPTNGVGYQPYRVVVLSFELLHAPATVCGPKKSTHHHHHHHH

SEQ ID NO: 2535 - protein, 244 aa, Artificial Sequence
  Description of Artificial Sequence: Synthetic polypeptide
MGILPSPGMPALLSLVSLLSVLLMGCVAETGTRFPNITNLCPFGEVFNATRFASVYAWNRKRISNCVADYSVLYNSASFSTFKCYGVSPTKLNDLCFTNVYADYFVIRGDEVRQIAPGQTGKIADYNYKLPDDFTGCVIAWNSNNLDSKVGGNYNYLYRLFRKSNLKPFERDISTEIYQAGSTPCNGVEGFNCYFPLQSYGFQPTNGVGYQPYRVVVLSFELLHAPATVCGPKKSTHHHHHHHH

SEQ ID NO: 2536 - protein, 244 aa, Artificial Sequence
  Description of Artificial Sequence: Synthetic polypeptide
MGILPSPGMPALLSLVSLLSVLLMGCVAETGTRFPNITNRCPFGEVFNATRFASVYAWNRKRISNCVADYSVLYNSASFSTFKCYGVSPTKLNDLCFTNVYADSFVIRGDEVRQIAPGQTGKIADYNYKLPDDFTGCVIAWNSNNLDSKVGGNYNYLYRLFRKSNLKPFERDISTEIYQAGSTPCNGVEGFNCYFPLQSYGFQPTNGVGYQPYRVVVLSFELLHAPATVCGPKKSTHHHHHHHH

SEQ ID NO: 2537 - protein, 244 aa, Artificial Sequence
  Description of Artificial Sequence: Synthetic polypeptide
MGILPSPGMPALLSLVSLLSVLLMGCVAETGTRFPNITNLCPFGEVFNATRFASVYAWNRKRISNCVADYSVLYNSASFSTFKCYGVSPTKLNDLCFTNVYADSFVIRGDEVRQIAPGQTGKIADYNYKLPDDFTGCVIAWNSNNLDSKVGGNYNYLYRLFRKSNLKPFERDISTEIYQAGSTPCNGVEGFNCYHPLQSYGFQPTNGVGYQPYRVVVLSFELLHAPATVCGPKKSTHHHHHHHH

SEQ ID NO: 2538 - protein, 244 aa, Artificial Sequence
  Description of Artificial Sequence: Synthetic polypeptide
MGILPSPGMPALLSLVSLLSVLLMGCVAETGTRFPNITNLCPFGEVFNATRFASVYAWNRKRISNCVADYSVLYNSFSFSTFKCYGVSPTKLNDLCFTNVYADSFVIRGDEVRQIAPGQTGKIADYNYKLPDDFTGCVIAWNSNNLDSKVGGNYNYLYRLFRKSNLKPFERDISTEIYQAGSTPCNGVEGFNCYFPLQSYGFQPTNGVGYQPYRVVVLSFELLHAPATVCGPKKSTHHHHHHHH

SEQ ID NO: 2539 - protein, 244 aa, Artificial Sequence
  Description of Artificial Sequence: Synthetic polypeptide
MGILPSPGMPALLSLVSLLSVLLMGCVAETGTRFPNITNLCPFGEVFNATRFASVYAWNRKRISNCVADYSVLYNSASFSTFKCYGVSPTKLNDLCFTNVYADSFVIRGDEVRQIAPGQTGKIADYNYKLPDDFTGCVIAWNSNNLDSKVGGNYNYLYRLFRKSNLKPFERDISTEIYQAGGTPCNGVEGFNCYFPLQSYGFQPTNGVGYQPYRVVVLSFELLHAPATVCGPKKSTHHHHHHHH

SEQ ID NO: 2540 - protein, 244 aa, Artificial Sequence
  Description of Artificial Sequence: Synthetic polypeptide
MGILPSPGMPALLSLVSLLSVLLMGCVAETGTRFPNITNLCPFGEVFNATRFASVYAWNRKRISNCVADYSVLYNSASFSTFKCYGVSPTKLNDLCFTNVYADSFVIRGDEVRQIAPGQTGKIADYNYKLPDDFTGCVIAWNSNNLDSKVGGNYNYLYRLFRKSNLKPFERDISTEIYQAGSTPCNGVEGFNCYSPLQSYGFQPTNGVGYQPYRVVVLSFELLHAPATVCGPKKSTHHHHHHHH

SEQ ID NO: 2541 - protein, 244 aa, Artificial Sequence
  Description of Artificial Sequence: Synthetic polypeptide
MGILPSPGMPALLSLVSLLSVLLMGCVAETGTRFPNITNLCPFGEVFNATRFASVYAWNRKRISNCVADYSVLYNSASFSTFKCYGVSPTKLNDLCFTNVYADSFVIRGDDVRQIAPGQTGKIADYNYKLPDDFTGCVIAWNSNNLDSKVGGNYNYLYRLFRKSNLKPFERDISTEIYQAGSTPCNGVEGFNCYFPLQSYGFQPTNGVGYQPYRVVVLSFELLHAPATVCGPKKSTHHHHHHHH

SEQ ID NO: 2542 - protein, 244 aa, Artificial Sequence
  Description of Artificial Sequence: Synthetic polypeptide
MGILPSPGMPALLSLVSLLSVLLMGCVAETGTRFPNITNLCPFGEVFNATRFASVYAWNRKRISNCVADYSVLYNSASFSTFKCYGVSPTKLNDLCFTNVYADSFVIRGDEVRQIAPGQTGKIADYNYKLPDDFTGCVIAWNSNNLDSKVGGNYNYLYRLFRKSNLKPFERDISTEIYQAGSQPCNGVEGFNCYFPLQSYGFQPTNGVGYQPYRVVVLSFELLHAPATVCGPKKSTHHHHHHHH

SEQ ID NO: 2543 - protein, 244 aa, Artificial Sequence
  Description of Artificial Sequence: Synthetic polypeptide
MGILPSPGMPALLSLVSLLSVLLMGCVAETGTRFPNITNLCPFGEVFNATRFASVYAWNRKRISNCVADYSVLYNSGSFSTFKCYGVSPTKLNDLCFTNVYADSFVIRGDEVRQIAPGQTGKIADYNYKLPDDFTGCVIAWNSNNLDSKVGGNYNYLYRLFRKSNLKPFERDISTEIYQAGSTPCNGVEGFNCYFPLQSYGFQPTNGVGYQPYRVVVLSFELLHAPATVCGPKKSTHHHHHHHH

SEQ ID NO: 2544 - protein, 244 aa, Artificial Sequence
  Description of Artificial Sequence: Synthetic polypeptide
MGILPSPGMPALLSLVSLLSVLLMGCVAETGTRFPNITNLCPFGEVFNATRFASVYAWNRKRISNCVADYSVLYNSASFSTFKCYGVSPTKLNDLCFTNVYADSFVIRGDEVRQIAPGQTGKIADYNYKLPDDFTGCVIAWNSNNLDSKVGGNYNYLYRLFRKSNLKPFERDISTEIYQAGSIPCNGVEGFNCYFPLQSYGFQPTNGVGYQPYRVVVLSFELLHAPATVCGPKKSTHHHHHHHH

SEQ ID NO: 2545 - protein, 244 aa, Artificial Sequence
  Description of Artificial Sequence: Synthetic polypeptide
MGILPSPGMPALLSLVSLLSVLLMGCVAETGTRFPNITNLCPFGEVFNATRFASVYAWNRKRISNCVADYSVLYNSASFSTFKCYGVSPTKLNDLCFTNVYADSFVIRGDEVRQIAPGQTGKIADYNYKLPDDFTGCVIAWNSNNLDSKVGGNYNYLYRLFRKSNLKPFERDISTEIYQAGSTPCNGVEGFNCYFPLQSYGFQPTNPVGYQPYRVVVLSFELLHAPATVCGPKKSTHHHHHHHH

SEQ ID NO: 2546 - protein, 244 aa, Artificial Sequence
  Description of Artificial Sequence: Synthetic polypeptide
MGILPSPGMPALLSLVSLLSVLLMGCVAETGTRFPNITNLCPFGEVFNATRFASVYAWNRKRISNCVADYSVLYNSASFSTFKCYGVSPTKLNDLCFTNVYADSFVIRGDEVRQIAPGQTGEIADYNYKLPDDFTGCVIAWNSNNLDSKVGGNYNYLYRLFRKSNLKPFERDISTEIYQAGSTPCNGVEGFNCYFPLQSYGFQPTNGVGYQPYRVVVLSFELLHAPATVCGPKKSTHHHHHHHH

SEQ ID NO: 2547 - protein, 244 aa, Artificial Sequence
  Description of Artificial Sequence: Synthetic polypeptide
MGILPSPGMPALLSLVSLLSVLLMGCVAETGTRFPNITNLCPFGEVFNATRFASVYAWNRKRISNCVADYSVLYNSASFSTFKCYGVSPTKLNDLCFTNVYADSFVIRGDEVRQIAPGQTGKIADYNYKLPDDFTGCVIAWNSNNLDSKVGGNYNYLYRLFRKSNLKPFERDISTEIYQAGSTPCNGVEGFNCRFPLQSYGFQPTNGVGYQPYRVVVLSFELLHAPATVCGPKKSTHHHHHHHH

SEQ ID NO: 2548 - protein, 244 aa, Artificial Sequence
  Description of Artificial Sequence: Synthetic polypeptide
MGILPSPGMPALLSLVSLLSVLLMGCVAETGTRFPNITNLCPFGEVFNATRFASVYAWNRKRISNCVADYSVLYNSASFSTFKCYGVSPTKLNDLCFTNVYADSFVIRGDEVRQIAPGQTGKIADYNYKLPDDFTGCVIAWNSNNLDSKVGGNYNYLYRLFRKSNLKPFERDISTEIYQAGSTPCNGVEGFNCYFPLQSYGFQPTNGVDYQPYRVVVLSFELLHAPATVCGPKKSTHHHHHHHH

SEQ ID NO: 2549 - protein, 244 aa, Artificial Sequence
  Description of Artificial Sequence: Synthetic polypeptide
MGILPSPGMPALLSLVSLLSVLLMGCVAETGTRFPNITNLCPFGEVFNATRFASVYAWNRKRISNCVADYSVLYNSNSFSTFKCYGVSPTKLNDLCFTNVYADSFVIRGDEVRQIAPGQTGKIADYNYKLPDDFTGCVIAWNSNNLDSKVGGNYNYLYRLFRKSNLKPFERDISTEIYQAGSTPCNGVEGFNCYFPLQSYGFQPTNGVGYQPYRVVVLSFELLHAPATVCGPKKSTHHHHHHHH

SEQ ID NO: 2550 - protein, 244 aa, Artificial Sequence
  Description of Artificial Sequence: Synthetic polypeptide
MGILPSPGMPALLSLVSLLSVLLMGCVAETGTRFPNITNLCPFGEVFNATRFASVYAWNRKRISNCVADYSVLYNSCSFSTFKCYGVSPTKLNDLCFTNVYADSFVIRGDEVRQIAPGQTGKIADYNYKLPDDFTGCVIAWNSNNLDSKVGGNYNYLYRLFRKSNLKPFERDISTEIYQAGSTPCNGVEGFNCYFPLQSYGFQPTNGVGYQPYRVVVLSFELLHAPATVCGPKKSTHHHHHHHH

SEQ ID NO: 2551 - protein, 244 aa, Artificial Sequence
  Description of Artificial Sequence: Synthetic polypeptide
MGILPSPGMPALLSLVSLLSVLLMGCVAETGTRFPNITNLCPFGEVFNATRFASVYAWNRKRISNCVADYSVLYNSASFSTFKCYGVSPTKLNDLCFTNVYADSFVIRGDEVRQIAPGQTGKIADYNYKLPDDFTGCVIAWNSNNLDSKVGGNYNYLYRLFRKSNLKPFERDISTEIYQAGSTPCNGVEGINCYFPLQSYGFQPTNGVGYQPYRVVVLSFELLHAPATVCGPKKSTHHHHHHHH

SEQ ID NO: 2552 - protein, 244 aa, Artificial Sequence
  Description of Artificial Sequence: Synthetic polypeptide
MGILPSPGMPALLSLVSLLSVLLMGCVAETGTRFPNITNLCPFGEVFNATRFASVYAWNRKRISNCVADYSVLYNSASFSTFKCYGVSPTKLNDLCFTSVYADSFVIRGDEVRQIAPGQTGKIADYNYKLPDDFTGCVIAWNSNNLDSKVGGNYNYLYRLFRKSNLKPFERDISTEIYQAGSTPCNGVEGFNCYFPLQSYGFQPTNGVGYQPYRVVVLSFELLHAPATVCGPKKSTHHHHHHHH

SEQ ID NO: 2553 - protein, 244 aa, Artificial Sequence
  Description of Artificial Sequence: Synthetic polypeptide
MGILPSPGMPALLSLVSLLSVLLMGCVAETGTRFPNITNLCPFGEVFNATRFASVYAWNRKRISNCVADYSVLYNSASFSTFKCYGVSPTKLNDLCFTNVYADSFVIRGDEVRQIAPGQTGKIADYNYKLPDDFTGCVIAWNSSNLDSKVGGNYNYLYRLFRKSNLKPFERDISTEIYQAGSTPCNGVEGFNCYFPLQSYGFQPTNGVGYQPYRVVVLSFELLHAPATVCGPKKSTHHHHHHHH

SEQ ID NO: 2554 - protein, 244 aa, Artificial Sequence
  Description of Artificial Sequence: Synthetic polypeptide
MGILPSPGMPALLSLVSLLSVLLMGCVAETGTRFPNITNLCPFGEVFNATRFASVYAWNRKRISNCVADYSVLYNSASFSTFKCYGVSPTKLNDLCFTNVYADSFVIRGDEVRQIAPGQTGKIADYNYKLPDDFTGCVIAWNSNNLDSKVGGNYNYLYRLFRKSNLKPFERDISTEIYQAGSTPCNGVEGFNCYGPLQSYGFQPTNGVGYQPYRVVVLSFELLHAPATVCGPKKSTHHHHHHHH

SEQ ID NO: 2555 - protein, 244 aa, Artificial Sequence
  Description of Artificial Sequence: Synthetic polypeptide
MGILPSPGMPALLSLVSLLSVLLMGCVAETGTRFPNITNLCPFGEVFNATRFASVYAWNRKRISNCVADYSVLYNSASFSTFKCYGVSPTKLNDLCFTNVYADSFVIRGDEVRQIAPGQTGKIADYNYKLPDDFTGCVIAWNSNNLDSKVGGNYNYLYRLFRKSNLKPFERDISTEIYQAGSTPCNGVEGFNCYFPLQSYGFQPTEGVGYQPYRVVVLSFELLHAPATVCGPKKSTHHHHHHHH

SEQ ID NO: 2556 - protein, 244 aa, Artificial Sequence
  Description of Artificial Sequence: Synthetic polypeptide
MGILPSPGMPALLSLVSLLSVLLMGCVAETGTRFPNITNLCPFGEVFNATRFASVYAWNRKRISNCVADYSVLYNSASFSTFKCYGVSPTKLNDLCFTNVYADSFVIRGDEVRQIAPGQTGKIADYNYKLPDDFTGCVIAWNSNNLDSKVGGNYNYLYRLFRKSNLKPFERDISTEIYQAGSTPCNGVEGFNCYRPLQSYGFQPTNGVGYQPYRVVVLSFELLHAPATVCGPKKSTHHHHHHHH

SEQ ID NO: 2557 - protein, 244 aa, Artificial Sequence
  Description of Artificial Sequence: Synthetic polypeptide
MGILPSPGMPALLSLVSLLSVLLMGCVAETGTRFPNITNLCPFGEVFNATRFASVYAWNRKRISNCVADYSVLYNSASFSTFKCYGVSPTKLNDLCFTNVYADSFVIRGDEVRQIAPGQTGKIADYNYKLPDDFTGCVIAWNSNNLDSKVGGNYNYLYRLFRKSNLKPFERDISTEIYQAGSTPCNGVEGFNCYFPLQSYGFQPTDGVGYQPYRVVVLSFELLHAPATVCGPKKSTHHHHHHHH

SEQ ID NO: 2558 - protein, 244 aa, Artificial Sequence
  Description of Artificial Sequence: Synthetic polypeptide
MGILPSPGMPALLSLVSLLSVLLMGCVAETGTRFPNITNLCPFGEVFNATRFASVYAWNRKRISNCVADYSVLYNSASFSTFKCYGVSPTKLNDLCFTNVYADSFVIRGDEVRQIAPGQTGKIADYNYKLPDDFTGCVIAWNSNNLDSKVGGNYNYLYRLFRKSNLKPFERDISTEIYQAGSTPCNGVEGLNCYFPLQSYGFQPTNGVGYQPYRVVVLSFELLHAPATVCGPKKSTHHHHHHHH

SEQ ID NO: 2559 - protein, 244 aa, Artificial Sequence
  Description of Artificial Sequence: Synthetic polypeptide
MGILPSPGMPALLSLVSLLSVLLMGCVAETGTRFPNITNLCPFGEVFNATRFASVYAWNRKRISNCVADYSVLYNSASFSTFKCYGVSPTKLNDLCFTNVYADSFVIRGDEVRQIAPGQTGKIADYNYKLPDDFTGCVIAWNSNNLDSKVGGNYNYLYRLFRKSNLKPFERDISTEIYQAGSTPCNGVEGFNCYFPLQSYGFQPTNGVAYQPYRVVVLSFELLHAPATVCGPKKSTHHHHHHHH

SEQ ID NO: 2560 - protein, 244 aa, Artificial Sequence
  Description of Artificial Sequence: Synthetic polypeptide
MGILPSPGMPALLSLVSLLSVLLMGCVAETGTRFPNITNLCPFGEVFNATRFASVYAWNRKKISNCVADYSVLYNSASFSTFKCYGVSPTKLNDLCFTNVYADSFVIRGDEVRQIAPGQTGKIADYNYKLPDDFTGCVIAWNSNNLDSKVGGNYNYLYRLFRKSNLKPFERDISTEIYQAGSTPCNGVEGFNCYFPLQSYGFQPTNGVGYQPYRVVVLSFELLHAPATVCGPKKSTHHHHHHHH

SEQ ID NO: 2561 - protein, 244 aa, Artificial Sequence
  Description of Artificial Sequence: Synthetic polypeptide
MGILPSPGMPALLSLVSLLSVLLMGCVAETGTRFPNITNLCPFGEVFNATRFASVYAWNRKRISNCVADYSVLYNSASFSTFKCYGVSPTKLNDLCFTNVYADSFVIRGDEVRQIAPGQTGKIADYNYKLPDDFTGCVIAWNSNNLDSKVGGNYNYLYRLFRKSNLKPFERDISTEIYQAGSTPCNGVEGFNCYKPLQSYGFQPTNGVGYQPYRVVVLSFELLHAPATVCGPKKSTHHHHHHHH

SEQ ID NO: 2562 - protein, 244 aa, Artificial Sequence
  Description of Artificial Sequence: Synthetic polypeptide
MGILPSPGMPALLSLVSLLSVLLMGCVAETGTRFPNITNLCPFGEVFNATRFASVYAWNRKRISNCVADYSVLYNSASFSTFKCYGVSPTKLNDLCFTNVYADSFVIRGDEVRQIAPGQTGKIADYNYKLPDDFTGCVIAWNSNNLDSKVGGNYNYLYRLFRKSNLKPFERDISTEIYQAGSTPCNGVPGFNCYFPLQSYGFQPTNGVGYQPYRVVVLSFELLHAPATVCGPKKSTHHHHHHHH

SEQ ID NO: 2563 - protein, 244 aa, Artificial Sequence
  Description of Artificial Sequence: Synthetic polypeptide
MGILPSPGMPALLSLVSLLSVLLMGCVAETGTRFPNITNLCPFGEVFNATRFASVYAWNRKRISNCVADYSVLYNSASFSTFKCYGVSPTKLNDLCFTNVYADSFVIRGDEVRQIAPGQTGKIADYNYKLPDDFTGCVIAWNSNNLDSKVGGNYNYLYRLFRKSNLKPFERDISTEIYQAGSTPCNGAEGFNCYFPLQSYGFQPTNGVGYQPYRVVVLSFELLHAPATVCGPKKSTHHHHHHHH

SEQ ID NO: 2564 - protein, 244 aa, Artificial Sequence
  Description of Artificial Sequence: Synthetic polypeptide
MGILPSPGMPALLSLVSLLSVLLMGCVAETGTRFPNITNLCPFGEVFNATRFASVYAWNRKRISNCVADYSVLYNSASFSTFKCYGVSPTKLNDLCFTNVYADSFVIRGDEVRQIAPGQTGKIADYNYKLPDDFTGCVIAWNSNNLDSKVGGNYNYLYRLFRKSNLKPFERDISTEIYQAGSTPCNGVEGFNCYMPLQSYGFQPTNGVGYQPYRVVVLSFELLHAPATVCGPKKSTHHHHHHHH

SEQ ID NO: 2565 - protein, 244 aa, Artificial Sequence
  Description of Artificial Sequence: Synthetic polypeptide
MGILPSPGMPALLSLVSLLSVLLMGCVAETGTRFPNITNLCPFGEVFNATRFASVYAWNRKRISNCVADYSVLYNSASFSTFKCYGVSPTKLNDLCFTNVYADSFVIRGDEVRQIAPGQTGKIADYNYKLPDDFTGCVIAWNSNNLDSKVGGNYNYLYRLFRKSNLKPFERDISTEIYQAGSTPCNGVEGPNCYFPLQSYGFQPTNGVGYQPYRVVVLSFELLHAPATVCGPKKSTHHHHHHHH

SEQ ID NO: 2566 - protein, 244 aa, Artificial Sequence
  Description of Artificial Sequence: Synthetic polypeptide
MGILPSPGMPALLSLVSLLSVLLMGCVAETGTRFPNITNLCPFGEVFNATRFASVYAWNRKRISNCVADYTVLYNSASFSTFKCYGVSPTKLNDLCFTNVYADSFVIRGDEVRQIAPGQTGKIADYNYKLPDDFTGCVIAWNSNNLDSKVGGNYNYLYRLFRKSNLKPFERDISTEIYQAGSTPCNGVEGFNCYFPLQSYGFQPTNGVGYQPYRVVVLSFELLHAPATVCGPKKSTHHHHHHHH

SEQ ID NO: 2567 - protein, 244 aa, Artificial Sequence
  Description of Artificial Sequence: Synthetic polypeptide
MGILPSPGMPALLSLVSLLSVLLMGCVAETGTRFPNITNLCPFGEVFNATRFASVYAWNRKRISNCVADYSVLYNSASFSTFKCYGVSPTKLNDLCFTNVYADSFVIRGDEVRQIAPGQTGKIADYNYKLPDDFTGCVIAWNSNNLDSKVGGNYNYLYRLFRKSNLKPFERDISTEIYQAGSTPCNGVEGFNCYFPLQSYGFQPTLGVGYQPYRVVVLSFELLHAPATVCGPKKSTHHHHHHHH

SEQ ID NO: 2568 - protein, 244 aa, Artificial Sequence
  Description of Artificial Sequence: Synthetic polypeptide
MGILPSPGMPALLSLVSLLSVLLMGCVAETGTRFPNITNLCPFGEVFNATRFASVYAWNRKRISNCVADYSVLYNSASFSTFKCYGVSPTKLNDLCFTNVYADSFVIRGDEVRQIAPGQTGKIADYNYKLPDDFTGCVIAWNSNNLDSKVGGNYNYLYRLFRKSNLKPFERDISTEIYQAGSTPCNGVTGFNCYFPLQSYGFQPTNGVGYQPYRVVVLSFELLHAPATVCGPKKSTHHHHHHHH

SEQ ID NO: 2569 - protein, 244 aa, Artificial Sequence
  Description of Artificial Sequence: Synthetic polypeptide
MGILPSPGMPALLSLVSLLSVLLMGCVAETGTRFPNITNLCPFGRVFNATRFASVYAWNRKRISNCVADYSVLYNSASFSTFKCYGVSPTKLNDLCFTNVYADSFVIRGDEVRQIAPGQTGKIADYNYKLPDDFTGCVIAWNSNNLDSKVGGNYNYLYRLFRKSNLKPFERDISTEIYQAGSTPCNGVEGFNCYFPLQSYGFQPTNGVGYQPYRVVVLSFELLHAPATVCGPKKSTHHHHHHHH

SEQ ID NO: 2570 - protein, 244 aa, Artificial Sequence
  Description of Artificial Sequence: Synthetic polypeptide
MGILPSPGMPALLSLVSLLSVLLMGCVAETGTRFPNITNLCPFGEVFNATRFASVYAWNRKRISNCVADYSVLYNSASFSTFKCYGVSPTKLNDLCFTNVYADSFVIRGDEVRQIAPGQTGKIADYNYKLPDDFTGCVIAWNSNNLDSKVGGNYNYLYRLFRKSNLKPFERDISTEIYQAGSTPCNGVEGFNCYDPLQSYGFQPTNGVGYQPYRVVVLSFELLHAPATVCGPKKSTHHHHHHHH

SEQ ID NO: 2571 - protein, 244 aa, Artificial Sequence
  Description of Artificial Sequence: Synthetic polypeptide
MGILPSPGMPALLSLVSLLSVLLMGCVAETGTRFPNITNLCPFGEVFNATRFASVYAWNRKRISNCVADYSVLYNSASFSTFKCYGVSPTKLNDLCFTNVYADSFVIRGDEVRQIAPGQTGKIADYNYKLPDDFTGCVIAWNSNNLDSKVGGNYNYLYRLFRKSNLKPFERDISTEIYQAGSTPCNGVEGFNCYWPLQSYGFQPTNGVGYQPYRVVVLSFELLHAPATVCGPKKSTHHHHHHHH

SEQ ID NO: 2572 - protein, 244 aa, Artificial Sequence
  Description of Artificial Sequence: Synthetic polypeptide
MGILPSPGMPALLSLVSLLSVLLMGCVAETGTRFPNITNLCPFGEVFNATRFASVYAWNRKRISNCVADYSVLYNSASFSTFKCYGVSPTKLNDLCFTNVYADSFVIRGDEVRQIAPGQTGKIADYNYKLPDDFTGCVIAWNSNNLDSKVGGNYNYLYRLFRKSNLKPFERDISTEIYQAGSTPCNGVEGFNCYEPLQSYGFQPTNGVGYQPYRVVVLSFELLHAPATVCGPKKSTHHHHHHHH

SEQ ID NO: 2573 - protein, 244 aa, Artificial Sequence
  Description of Artificial Sequence: Synthetic polypeptide
MGILPSPGMPALLSLVSLLSVLLMGCVAETGTRFPNITNLCPFGKVFNATRFASVYAWNRKRISNCVADYSVLYNSASFSTFKCYGVSPTKLNDLCFTNVYADSFVIRGDEVRQIAPGQTGKIADYNYKLPDDFTGCVIAWNSNNLDSKVGGNYNYLYRLFRKSNLKPFERDISTEIYQAGSTPCNGVEGFNCYFPLQSYGFQPTNGVGYQPYRVVVLSFELLHAPATVCGPKKSTHHHHHHHH

SEQ ID NO: 2574 - protein, 244 aa, Artificial Sequence
  Description of Artificial Sequence: Synthetic polypeptide
MGILPSPGMPALLSLVSLLSVLLMGCVAETGTRFPNITNLCPFGEVFNATRFASVYAWNRKRISNCVADYSVLYNSASFSTFKCYGVSPTKLNDLCFTNVYADSFVIRGDEVRQIAPGQTGLIADYNYKLPDDFTGCVIAWNSNNLDSKVGGNYNYLYRLFRKSNLKPFERDISTEIYQAGSTPCNGVEGFNCYFPLQSYGFQPTNGVGYQPYRVVVLSFELLHAPATVCGPKKSTHHHHHHHH

SEQ ID NO: 2575 - protein, 244 aa, Artificial Sequence
  Description of Artificial Sequence: Synthetic polypeptide
MGILPSPGMPALLSLVSLLSVLLMGCVAETGTRFPNITNLCPFGEVFNATRFASVYAWNRKRISNCVADYSVLYNSASFSTFKCYGVSPTKLNDLCFTNVYADSFVIRGDEVRQIAPGQTGKIADYNYKLPDDFTGCVIAWNSNNLDSKVGGNYSYLYRLFRKSNLKPFERDISTEIYQAGSTPCNGVEGFNCYFPLQSYGFQPTNGVGYQPYRVVVLSFELLHAPATVCGPKKSTHHHHHHHH

SEQ ID NO: 2576 - protein, 244 aa, Artificial Sequence
  Description of Artificial Sequence: Synthetic polypeptide
MGILPSPGMPALLSLVSLLSVLLMGCVAETGTRFPNITNLCPFGEVFNATRFASVYAWNRKRISNCVADYSVLYNSASFSTFKCYGVSPTKLNDLCFTNVYADSFVIRGDEVRQIAPGQTGKIADYNYKLPDDFTGCVIAWNSNNLDSKVGGNYNYLYRLFRKSNLKPFERDISTEIYQAGSTPCNGVEGYNCYFPLQSYGFQPTNGVGYQPYRVVVLSFELLHAPATVCGPKKSTHHHHHHHH

SEQ ID NO: 2577 - protein, 244 aa, Artificial Sequence
  Description of Artificial Sequence: Synthetic polypeptide
MGILPSPGMPALLSLVSLLSVLLMGCVAETGTRFPNITNLCPFGEVFNATRFASVYAWNRKRISNCVADYSVLYNSASFSTFKCYGVSPTKLNDLCFTNVYADSFVIRGDEVRQIAPGETGKIADYNYKLPDDFTGCVIAWNSNNLDSKVGGNYNYLYRLFRKSNLKPFERDISTEIYQAGSTPCNGVEGFNCYFPLQSYGFQPTNGVGYQPYRVVVLSFELLHAPATVCGPKKSTHHHHHHHH

SEQ ID NO: 2578 - protein, 244 aa, Artificial Sequence
  Description of Artificial Sequence: Synthetic polypeptide
MGILPSPGMPALLSLVSLLSVLLMGCVAETGTRFPNITNLCPFGEVFNATRFASVYAWNRKRISNCVADYSVLYNSDSFSTFKCYGVSPTKLNDLCFTNVYADSFVIRGDEVRQIAPGQTGKIADYNYKLPDDFTGCVIAWNSNNLDSKVGGNYNYLYRLFRKSNLKPFERDISTEIYQAGSTPCNGVEGFNCYFPLQSYGFQPTNGVGYQPYRVVVLSFELLHAPATVCGPKKSTHHHHHHHH

SEQ ID NO: 2579 - protein, 244 aa, Artificial Sequence
  Description of Artificial Sequence: Synthetic polypeptide
MGILPSPGMPALLSLVSLLSVLLMGCVAETGTRFPNITNLCPFNEVFNATRFASVYAWNRKRISNCVADYSVLYNSASFSTFKCYGVSPTKLNDLCFTNVYADSFVIRGDEVRQIAPGQTGKIADYNYKLPDDFTGCVIAWNSNNLDSKVGGNYNYLYRLFRKSNLKPFERDISTEIYQAGSTPCNGVEGFNCYFPLQSYGFQPTNGVGYQPYRVVVLSFELLHAPATVCGPKKSTHHHHHHHH

SEQ ID NO: 2580 - protein, 244 aa, Artificial Sequence
  Description of Artificial Sequence: Synthetic polypeptide
MGILPSPGMPALLSLVSLLSVLLMGCVAETGTRFPNITNLCPFGEVFNATRFASVYAWNRKRISNCVADYSVLYNSASFSTFKCYGVSPTKLNDLCFTNVYADSFVIRGDEVRQIAPGQTGKIADYNYKLPDDFTGCVIAWNSNNLDSKVGGNYNYLYRLFRKSNLKPFERDISTEIYQAGSTPCNGVEGTNCYFPLQSYGFQPTNGVGYQPYRVVVLSFELLHAPATVCGPKKSTHHHHHHHH

SEQ ID NO: 2581 - protein, 244 aa, Artificial Sequence
  Description of Artificial Sequence: Synthetic polypeptide
MGILPSPGMPALLSLVSLLSVLLMGCVAETGTRFPNITNLCPFGEVFNATRFASVYAWNRKRISNCVADYSVLYNSASFSTFKCYGVSPTKLNDLCFTNVYADSFVIRGDEVRQIAPGQTGKIADYNYKLPDDFTGCVIAWNSANLDSKVGGNYNYLYRLFRKSNLKPFERDISTEIYQAGSTPCNGVEGFNCYFPLQSYGFQPTNGVGYQPYRVVVLSFELLHAPATVCGPKKSTHHHHHHHH

SEQ ID NO: 2582 - protein, 244 aa, Artificial Sequence
  Description of Artificial Sequence: Synthetic polypeptide
MGILPSPGMPALLSLVSLLSVLLMGCVAETGTRFPNITNLCPFGEVFNATRFASVYAWNRKRISNCVADYSVLYNSASFSTFKCYGVSPTKLNDLCFTNVYADSFVIRGDEVRQIAPGQTGFIADYNYKLPDDFTGCVIAWNSNNLDSKVGGNYNYLYRLFRKSNLKPFERDISTEIYQAGSTPCNGVEGFNCYFPLQSYGFQPTNGVGYQPYRVVVLSFELLHAPATVCGPKKSTHHHHHHHH

SEQ ID NO: 2583 - protein, 244 aa, Artificial Sequence
  Description of Artificial Sequence: Synthetic polypeptide
MGILPSPGMPALLSLVSLLSVLLMGCVAETGTRFPNITNLCPFGEVFNATRFASVYAWNRTRISNCVADYSVLYNSASFSTFKCYGVSPTKLNDLCFTNVYADSFVIRGDEVRQIAPGQTGKIADYNYKLPDDFTGCVIAWNSNNLDSKVGGNYNYLYRLFRKSNLKPFERDISTEIYQAGSTPCNGVEGFNCYFPLQSYGFQPTNGVGYQPYRVVVLSFELLHAPATVCGPKKSTHHHHHHHH

SEQ ID NO: 2584 - protein, 244 aa, Artificial Sequence
  Description of Artificial Sequence: Synthetic polypeptide
MGILPSPGMPALLSLVSLLSVLLMGCVAETGTRFPNITNLCPFGEVFNATRFASVYAWNRKRISNCVADYSVLYNSASFSTFKCYGVSPTKLNDLCFTNVYADSFVIRGDEVRQIAPGQTGKIADYNYKLPDDFTGCVIAWNSNNLDSKVGGNYNYLYRLFRKSNLKPFERDISTEIYQAGSTPCNGVVGFNCYFPLQSYGFQPTNGVGYQPYRVVVLSFELLHAPATVCGPKKSTHHHHHHHH

SEQ ID NO: 2585 - protein, 244 aa, Artificial Sequence
  Description of Artificial Sequence: Synthetic polypeptide
MGILPSPGMPALLSLVSLLSVLLMGCVAETGTRFPNITNLCPFGEVFNATRFASVYAWNRKRISNCVADYSVLYNSASFSTFKCYGVSPTKLNDLCFTNVYADSFVIRGDEVRQIAPGQTGKIADYNYKLPDDFTGCVIAWNSNNLDSKVGGNYNYLYRLFRKSNLKPFERDISTEIYQAGSTPCNGVYGFNCYFPLQSYGFQPTNGVGYQPYRVVVLSFELLHAPATVCGPKKSTHHHHHHHH

SEQ ID NO: 2586 - protein, 244 aa, Artificial Sequence
  Description of Artificial Sequence: Synthetic polypeptide
MGILPSPGMPALLSLVSLLSVLLMGCVAETGTRFPNITNLCPFGEVFNATRFASVYAWNRKRISNCVADYSVLYNSASFSTFKCYGVSPTKLNDLCFTNVYADSFVIRGDEVRQIAPGQTGKIADYNYKLPDDFTGCVIAWNSNNLDSKVGGNYNYLYRLFRKSNLKPFERDISTEIYQAGSTPCNGVEGFNCYTPLQSYGFQPTNGVGYQPYRVVVLSFELLHAPATVCGPKKSTHHHHHHHH

SEQ ID NO: 2587 - protein, 244 aa, Artificial Sequence
  Description of Artificial Sequence: Synthetic polypeptide
MGILPSPGMPALLSLVSLLSVLLMGCVAETGTRFPNITNLCPFGEVFNATRFASVYAWNRKRISNCVADYSVLYNSASFSTFKCYGVSPTKLNDLCFTNVYADSFVIRGDEVRQIAPGQTGKIADYNYKLPDDFTGCVIAWNSNNLDSKVGGNYNYLYRLFRKSNLKPFERDISTEIYQAGSTPCNGVEGFNCYYPLQSYGFQPTNGVGYQPYRVVVLSFELLHAPATVCGPKKSTHHHHHHHH

SEQ ID NO: 2588 - protein, 244 aa, Artificial Sequence
  Description of Artificial Sequence: Synthetic polypeptide
MGILPSPGMPALLSLVSLLSVLLMGCVAETGTRFPNITNLCPFGEVFNATRFASVYAWNRKRISNCVADYSVLYNSASFSTFKCYGVSPTKLNDLCFTNVYADSFVIRGDEVRQIAPGQTGVIADYNYKLPDDFTGCVIAWNSNNLDSKVGGNYNYLYRLFRKSNLKPFERDISTEIYQAGSTPCNGVEGFNCYFPLQSYGFQPTNGVGYQPYRVVVLSFELLHAPATVCGPKKSTHHHHHHHH

SEQ ID NO: 2589 - protein, 244 aa, Artificial Sequence
  Description of Artificial Sequence: Synthetic polypeptide
MGILPSPGMPALLSLVSLLSVLLMGCVAETGTRFPNITNLCPFGEVFNATRFASVYAWNRKRISNCVADYSVLYNSSSFSTFKCYGVSPTKLNDLCFTNVYADSFVIRGDEVRQIAPGQTGKIADYNYKLPDDFTGCVIAWNSNNLDSKVGGNYNYLYRLFRKSNLKPFERDISTEIYQAGSTPCNGVEGFNCYFPLQSYGFQPTNGVGYQPYRVVVLSFELLHAPATVCGPKKSTHHHHHHHH

SEQ ID NO: 2590 - protein, 244 aa, Artificial Sequence
  Description of Artificial Sequence: Synthetic polypeptide
MGILPSPGMPALLSLVSLLSVLLMGCVAETGTRFPNITNLCPFGEVFNATRFASVYAWNRKRISNCVADYSVLYNSASFSTFKCYGVSPTKLNDLCFTNVYADSFVVRGDEVRQIAPGQTGKIADYNYKLPDDFTGCVIAWNSNNLDSKVGGNYNYLYRLFRKSNLKPFERDISTEIYQAGSTPCNGVEGFNCYFPLQSYGFQPTNGVGYQPYRVVVLSFELLHAPATVCGPKKSTHHHHHHHH

SEQ ID NO: 2591 - protein, 244 aa, Artificial Sequence
  Description of Artificial Sequence: Synthetic polypeptide
MGILPSPGMPALLSLVSLLSVLLMGCVAETGTRFPNITNLCPFGEVFNATRFASVYAWNRKRISNCVADYSVLYNSASFSTFKCYGVSPTKLNDLCFTNVYADSFVIRGDEVRQIAPGQTGKIADYNYKLPDDFTGCVIAWNSNNLDSKVGGNYNYLYRLFRKSNLKPFERDISTEIYQAGSTPCNGREGFNCYFPLQSYGFQPTNGVGYQPYRVVVLSFELLHAPATVCGPKKSTHHHHHHHH

SEQ ID NO: 2592 - protein, 244 aa, Artificial Sequence
  Description of Artificial Sequence: Synthetic polypeptide
MGILPSPGMPALLSLVSLLSVLLMGCVAETGTRFPNITNLCPFGEVFNATRFASVYAWNRKRISNCVADYSVLYNSASFSTFKCYGVSPTKLNDLCFTNVYADSFVIRGDEVRQIAPGQTGKIADYNYKLPDDFTGCVIAWNSNNLDSKVGGNYNYLYRLFRKSNLKPFERDISTEIYQAGSKPCNGVEGFNCYFPLQSYGFQPTNGVGYQPYRVVVLSFELLHAPATVCGPKKSTHHHHHHHH

SEQ ID NO: 2593 - DNA, 1260 bp, Severe acute respiratory syndrome coronavirus 2
atgtctgataatggaccccaaaatcagcgaaatgcaccccgcattacgtttggtggaccctcagattcaactggcagtaaccagaatggagaacgcagtggggcgcgatcaaaacaacgtcggccccaaggtttacccaataatactgcgtcttggttcaccgctctcactcaacatggcaaggaagaccttaaattccctcgaggacaaggcgttccaattaacaccaatagcagtccagatgaccaaattggctactaccgaagagctaccagacgaattcgtggtggtgacggtaaaatgaaagatctcagtccaagatggtatttctactacctaggaactgggccagaagctggacttccctatggtgctaacaaagacggcatcatatgggttgcaactgagggagccttgaatacaccaaaagatcacattggcacccgcaatcctgctaacaatgctgcaatcgtgctacaacttcctcaaggaacaacattgccaaaaggcttctacgcagaagggagcagaggcggcagtcaagcctcttctcgttcctcatcacgtagtcgcaacagttcaagaaattcaactccaggcagcagtaggggaacttctcctgctagaatggctggcaatggcggtgatgctgctcttgctttgctgctgcttgacagattgaaccagcttgagagcaaaatgtctggtaaaggccaacaacaacaaggccaaactgtcactaagaaatctgctgctgaggcttctaagaagcctcggcaaaaacgtactgccactaaagcatacaatgtaacacaagcttttggcagacgtggtccagaacaaacccaaggaaattttggggaccaggaactaatcagacaaggaactgattacaaacattggccgcaaattgcacaatttgcccccagcgcttcagcgttcttcggaatgtcgcgcattggcatggaagtcacaccttcgggaacgtggttgacctacacaggtgccatcaaattggatgacaaagatccaaatttcaaagatcaagtcattttgctgaataagcatattgacgcatacaaaacattcccaccaacagagcctaaaaaggacaaaaagaagaaggctgatgaaactcaagccttaccgcagagacagaagaaacagcaaactgtgactcttcttcctgctgcagatttggatgatttctccaaacaattgcaacaatccatgagcagtgctgactcaactcaggcctaa

SEQ ID NO: 2594 - protein, 419 aa, Severe acute respiratory syndrome coronavirus 2
MSDNGPQNQRNAPRITFGGPSDSTGSNQNGERSGARSKQRRPQGLPNNTASWFTALTQHGKEDLKFPRGQGVPINTNSSPDDQIGYYRRATRRIRGGDGKMKDLSPRWYFYYLGTGPEAGLPYGANKDGIIWVATEGALNTPKDHIGTRNPANNAAIVLQLPQGTTLPKGFYAEGSRGGSQASSRSSSRSRNSSRNSTPGSSRGTSPARMAGNGGDAALALLLLDRLNQLESKMSGKGQQQQGQTVTKKSAAEASKKPRQKRTATKAYNVTQAFGRRGPEQTQGNFGDQELIRQGTDYKHWPQIAQFAPSASAFFGMSRIGMEVTPSGTWLTYTGAIKLDDKDPNFKDQVILLNKHIDAYKTFPPTEPKKDKKKKADETQALPQRQKKQQTVTLLPAADLDDFSKQLQQSMSSADSTQA

SEQ ID NO: 2595 - DNA, 3822 bp, Severe acute respiratory syndrome coronavirus 2
atgtttgtttttcttgttttattgccactagtctctagtcagtgtgttaatcttacaaccagaactcaattaccccctgcatacactaattctttcacacgtggtgtttattaccctgacaaagttttcagatcctcagttttacattcaactcaggacttgttcttacctttcttttccaatgttacttggttccatgctatacatgtctctgggaccaatggtactaagaggtttgataaccctgtcctaccatttaatgatggtgtttattttgcttccactgagaagtctaacataataagaggctggatttttggtactactttagattcgaagacccagtccctacttattgttaataacgctactaatgttgttattaaagtctgtgaatttcaattttgtaatgatccatttttgggtgtttattaccacaaaaacaacaaaagttggatggaaagtgagttcagagtttattctagtgcgaataattgcacttttgaatatgtctctcagccttttcttatggaccttgaaggaaaacagggtaatttcaaaaatcttagggaatttgtgtttaagaatattgatggttattttaaaatatattctaagcacacgcctattaatttagtgcgtgatctccctcagggtttttcggctttagaaccattggtagatttgccaataggtattaacatcactaggtttcaaactttacttgctttacatagaagttatttgactcctggtgattcttcttcaggttggacagctggtgctgcagcttattatgtgggttatcttcaacctaggacttttctattaaaatataatgaaaatggaaccattacagatgctgtagactgtgcacttgaccctctctcagaaacaaagtgtacgttgaaatccttcactgtagaaaaaggaatctatcaaacttctaactttagagtccaaccaacagaatctattgttagatttcctaatattacaaacttgtgcccttttggtgaagtttttaacgccaccagatttgcatctgtttatgcttggaacaggaagagaatcagcaactgtgttgctgattattctgtcctatataattccgcatcattttccacttttaagtgttatggagtgtctcctactaaattaaatgatctctgctttactaatgtctatgcagattcatttgtaattagaggtgatgaagtcagacaaatcgctccagggcaaactggaaagattgctgattataattataaattaccagatgattttacaggctgcgttatagcttggaattctaacaatcttgattctaaggttggtggtaattataattacctgtatagattgtttaggaagtctaatctcaaaccttttgagagagatatttcaactgaaatctatcaggccggtagcacaccttgtaatggtgttgaaggttttaattgttactttcctttacaatcatatggtttccaacccactaatggtgttggttaccaaccatacagagtagtagtactttcttttgaacttctacatgcaccagcaactgtttgtggacctaaaaagtctactaatttggttaaaaacaaatgtgtcaatttcaacttcaatggtttaacaggcacaggtgttcttactgagtctaacaaaaagtttctgcctttccaacaatttggcagagacattgctgacactactgatgctgtccgtgatccacagacacttgagattcttgacattacaccatgttcttttggtggtgtcagtgttataacaccaggaacaaatacttctaaccaggttgctgttctttatcaggatgttaactgcacagaagtccctgttgctattcatgcagatcaacttactcctacttggcgtgtttattctacaggttctaatgtttttcaaacacgtgcaggctgtttaataggggctgaacatgtcaacaactcatatgagtgtgacatacccattggtgcaggtatatgcgctagttatcagactcagactaattctcctcggcgggcacgtagtgtagctagtcaatccatcattgcctacactatgtcacttggtgcagaaaattcagttgcttactctaataactctattgccatacccacaaattttactattagtgttaccacagaaattctaccagtgtctatgaccaagacatcagtagattgtacaatgtacatttgtggtgattcaactgaatgcagcaatcttttgttgcaatatggcagtttttgtacacaattaaaccgtgctttaactggaatagctgttgaacaagacaaaaacacccaagaagtttttgcacaagtcaaacaaatttacaaaacaccaccaattaaagattttggtggttttaatttttcacaaatattaccagatccatcaaaaccaagcaagaggtcatttattgaagatctacttttcaacaaagtgacacttgcagatgctggcttcatcaaacaatatggtgattgccttggtgatattgctgctagagacctcatttgtgcacaaaagtttaacggccttactgttttgccacctttgctcacagatgaaatgattgctcaatacacttctgcactgttagcgggtacaatcacttctggttggacctttggtgcaggtgctgcattacaaataccatttgctatgcaaatggcttataggtttaatggtattggagttacacagaatgttctctatgagaaccaaaaattgattgccaaccaatttaatagtgctattggcaaaattcaagactcactttcttccacagcaagtgcacttggaaaacttcaagatgtggtcaaccaaaatgcacaagctttaaacacgcttgttaaacaacttagctccaattttggtgcaatttcaagtgttttaaatgatatcctttcacgtcttgacaaagttgaggctgaagtgcaaattgataggttgatcacaggcagacttcaaagtttgcagacatatgtgactcaacaattaattagagctgcagaaatcagagcttctgctaatcttgctgctactaaaatgtcagagtgtgtacttggacaatcaaaaagagttgatttttgtggaaagggctatcatcttatgtccttccctcagtcagcacctcatggtgtagtcttcttgcatgtgacttatgtccctgcacaagaaaagaacttcacaactgctcctgccatttgtcatgatggaaaagcacactttcctcgtgaaggtgtctttgtttcaaatggcacacactggtttgtaacacaaaggaatttttatgaaccacaaatcattactacagacaacacatttgtgtctggtaactgtgatgttgtaataggaattgtcaacaacacagtttatgatcctttgcaacctgaattagactcattcaaggaggagttagataaatattttaagaatcatacatcaccagatgttgatttaggtgacatctctggcattaatgcttcagttgtaaacattcaaaaagaaattgaccgcctcaatgaggttgccaagaatttaaatgaatctctcatcgatctccaagaacttggaaagtatgagcagtatataaaatggccatggtacatttggctaggttttatagctggcttgattgccatagtaatggtgacaattatgctttgctgtatgaccagttgctgtagttgtctcaagggctgttgttcttgtggatcctgctgcaaatttgatgaagacgactctgagccagtgctcaaaggagtcaaattacattacacataa

SEQ ID NO: 2596 - protein, 1273 aa, Severe acute respiratory syndrome coronavirus 2
MFVFLVLLPLVSSQCVNLTTRTQLPPAYTNSFTRGVYYPDKVFRSSVLHSTQDLFLPFFSNVTWFHAIHVSGTNGTKRFDNPVLPFNDGVYFASTEKSNIIRGWIFGTTLDSKTQSLLIVNNATNVVIKVCEFQFCNDPFLGVYYHKNNKSWMESEFRVYSSANNCTFEYVSQPFLMDLEGKQGNFKNLREFVFKNIDGYFKIYSKHTPINLVRDLPQGFSALEPLVDLPIGINITRFQTLLALHRSYLTPGDSSSGWTAGAAAYYVGYLQPRTFLLKYNENGTITDAVDCALDPLSETKCTLKSFTVEKGIYQTSNFRVQPTESIVRFPNITNLCPFGEVFNATRFASVYAWNRKRISNCVADYSVLYNSASFSTFKCYGVSPTKLNDLCFTNVYADSFVIRGDEVRQIAPGQTGKIADYNYKLPDDFTGCVIAWNSNNLDSKVGGNYNYLYRLFRKSNLKPFERDISTEIYQAGSTPCNGVEGFNCYFPLQSYGFQPTNGVGYQPYRVVVLSFELLHAPATVCGPKKSTNLVKNKCVNFNFNGLTGTGVLTESNKKFLPFQQFGRDIADTTDAVRDPQTLEILDITPCSFGGVSVITPGTNTSNQVAVLYQDVNCTEVPVAIHADQLTPTWRVYSTGSNVFQTRAGCLIGAEHVNNSYECDIPIGAGICASYQTQTNSPRRARSVASQSIIAYTMSLGAENSVAYSNNSIAIPTNFTISVTTEILPVSMTKTSVDCTMYICGDSTECSNLLLQYGSFCTQLNRALTGIAVEQDKNTQEVFAQVKQIYKTPPIKDFGGFNFSQILPDPSKPSKRSFIEDLLFNKVTLADAGFIKQYGDCLGDIAARDLICAQKFNGLTVLPPLLTDEMIAQYTSALLAGTITSGWTFGAGAALQIPFAMQMAYRFNGIGVTQNVLYENQKLIANQFNSAIGKIQDSLSSTASALGKLQDVVNQNAQALNTLVKQLSSNFGAISSVLNDILSRLDKVEAEVQIDRLITGRLQSLQTYVTQQLIRAAEIRASANLAATKMSECVLGQSKRVDFCGKGYHLMSFPQSAPHGVVFLHVTYVPAQEKNFTTAPAICHDGKAHFPREGVFVSNGTHWFVTQRNFYEPQIITTDNTFVSGNCDVVIGIVNNTVYDPLQPELDSFKEELDKYFKNHTSPDVDLGDISGINASVVNIQKEIDRLNEVAKNLNESLIDLQELGKYEQYIKWPWYIWLGFIAGLIAIVMVTIMLCCMTSCCSCLKGCCSCGSCCKFDEDDSEPVLKGVKLHYT

SEQ ID NO: 2597 - protein, 7 aa, Artificial Sequence
  Description of Artificial Sequence: Synthetic peptide
MHHHHHH

SEQ ID NO: 2598 - protein, 8 aa, Artificial Sequence
  Description of Artificial Sequence: Synthetic 8xHis tag
HHHHHHHH

SEQ ID NO: 2599 - protein, 6 aa, Artificial Sequence
  Description of Artificial Sequence: Synthetic 6xHis tag
HHHHHH

SEQ ID NO: 2600 - protein, 4 aa, Artificial Sequence
  Description of Artificial Sequence: Synthetic peptide
GGSG

SEQ ID NO: 2601 - DNA, 1098 bp, Artificial Sequence
  Description of Artificial Sequence: Synthetic polynucleotide
aaaatcgaagaaggtaaactggtaatctggattaacggcgataaaggctataacggtctcgctgaagtcggtaagaaattcgagaaagataccggaattaaagtcaccgttgagcatccggataaactggaagagaaattcccacaggttgcggcaactggcgatggccctgacattatcttctgggcacacgaccgctttggtggctacgctcaatctggcctgttggctgaaatcaccccggacaaagcgttccaggacaagctgtatccgtttacctgggatgccgtacgttacaacggcaagctgattgcttacccgatcgctgttgaagcgttatcgctgatttataacaaagatctgctgccgaacccgccaaaaacctgggaagagatcccggcgctggataaagaactgaaagcgaaaggtaagagcgcgctgatgttcaacctgcaagaaccgtacttcacctggccgctgattgctgctgacgggggttatgcgttcaagtatgaaaacggcaagtacgacattaaagacgtgggcgtggataacgctggcgcgaaagcgggtctgaccttcctggttgacctgattaaaaacaaacacatgaatgcagacaccgattactccatcgcagaagctgcctttaataaaggcgaaacagcgatgaccatcaacggcccgtgggcatggtccaacatcgacaccagcaaagtgaattatggtgtaacggtactgccgaccttcaagggtcaaccatccaaaccgttcgttggcgtgctgagcgcaggtattaacgccgccagtccgaacaaagagctggcgaaagagttcctcgaaaactatctgctgactgatgaaggtctggaagcggttaataaagacaaaccgctgggtgccgtagcgctgaagtcttacgaggaagagttggcgaaagatccacgtattgccgccaccatggaaaacgcccagaaaggtgaaatcatgccgaacatcccgcagatgtccgctttctggtatgccgtgcgtactgcggtgatcaacgccgccagcggtcgtcagactgtcgatgaagccctgaaagacgcgcagact

SEQ ID NO: 2602 - DNA, 12 bp, Artificial Sequence
  Description of Artificial Sequence: Synthetic oligonucleotide
ggtggttctggt

SEQ ID NO: 2603 - DNA, 21 bp, Artificial Sequence
  Description of Artificial Sequence: Synthetic oligonucleotide
gagaacctgtactttcaaagc

SEQ ID NO: 2604 - DNA, 1254 bp, Artificial Sequence
  Description of Artificial Sequence: Synthetic polynucleotide
tcagataatgggcctcaaaaccagcgcaacgctccacgtataaccttcggtggcccgtctgactccacaggcagcaaccagaatggtgagcgtagtggagccaggtctaagcagcgccgtccccagggtctgccgaacaacacggcgagctggtttactccgcttgttcaatttggtaaagaagacttaaaattcccgccgggccagggcgtcccgatcaacactaactcttccccggatgatcagattggttattaccgcagagcaactcgtcggattcgcggcggcgacggtaaaatgaaagatttgccaccgaagtggtacttttactatctcggcaccggtccgcacgctgatctgccctacgggcaaaagaaggacggggtagtgtgggtggctcgacctggtgccctgaatactccaaaagatcatatcggcacccgtaaccctgctaataacgctgcgatcccactgcaactgcctccgggtacaaaactgccaaaaggcttctatgcagaagggtcgcgtggtggcagccaggcgagtagccgtagcagctcccgctctcgcaactcgtcccgtaactccactccgggctcttctcgcggcacgtccccggctcgtatggcaggtaacggtggtgacgctgctctggcgctgctactgctggacaggctgaaccagctggagtcgaagatgagtggtaaaggccaacagcagcagggccagaccgttaccaaaaagagcgcagctgaagcatctaaaaaaccgcgacagaaacgtaccgcgactaaagcgtacaatgtaacacaggccttcggtcgtcgaggtccggagcaaactcaaggaaactttggcgatcaggaattaatccgccaggggaccgactacaaacactggccgcaaattgcccagttcgccccatccgctagtgcattcttcggtatgagccgcatcggcatggaagtaacgccaagtggtacgtggctgacctacaccggtgctatcaagcttgatgacaaggacccgaactttaaagaccaggttattctgcttaacaaacatattgatgcctataaaactttcccgccgaccgaacccaaaaaggacaaaaagaaaaaagctgatgaaacccaggctctaccgcagcgtcagaaaaaacagcaaactgtgactctgctgccagctgcggacctggatgatttttccaagcagctgcaacagtctatgagctctgcggactctacgcaggct

SEQ ID NO: 2605 - DNA, 18 bp, Artificial Sequence
  Description of Artificial Sequence: Synthetic oligonucleotide
caccatcatcaccatcat

SEQ ID NO: 2606 - DNA, 2421 bp, Artificial Sequence
  Description of Artificial Sequence: Synthetic polynucleotide
atgaaaatcgaagaaggtaaactggtaatctggattaacggcgataaaggctataacggtctcgctgaagtcggtaagaaattcgagaaagataccggaattaaagtcaccgttgagcatccggataaactggaagagaaattcccacaggttgcggcaactggcgatggccctgacattatcttctgggcacacgaccgctttggtggctacgctcaatctggcctgttggctgaaatcaccccggacaaagcgttccaggacaagctgtatccgtttacctgggatgccgtacgttacaacggcaagctgattgcttacccgatcgctgttgaagcgttatcgctgatttataacaaagatctgctgccgaacccgccaaaaacctgggaagagatcccggcgctggataaagaactgaaagcgaaaggtaagagcgcgctgatgttcaacctgcaagaaccgtacttcacctggccgctgattgctgctgacgggggttatgcgttcaagtatgaaaacggcaagtacgacattaaagacgtgggcgtggataacgctggcgcgaaagcgggtctgaccttcctggttgacctgattaaaaacaaacacatgaatgcagacaccgattactccatcgcagaagctgcctttaataaaggcgaaacagcgatgaccatcaacggcccgtgggcatggtccaacatcgacaccagcaaagtgaattatggtgtaacggtactgccgaccttcaagggtcaaccatccaaaccgttcgttggcgtgctgagcgcaggtattaacgccgccagtccgaacaaagagctggcgaaagagttcctcgaaaactatctgctgactgatgaaggtctggaagcggttaataaagacaaaccgctgggtgccgtagcgctgaagtcttacgaggaagagttggcgaaagatccacgtattgccgccaccatggaaaacgcccagaaaggtgaaatcatgccgaacatcccgcagatgtccgctttctggtatgccgtgcgtactgcggtgatcaacgccgccagcggtcgtcagactgtcgatgaagccctgaaagacgcgcagactggtggttctggtgagaacctgtactttcaaagctcagataatgggcctcaaaaccagcgcaacgctccacgtataaccttcggtggcccgtctgactccacaggcagcaaccagaatggtgagcgtagtggagccaggtctaagcagcgccgtccccagggtctgccgaacaacacggcgagctggtttactgcgcttacccaacacggtaaagaagacttaaaattcccgcgtggccagggcgtcccgatcaacactaactcttccccggatgatcagattggttattaccgcagacaaactcgtcggattcgcggcggcgacggtaaaatgaaagatttgtctccgcgttggtacttttactatctcggcaccggtccggaagctggactgccctacggggcaaacaaggacgggatcatttgggtggctaccgaaggtgccctgaatactccaaaagatcatatcggcacccgtaaccctgctaataacgctgcgatcgttctgcaactgcctcagggtacaactctgccaaaaggcttctatgcagaagggtcgcgtggtggcagccaggcgagtagccgtagcagctcccgctctcgcaactcgtcccgtaactccactccgggctcttctcgcggcacgtccccggctcgtatggcaggtaacggtggtgacgctgctctggcgctgctactgctggacaggctgaaccagctggagtcgaagatgagtggtaaaggccaacagcagcagggccagaccgttaccaaaaagagcgcagctgaagcatctaaaaaaccgcgacagaaacgtaccgcgactaaagcgtacaatgtaacacaggccttcggtcgtcgaggtccggagcaaactcaaggaaactttggcgatcaggaattaatccgccaggggaccgactacaaacactggccgcaaattgcccagttcgccccatccgctagtgcattcttcggtatgagccgcatcggcatggaagtaacgccaagtggtacgtggctgacctacaccggtgctatcaagcttgatgacaaggacccgaactttaaagaccaggttattctgcttaacaaacatattgatgcctataaaactttcccgccgaccgaacccaaaaaggacaaaaagaaaaaagctgatgaaacccaggctctaccgcagcgtcagaaaaaacagcaaactgtgactctgctgccagctgcggacctggatgatttttccaagcagctgcaacagtctatgagctctgcggactctacgcaggctggtggttctggtcaccatcatcaccatcattaa

SEQ ID NO: 2607 - DNA, 2421 bp, Artificial Sequence
  Description of Artificial Sequence: Synthetic polynucleotide
atgaaaatcgaagaaggtaaactggtaatctggattaacggcgataaaggctataacggtctcgctgaagtcggtaagaaattcgagaaagataccggaattaaagtcaccgttgagcatccggataaactggaagagaaattcccacaggttgcggcaactggcgatggccctgacattatcttctgggcacacgaccgctttggtggctacgctcaatctggcctgttggctgaaatcaccccggacaaagcgttccaggacaagctgtatccgtttacctgggatgccgtacgttacaacggcaagctgattgcttacccgatcgctgttgaagcgttatcgctgatttataacaaagatctgctgccgaacccgccaaaaacctgggaagagatcccggcgctggataaagaactgaaagcgaaaggtaagagcgcgctgatgttcaacctgcaagaaccgtacttcacctggccgctgattgctgctgacgggggttatgcgttcaagtatgaaaacggcaagtacgacattaaagacgtgggcgtggataacgctggcgcgaaagcgggtctgaccttcctggttgacctgattaaaaacaaacacatgaatgcagacaccgattactccatcgcagaagctgcctttaataaaggcgaaacagcgatgaccatcaacggcccgtgggcatggtccaacatcgacaccagcaaagtgaattatggtgtaacggtactgccgaccttcaagggtcaaccatccaaaccgttcgttggcgtgctgagcgcaggtattaacgccgccagtccgaacaaagagctggcgaaagagttcctcgaaaactatctgctgactgatgaaggtctggaagcggttaataaagacaaaccgctgggtgccgtagcgctgaagtcttacgaggaagagttggcgaaagatccacgtattgccgccaccatggaaaacgcccagaaaggtgaaatcatgccgaacatcccgcagatgtccgctttctggtatgccgtgcgtactgcggtgatcaacgccgccagcggtcgtcagactgtcgatgaagccctgaaagacgcgcagactggtggttctggtgagaacctgtactttcaaagctcagataatgggcctcaaaaccagcgcaacgctccacgtataaccttcggtggcccgtctgactccacaggcagcaaccagaatggtgagcgtagtggagccaggtctaagcagcgccgtccccagggtctgccgaacaacacggcgagctggtttactgcgcttacccaacacggtaaagaagacttaaaattcccgcgtggccagggcgtcccgatcaacactaactcttccccggatgatcagattggttattaccgcagagcaactcgtcggattcgcggcggcgacggtaaaatgaaagatttgtctccgcgttggtacttttactatctcggcaccggtccggaagctggactgccctacggggcaaacaaggacgggatcatttgggtggctaccgaaggtgccctgaatactccaaaagatcatatcggcacccgtaaccctgctaataacgctgcgatcgttctgcaactgcctcagggtacaactctgccaaaaggcttctatgcagaagggtcgcgtggtggcagccaggcgagtagccgtagcagctcccgctctcgcaactcgtcccgtaactccactccgggctcttctcgcggcacgtccccggctcgtatggcaggtaacggtggtgacgctgctctggcgctgctactgctggacaggctgaaccagctggagtcgaagatgagtggtaaaggccaacagcagcagggccagaccgttaccaaaaagagcgcagctgaaatgtctaaaaaaccgcgatggaaacgtacccccactaaaggctacaatgtaacacaggccttcggtcctcgaggtccgaaagatactcaaggaaactttggcgatgcggaattaatcaagcaggggaccgactacaaacactggccgcaaattgcccagttcgtgccatccgctgcggcattcttctttatgagccgcatcggcatgaaagaaacgccagatggtgtgtggctgacctacaccggtacgatcaagcttgataaagatgacccgaactttgatgaccaggttaaactgcttaacaaacatattgatgcctataaaactttcccgccgaccgaacccaaaaaggacaaaaagaaaaaagctgatgaaacccaggctctaccgcagcgtcagaaaaaacagcaaactgtgactctgctgccagctgcggacctggatgatttttccaagcagctgcaacagtctatgagctctgcggactctacgcaggctggtggttctggtcaccatcatcaccatcattaa

SEQ ID NO: 2608 - DNA, 2421 bp, Artificial Sequence
  Description of Artificial Sequence: Synthetic polynucleotide
atgaaaatcgaagaaggtaaactggtaatctggattaacggcgataaaggctataacggtctcgctgaagtcggtaagaaattcgagaaagataccggaattaaagtcaccgttgagcatccggataaactggaagagaaattcccacaggttgcggcaactggcgatggccctgacattatcttctgggcacacgaccgctttggtggctacgctcaatctggcctgttggctgaaatcaccccggacaaagcgttccaggacaagctgtatccgtttacctgggatgccgtacgttacaacggcaagctgattgcttacccgatcgctgttgaagcgttatcgctgatttataacaaagatctgctgccgaacccgccaaaaacctgggaagagatcccggcgctggataaagaactgaaagcgaaaggtaagagcgcgctgatgttcaacctgcaagaaccgtacttcacctggccgctgattgctgctgacgggggttatgcgttcaagtatgaaaacggcaagtacgacattaaagacgtgggcgtggataacgctggcgcgaaagcgggtctgaccttcctggttgacctgattaaaaacaaacacatgaatgcagacaccgattactccatcgcagaagctgcctttaataaaggcgaaacagcgatgaccatcaacggcccgtgggcatggtccaacatcgacaccagcaaagtgaattatggtgtaacggtactgccgaccttcaagggtcaaccatccaaaccgttcgttggcgtgctgagcgcaggtattaacgccgccagtccgaacaaagagctggcgaaagagttcctcgaaaactatctgctgactgatgaaggtctggaagcggttaataaagacaaaccgctgggtgccgtagcgctgaagtcttacgaggaagagttggcgaaagatccacgtattgccgccaccatggaaaacgcccagaaaggtgaaatcatgccgaacatcccgcagatgtccgctttctggtatgccgtgcgtactgcggtgatcaacgccgccagcggtcgtcagactgtcgatgaagccctgaaagacgcgcagactggtggttctggtgagaacctgtactttcaaagctcagataatgggcctcaaaaccagcgcaacgctccacgtataaccttcggtggcccgtctgactccacaggcagcaaccagaatggtgagcgtagtggagccaggtctaagcagcgccgtccccagggtctgccgaacaacacggcgagctggtttactgcgcttacccaacacggtaaagaagacttaaaattcccgcgtggccagggcgtcccgatcaacactaactcttccccggatgatcagattggttattaccgcagagcaactcgtcggattcgcggcggcgacggtaaaatgaaagatttgtctccgcgttggtacttttactatctcggcaccggtccggaagctggactgccctacggggcaaacaaggacgggatcatttgggtggctaccgaaggtgccctgaatactccaaaagatcatatcggcacccgtaaccctgctaataacgctgcgatcgttctgcaactgcctcagggtacaactctgccaaaaggcttctatgcagaagggtcgcgtggtggcagccaggcgagtagccgtagcagctcccgctctcgcaactcgtcccgtaactccactccgggctcttctcgcggcacgtccccggctcgtatggcaggtaacggtggtgacgctgctctggcgctgctactgctggacaggctgaaccagctggagtcgaagatgagtggtaaaggccaacagcagcagggccagaccgttaccaaaaagagcgcagctgaagcatctaaacatccgcgacagaaacgtaccgcgactaaagcgtacaatgtaacacaggccttcggtcgtcgaggtccggagcaaactcaaggaaactttggcgatcaggaattaatccgccaggggaccgactacaaacactggccgcaaattgcccagttcgccccatccgctagtgcattcttcggtatgagccgcatcggcatggaagtaacgccaagtggtacgtggctgacctacaccggtgctatcaagcttgatgacaaggacccgaactttaaagaccaggttattctgcttaacaaacatattgatgcctataaaactttcccgccgaccgaacccaaaaaggacaaaaagaaaaaagctgatgaaacccaggctctaccgcagcgtcagaaaaaacagcaaactgtgactctgctgccagctgcggacctggatgatttttccaagcagctgcaacagtctatgagctctgcggactctacgcaggctggtggttctggtcaccatcatcaccatcattaa

SEQ ID NO: 2609 - DNA, 2421 bp, Artificial Sequence
  Description of Artificial Sequence: Synthetic polynucleotide
atgaaaatcgaagaaggtaaactggtaatctggattaacggcgataaaggctataacggtctcgctgaagtcggtaagaaattcgagaaagataccggaattaaagtcaccgttgagcatccggataaactggaagagaaattcccacaggttgcggcaactggcgatggccctgacattatcttctgggcacacgaccgctttggtggctacgctcaatctggcctgttggctgaaatcaccccggacaaagcgttccaggacaagctgtatccgtttacctgggatgccgtacgttacaacggcaagctgattgcttacccgatcgctgttgaagcgttatcgctgatttataacaaagatctgctgccgaacccgccaaaaacctgggaagagatcccggcgctggataaagaactgaaagcgaaaggtaagagcgcgctgatgttcaacctgcaagaaccgtacttcacctggccgctgattgctgctgacgggggttatgcgttcaagtatgaaaacggcaagtacgacattaaagacgtgggcgtggataacgctggcgcgaaagcgggtctgaccttcctggttgacctgattaaaaacaaacacatgaatgcagacaccgattactccatcgcagaagctgcctttaataaaggcgaaacagcgatgaccatcaacggcccgtgggcatggtccaacatcgacaccagcaaagtgaattatggtgtaacggtactgccgaccttcaagggtcaaccatccaaaccgttcgttggcgtgctgagcgcaggtattaacgccgccagtccgaacaaagagctggcgaaagagttcctcgaaaactatctgctgactgatgaaggtctggaagcggttaataaagacaaaccgctgggtgccgtagcgctgaagtcttacgaggaagagttggcgaaagatccacgtattgccgccaccatggaaaacgcccagaaaggtgaaatcatgccgaacatcccgcagatgtccgctttctggtatgccgtgcgtactgcggtgatcaacgccgccagcggtcgtcagactgtcgatgaagccctgaaagacgcgcagactggtggttctggtgagaacctgtactttcaaagctcagataatgggcctcaaaaccagcgcaacgctccacgtataaccttcggtggcccgtctgactccacaggcagcaaccagaatggtgagcgtagtggagccaggtctaagcagcgccgtccccagggtctgccgaacaacacggcgagctggtttactggccttacccaaaatggtaaagaagacttaaaattcccgccaggccagggcgtcccgatcaacactaactcttccccggatgatcagattggttattaccgcagagcaactcgtcggattcgcggcggcgacggtaaaatgaaagatttgccgccgaaatggtacttttactatctcggcaccggtccgcacgctgatctgccctacgggcaaaagcaggacggggtgttttgggtggctcgacctggtgccctgaatactccaaaagatcatatcggcacccgtaaccctgctaataacgctgcgatcccactgcaactgcctccgggtacaaaactgccaaaaggcttctatgcagaagggtcgcgtggtggcagccaggcgagtagccgtagcagctcccgctctcgcaactcgtcccgtaactccactccgggctcttctcgcggcacgtccccggctcgtatggcaggtaacggtggtgacgctgctctggcgctgctactgctggacaggctgaaccagctggagtcgaagatgagtggtaaaggccaacagcagcagggccagaccgttaccaaaaagagcgcagctgaagcatctaaaaaaccgcgacagaaacgtaccgcgactaaagcgtacaatgtaacacaggccttcggtcgtcgaggtccggagcaaactcaaggaaactttggcgatcaggaattaatccgccaggggaccgactacaaacactggccgcaaattgcccagttcgccccatccgctagtgcattcttcggtatgagccgcatcggcatggaagtaacgccaagtggtacgtggctgacctacaccggtgctatcaagcttgatgacaaggacccgaactttaaagaccaggttattctgcttaacaaacatattgatgcctataaaactttcccgccgaccgaacccaaaaaggacaaaaagaaaaaagctgatgaaacccaggctctaccgcagcgtcagaaaaaacagcaaactgtgactctgctgccagctgcggacctggatgatttttccaagcagctgcaacagtctatgagctctgcggactctacgcaggctggtggttctggtcaccatcatcaccatcattaa

SEQ ID NO: 2610 - DNA, 2421 bp, Artificial Sequence
  Description of Artificial Sequence: Synthetic polynucleotide
atgaaaatcgaagaaggtaaactggtaatctggattaacggcgataaaggctataacggtctcgctgaagtcggtaagaaattcgagaaagataccggaattaaagtcaccgttgagcatccggataaactggaagagaaattcccacaggttgcggcaactggcgatggccctgacattatcttctgggcacacgaccgctttggtggctacgctcaatctggcctgttggctgaaatcaccccggacaaagcgttccaggacaagctgtatccgtttacctgggatgccgtacgttacaacggcaagctgattgcttacccgatcgctgttgaagcgttatcgctgatttataacaaagatctgctgccgaacccgccaaaaacctgggaagagatcccggcgctggataaagaactgaaagcgaaaggtaagagcgcgctgatgttcaacctgcaagaaccgtacttcacctggccgctgattgctgctgacgggggttatgcgttcaagtatgaaaacggcaagtacgacattaaagacgtgggcgtggataacgctggcgcgaaagcgggtctgaccttcctggttgacctgattaaaaacaaacacatgaatgcagacaccgattactccatcgcagaagctgcctttaataaaggcgaaacagcgatgaccatcaacggcccgtgggcatggtccaacatcgacaccagcaaagtgaattatggtgtaacggtactgccgaccttcaagggtcaaccatccaaaccgttcgttggcgtgctgagcgcaggtattaacgccgccagtccgaacaaagagctggcgaaagagttcctcgaaaactatctgctgactgatgaaggtctggaagcggttaataaagacaaaccgctgggtgccgtagcgctgaagtcttacgaggaagagttggcgaaagatccacgtattgccgccaccatggaaaacgcccagaaaggtgaaatcatgccgaacatcccgcagatgtccgctttctggtatgccgtgcgtactgcggtgatcaacgccgccagcggtcgtcagactgtcgatgaagccctgaaagacgcgcagactggtggttctggtgagaacctgtactttcaaagctcagataatgggcctcaaaaccagcgcaacgctccacgtataaccttcggtggcccgtctgactccacaggcagcaaccagaatggtgagcgtagtggagccaggtctaagcagcgccgtccccagggtctgccgaacaacacggcgagctggtttactgcgcttacccaacacggtaaagaagacttaaaattcccgcgtggccagggcgtcccgatcaacactaactcttccccggatgatcagattggttattaccgcagagcaactcgtcggattcgcggcggcgacggtaaaatgaaagatttgtctccgcgttggtacttttactatctcggcaccggtccggaagctggactgccctacggggcaaacaaggacgggatcatttgggtggctaccgaaggtgccctgaatactccaaaagatcatatcggcacccgtaaccctgctaataacgctgcgatcgttctgcaactgcctcagggtacaactctgccaaaaggcttctatgcagaagggtcgcgtggtggcagccaggcgagtagccgtagcagctcccgctctcgcaactcgtcccgtaactccactccgggctcttctcgcggcacgtccccggctcgtatggcaggtaacggtggtgacgctgctctggcgctgctactgctggacaggctgaaccagctggagtcgaagatgagtggtaaaggccaacagcagcagggccagaccgttaccaaaaagagcgcagctgaagcatctaaaaaaccgcgacagaaacgtaccgcgactaaagcgtacaatgtaacacaggccttcggtcgtcgaggtccggagcaaactcaaggaaactttggcgatcaggaattaatccgccaggggaccgactacaaacaatggccgcaaattgcccagttcgccccatccgctagtgcattcttcggtatgagccgcatcggcatggaagtaacgccaagtggtacgtggctgacctacaccggtgctatcaagcttgatgacaaggacccgaactttaaagaccaggttattctgcttaacaaacatattgatgcctataaaactttcccgccgaccgaacccaaaaaggacaaaaagaaaaaagctgatgaaacccaggctctaccgcagcgtcagaaaaaacagcaaactgtgactctgctgccagctgcggacctggatgatttttccaagcagctgcaacagtctatgagctctgcggactctacgcaggctggtggttctggtcaccatcatcaccatcattaa

SEQ ID NO: 2611 - DNA, 2421 bp, Artificial Sequence
  Description of Artificial Sequence: Synthetic polynucleotide
atgaaaatcgaagaaggtaaactggtaatctggattaacggcgataaaggctataacggtctcgctgaagtcggtaagaaattcgagaaagataccggaattaaagtcaccgttgagcatccggataaactggaagagaaattcccacaggttgcggcaactggcgatggccctgacattatcttctgggcacacgaccgctttggtggctacgctcaatctggcctgttggctgaaatcaccccggacaaagcgttccaggacaagctgtatccgtttacctgggatgccgtacgttacaacggcaagctgattgcttacccgatcgctgttgaagcgttatcgctgatttataacaaagatctgctgccgaacccgccaaaaacctgggaagagatcccggcgctggataaagaactgaaagcgaaaggtaagagcgcgctgatgttcaacctgcaagaaccgtacttcacctggccgctgattgctgctgacgggggttatgcgttcaagtatgaaaacggcaagtacgacattaaagacgtgggcgtggataacgctggcgcgaaagcgggtctgaccttcctggttgacctgattaaaaacaaacacatgaatgcagacaccgattactccatcgcagaagctgcctttaataaaggcgaaacagcgatgaccatcaacggcccgtgggcatggtccaacatcgacaccagcaaagtgaattatggtgtaacggtactgccgaccttcaagggtcaaccatccaaaccgttcgttggcgtgctgagcgcaggtattaacgccgccagtccgaacaaagagctggcgaaagagttcctcgaaaactatctgctgactgatgaaggtctggaagcggttaataaagacaaaccgctgggtgccgtagcgctgaagtcttacgaggaagagttggcgaaagatccacgtattgccgccaccatggaaaacgcccagaaaggtgaaatcatgccgaacatcccgcagatgtccgctttctggtatgccgtgcgtactgcggtgatcaacgccgccagcggtcgtcagactgtcgatgaagccctgaaagacgcgcagactggtggttctggtgagaacctgtactttcaaagctcagataatgggcctcaaaaccagcgcaacgctccacgtataaccttcggtggcccgtctgactccacaggcagcaaccagaatggtgagcgtagtggagccaggtctaagcagcgccgtccccagggtctgccgaacaacacggcgagctggtttactcctcttgtccaatttggtaaagaagacttaaaattcccgccgggccagggcgtcccgatcaacactaactcttccccggatgatcagattggttattaccgcagagcaactcgtcggattcgcggcggcgacggtaaaatgaaagatttgccaccgaagtggtacttttactatctcggcaccggtccgcatgctgatctgccctacgggcaaaaacaagacggggtagtgtgggtggctcgacctggtgccctgaatactccaaaagatcatatcggcacccgtaaccctgctaataacgctgcgatcccgctgcaactgcctcccggtacaaagctgccaaaaggcttctatgcagaagggtcgcgtggtggcagccaggcgagtagccgtagcagctcccgctctcgcaactcgtcccgtaactccactccgggctcttctcgcggcacgtccccggctcgtatggcaggtaacggtggtgacgctgctctggcgctgctactgctggacaggctgaaccagctggagtcgaagatgagtggtaaaggccaacagcagcagggccagaccgttaccaaaaagagcgcagctgaagcatctaaaaaaccgcgacagaaacgtaccgcgactaaagcgtacaatgtaacacaggccttcggtcgtcgaggtccggagcaaactcaaggaaactttggcgatcaggaattaatccgccaggggaccgactacaaacactggccgcaaattgcccagttcgccccatccgctagtgcattcttcggtatgagccgcatcggcatggaagtaacgccaagtggtacgtggctgacctacaccggtgctatcaagcttgatgacaaggacccgaactttaaagaccaggttattctgcttaacaaacatattgatgcctataaaactttcccgccgaccgaacccaaaaaggacaaaaagaaaaaagctgatgaaacccaggctctaccgcagcgtcagaaaaaacagcaaactgtgactctgctgccagctgcggacctggatgatttttccaagcagctgcaacagtctatgagctctgcggactctacgcaggctggtggttctggtcaccatcatcaccatcattaa

SEQ ID NO: 2612 - DNA, 2421 bp, Artificial Sequence
  Description of Artificial Sequence: Synthetic polynucleotide
atgaaaatcgaagaaggtaaactggtaatctggattaacggcgataaaggctataacggtctcgctgaagtcggtaagaaattcgagaaagataccggaattaaagtcaccgttgagcatccggataaactggaagagaaattcccacaggttgcggcaactggcgatggccctgacattatcttctgggcacacgaccgctttggtggctacgctcaatctggcctgttggctgaaatcaccccggacaaagcgttccaggacaagctgtatccgtttacctgggatgccgtacgttacaacggcaagctgattgcttacccgatcgctgttgaagcgttatcgctgatttataacaaagatctgctgccgaacccgccaaaaacctgggaagagatcccggcgctggataaagaactgaaagcgaaaggtaagagcgcgctgatgttcaacctgcaagaaccgtacttcacctggccgctgattgctgctgacgggggttatgcgttcaagtatgaaaacggcaagtacgacattaaagacgtgggcgtggataacgctggcgcgaaagcgggtctgaccttcctggttgacctgattaaaaacaaacacatgaatgcagacaccgattactccatcgcagaagctgcctttaataaaggcgaaacagcgatgaccatcaacggcccgtgggcatggtccaacatcgacaccagcaaagtgaattatggtgtaacggtactgccgaccttcaagggtcaaccatccaaaccgttcgttggcgtgctgagcgcaggtattaacgccgccagtccgaacaaagagctggcgaaagagttcctcgaaaactatctgctgactgatgaaggtctggaagcggttaataaagacaaaccgctgggtgccgtagcgctgaagtcttacgaggaagagttggcgaaagatccacgtattgccgccaccatggaaaacgcccagaaaggtgaaatcatgccgaacatcccgcagatgtccgctttctggtatgccgtgcgtactgcggtgatcaacgccgccagcggtcgtcagactgtcgatgaagccctgaaagacgcgcagactggtggttctggtgagaacctgtactttcaaagctcagataatgggcctcaaaaccagcgcaacgctccacgtataaccttcggtggcccgtctgactccacaggcagcaaccagaatggtgagcgtagtggagccaggtctaagcagcgccgtccccagggtctgccgaacaacacggcgagctggtttactgcgcttacccaacacggtaaagaagacttaaaattcccgcgtggccagggcgtcccgatcaacactaactcttccccggatgatcagattggttattaccgcagagcaactcgtcggattcgcggcggcgacggtaaaatgaaagatttgtctccgcgttggtacttttactatctcggcaccggtccggaagctggactgccctacggggcaaacaaggacgggatcatttgggtggctaccgaaggtgccctgaatactccaaaagatcatatcggcacccgtaaccctgctaataacgctgcgcctgttctgcaactgcctcagggtacaactctgccaaaaggcttctatgcagaagggtcgcgtggtggcagccaggcgagtagccgtagcagctcccgctctcgcaactcgtcccgtaactccactccgggctcttctcgcggcacgtccccggctcgtatggcaggtaacggtggtgacgctgctctggcgctgctactgctggacaggctgaaccagctggagtcgaagatgagtggtaaaggccaacagcagcagggccagaccgttaccaaaaagagcgcagctgaagcatctaaaaaaccgcgacagaaacgtaccgcgactaaagcgtacaatgtaacacaggccttcggtcgtcgaggtccggagcaaactcaaggaaactttggcgatcaggaattaatccgccaggggaccgactacaaacactggccgcaaattgcccagttcgccccatccgctagtgcattcttcggtatgagccgcatcggcatggaagtaacgccaagtggtacgtggctgacctacaccggtgctatcaagcttgatgacaaggacccgaactttaaagaccaggttattctgcttaacaaacatattgatgcctataaaactttcccgccgaccgaacccaaaaaggacaaaaagaaaaaagctgatgaaacccaggctctaccgcagcgtcagaaaaaacagcaaactgtgactctgctgccagctgcggacctggatgatttttccaagcagctgcaacagtctatgagctctgcggactctacgcaggctggtggttctggtcaccatcatcaccatcattaa

SEQ ID NO: 2613 - DNA, 2421 bp, Artificial Sequence
  Description of Artificial Sequence: Synthetic polynucleotide
atgaaaatcgaagaaggtaaactggtaatctggattaacggcgataaaggctataacggtctcgctgaagtcggtaagaaattcgagaaagataccggaattaaagtcaccgttgagcatccggataaactggaagagaaattcccacaggttgcggcaactggcgatggccctgacattatcttctgggcacacgaccgctttggtggctacgctcaatctggcctgttggctgaaatcaccccggacaaagcgttccaggacaagctgtatccgtttacctgggatgccgtacgttacaacggcaagctgattgcttacccgatcgctgttgaagcgttatcgctgatttataacaaagatctgctgccgaacccgccaaaaacctgggaagagatcccggcgctggataaagaactgaaagcgaaaggtaagagcgcgctgatgttcaacctgcaagaaccgtacttcacctggccgctgattgctgctgacgggggttatgcgttcaagtatgaaaacggcaagtacgacattaaagacgtgggcgtggataacgctggcgcgaaagcgggtctgaccttcctggttgacctgattaaaaacaaacacatgaatgcagacaccgattactccatcgcagaagctgcctttaataaaggcgaaacagcgatgaccatcaacggcccgtgggcatggtccaacatcgacaccagcaaagtgaattatggtgtaacggtactgccgaccttcaagggtcaaccatccaaaccgttcgttggcgtgctgagcgcaggtattaacgccgccagtccgaacaaagagctggcgaaagagttcctcgaaaactatctgctgactgatgaaggtctggaagcggttaataaagacaaaccgctgggtgccgtagcgctgaagtcttacgaggaagagttggcgaaagatccacgtattgccgccaccatggaaaacgcccagaaaggtgaaatcatgccgaacatcccgcagatgtccgctttctggtatgccgtgcgtactgcggtgatcaacgccgccagcggtcgtcagactgtcgatgaagccctgaaagacgcgcagactggtggttctggtgagaacctgtactttcaaagctcagataatgggcctcaaaaccagcgcaacgctccacgtataaccttcggtggcccgtctgactccacaggcagcaaccagaatggtgagcgtagtggagccaggtctaagcagcgccgtccccagggtctgccgaacaacacggcgagctggtttactgcgcttacccaacacggtaaagaagacttaaaattcccgcgtggccagggcgtcccgatcaacactaactcttccccggatgatcagattggttattaccgcagagcaactcgtcggattcgcggcggcgacggtaaaatgaaagatttgtctccgcgttggtacttttactatctcggcaccggtccggaagctggactgccctacggggcaaacaaggacgggatcatttgggtggctaccgaaggtgccctgaatactccaaaagatcatatcggcacccgtaaccctgctaataacgctgcgatcgttctgcaactgcctcagggtacaactctgccaaaaggcttctatgcagaagggtcgcgtggtggcagccaggcgagtagccgtagcagctcccgctctcgcaactcgtcccgtaactccactccgggctcttctcgcggcacgtccccggctcgtatggcaggtaacggtggtgacgctgctctggcgctgctactgctggacaggctgaaccagctggagtcgaagatgagtggtaaaggccaacagcagcagggccagaccgttaccaaaaagagcgcagctgaagcatctaaaaaaccgcgacagaaacgtaccgcgactaaagcgtacaatgtaacacaggccttcggtcgtcgaggtccggagcaaactcaaggaaactttggcgatcaggaattaatccgcaaagggaccgactacaaacactggccgcaaattgcccagttcgccccatccgctagtgcattcttcggtatgagccgcatcggcatggaagtaacgccaagtggtacgtggctgacctacaccggtgctatcaagcttgatgacaaggacccgaactttaaagaccaggttattctgcttaacaaacatattgatgcctataaaactttcccgccgaccgaacccaaaaaggacaaaaagaaaaaagctgatgaaacccaggctctaccgcagcgtcagaaaaaacagcaaactgtgactctgctgccagctgcggacctggatgatttttccaagcagctgcaacagtctatgagctctgcggactctacgcaggctggtggttctggtcaccatcatcaccatcattaa

SEQ ID NO: 2614 - DNA, 2421 bp, Artificial Sequence
  Description of Artificial Sequence: Synthetic polynucleotide
atgaaaatcgaagaaggtaaactggtaatctggattaacggcgataaaggctataacggtctcgctgaagtcggtaagaaattcgagaaagataccggaattaaagtcaccgttgagcatccggataaactggaagagaaattcccacaggttgcggcaactggcgatggccctgacattatcttctgggcacacgaccgctttggtggctacgctcaatctggcctgttggctgaaatcaccccggacaaagcgttccaggacaagctgtatccgtttacctgggatgccgtacgttacaacggcaagctgattgcttacccgatcgctgttgaagcgttatcgctgatttataacaaagatctgctgccgaacccgccaaaaacctgggaagagatcccggcgctggataaagaactgaaagcgaaaggtaagagcgcgctgatgttcaacctgcaagaaccgtacttcacctggccgctgattgctgctgacgggggttatgcgttcaagtatgaaaacggcaagtacgacattaaagacgtgggcgtggataacgctggcgcgaaagcgggtctgaccttcctggttgacctgattaaaaacaaacacatgaatgcagacaccgattactccatcgcagaagctgcctttaataaaggcgaaacagcgatgaccatcaacggcccgtgggcatggtccaacatcgacaccagcaaagtgaattatggtgtaacggtactgccgaccttcaagggtcaaccatccaaaccgttcgttggcgtgctgagcgcaggtattaacgccgccagtccgaacaaagagctggcgaaagagttcctcgaaaactatctgctgactgatgaaggtctggaagcggttaataaagacaaaccgctgggtgccgtagcgctgaagtcttacgaggaagagttggcgaaagatccacgtattgccgccaccatggaaaacgcccagaaaggtgaaatcatgccgaacatcccgcagatgtccgctttctggtatgccgtgcgtactgcggtgatcaacgccgccagcggtcgtcagactgtcgatgaagccctgaaagacgcgcagactggtggttctggtgagaacctgtactttcaaagctcagataatgggcctcaaaaccagcgcaacgctccacgtataaccttcggtggcccgtctgactccacaggcagcaaccagaatggtgagcgtagtggagccaggtctaagcagcgccgtccccagggtctgccgaacaacacggcgagctggtttactgcgcttacccaacacggtaaagaagacttaaaattcccgcgtggccagggcgtcccgatcaacactaactcttccccggatgatcagattggttattaccgcagagcaactcgtcggattcgcggcggcgacggtaaaatgaaagatttgtctccgcgttggtacttttactatctcggcaccggtccggaagctggactgccctacggggcaaacaaggacgggatcatttgggtggctaccgaaggtgccctgaatactccaaaagatcatatcggcacccgtaaccctgctaataacgctgcgatcgttctgcaactgcctgatggtacaactctgccaaaaggcttctatgcagaagggtcgcgtggtggcagccaggcgagtagccgtagcagctcccgctctcgcaactcgtcccgtaactccactccgggctcttctcgcggcacgtccccggctcgtatggcaggtaacggtggtgacgctgctctggcgctgctactgctggacaggctgaaccagctggagtcgaagatgagtggtaaaggccaacagcagcagggccagaccgttaccaaaaagagcgcagctgaagcatctaaaaaaccgcgacagaaacgtaccgcgactaaagcgtacaatgtaacacaggccttcggtcgtcgaggtccggagcaaactcaaggaaactttggcgatcaggaattaatccgccaggggaccgactacaaacactggccgcaaattgcccagttcgccccatccgctagtgcattcttcggtatgagccgcatcggcatggaagtaacgccaagtggtacgtggctgacctacaccggtgctatcaagcttgatgacaaggacccgaactttaaagaccaggttattctgcttaacaaacatattgatgcctataaaactttcccgccgaccgaacccaaaaaggacaaaaagaaaaaagctgatgaaacccaggctctaccgcagcgtcagaaaaaacagcaaactgtgactctgctgccagctgcggacctggatgatttttccaagcagctgcaacagtctatgagctctgcggactctacgcaggctggtggttctggtcaccatcatcaccatcattaa

SEQ ID NO: 2615 - DNA, 2421 bp, Artificial Sequence
  Description of Artificial Sequence: Synthetic polynucleotide
atgaaaatcgaagaaggtaaactggtaatctggattaacggcgataaaggctataacggtctcgctgaagtcggtaagaaattcgagaaagataccggaattaaagtcaccgttgagcatccggataaactggaagagaaattcccacaggttgcggcaactggcgatggccctgacattatcttctgggcacacgaccgctttggtggctacgctcaatctggcctgttggctgaaatcaccccggacaaagcgttccaggacaagctgtatccgtttacctgggatgccgtacgttacaacggcaagctgattgcttacccgatcgctgttgaagcgttatcgctgatttataacaaagatctgctgccgaacccgccaaaaacctgggaagagatcccggcgctggataaagaactgaaagcgaaaggtaagagcgcgctgatgttcaacctgcaagaaccgtacttcacctggccgctgattgctgctgacgggggttatgcgttcaagtatgaaaacggcaagtacgacattaaagacgtgggcgtggataacgctggcgcgaaagcgggtctgaccttcctggttgacctgattaaaaacaaacacatgaatgcagacaccgattactccatcgcagaagctgcctttaataaaggcgaaacagcgatgaccatcaacggcccgtgggcatggtccaacatcgacaccagcaaagtgaattatggtgtaacggtactgccgaccttcaagggtcaaccatccaaaccgttcgttggcgtgctgagcgcaggtattaacgccgccagtccgaacaaagagctggcgaaagagttcctcgaaaactatctgctgactgatgaaggtctggaagcggttaataaagacaaaccgctgggtgccgtagcgctgaagtcttacgaggaagagttggcgaaagatccacgtattgccgccaccatggaaaacgcccagaaaggtgaaatcatgccgaacatcccgcagatgtccgctttctggtatgccgtgcgtactgcggtgatcaacgccgccagcggtcgtcagactgtcgatgaagccctgaaagacgcgcagactggtggttctggtgagaacctgtactttcaaagctcagataatgggcctcaaaaccagcgcaacgctccacgtataaccttcggtggcccgtctgactccacaggcagcaaccagaatggtgagcgtagtggagccaggtctaagcagcgccgtccccagggtctgccgaacaacacggcgagctggtttactgcgcttacccaacacggtaaagaagacttaaaattcccgcgtggccagggcgtcccgatcaacactaactcttccccggatgatcagattggttattaccgcagagcaactcgtcggattcgcggcggcgacggtaaaatgaaagatttgtctccgcgttggtacttttactatctcggcaccggtccggaagctggactgccctacggggcaaacaaggacgggatcatttgggtggctaccgaaggtgccctgaatactccaaaagatcatatcggcacccgtaaccctgctaataacgctgcgatcgttctgcaactgcctcagggtacaaaactgccaaaaggcttctatgcagaagggtcgcgtggtggcagccaggcgagtagccgtagcagctcccgctctcgcaactcgtcccgtaactccactccgggctcttctcgcggcacgtccccggctcgtatggcaggtaacggtggtgacgctgctctggcgctgctactgctggacaggctgaaccagctggagtcgaagatgagtggtaaaggccaacagcagcagggccagaccgttaccaaaaagagcgcagctgaagcatctaaaaaaccgcgacagaaacgtaccgcgactaaagcgtacaatgtaacacaggccttcggtcgtcgaggtccggagcaaactcaaggaaactttggcgatcaggaattaatccgccaggggaccgactacaaacactggccgcaaattgcccagttcgccccatccgctagtgcattcttcggtatgagccgcatcggcatggaagtaacgccaagtggtacgtggctgacctacaccggtgctatcaagcttgatgacaaggacccgaactttaaagaccaggttattctgcttaacaaacatattgatgcctataaaactttcccgccgaccgaacccaaaaaggacaaaaagaaaaaagctgatgaaacccaggctctaccgcagcgtcagaaaaaacagcaaactgtgactctgctgccagctgcggacctggatgatttttccaagcagctgcaacagtctatgagctctgcggactctacgcaggctggtggttctggtcaccatcatcaccatcattaa

SEQ ID NO: 2616 - DNA, 2421 bp, Artificial Sequence
  Description of Artificial Sequence: Synthetic polynucleotide
atgaaaatcgaagaaggtaaactggtaatctggattaacggcgataaaggctataacggtctcgctgaagtcggtaagaaattcgagaaagataccggaattaaagtcaccgttgagcatccggataaactggaagagaaattcccacaggttgcggcaactggcgatggccctgacattatcttctgggcacacgaccgctttggtggctacgctcaatctggcctgttggctgaaatcaccccggacaaagcgttccaggacaagctgtatccgtttacctgggatgccgtacgttacaacggcaagctgattgcttacccgatcgctgttgaagcgttatcgctgatttataacaaagatctgctgccgaacccgccaaaaacctgggaagagatcccggcgctggataaagaactgaaagcgaaaggtaagagcgcgctgatgttcaacctgcaagaaccgtacttcacctggccgctgattgctgctgacgggggttatgcgttcaagtatgaaaacggcaagtacgacattaaagacgtgggcgtggataacgctggcgcgaaagcgggtctgaccttcctggttgacctgattaaaaacaaacacatgaatgcagacaccgattactccatcgcagaagctgcctttaataaaggcgaaacagcgatgaccatcaacggcccgtgggcatggtccaacatcgacaccagcaaagtgaattatggtgtaacggtactgccgaccttcaagggtcaaccatccaaaccgttcgttggcgtgctgagcgcaggtattaacgccgccagtccgaacaaagagctggcgaaagagttcctcgaaaactatctgctgactgatgaaggtctggaagcggttaataaagacaaaccgctgggtgccgtagcgctgaagtcttacgaggaagagttggcgaaagatccacgtattgccgccaccatggaaaacgcccagaaaggtgaaatcatgccgaacatcccgcagatgtccgctttctggtatgccgtgcgtactgcggtgatcaacgccgccagcggtcgtcagactgtcgatgaagccctgaaagacgcgcagactggtggttctggtgagaacctgtactttcaaagctcagataatgggcctcaaaaccagcgcaacgctccacgtataaccttcggtggcccgtctgactccacaggcagcaaccagaatggtgagcgtagtggagccaggtctaagcagcgccgtccccagggtctgccgaacaacacggcgagctggtttactgcgcttacccaacacggtaaagaagacttaaaattcccgcgtggccagggcgtcccgatcaacactaactcttccccggatgatcagattggttattaccgcagagcaactcgtcggattcgcggcggcgacggtaaaatgaaagatttgtctccgcgttggtacttttactatctcggcaccggtccggaagctggactgccctacggggcaaacaaggacgggatcatttgggtggctaccgaaggtgccctgaatactccaaaagatcatatcggcacccgtaaccctgctaataacgctgcgatcgttctgcaactgcctcagggtacaactctgccaaaaggcttctatgcagaagggtcgcgtggtggcagccaggcgagtagccgtagcagctcccgctctcgcaactcgtcccgtaactccactccgggctcttctcgcggcacgtccccggctcgtatggcaggtaacggtggtgacgctgctctggcgctgctactgctggacaggctgaaccagctggagtcgaagatgagtggtaaaggccaacagcagcagggccagaccgttaccaaaaagagcgcagctgaagcatctaaaaaaccgcgacagaaacgtaccgcgactaaagattacaatgtaacacaggccttcggtcgtcgaggtccggagcaaactcaaggaaactttggcgatcaggatttaatcaaattggggaccgactacaaacactggccgcaaattgcccagttcgccccatccgctagtgcattcttcggtatgagccgcatcggcacggaagaaacgccaagtggtacgtggctgacctacaccggtgctatcaagcttgataaaaaggacccgaactttaaagaccaggttattctgcttaacaaacatattgatgcctataaaactttcccgccgaccgaacccaaaaaggacaaaaagaaaaaagctgatgaaacccaggctctaccgcagcgtcagaaaaaacagcaaactgtgactctgctgccagctgcggacctggatgatttttccaagcagctgcaacagtctatgagctctgcggactctacgcaggctggtggttctggtcaccatcatcaccatcattaa

SEQ ID NO: 2617 - DNA, 2421 bp, Artificial Sequence
  Description of Artificial Sequence: Synthetic polynucleotide
atgaaaatcgaagaaggtaaactggtaatctggattaacggcgataaaggctataacggtctcgctgaagtcggtaagaaattcgagaaagataccggaattaaagtcaccgttgagcatccggataaactggaagagaaattcccacaggttgcggcaactggcgatggccctgacattatcttctgggcacacgaccgctttggtggctacgctcaatctggcctgttggctgaaatcaccccggacaaagcgttccaggacaagctgtatccgtttacctgggatgccgtacgttacaacggcaagctgattgcttacccgatcgctgttgaagcgttatcgctgatttataacaaagatctgctgccgaacccgccaaaaacctgggaagagatcccggcgctggataaagaactgaaagcgaaaggtaagagcgcgctgatgttcaacctgcaagaaccgtacttcacctggccgctgattgctgctgacgggggttatgcgttcaagtatgaaaacggcaagtacgacattaaagacgtgggcgtggataacgctggcgcgaaagcgggtctgaccttcctggttgacctgattaaaaacaaacacatgaatgcagacaccgattactccatcgcagaagctgcctttaataaaggcgaaacagcgatgaccatcaacggcccgtgggcatggtccaacatcgacaccagcaaagtgaattatggtgtaacggtactgccgaccttcaagggtcaaccatccaaaccgttcgttggcgtgctgagcgcaggtattaacgccgccagtccgaacaaagagctggcgaaagagttcctcgaaaactatctgctgactgatgaaggtctggaagcggttaataaagacaaaccgctgggtgccgtagcgctgaagtcttacgaggaagagttggcgaaagatccacgtattgccgccaccatggaaaacgcccagaaaggtgaaatcatgccgaacatcccgcagatgtccgctttctggtatgccgtgcgtactgcggtgatcaacgccgccagcggtcgtcagactgtcgatgaagccctgaaagacgcgcagactggtggttctggtgagaacctgtactttcaaagctcagataatgggcctcaaaaccagcgcaacgctccacgtataaccttcggtggcccgtctgactccacaggcagcaaccagaatggtgagcgtagtggagccaggtctaagcagcgccgtccccagggtctgccgaacaacacggcgagctggtttactccgcttacccaaaatggtaaagaagacttaaaattcccgccaggccagggcgtcccgatcaacactaactcttccccggatgatcagattggttattaccgcagagcaactcgtcggattcgcggcggcgacggtaaaatgaaagatttgcctccgaaatggtacttttactatctcggcaccggtccgcacgctgatctgccctacgggcaaaagcatgacggggttttttgggtggctcgccctggtgccctgaatactccaaaagatcatatcggcacccgtaaccctgctaataacgctgcgatcccgaatcaactgcctccgggtacaaagctgccaaaaggcttctatgcagaagggtcgcgtggtggcagccaggcgagtagccgtagcagctcccgctctcgcaactcgtcccgtaactccactccgggctcttctcgcggcacgtccccggctcgtatggcaggtaacggtggtgacgctgctctggcgctgctactgctggacaggctgaaccagctggagtcgaagatgagtggtaaaggccaacagcagcagggccagaccgttaccaaaaagagcgcagctgaagcatctaaaaaaccgcgacagaaacgtaccgcgactaaagcgtacaatgtaacacaggccttcggtcgtcgaggtccggagcaaactcaaggaaactttggcgatcaggaattaatccgccaggggaccgactacaaacactggccgcaaattgcccagttcgccccatccgctagtgcattcttcggtatgagccgcatcggcatggaagtaacgccaagtggtacgtggctgacctacaccggtgctatcaagcttgatgacaaggacccgaactttaaagaccaggttattctgcttaacaaacatattgatgcctataaaactttcccgccgaccgaacccaaaaaggacaaaaagaaaaaagctgatgaaacccaggctctaccgcagcgtcagaaaaaacagcaaactgtgactctgctgccagctgcggacctggatgatttttccaagcagctgcaacagtctatgagctctgcggactctacgcaggctggtggttctggtcaccatcatcaccatcattaa

SEQ ID NO: 2618 - DNA, 2421 bp, Artificial Sequence
  Description of Artificial Sequence: Synthetic polynucleotide
atgaaaatcgaagaaggtaaactggtaatctggattaacggcgataaaggctataacggtctcgctgaagtcggtaagaaattcgagaaagataccggaattaaagtcaccgttgagcatccggataaactggaagagaaattcccacaggttgcggcaactggcgatggccctgacattatcttctgggcacacgaccgctttggtggctacgctcaatctggcctgttggctgaaatcaccccggacaaagcgttccaggacaagctgtatccgtttacctgggatgccgtacgttacaacggcaagctgattgcttacccgatcgctgttgaagcgttatcgctgatttataacaaagatctgctgccgaacccgccaaaaacctgggaagagatcccggcgctggataaagaactgaaagcgaaaggtaagagcgcgctgatgttcaacctgcaagaaccgtacttcacctggccgctgattgctgctgacgggggttatgcgttcaagtatgaaaacggcaagtacgacattaaagacgtgggcgtggataacgctggcgcgaaagcgggtctgaccttcctggttgacctgattaaaaacaaacacatgaatgcagacaccgattactccatcgcagaagctgcctttaataaaggcgaaacagcgatgaccatcaacggcccgtgggcatggtccaacatcgacaccagcaaagtgaattatggtgtaacggtactgccgaccttcaagggtcaaccatccaaaccgttcgttggcgtgctgagcgcaggtattaacgccgccagtccgaacaaagagctggcgaaagagttcctcgaaaactatctgctgactgatgaaggtctggaagcggttaataaagacaaaccgctgggtgccgtagcgctgaagtcttacgaggaagagttggcgaaagatccacgtattgccgccaccatggaaaacgcccagaaaggtgaaatcatgccgaacatcccgcagatgtccgctttctggtatgccgtgcgtactgcggtgatcaacgccgccagcggtcgtcagactgtcgatgaagccctgaaagacgcgcagactggtggttctggtgagaacctgtactttcaaagctcagataatgggcctcaaaaccagcgcaacgctccacgtataaccttcggtggcccgtctgactccacaggcagcaaccagaatggtgagcgtagtggagccaggtctaagcagcgccgtccccagggtctgccgaacaacacggcgagctggtttactgcgcttacccaacacggtaaagaagacttaaaattcccgcgtggccagggcgtcccgatcaacactaactcttccccggatgatcagattggttattaccgcagagcaactcgtcggattcgcggcggcgacggtaaaatgaaagatttgtctccgcgttggtacttttactatctcggcaccggtccggaagctggactgccctacggggcaaacaaggacgggatcatttgggtggctaccgaaggtgccctgaatactccaaaagatcatatcggcacccgtaaccctgctaataacgctgcgatcgttctgcaactgcctcagggtacaactctgccaaaaggcttctatgcagaagggtcgcgtggtggcagccaggcgagtagccgtagcagctcccgctctcgcaactcgtcccgtaactccactccgggctcttctcgcggcacgtccccggctcgtatggcaggtaacggtggtgacgctgctctggcgctgctactgctggacaggctgaaccagctggagtcgaagatgagtggtaaaggccaacagcagcagggccagaccgttaccaaaaagagcgcagctgaagcatctaaaaaaccgcgacagaaacgtaccgcgactaaagcgtgcaatgtaacacaggccttcggtcgtcgaggtccggagcaaactcaaggaaactttggcgatcaggaattaatccgccaggggaccgactacaaacactggccgcaaattgcccagttcgccccatccgctagtgcattcttcggtatgagccgcatcggcatggaagtaacgccaagtggtacgtggctgacctacaccggtgctatcaagcttgatgacaaggacccgaactttaaagaccaggttattctgcttaacaaacatattgatgcctataaaactttcccgccgaccgaacccaaaaaggacaaaaagaaaaaagctgatgaaacccaggctctaccgcagcgtcagaaaaaacagcaaactgtgactctgctgccagctgcggacctggatgatttttccaagcagctgcaacagtctatgagctctgcggactctacgcaggctggtggttctggtcaccatcatcaccatcattaa

SEQ ID NO: 2619 - DNA, 2421 bp, Artificial Sequence
  Description of Artificial Sequence: Synthetic polynucleotide
atgaaaatcgaagaaggtaaactggtaatctggattaacggcgataaaggctataacggtctcgctgaagtcggtaagaaattcgagaaagataccggaattaaagtcaccgttgagcatccggataaactggaagagaaattcccacaggttgcggcaactggcgatggccctgacattatcttctgggcacacgaccgctttggtggctacgctcaatctggcctgttggctgaaatcaccccggacaaagcgttccaggacaagctgtatccgtttacctgggatgccgtacgttacaacggcaagctgattgcttacccgatcgctgttgaagcgttatcgctgatttataacaaagatctgctgccgaacccgccaaaaacctgggaagagatcccggcgctggataaagaactgaaagcgaaaggtaagagcgcgctgatgttcaacctgcaagaaccgtacttcacctggccgctgattgctgctgacgggggttatgcgttcaagtatgaaaacggcaagtacgacattaaagacgtgggcgtggataacgctggcgcgaaagcgggtctgaccttcctggttgacctgattaaaaacaaacacatgaatgcagacaccgattactccatcgcagaagctgcctttaataaaggcgaaacagcgatgaccatcaacggcccgtgggcatggtccaacatcgacaccagcaaagtgaattatggtgtaacggtactgccgaccttcaagggtcaaccatccaaaccgttcgttggcgtgctgagcgcaggtattaacgccgccagtccgaacaaagagctggcgaaagagttcctcgaaaactatctgctgactgatgaaggtctggaagcggttaataaagacaaaccgctgggtgccgtagcgctgaagtcttacgaggaagagttggcgaaagatccacgtattgccgccaccatggaaaacgcccagaaaggtgaaatcatgccgaacatcccgcagatgtccgctttctggtatgccgtgcgtactgcggtgatcaacgccgccagcggtcgtcagactgtcgatgaagccctgaaagacgcgcagactggtggttctggtgagaacctgtactttcaaagctcagataatgggcctcaaaaccagcgcaacgctccacgtataaccttcggtggcccgtctgactccacaggcagcaaccagaatggtgagcgtagtggagccaggtctaagcagcgccgtccccagggtctgccgaacaacacggcgagctggtttactgcgcttacccaacacggtaaagaagacttaaaattcccgccaggccagggcgtcccgatcaaccccaactctaaaccggatgatcagattggttattaccgcagagaagttcgtcggtatcgcggcggcgacggtcaaatgaaagatttgcctccgcgttggtacttttactatctcggcaccggtccggaagctggactgccctacggggcaaacaaggacgggatcatttgggtggctaccgaaggtgccctgaatactccaaaagatcatatcggcacccgtaaccctgctaataacgctgcgatcgttctgcaactgcctcagggtacaactctgccaaaaggcttctatgcagaagggtcgcgtggtggcagccaggcgagtagccgtagcagctcccgctctcgcaactcgtcccgtaactccactccgggctcttctcgcggcacgtccccggctcgtatggcaggtaacggtggtgacgctgctctggcgctgctactgctggacaggctgaaccagctggagtcgaagatgagtggtaaaggccaacagcagcagggccagaccgttaccaaaaagagcgcagctgaagcatctaaaaaaccgcgacagaaacgtaccgcgactaaagcgtacaatgtaacacaggccttcggtcgtcgaggtccggagcaaactcaaggaaactttggcgatcaggaattaatccgccaggggaccgactacaaacactggccgcaaattgcccagttcgccccatccgctagtgcattcttcggtatgagccgcatcggcatggaagtaacgccaagtggtacgtggctgacctacaccggtgctatcaagcttgatgacaaggacccgaactttaaagaccaggttattctgcttaacaaacatattgatgcctataaaactttcccgccgaccgaacccaaaaaggacaaaaagaaaaaagctgatgaaacccaggctctaccgcagcgtcagaaaaaacagcaaactgtgactctgctgccagctgcggacctggatgatttttccaagcagctgcaacagtctatgagctctgcggactctacgcaggctggtggttctggtcaccatcatcaccatcattaa

SEQ ID NO: 2620 - DNA, 2421 bp, Artificial Sequence
  Description of Artificial Sequence: Synthetic polynucleotide
atgaaaatcgaagaaggtaaactggtaatctggattaacggcgataaaggctataacggtctcgctgaagtcggtaagaaattcgagaaagataccggaattaaagtcaccgttgagcatccggataaactggaagagaaattcccacaggttgcggcaactggcgatggccctgacattatcttctgggcacacgaccgctttggtggctacgctcaatctggcctgttggctgaaatcaccccggacaaagcgttccaggacaagctgtatccgtttacctgggatgccgtacgttacaacggcaagctgattgcttacccgatcgctgttgaagcgttatcgctgatttataacaaagatctgctgccgaacccgccaaaaacctgggaagagatcccggcgctggataaagaactgaaagcgaaaggtaagagcgcgctgatgttcaacctgcaagaaccgtacttcacctggccgctgattgctgctgacgggggttatgcgttcaagtatgaaaacggcaagtacgacattaaagacgtgggcgtggataacgctggcgcgaaagcgggtctgaccttcctggttgacctgattaaaaacaaacacatgaatgcagacaccgattactccatcgcagaagctgcctttaataaaggcgaaacagcgatgaccatcaacggcccgtgggcatggtccaacatcgacaccagcaaagtgaattatggtgtaacggtactgccgaccttcaagggtcaaccatccaaaccgttcgttggcgtgctgagcgcaggtattaacgccgccagtccgaacaaagagctggcgaaagagttcctcgaaaactatctgctgactgatgaaggtctggaagcggttaataaagacaaaccgctgggtgccgtagcgctgaagtcttacgaggaagagttggcgaaagatccacgtattgccgccaccatggaaaacgcccagaaaggtgaaatcatgccgaacatcccgcagatgtccgctttctggtatgccgtgcgtactgcggtgatcaacgccgccagcggtcgtcagactgtcgatgaagccctgaaagacgcgcagactggtggttctggtgagaacctgtactttcaaagctcagataatgggcctcaaaaccagcgcaacgctccacgtataaccttcggtggcccgtctgactccacaggcagcaaccagaatggtgagcgtagtggagccaggtctaagcagcgccgtccccagggtctgccgaacaacacggcgagctggtttactgcgcttacccaacacggtaaagaagacttaaaattcccgcgtggccagggcgtcccgatcaacactaactcttccccggatgatcagattggttattaccgcagagcaactcgtcggattcgcggcggcgacggtaaaatgaaagatttgtctccgctctggtacttttactatctcggcaccggtccggaagctggactgccctacggggcaaacaaggacgggatcatttgggtggctaccgaaggtgccctgaatactccaaaagatcatatcggcacccgtaaccctgctaataacgctgcgatcgttctgcaactgcctcagggtacaactctgccaaaaggcttctatgcagaagggtcgcgtggtggcagccaggcgagtagccgtagcagctcccgctctcgcaactcgtcccgtaactccactccgggctcttctcgcggcacgtccccggctcgtatggcaggtaacggtggtgacgctgctctggcgctgctactgctggacaggctgaaccagctggagtcgaagatgagtggtaaaggccaacagcagcagggccagaccgttaccaaaaagagcgcagctgaagcatctaaaaaaccgcgacagaaacgtaccgcgactaaagcgtacaatgtaacacaggccttcggtcgtcgaggtccggagcaaactcaaggaaactttggcgatcaggaattaatccgccaggggaccgactacaaacactggccgcaaattgcccagttcgccccatccgctagtgcattcttcggtatgagccgcatcggcatggaagtaacgccaagtggtacgtggctgacctacaccggtgctatcaagcttgatgacaaggacccgaactttaaagaccaggttattctgcttaacaaacatattgatgcctataaaactttcccgccgaccgaacccaaaaaggacaaaaagaaaaaagctgatgaaacccaggctctaccgcagcgtcagaaaaaacagcaaactgtgactctgctgccagctgcggacctggatgatttttccaagcagctgcaacagtctatgagctctgcggactctacgcaggctggtggttctggtcaccatcatcaccatcattaa

SEQ ID NO: 2621 - DNA, 2421 bp, Artificial Sequence
  Description of Artificial Sequence: Synthetic polynucleotide
atgaaaatcgaagaaggtaaactggtaatctggattaacggcgataaaggctataacggtctcgctgaagtcggtaagaaattcgagaaagataccggaattaaagtcaccgttgagcatccggataaactggaagagaaattcccacaggttgcggcaactggcgatggccctgacattatcttctgggcacacgaccgctttggtggctacgctcaatctggcctgttggctgaaatcaccccggacaaagcgttccaggacaagctgtatccgtttacctgggatgccgtacgttacaacggcaagctgattgcttacccgatcgctgttgaagcgttatcgctgatttataacaaagatctgctgccgaacccgccaaaaacctgggaagagatcccggcgctggataaagaactgaaagcgaaaggtaagagcgcgctgatgttcaacctgcaagaaccgtacttcacctggccgctgattgctgctgacgggggttatgcgttcaagtatgaaaacggcaagtacgacattaaagacgtgggcgtggataacgctggcgcgaaagcgggtctgaccttcctggttgacctgattaaaaacaaacacatgaatgcagacaccgattactccatcgcagaagctgcctttaataaaggcgaaacagcgatgaccatcaacggcccgtgggcatggtccaacatcgacaccagcaaagtgaattatggtgtaacggtactgccgaccttcaagggtcaaccatccaaaccgttcgttggcgtgctgagcgcaggtattaacgccgccagtccgaacaaagagctggcgaaagagttcctcgaaaactatctgctgactgatgaaggtctggaagcggttaataaagacaaaccgctgggtgccgtagcgctgaagtcttacgaggaagagttggcgaaagatccacgtattgccgccaccatggaaaacgcccagaaaggtgaaatcatgccgaacatcccgcagatgtccgctttctggtatgccgtgcgtactgcggtgatcaacgccgccagcggtcgtcagactgtcgatgaagccctgaaagacgcgcagactggtggttctggtgagaacctgtactttcaaagctcagataatgggcctcaaaaccagcgcaacgctccacgtataaccttcggtggcccgtctgactccacaggcagcaaccagaatggtgagcgtagtggagccaggtctaagcagcgccgtccccagggtctgccgaacaacacggcgagctggtttactccacttacccaacacggtaaagaagacttaaaattcccgccgggccagggcgtcccgatcaacactaactcttccccggatgatcagattggttattaccgcagagcaactcgtcggattcgcggcggcgacggtaaaatgaaagatttgcccccgcgttggtacttttactatctcggcaccggtccggaagctgatctgccctacgggcaagtgaaggacgggatcttttgggtggctgaggaaggtgccctgaatactccaaaagatcatatcggcacccgtaaccctgctaataacgctgcgatcccgctgcaactgcctcccggtacaactctgccaaaaggcttctatgcagaagggtcgcgtggtggcagccaggcgagtagccgtagcagctcccgctctcgcaactcgtcccgtaactccactccgggctcttctcgcggcacgtccccggctcgtatggcaggtaacggtggtgacgctgctctggcgctgctactgctggacaggctgaaccagctggagtcgaagatgagtggtaaaggccaacagcagcagggccagaccgttaccaaaaagagcgcagctgaagcatctaaaaaaccgcgacagaaacgtaccgcgactaaagcgtacaatgtaacacaggccttcggtcgtcgaggtccggagcaaactcaaggaaactttggcgatcaggaattaatccgccaggggaccgactacaaacactggccgcaaattgcccagttcgccccatccgctagtgcattcttcggtatgagccgcatcggcatggaagtaacgccaagtggtacgtggctgacctacaccggtgctatcaagcttgatgacaaggacccgaactttaaagaccaggttattctgcttaacaaacatattgatgcctataaaactttcccgccgaccgaacccaaaaaggacaaaaagaaaaaagctgatgaaacccaggctctaccgcagcgtcagaaaaaacagcaaactgtgactctgctgccagctgcggacctggatgatttttccaagcagctgcaacagtctatgagctctgcggactctacgcaggctggtggttctggtcaccatcatcaccatcattaa

SEQ ID NO: 2622 - DNA, 2421 bp, Artificial Sequence
  Description of Artificial Sequence: Synthetic polynucleotide
atgaaaatcgaagaaggtaaactggtaatctggattaacggcgataaaggctataacggtctcgctgaagtcggtaagaaattcgagaaagataccggaattaaagtcaccgttgagcatccggataaactggaagagaaattcccacaggttgcggcaactggcgatggccctgacattatcttctgggcacacgaccgctttggtggctacgctcaatctggcctgttggctgaaatcaccccggacaaagcgttccaggacaagctgtatccgtttacctgggatgccgtacgttacaacggcaagctgattgcttacccgatcgctgttgaagcgttatcgctgatttataacaaagatctgctgccgaacccgccaaaaacctgggaagagatcccggcgctggataaagaactgaaagcgaaaggtaagagcgcgctgatgttcaacctgcaagaaccgtacttcacctggccgctgattgctgctgacgggggttatgcgttcaagtatgaaaacggcaagtacgacattaaagacgtgggcgtggataacgctggcgcgaaagcgggtctgaccttcctggttgacctgattaaaaacaaacacatgaatgcagacaccgattactccatcgcagaagctgcctttaataaaggcgaaacagcgatgaccatcaacggcccgtgggcatggtccaacatcgacaccagcaaagtgaattatggtgtaacggtactgccgaccttcaagggtcaaccatccaaaccgttcgttggcgtgctgagcgcaggtattaacgccgccagtccgaacaaagagctggcgaaagagttcctcgaaaactatctgctgactgatgaaggtctggaagcggttaataaagacaaaccgctgggtgccgtagcgctgaagtcttacgaggaagagttggcgaaagatccacgtattgccgccaccatggaaaacgcccagaaaggtgaaatcatgccgaacatcccgcagatgtccgctttctggtatgccgtgcgtactgcggtgatcaacgccgccagcggtcgtcagactgtcgatgaagccctgaaagacgcgcagactggtggttctggtgagaacctgtactttcaaagctcagataatgggcctcaaaaccagcgcaacgctccacgtataaccttcggtggcccgtctgactccacaggcagcaaccagaatggtgagcgtagtggagccaggtctaagcagcgccgtccccagggtctgccgaacaacacggcgagctggtttactgcgcttacccaacacggtaaagaagacttaaaattcccgcgtggccagggcgtcccgatcaacactaactcttccccggatgatcagattggttattaccgcagagcaactcgtcggattcgcggcggcgacggtaaaatgaaagatttgtctccgcgttggtacttttactatctcggcaccggtccggaagctggactgccctacggggcaaacaaggacgggatcatttgggtggctaccgaaggtgccctgaatactccaaaagatcatatcggcacccgtaaccctgctaataacgctgcgatcgttctgcaactgcctcagggtacaactctgccaaaaggcttctatgcagaagggtcgcgtggtggcagccaggcgagtagccgtagcagctcccgctctcgcaactcgtcccgtaactccactccgggctcttctcgcggcacgtccccggctcgtatggcaggtaacggtggtgacgctgctctggcgctgctactgctggacaggctgaaccagctggagtcgaagatgagtggtaaaggccaacagcagcagggccagaccgttaccaaaaagagcgcagctgaaatgtctaaaaaaccgcgacagaaacgtaccgcgactaaaggctgcaatgtaacacagtgtttcggtccccgaggtccggagcaaactcaaggaaactttggcgatgccgaattagtgaagaaagggaccgactacaaacactggccgcaaattgcccagttcgccccatccgctagtgcattcttcggtatgagccgcatctcatcaaaggaaacgccaagtggtacgtggctgacctacaccggtgctatcaagcttgataaagatgacccgaactttaaagaccaggttattctgcttaacaaacatattgatgcctataaaactttcccgccgaccgaacccaaaaaggacaaaaagaaaaaagctgatgaaacccaggctctaccgcagcgtcagaaaaaacagcaaactgtgactctgctgccagctgcggacctggatgatttttccaagcagctgcaacagtctatgagctctgcggactctacgcaggctggtggttctggtcaccatcatcaccatcattaa

SEQ ID NO: 2623 - DNA, 2421 bp, Artificial Sequence
  Description of Artificial Sequence: Synthetic polynucleotide
atgaaaatcgaagaaggtaaactggtaatctggattaacggcgataaaggctataacggtctcgctgaagtcggtaagaaattcgagaaagataccggaattaaagtcaccgttgagcatccggataaactggaagagaaattcccacaggttgcggcaactggcgatggccctgacattatcttctgggcacacgaccgctttggtggctacgctcaatctggcctgttggctgaaatcaccccggacaaagcgttccaggacaagctgtatccgtttacctgggatgccgtacgttacaacggcaagctgattgcttacccgatcgctgttgaagcgttatcgctgatttataacaaagatctgctgccgaacccgccaaaaacctgggaagagatcccggcgctggataaagaactgaaagcgaaaggtaagagcgcgctgatgttcaacctgcaagaaccgtacttcacctggccgctgattgctgctgacgggggttatgcgttcaagtatgaaaacggcaagtacgacattaaagacgtgggcgtggataacgctggcgcgaaagcgggtctgaccttcctggttgacctgattaaaaacaaacacatgaatgcagacaccgattactccatcgcagaagctgcctttaataaaggcgaaacagcgatgaccatcaacggcccgtgggcatggtccaacatcgacaccagcaaagtgaattatggtgtaacggtactgccgaccttcaagggtcaaccatccaaaccgttcgttggcgtgctgagcgcaggtattaacgccgccagtccgaacaaagagctggcgaaagagttcctcgaaaactatctgctgactgatgaaggtctggaagcggttaataaagacaaaccgctgggtgccgtagcgctgaagtcttacgaggaagagttggcgaaagatccacgtattgccgccaccatggaaaacgcccagaaaggtgaaatcatgccgaacatcccgcagatgtccgctttctggtatgccgtgcgtactgcggtgatcaacgccgccagcggtcgtcagactgtcgatgaagccctgaaagacgcgcagactggtggttctggtgagaacctgtactttcaaagctcagataatgggcctcaaaaccagcgcaacgctccacgtataaccttcggtggcccgtctgactccacaggcagcaaccagaatggtgagcgtagtggagccaggtctaagcagcgccgtccccagggtctgccgaacaacacggcgagctggtttactgcgcttacccaacacggtaaagaagacttaaaattcccgcgtggccagggcgtcccgatcaacactaactcttccccggatgatcagattggttattaccgcagagcaactcgtcggattcgcggcggcgacggtaaaatgaaagatttgtctccgcgttggtacttttactatctcggcaccggtccggaagctggactgccctacggggcaaacaaggacgggatcatttgggtggctaccgaaggtgccctgaatactccaaaagatcatatcggcacccgtaaccctgctaataacgctgcgatcgttctgcaactgcctcagggtacaactctgccaaaaggcttctatgcagaagggtcgcgtggtggcagccaggcgagtagccgtagcagctcccgctctcgcaactcgtcccgtaactccactccgggctcttctcgcggcacgtccccggctcgtatggcaggtaacggtggtgacgctgctctggcgctgctactgctggacaggctgaaccagctggagtcgaagatgagtggtaaaggccaacagcagcagggccagaccgttaccaaaaagagcgcagctgaaatgtctaaaaaaccgcgatggaaacgtaccgcgactaaagagtacaatgtaacacaggccttcggtaaacgaggtccgaaagatactcaaggaaactttggcgatgccgaattaatcaaacaggggaccgactacaaacactggccgcaaattgcccagttcgtgccatccgctgccgcattcttctttatgagccgcatctcgatgaaggaaacgccagatggtgtctggctgacctacaccggtacgatcaagcttgataaagatgacccgaactttgatgaccaggttaaactgcttaacaaacatattgatgcctataaaactttcccgccgaccgaacccaaaaaggacaaaaagaaaaaagctgatgaaacccaggctctaccgcagcgtcagaaaaaacagcaaactgtgactctgctgccagctgcggacctggatgatttttccaagcagctgcaacagtctatgagctctgcggactctacgcaggctggtggttctggtcaccatcatcaccatcattaa

SEQ ID NO: 2624 - DNA, 2421 bp, Artificial Sequence
  Description of Artificial Sequence: Synthetic polynucleotide
atgaaaatcgaagaaggtaaactggtaatctggattaacggcgataaaggctataacggtctcgctgaagtcggtaagaaattcgagaaagataccggaattaaagtcaccgttgagcatccggataaactggaagagaaattcccacaggttgcggcaactggcgatggccctgacattatcttctgggcacacgaccgctttggtggctacgctcaatctggcctgttggctgaaatcaccccggacaaagcgttccaggacaagctgtatccgtttacctgggatgccgtacgttacaacggcaagctgattgcttacccgatcgctgttgaagcgttatcgctgatttataacaaagatctgctgccgaacccgccaaaaacctgggaagagatcccggcgctggataaagaactgaaagcgaaaggtaagagcgcgctgatgttcaacctgcaagaaccgtacttcacctggccgctgattgctgctgacgggggttatgcgttcaagtatgaaaacggcaagtacgacattaaagacgtgggcgtggataacgctggcgcgaaagcgggtctgaccttcctggttgacctgattaaaaacaaacacatgaatgcagacaccgattactccatcgcagaagctgcctttaataaaggcgaaacagcgatgaccatcaacggcccgtgggcatggtccaacatcgacaccagcaaagtgaattatggtgtaacggtactgccgaccttcaagggtcaaccatccaaaccgttcgttggcgtgctgagcgcaggtattaacgccgccagtccgaacaaagagctggcgaaagagttcctcgaaaactatctgctgactgatgaaggtctggaagcggttaataaagacaaaccgctgggtgccgtagcgctgaagtcttacgaggaagagttggcgaaagatccacgtattgccgccaccatggaaaacgcccagaaaggtgaaatcatgccgaacatcccgcagatgtccgctttctggtatgccgtgcgtactgcggtgatcaacgccgccagcggtcgtcagactgtcgatgaagccctgaaagacgcgcagactggtggttctggtgagaacctgtactttcaaagctcagataatgggcctcaaaaccagcgcaacgctccacgtataaccttcggtggcccgtctgactccacaggcagcaaccagaatggtgagcgtagtggagccaggtctaagcagcgccgtccccagggtctgccgaacaacacggcgagctggtttactgcgcttacccaacacggtaaagaagacttaaaattcccgcgtggccagggcgtcccgatcaacactaactcttccccggatgatcagattggttattaccgcagagcaactcgtcggattcgcggcggcgacggtaaaatgaaagatttgtctccggtttggtacttttactatctcggcaccggtccggaagctggactgccctacggggcaaacaaggacgggatcatttgggtggctaccgaaggtgccctgaatactccaaaagatcatatcggcacccgtaaccctgctaataacgctgcgatcgttctgcaactgcctcagggtacaactctgccaaaaggcttctatgcagaagggtcgcgtggtggcagccaggcgagtagccgtagcagctcccgctctcgcaactcgtcccgtaactccactccgggctcttctcgcggcacgtccccggctcgtatggcaggtaacggtggtgacgctgctctggcgctgctactgctggacaggctgaaccagctggagtcgaagatgagtggtaaaggccaacagcagcagggccagaccgttaccaaaaagagcgcagctgaagcatctaaaaaaccgcgacagaaacgtaccgcgactaaagcgtacaatgtaacacaggccttcggtcgtcgaggtccggagcaaactcaaggaaactttggcgatcaggaattaatccgccaggggaccgactacaaacactggccgcaaattgcccagttcgccccatccgctagtgcattcttcggtatgagccgcatcggcatggaagtaacgccaagtggtacgtggctgacctacaccggtgctatcaagcttgatgacaaggacccgaactttaaagaccaggttattctgcttaacaaacatattgatgcctataaaactttcccgccgaccgaacccaaaaaggacaaaaagaaaaaagctgatgaaacccaggctctaccgcagcgtcagaaaaaacagcaaactgtgactctgctgccagctgcggacctggatgatttttccaagcagctgcaacagtctatgagctctgcggactctacgcaggctggtggttctggtcaccatcatcaccatcattaa

SEQ ID NO: 2625 - DNA, 2421 bp, Artificial Sequence
  Description of Artificial Sequence: Synthetic polynucleotide
atgaaaatcgaagaaggtaaactggtaatctggattaacggcgataaaggctataacggtctcgctgaagtcggtaagaaattcgagaaagataccggaattaaagtcaccgttgagcatccggataaactggaagagaaattcccacaggttgcggcaactggcgatggccctgacattatcttctgggcacacgaccgctttggtggctacgctcaatctggcctgttggctgaaatcaccccggacaaagcgttccaggacaagctgtatccgtttacctgggatgccgtacgttacaacggcaagctgattgcttacccgatcgctgttgaagcgttatcgctgatttataacaaagatctgctgccgaacccgccaaaaacctgggaagagatcccggcgctggataaagaactgaaagcgaaaggtaagagcgcgctgatgttcaacctgcaagaaccgtacttcacctggccgctgattgctgctgacgggggttatgcgttcaagtatgaaaacggcaagtacgacattaaagacgtgggcgtggataacgctggcgcgaaagcgggtctgaccttcctggttgacctgattaaaaacaaacacatgaatgcagacaccgattactccatcgcagaagctgcctttaataaaggcgaaacagcgatgaccatcaacggcccgtgggcatggtccaacatcgacaccagcaaagtgaattatggtgtaacggtactgccgaccttcaagggtcaaccatccaaaccgttcgttggcgtgctgagcgcaggtattaacgccgccagtccgaacaaagagctggcgaaagagttcctcgaaaactatctgctgactgatgaaggtctggaagcggttaataaagacaaaccgctgggtgccgtagcgctgaagtcttacgaggaagagttggcgaaagatccacgtattgccgccaccatggaaaacgcccagaaaggtgaaatcatgccgaacatcccgcagatgtccgctttctggtatgccgtgcgtactgcggtgatcaacgccgccagcggtcgtcagactgtcgatgaagccctgaaagacgcgcagactggtggttctggtgagaacctgtactttcaaagctcagataatgggcctcaaaaccagcgcaacgctccacgtataaccttcggtggcccgtctgactccacaggcagcaaccagaatggtgagcgtagtggagccaggtctaagcagcgccgtccccagggtctgccgaacaacacggcgagctggtttactccgcttacccaaaatggtaaagaagacttaaaattcccgcctggccagggcgtcccgatcaacactaactcttccccggatgatcagattggttattaccgcagagcaactcgtcggattcgcggcggcgacggtaaaatgaaagatttgccaccgaagtggtacttttactatctcggcaccggtccgcatgctgatctgccctacgggcaaaaacacgacggggttttttgggtggctcgtccaggtgccctgaatactccaaaagatcatatcggcacccgtaaccctgctaataacgctgcgatcccgctgcaactgcctccgggtacaaaactgccaaaaggcttctatgcagaagggtcgcgtggtggcagccaggcgagtagccgtagcagctcccgctctcgcaactcgtcccgtaactccactccgggctcttctcgcggcacgtccccggctcgtatggcaggtaacggtggtgacgctgctctggcgctgctactgctggacaggctgaaccagctggagtcgaagatgagtggtaaaggccaacagcagcagggccagaccgttaccaaaaagagcgcagctgaagcatctaaaaaaccgcgacagaaacgtaccgcgactaaagcgtacaatgtaacacaggccttcggtcgtcgaggtccggagcaaactcaaggaaactttggcgatcaggaattaatccgccaggggaccgactacaaacactggccgcaaattgcccagttcgccccatccgctagtgcattcttcggtatgagccgcatcggcatggaagtaacgccaagtggtacgtggctgacctacaccggtgctatcaagcttgatgacaaggacccgaactttaaagaccaggttattctgcttaacaaacatattgatgcctataaaactttcccgccgaccgaacccaaaaaggacaaaaagaaaaaagctgatgaaacccaggctctaccgcagcgtcagaaaaaacagcaaactgtgactctgctgccagctgcggacctggatgatttttccaagcagctgcaacagtctatgagctctgcggactctacgcaggctggtggttctggtcaccatcatcaccatcattaa

SEQ ID NO: 2626 - DNA, 2421 bp, Artificial Sequence
  Description of Artificial Sequence: Synthetic polynucleotide
atgaaaatcgaagaaggtaaactggtaatctggattaacggcgataaaggctataacggtctcgctgaagtcggtaagaaattcgagaaagataccggaattaaagtcaccgttgagcatccggataaactggaagagaaattcccacaggttgcggcaactggcgatggccctgacattatcttctgggcacacgaccgctttggtggctacgctcaatctggcctgttggctgaaatcaccccggacaaagcgttccaggacaagctgtatccgtttacctgggatgccgtacgttacaacggcaagctgattgcttacccgatcgctgttgaagcgttatcgctgatttataacaaagatctgctgccgaacccgccaaaaacctgggaagagatcccggcgctggataaagaactgaaagcgaaaggtaagagcgcgctgatgttcaacctgcaagaaccgtacttcacctggccgctgattgctgctgacgggggttatgcgttcaagtatgaaaacggcaagtacgacattaaagacgtgggcgtggataacgctggcgcgaaagcgggtctgaccttcctggttgacctgattaaaaacaaacacatgaatgcagacaccgattactccatcgcagaagctgcctttaataaaggcgaaacagcgatgaccatcaacggcccgtgggcatggtccaacatcgacaccagcaaagtgaattatggtgtaacggtactgccgaccttcaagggtcaaccatccaaaccgttcgttggcgtgctgagcgcaggtattaacgccgccagtccgaacaaagagctggcgaaagagttcctcgaaaactatctgctgactgatgaaggtctggaagcggttaataaagacaaaccgctgggtgccgtagcgctgaagtcttacgaggaagagttggcgaaagatccacgtattgccgccaccatggaaaacgcccagaaaggtgaaatcatgccgaacatcccgcagatgtccgctttctggtatgccgtgcgtactgcggtgatcaacgccgccagcggtcgtcagactgtcgatgaagccctgaaagacgcgcagactggtggttctggtgagaacctgtactttcaaagctcagataatgggcctcaaaaccagcgcaacgctccacgtataaccttcggtggcccgtctgactccacaggcagcaaccagaatggtgagcgtagtggagccaggtctaagcagcgccgtccccagggtctgccgaacaacacggcgagctggtttactgcgcttacccaacacggtaaagaagacttaaaattcccgcgtggccagggcgtcccgatcaacactaactcttccccggatgatcagattggttattaccgcagagcaactcgtcggattcgcggcggcgacggtaaaatgaaagatttgtctccgcgttggtacttttactatctcggcaccggtccggaagctggactgccctacggggcaacgaaggacgggatcatttgggtggctaccgaaggtgccctgaatactccaaaagatcatatcggcacccgtaaccctgctaataacgctgcgatcgttctgcaactgcctcagggtacaactctgccaaaaggcttctatgcagaagggtcgcgtggtggcagccaggcgagtagccgtagcagctcccgctctcgcaactcgtcccgtaactccactccgggctcttctcgcggcacgtccccggctcgtatggcaggtaacggtggtgacgctgctctggcgctgctactgctggacaggctgaaccagctggagtcgaagatgagtggtaaaggccaacagcagcagggccagaccgttaccaaaaagagcgcagctgaagcatctaaaaaaccgcgacagaaacgtaccgcgactaaagcgtacaatgtaacacaggccttcggtcgtcgaggtccggagcaaactcaaggaaactttggcgatcaggaattaatccgccaggggaccgactacaaacactggccgcaaattgcccagttcgccccatccgctagtgcattcttcggtatgagccgcatcggcatggaagtaacgccaagtggtacgtggctgacctacaccggtgctatcaagcttgatgacaaggacccgaactttaaagaccaggttattctgcttaacaaacatattgatgcctataaaactttcccgccgaccgaacccaaaaaggacaaaaagaaaaaagctgatgaaacccaggctctaccgcagcgtcagaaaaaacagcaaactgtgactctgctgccagctgcggacctggatgatttttccaagcagctgcaacagtctatgagctctgcggactctacgcaggctggtggttctggtcaccatcatcaccatcattaa

SEQ ID NO: 2627 - DNA, 2421 bp, Artificial Sequence
  Description of Artificial Sequence: Synthetic polynucleotide
atgaaaatcgaagaaggtaaactggtaatctggattaacggcgataaaggctataacggtctcgctgaagtcggtaagaaattcgagaaagataccggaattaaagtcaccgttgagcatccggataaactggaagagaaattcccacaggttgcggcaactggcgatggccctgacattatcttctgggcacacgaccgctttggtggctacgctcaatctggcctgttggctgaaatcaccccggacaaagcgttccaggacaagctgtatccgtttacctgggatgccgtacgttacaacggcaagctgattgcttacccgatcgctgttgaagcgttatcgctgatttataacaaagatctgctgccgaacccgccaaaaacctgggaagagatcccggcgctggataaagaactgaaagcgaaaggtaagagcgcgctgatgttcaacctgcaagaaccgtacttcacctggccgctgattgctgctgacgggggttatgcgttcaagtatgaaaacggcaagtacgacattaaagacgtgggcgtggataacgctggcgcgaaagcgggtctgaccttcctggttgacctgattaaaaacaaacacatgaatgcagacaccgattactccatcgcagaagctgcctttaataaaggcgaaacagcgatgaccatcaacggcccgtgggcatggtccaacatcgacaccagcaaagtgaattatggtgtaacggtactgccgaccttcaagggtcaaccatccaaaccgttcgttggcgtgctgagcgcaggtattaacgccgccagtccgaacaaagagctggcgaaagagttcctcgaaaactatctgctgactgatgaaggtctggaagcggttaataaagacaaaccgctgggtgccgtagcgctgaagtcttacgaggaagagttggcgaaagatccacgtattgccgccaccatggaaaacgcccagaaaggtgaaatcatgccgaacatcccgcagatgtccgctttctggtatgccgtgcgtactgcggtgatcaacgccgccagcggtcgtcagactgtcgatgaagccctgaaagacgcgcagactggtggttctggtgagaacctgtactttcaaagctcagataatgggcctcaaaaccagcgcaacgctccacgtataaccttcggtggcccgtctgactccacaggcagcaaccagaatggtgagcgtagtggagccaggtctaagcagcgccgtccccagggtctgccgaacaacacggcgagctggtttactgcgcttacccaacacggtaaagaagacttaaaattcccgcgtggccagggcgtcccgatcaacactaactcttccccggatgatcagattggttattaccgcagagcaactcgtcggattcgcggcggcgacggtaaaatgaaagatttgtctccgcgttggtacttttactatctcggcaccggtccggaagctggactgccctacgggcaaaacaaggacgggatcatttgggtggctaccgaaggtgccctgaatactccaaaagatcatatcggcacccgtaaccctgctaataacgctgcgatcgttctgcaactgcctcagggtacaactctgccaaaaggcttctatgcagaagggtcgcgtggtggcagccaggcgagtagccgtagcagctcccgctctcgcaactcgtcccgtaactccactccgggctcttctcgcggcacgtccccggctcgtatggcaggtaacggtggtgacgctgctctggcgctgctactgctggacaggctgaaccagctggagtcgaagatgagtggtaaaggccaacagcagcagggccagaccgttaccaaaaagagcgcagctgaagcatctaaaaaaccgcgacagaaacgtaccgcgactaaagcgtacaatgtaacacaggccttcggtcgtcgaggtccggagcaaactcaaggaaactttggcgatcaggaattaatccgccaggggaccgactacaaacactggccgcaaattgcccagttcgccccatccgctagtgcattcttcggtatgagccgcatcggcatggaagtaacgccaagtggtacgtggctgacctacaccggtgctatcaagcttgatgacaaggacccgaactttaaagaccaggttattctgcttaacaaacatattgatgcctataaaactttcccgccgaccgaacccaaaaaggacaaaaagaaaaaagctgatgaaacccaggctctaccgcagcgtcagaaaaaacagcaaactgtgactctgctgccagctgcggacctggatgatttttccaagcagctgcaacagtctatgagctctgcggactctacgcaggctggtggttctggtcaccatcatcaccatcattaa

SEQ ID NO: 2628 - DNA, 2421 bp, Artificial Sequence
  Description of Artificial Sequence: Synthetic polynucleotide
atgaaaatcgaagaaggtaaactggtaatctggattaacggcgataaaggctataacggtctcgctgaagtcggtaagaaattcgagaaagataccggaattaaagtcaccgttgagcatccggataaactggaagagaaattcccacaggttgcggcaactggcgatggccctgacattatcttctgggcacacgaccgctttggtggctacgctcaatctggcctgttggctgaaatcaccccggacaaagcgttccaggacaagctgtatccgtttacctgggatgccgtacgttacaacggcaagctgattgcttacccgatcgctgttgaagcgttatcgctgatttataacaaagatctgctgccgaacccgccaaaaacctgggaagagatcccggcgctggataaagaactgaaagcgaaaggtaagagcgcgctgatgttcaacctgcaagaaccgtacttcacctggccgctgattgctgctgacgggggttatgcgttcaagtatgaaaacggcaagtacgacattaaagacgtgggcgtggataacgctggcgcgaaagcgggtctgaccttcctggttgacctgattaaaaacaaacacatgaatgcagacaccgattactccatcgcagaagctgcctttaataaaggcgaaacagcgatgaccatcaacggcccgtgggcatggtccaacatcgacaccagcaaagtgaattatggtgtaacggtactgccgaccttcaagggtcaaccatccaaaccgttcgttggcgtgctgagcgcaggtattaacgccgccagtccgaacaaagagctggcgaaagagttcctcgaaaactatctgctgactgatgaaggtctggaagcggttaataaagacaaaccgctgggtgccgtagcgctgaagtcttacgaggaagagttggcgaaagatccacgtattgccgccaccatggaaaacgcccagaaaggtgaaatcatgccgaacatcccgcagatgtccgctttctggtatgccgtgcgtactgcggtgatcaacgccgccagcggtcgtcagactgtcgatgaagccctgaaagacgcgcagactggtggttctggtgagaacctgtactttcaaagctcagataatgggcctcaaaaccagcgcaacgctccacgtataaccttcggtggcccgtctgactccacaggcagcaaccagaatggtgagcgtagtggagccaggtctaagcagcgccgtccccagggtctgccgaacaacacggcgagctggtttactgcgcttacccaacacggtaaagaagacttaaaattcccgcgtggccagggcgtcccgatcaacactaactcttccccggatgatcagattggttattaccgcagagcaactcgtcggattcgcggcggcgacggtaaaatgaaagatttgtctccgcgttggtacttttactatctcggcaccggtccggaagctggactgccctacggggcaaacaaggacgggatcatttgggtggctaccgaaggtgccctgaatactccaaaagatcatatcggcacccgtaaccctgctaataacgctgcgcatgttctgcaactgcctcagggtacaactctgccaaaaggcttctatgcagaagggtcgcgtggtggcagccaggcgagtagccgtagcagctcccgctctcgcaactcgtcccgtaactccactccgggctcttctcgcggcacgtccccggctcgtatggcaggtaacggtggtgacgctgctctggcgctgctactgctggacaggctgaaccagctggagtcgaagatgagtggtaaaggccaacagcagcagggccagaccgttaccaaaaagagcgcagctgaagcatctaaaaaaccgcgacagaaacgtaccgcgactaaagcgtacaatgtaacacaggccttcggtcgtcgaggtccggagcaaactcaaggaaactttggcgatcaggaattaatccgccaggggaccgactacaaacactggccgcaaattgcccagttcgccccatccgctagtgcattcttcggtatgagccgcatcggcatggaagtaacgccaagtggtacgtggctgacctacaccggtgctatcaagcttgatgacaaggacccgaactttaaagaccaggttattctgcttaacaaacatattgatgcctataaaactttcccgccgaccgaacccaaaaaggacaaaaagaaaaaagctgatgaaacccaggctctaccgcagcgtcagaaaaaacagcaaactgtgactctgctgccagctgcggacctggatgatttttccaagcagctgcaacagtctatgagctctgcggactctacgcaggctggtggttctggtcaccatcatcaccatcattaa

SEQ ID NO: 2629 - DNA, 2421 bp, Artificial Sequence
  Description of Artificial Sequence: Synthetic polynucleotide
atgaaaatcgaagaaggtaaactggtaatctggattaacggcgataaaggctataacggtctcgctgaagtcggtaagaaattcgagaaagataccggaattaaagtcaccgttgagcatccggataaactggaagagaaattcccacaggttgcggcaactggcgatggccctgacattatcttctgggcacacgaccgctttggtggctacgctcaatctggcctgttggctgaaatcaccccggacaaagcgttccaggacaagctgtatccgtttacctgggatgccgtacgttacaacggcaagctgattgcttacccgatcgctgttgaagcgttatcgctgatttataacaaagatctgctgccgaacccgccaaaaacctgggaagagatcccggcgctggataaagaactgaaagcgaaaggtaagagcgcgctgatgttcaacctgcaagaaccgtacttcacctggccgctgattgctgctgacgggggttatgcgttcaagtatgaaaacggcaagtacgacattaaagacgtgggcgtggataacgctggcgcgaaagcgggtctgaccttcctggttgacctgattaaaaacaaacacatgaatgcagacaccgattactccatcgcagaagctgcctttaataaaggcgaaacagcgatgaccatcaacggcccgtgggcatggtccaacatcgacaccagcaaagtgaattatggtgtaacggtactgccgaccttcaagggtcaaccatccaaaccgttcgttggcgtgctgagcgcaggtattaacgccgccagtccgaacaaagagctggcgaaagagttcctcgaaaactatctgctgactgatgaaggtctggaagcggttaataaagacaaaccgctgggtgccgtagcgctgaagtcttacgaggaagagttggcgaaagatccacgtattgccgccaccatggaaaacgcccagaaaggtgaaatcatgccgaacatcccgcagatgtccgctttctggtatgccgtgcgtactgcggtgatcaacgccgccagcggtcgtcagactgtcgatgaagccctgaaagacgcgcagactggtggttctggtgagaacctgtactttcaaagctcagataatgggcctcaaaaccagcgcaacgctccacgtataaccttcggtggcccgtctgactccacaggcagcaaccagaatggtgagcgtagtggagccaggtctaagcagcgccgtccccagggtctgccgaacaacacggcgagctggtttactggccttacccaacacggtaaagaagacttaaaattcccgccaggccagggcgtcccgatcaacactaactcttccccggatgatcagattggttattaccgcagagcaactcgtcggattcgcggcggcgacggtaaaatgaaagatttgcctccgcgttggtacttttactatctcggcaccggtccggaagctgatctgccctacggggcagtgaagccggggatcttttgggtggctgcggaaggtgccctgaatactccaaaagatcatatcggcacccgtaaccctgctaataacgctgcgatccctctgcaactgcctccgggtacaactctgccaaaaggcttctatgcagaagggtcgcgtggtggcagccaggcgagtagccgtagcagctcccgctctcgcaactcgtcccgtaactccactccgggctcttctcgcggcacgtccccggctcgtatggcaggtaacggtggtgacgctgctctggcgctgctactgctggacaggctgaaccagctggagtcgaagatgagtggtaaaggccaacagcagcagggccagaccgttaccaaaaagagcgcagctgaagcatctaaaaaaccgcgacagaaacgtaccgcgactaaagcgtacaatgtaacacaggccttcggtcgtcgaggtccggagcaaactcaaggaaactttggcgatcaggaattaatccgccaggggaccgactacaaacactggccgcaaattgcccagttcgccccatccgctagtgcattcttcggtatgagccgcatcggcatggaagtaacgccaagtggtacgtggctgacctacaccggtgctatcaagcttgatgacaaggacccgaactttaaagaccaggttattctgcttaacaaacatattgatgcctataaaactttcccgccgaccgaacccaaaaaggacaaaaagaaaaaagctgatgaaacccaggctctaccgcagcgtcagaaaaaacagcaaactgtgactctgctgccagctgcggacctggatgatttttccaagcagctgcaacagtctatgagctctgcggactctacgcaggctggtggttctggtcaccatcatcaccatcattaa

SEQ ID NO: 2630 - DNA, 2421 bp, Artificial Sequence
  Description of Artificial Sequence: Synthetic polynucleotide
atgaaaatcgaagaaggtaaactggtaatctggattaacggcgataaaggctataacggtctcgctgaagtcggtaagaaattcgagaaagataccggaattaaagtcaccgttgagcatccggataaactggaagagaaattcccacaggttgcggcaactggcgatggccctgacattatcttctgggcacacgaccgctttggtggctacgctcaatctggcctgttggctgaaatcaccccggacaaagcgttccaggacaagctgtatccgtttacctgggatgccgtacgttacaacggcaagctgattgcttacccgatcgctgttgaagcgttatcgctgatttataacaaagatctgctgccgaacccgccaaaaacctgggaagagatcccggcgctggataaagaactgaaagcgaaaggtaagagcgcgctgatgttcaacctgcaagaaccgtacttcacctggccgctgattgctgctgacgggggttatgcgttcaagtatgaaaacggcaagtacgacattaaagacgtgggcgtggataacgctggcgcgaaagcgggtctgaccttcctggttgacctgattaaaaacaaacacatgaatgcagacaccgattactccatcgcagaagctgcctttaataaaggcgaaacagcgatgaccatcaacggcccgtgggcatggtccaacatcgacaccagcaaagtgaattatggtgtaacggtactgccgaccttcaagggtcaaccatccaaaccgttcgttggcgtgctgagcgcaggtattaacgccgccagtccgaacaaagagctggcgaaagagttcctcgaaaactatctgctgactgatgaaggtctggaagcggttaataaagacaaaccgctgggtgccgtagcgctgaagtcttacgaggaagagttggcgaaagatccacgtattgccgccaccatggaaaacgcccagaaaggtgaaatcatgccgaacatcccgcagatgtccgctttctggtatgccgtgcgtactgcggtgatcaacgccgccagcggtcgtcagactgtcgatgaagccctgaaagacgcgcagactggtggttctggtgagaacctgtactttcaaagctcagataatgggcctcaaaaccagcgcaacgctccacgtataaccttcggtggcccgtctgactccacaggcagcaaccagaatggtgagcgtagtggagccaggtctaagcagcgccgtccccagggtctgccgaacaacacggcgagctggtttactccgcttacccaatttggtaaagaagacttaaaattcccgccgggccagggcgtcccgatcaacactaactcttccccggatgatcagattggttattaccgcagagcaactcgtcggattcgcggcggcgacggtaaaatgaaagatttgcctccgaaatggtacttttactatctcggcaccggtccgcatgctgatctgccctacgggcaaaagaaggacggggttttctgggtggctcgaccaggtgccctgaatactccaaaagatcatatcggcacccgtaaccctgctaataacgctgcgatcccactgcaactgcctccgggtacaaaactgccaaaaggcttctatgcagaagggtcgcgtggtggcagccaggcgagtagccgtagcagctcccgctctcgcaactcgtcccgtaactccactccgggctcttctcgcggcacgtccccggctcgtatggcaggtaacggtggtgacgctgctctggcgctgctactgctggacaggctgaaccagctggagtcgaagatgagtggtaaaggccaacagcagcagggccagaccgttaccaaaaagagcgcagctgaagcatctaaaaaaccgcgacagaaacgtaccgcgactaaagcgtacaatgtaacacaggccttcggtcgtcgaggtccggagcaaactcaaggaaactttggcgatcaggaattaatccgccaggggaccgactacaaacactggccgcaaattgcccagttcgccccatccgctagtgcattcttcggtatgagccgcatcggcatggaagtaacgccaagtggtacgtggctgacctacaccggtgctatcaagcttgatgacaaggacccgaactttaaagaccaggttattctgcttaacaaacatattgatgcctataaaactttcccgccgaccgaacccaaaaaggacaaaaagaaaaaagctgatgaaacccaggctctaccgcagcgtcagaaaaaacagcaaactgtgactctgctgccagctgcggacctggatgatttttccaagcagctgcaacagtctatgagctctgcggactctacgcaggctggtggttctggtcaccatcatcaccatcattaa

SEQ ID NO: 2631 - DNA, 2421 bp, Artificial Sequence
  Description of Artificial Sequence: Synthetic polynucleotide
atgaaaatcgaagaaggtaaactggtaatctggattaacggcgataaaggctataacggtctcgctgaagtcggtaagaaattcgagaaagataccggaattaaagtcaccgttgagcatccggataaactggaagagaaattcccacaggttgcggcaactggcgatggccctgacattatcttctgggcacacgaccgctttggtggctacgctcaatctggcctgttggctgaaatcaccccggacaaagcgttccaggacaagctgtatccgtttacctgggatgccgtacgttacaacggcaagctgattgcttacccgatcgctgttgaagcgttatcgctgatttataacaaagatctgctgccgaacccgccaaaaacctgggaagagatcccggcgctggataaagaactgaaagcgaaaggtaagagcgcgctgatgttcaacctgcaagaaccgtacttcacctggccgctgattgctgctgacgggggttatgcgttcaagtatgaaaacggcaagtacgacattaaagacgtgggcgtggataacgctggcgcgaaagcgggtctgaccttcctggttgacctgattaaaaacaaacacatgaatgcagacaccgattactccatcgcagaagctgcctttaataaaggcgaaacagcgatgaccatcaacggcccgtgggcatggtccaacatcgacaccagcaaagtgaattatggtgtaacggtactgccgaccttcaagggtcaaccatccaaaccgttcgttggcgtgctgagcgcaggtattaacgccgccagtccgaacaaagagctggcgaaagagttcctcgaaaactatctgctgactgatgaaggtctggaagcggttaataaagacaaaccgctgggtgccgtagcgctgaagtcttacgaggaagagttggcgaaagatccacgtattgccgccaccatggaaaacgcccagaaaggtgaaatcatgccgaacatcccgcagatgtccgctttctggtatgccgtgcgtactgcggtgatcaacgccgccagcggtcgtcagactgtcgatgaagccctgaaagacgcgcagactggtggttctggtgagaacctgtactttcaaagctcagataatgggcctcaaaaccagcgcaacgctccacgtataaccttcggtggcccgtctgactccacaggcagcaaccagaatggtgagcgtagtggagccaggtctaagcagcgccgtccccagggtctgccgaacaacacggcgagctggtttactgcgcttacccaacacggtaaagaagacttaaaattcccgcgtggccagggcgtcccgatcaacactaactcttccccggatgatcagattggttattaccgcagagcaactcgtcggattcgcggcggcgacggtaaaatgaaagatttgtctccgcgttggtacttttactatctcggcaccggtccggaagctggactgccctacggggcaaagaaggacgggatcatttgggtggctaccgaaggtgccctgaatactccaaaagatcatatcggcacccgtaaccctgctaataacgctgcgatcgttctgcaactgcctcagggtacaactctgccaaaaggcttctatgcagaagggtcgcgtggtggcagccaggcgagtagccgtagcagctcccgctctcgcaactcgtcccgtaactccactccgggctcttctcgcggcacgtccccggctcgtatggcaggtaacggtggtgacgctgctctggcgctgctactgctggacaggctgaaccagctggagtcgaagatgagtggtaaaggccaacagcagcagggccagaccgttaccaaaaagagcgcagctgaagcatctaaaaaaccgcgacagaaacgtaccgcgactaaagcgtacaatgtaacacaggccttcggtcgtcgaggtccggagcaaactcaaggaaactttggcgatcaggaattaatccgccaggggaccgactacaaacactggccgcaaattgcccagttcgccccatccgctagtgcattcttcggtatgagccgcatcggcatggaagtaacgccaagtggtacgtggctgacctacaccggtgctatcaagcttgatgacaaggacccgaactttaaagaccaggttattctgcttaacaaacatattgatgcctataaaactttcccgccgaccgaacccaaaaaggacaaaaagaaaaaagctgatgaaacccaggctctaccgcagcgtcagaaaaaacagcaaactgtgactctgctgccagctgcggacctggatgatttttccaagcagctgcaacagtctatgagctctgcggactctacgcaggctggtggttctggtcaccatcatcaccatcattaa

SEQ ID NO: 2632 - DNA, 2421 bp, Artificial Sequence
  Description of Artificial Sequence: Synthetic polynucleotide
atgaaaatcgaagaaggtaaactggtaatctggattaacggcgataaaggctataacggtctcgctgaagtcggtaagaaattcgagaaagataccggaattaaagtcaccgttgagcatccggataaactggaagagaaattcccacaggttgcggcaactggcgatggccctgacattatcttctgggcacacgaccgctttggtggctacgctcaatctggcctgttggctgaaatcaccccggacaaagcgttccaggacaagctgtatccgtttacctgggatgccgtacgttacaacggcaagctgattgcttacccgatcgctgttgaagcgttatcgctgatttataacaaagatctgctgccgaacccgccaaaaacctgggaagagatcccggcgctggataaagaactgaaagcgaaaggtaagagcgcgctgatgttcaacctgcaagaaccgtacttcacctggccgctgattgctgctgacgggggttatgcgttcaagtatgaaaacggcaagtacgacattaaagacgtgggcgtggataacgctggcgcgaaagcgggtctgaccttcctggttgacctgattaaaaacaaacacatgaatgcagacaccgattactccatcgcagaagctgcctttaataaaggcgaaacagcgatgaccatcaacggcccgtgggcatggtccaacatcgacaccagcaaagtgaattatggtgtaacggtactgccgaccttcaagggtcaaccatccaaaccgttcgttggcgtgctgagcgcaggtattaacgccgccagtccgaacaaagagctggcgaaagagttcctcgaaaactatctgctgactgatgaaggtctggaagcggttaataaagacaaaccgctgggtgccgtagcgctgaagtcttacgaggaagagttggcgaaagatccacgtattgccgccaccatggaaaacgcccagaaaggtgaaatcatgccgaacatcccgcagatgtccgctttctggtatgccgtgcgtactgcggtgatcaacgccgccagcggtcgtcagactgtcgatgaagccctgaaagacgcgcagactggtggttctggtgagaacctgtactttcaaagctcagataatgggcctcaaaaccagcgcaacgctccacgtataaccttcggtggcccgtctgactccacaggcagcaaccagaatggtgagcgtagtggagccaggtctaagcagcgccgtccccagggtctgccgaacaacacggcgagctggtttactgggcttacccaacacggtaaagaagacttaaaattcccgccaggccagggcgtcccgatcaacactaactcttccccggatgatcagattggttattaccgcagagcaactcgtcggattcgcggcggcgacggtaaaatgaaagatttgcctccgcgttggtacttttactatctcggcaccggtccggaagctgatctgccctacggggcagttaaggacgggatcgtgtgggtggctgaagaaggtgccctgaatactccaaaagatcatatcggcacccgtaaccctgctaataacgctgcgatcccgctgcaactgcctccgggtacaactctgccaaaaggcttctatgcagaagggtcgcgtggtggcagccaggcgagtagccgtagcagctcccgctctcgcaactcgtcccgtaactccactccgggctcttctcgcggcacgtccccggctcgtatggcaggtaacggtggtgacgctgctctggcgctgctactgctggacaggctgaaccagctggagtcgaagatgagtggtaaaggccaacagcagcagggccagaccgttaccaaaaagagcgcagctgaagcatctaaaaaaccgcgacagaaacgtaccgcgactaaagcgtacaatgtaacacaggccttcggtcgtcgaggtccggagcaaactcaaggaaactttggcgatcaggaattaatccgccaggggaccgactacaaacactggccgcaaattgcccagttcgccccatccgctagtgcattcttcggtatgagccgcatcggcatggaagtaacgccaagtggtacgtggctgacctacaccggtgctatcaagcttgatgacaaggacccgaactttaaagaccaggttattctgcttaacaaacatattgatgcctataaaactttcccgccgaccgaacccaaaaaggacaaaaagaaaaaagctgatgaaacccaggctctaccgcagcgtcagaaaaaacagcaaactgtgactctgctgccagctgcggacctggatgatttttccaagcagctgcaacagtctatgagctctgcggactctacgcaggctggtggttctggtcaccatcatcaccatcattaa

SEQ ID NO: 2633 - DNA, 2421 bp, Artificial Sequence
  Description of Artificial Sequence: Synthetic polynucleotide
atgaaaatcgaagaaggtaaactggtaatctggattaacggcgataaaggctataacggtctcgctgaagtcggtaagaaattcgagaaagataccggaattaaagtcaccgttgagcatccggataaactggaagagaaattcccacaggttgcggcaactggcgatggccctgacattatcttctgggcacacgaccgctttggtggctacgctcaatctggcctgttggctgaaatcaccccggacaaagcgttccaggacaagctgtatccgtttacctgggatgccgtacgttacaacggcaagctgattgcttacccgatcgctgttgaagcgttatcgctgatttataacaaagatctgctgccgaacccgccaaaaacctgggaagagatcccggcgctggataaagaactgaaagcgaaaggtaagagcgcgctgatgttcaacctgcaagaaccgtacttcacctggccgctgattgctgctgacgggggttatgcgttcaagtatgaaaacggcaagtacgacattaaagacgtgggcgtggataacgctggcgcgaaagcgggtctgaccttcctggttgacctgattaaaaacaaacacatgaatgcagacaccgattactccatcgcagaagctgcctttaataaaggcgaaacagcgatgaccatcaacggcccgtgggcatggtccaacatcgacaccagcaaagtgaattatggtgtaacggtactgccgaccttcaagggtcaaccatccaaaccgttcgttggcgtgctgagcgcaggtattaacgccgccagtccgaacaaagagctggcgaaagagttcctcgaaaactatctgctgactgatgaaggtctggaagcggttaataaagacaaaccgctgggtgccgtagcgctgaagtcttacgaggaagagttggcgaaagatccacgtattgccgccaccatggaaaacgcccagaaaggtgaaatcatgccgaacatcccgcagatgtccgctttctggtatgccgtgcgtactgcggtgatcaacgccgccagcggtcgtcagactgtcgatgaagccctgaaagacgcgcagactggtggttctggtgagaacctgtactttcaaagctcagataatgggcctcaaaaccagcgcaacgctccacgtataaccttcggtggcccgtctgactccacaggcagcaaccagaatggtgagcgtagtggagccaggtctaagcagcgccgtccccagggtctgccgaacaacacggcgagctggtttactgcgcttacccaacacggtaaagaagacttaaaattcccgcgtggccagggcgtcccgatcaacactaactcttccccggatgatcagattggtagctaccgcagagcaactcgtcggattcgcggcggcgacggtaaaatgaaagatttgtctccgcgttggtacttttactatctcggcaccggtccggaagctggactgccctacggggcaaacaaggacgggatcatttgggtggctaccgaaggtgccctgaatactccaaaagatcatatcggcacccgtaaccctgctaataacgctgcgatcgttctgcaactgcctcagggtacaactctgccaaaaggcttctatgcagaagggtcgcgtggtggcagccaggcgagtagccgtagcagctcccgctctcgcaactcgtcccgtaactccactccgggctcttctcgcggcacgtccccggctcgtatggcaggtaacggtggtgacgctgctctggcgctgctactgctggacaggctgaaccagctggagtcgaagatgagtggtaaaggccaacagcagcagggccagaccgttaccaaaaagagcgcagctgaagcatctaaaaaaccgcgacagaaacgtaccgcgactaaagcgtacaatgtaacacaggccttcggtcgtcgaggtccggagcaaactcaaggaaactttggcgatcaggaattaatccgccaggggaccgactacaaacactggccgcaaattgcccagttcgccccatccgctagtgcattcttcggtatgagccgcatcggcatggaagtaacgccaagtggtacgtggctgacctacaccggtgctatcaagcttgatgacaaggacccgaactttaaagaccaggttattctgcttaacaaacatattgatgcctataaaactttcccgccgaccgaacccaaaaaggacaaaaagaaaaaagctgatgaaacccaggctctaccgcagcgtcagaaaaaacagcaaactgtgactctgctgccagctgcggacctggatgatttttccaagcagctgcaacagtctatgagctctgcggactctacgcaggctggtggttctggtcaccatcatcaccatcattaa

SEQ ID NO: 2634 - DNA, 2421 bp, Artificial Sequence
  Description of Artificial Sequence: Synthetic polynucleotide
atgaaaatcgaagaaggtaaactggtaatctggattaacggcgataaaggctataacggtctcgctgaagtcggtaagaaattcgagaaagataccggaattaaagtcaccgttgagcatccggataaactggaagagaaattcccacaggttgcggcaactggcgatggccctgacattatcttctgggcacacgaccgctttggtggctacgctcaatctggcctgttggctgaaatcaccccggacaaagcgttccaggacaagctgtatccgtttacctgggatgccgtacgttacaacggcaagctgattgcttacccgatcgctgttgaagcgttatcgctgatttataacaaagatctgctgccgaacccgccaaaaacctgggaagagatcccggcgctggataaagaactgaaagcgaaaggtaagagcgcgctgatgttcaacctgcaagaaccgtacttcacctggccgctgattgctgctgacgggggttatgcgttcaagtatgaaaacggcaagtacgacattaaagacgtgggcgtggataacgctggcgcgaaagcgggtctgaccttcctggttgacctgattaaaaacaaacacatgaatgcagacaccgattactccatcgcagaagctgcctttaataaaggcgaaacagcgatgaccatcaacggcccgtgggcatggtccaacatcgacaccagcaaagtgaattatggtgtaacggtactgccgaccttcaagggtcaaccatccaaaccgttcgttggcgtgctgagcgcaggtattaacgccgccagtccgaacaaagagctggcgaaagagttcctcgaaaactatctgctgactgatgaaggtctggaagcggttaataaagacaaaccgctgggtgccgtagcgctgaagtcttacgaggaagagttggcgaaagatccacgtattgccgccaccatggaaaacgcccagaaaggtgaaatcatgccgaacatcccgcagatgtccgctttctggtatgccgtgcgtactgcggtgatcaacgccgccagcggtcgtcagactgtcgatgaagccctgaaagacgcgcagactggtggttctggtgagaacctgtactttcaaagctcagataatgggcctcaaaaccagcgcaacgctccacgtataaccttcggtggcccgtctgactccacaggcagcaaccagaatggtgagcgtagtggagccaggtctaagcagcgccgtccccagggtctgccgaacaacacggcgagctggtttactgcgcttacccaacacggtaaagaagacttaaaattcccgcgtggccagggcgtcccgatcaacactaactcttccccggatgatcagattggtgcataccgcagagcaactcgtcggattcgcggcggcgacggtaaaatgaaagatttgtctccgcgttggtacttttactatctcggcaccggtccggaagctggactgccctacggggcaaacaaggacgggatcatttgggtggctaccgaaggtgccctgaatactccaaaagatcatatcggcacccgtaaccctgctaataacgctgcgatcgttctgcaactgcctcagggtacaactctgccaaaaggcttctatgcagaagggtcgcgtggtggcagccaggcgagtagccgtagcagctcccgctctcgcaactcgtcccgtaactccactccgggctcttctcgcggcacgtccccggctcgtatggcaggtaacggtggtgacgctgctctggcgctgctactgctggacaggctgaaccagctggagtcgaagatgagtggtaaaggccaacagcagcagggccagaccgttaccaaaaagagcgcagctgaagcatctaaaaaaccgcgacagaaacgtaccgcgactaaagcgtacaatgtaacacaggccttcggtcgtcgaggtccggagcaaactcaaggaaactttggcgatcaggaattaatccgccaggggaccgactacaaacactggccgcaaattgcccagttcgccccatccgctagtgcattcttcggtatgagccgcatcggcatggaagtaacgccaagtggtacgtggctgacctacaccggtgctatcaagcttgatgacaaggacccgaactttaaagaccaggttattctgcttaacaaacatattgatgcctataaaactttcccgccgaccgaacccaaaaaggacaaaaagaaaaaagctgatgaaacccaggctctaccgcagcgtcagaaaaaacagcaaactgtgactctgctgccagctgcggacctggatgatttttccaagcagctgcaacagtctatgagctctgcggactctacgcaggctggtggttctggtcaccatcatcaccatcattaa

SEQ ID NO: 2635 - DNA, 2421 bp, Artificial Sequence
  Description of Artificial Sequence: Synthetic polynucleotide
atgaaaatcgaagaaggtaaactggtaatctggattaacggcgataaaggctataacggtctcgctgaagtcggtaagaaattcgagaaagataccggaattaaagtcaccgttgagcatccggataaactggaagagaaattcccacaggttgcggcaactggcgatggccctgacattatcttctgggcacacgaccgctttggtggctacgctcaatctggcctgttggctgaaatcaccccggacaaagcgttccaggacaagctgtatccgtttacctgggatgccgtacgttacaacggcaagctgattgcttacccgatcgctgttgaagcgttatcgctgatttataacaaagatctgctgccgaacccgccaaaaacctgggaagagatcccggcgctggataaagaactgaaagcgaaaggtaagagcgcgctgatgttcaacctgcaagaaccgtacttcacctggccgctgattgctgctgacgggggttatgcgttcaagtatgaaaacggcaagtacgacattaaagacgtgggcgtggataacgctggcgcgaaagcgggtctgaccttcctggttgacctgattaaaaacaaacacatgaatgcagacaccgattactccatcgcagaagctgcctttaataaaggcgaaacagcgatgaccatcaacggcccgtgggcatggtccaacatcgacaccagcaaagtgaattatggtgtaacggtactgccgaccttcaagggtcaaccatccaaaccgttcgttggcgtgctgagcgcaggtattaacgccgccagtccgaacaaagagctggcgaaagagttcctcgaaaactatctgctgactgatgaaggtctggaagcggttaataaagacaaaccgctgggtgccgtagcgctgaagtcttacgaggaagagttggcgaaagatccacgtattgccgccaccatggaaaacgcccagaaaggtgaaatcatgccgaacatcccgcagatgtccgctttctggtatgccgtgcgtactgcggtgatcaacgccgccagcggtcgtcagactgtcgatgaagccctgaaagacgcgcagactggtggttctggtgagaacctgtactttcaaagctcagataatgggcctcaaaaccagcgcaacgctccacgtataaccttcggtggcccgtctgactccacaggcagcaaccagaatggtgagcgtagtggagccaggtctaagcagcgccgtccccagggtctgccgaacaacacggcgagctggtttactgcgcttacccaacacggtaaagaagacttaaaattcccgcgtggccagggcgtcccgatcaacactaactcttccccggatgatcagattggttattaccgcagagcaactcgtcggattcgcggcggcgacggtaaaatgaaagatttgtctccgcgttggtacttttactatctcggcaccggtccggaagctggactgccctacggggcaaacaaggacgggatcatttgggtggctaccgaaggtgccctgaatactccaaaagatcatatcggcacccgtaaccctgctaataacgctgcgatcgttctgcaactgcctcagggtacaactctgccaaaaggcttctatgcagaagggtcgcgtggtggcagccaggcgagtagccgtagcagctcccgctctcgcaactcgtcccgtaactccactccgggctcttctcgcggcacgtccccggctcgtatggcaggtaacggtggtgacgctgctctggcgctgctactgctggacaggctgaaccagctggagtcgaagatgagtggtaaaggccaacagcagcagggccagaccgttaccaaaaagagcgcagctgaagcatctaaaaaaccgcgacagaaacgtaccgcgactaaagcgtacaatgtaacacaggccttcggtcgtcgaggtccggagcaaactcaaggaaactttggcgatcaggaattaatccgccaggggaccgactacagtcactggccgcaaattgcccagttcgccccatccgctagtgcattcttcggtatgagccgcatcggcatggaagtaacgccaagtggtacgtggctgacctacaccggtgctatcaagcttgatgacaaggacccgaactttaaagaccaggttattctgcttaacaaacatattgatgcctataaaactttcccgccgaccgaacccaaaaaggacaaaaagaaaaaagctgatgaaacccaggctctaccgcagcgtcagaaaaaacagcaaactgtgactctgctgccagctgcggacctggatgatttttccaagcagctgcaacagtctatgagctctgcggactctacgcaggctggtggttctggtcaccatcatcaccatcattaa

SEQ ID NO: 2636 - DNA, 2421 bp, Artificial Sequence
  Description of Artificial Sequence: Synthetic polynucleotide
atgaaaatcgaagaaggtaaactggtaatctggattaacggcgataaaggctataacggtctcgctgaagtcggtaagaaattcgagaaagataccggaattaaagtcaccgttgagcatccggataaactggaagagaaattcccacaggttgcggcaactggcgatggccctgacattatcttctgggcacacgaccgctttggtggctacgctcaatctggcctgttggctgaaatcaccccggacaaagcgttccaggacaagctgtatccgtttacctgggatgccgtacgttacaacggcaagctgattgcttacccgatcgctgttgaagcgttatcgctgatttataacaaagatctgctgccgaacccgccaaaaacctgggaagagatcccggcgctggataaagaactgaaagcgaaaggtaagagcgcgctgatgttcaacctgcaagaaccgtacttcacctggccgctgattgctgctgacgggggttatgcgttcaagtatgaaaacggcaagtacgacattaaagacgtgggcgtggataacgctggcgcgaaagcgggtctgaccttcctggttgacctgattaaaaacaaacacatgaatgcagacaccgattactccatcgcagaagctgcctttaataaaggcgaaacagcgatgaccatcaacggcccgtgggcatggtccaacatcgacaccagcaaagtgaattatggtgtaacggtactgccgaccttcaagggtcaaccatccaaaccgttcgttggcgtgctgagcgcaggtattaacgccgccagtccgaacaaagagctggcgaaagagttcctcgaaaactatctgctgactgatgaaggtctggaagcggttaataaagacaaaccgctgggtgccgtagcgctgaagtcttacgaggaagagttggcgaaagatccacgtattgccgccaccatggaaaacgcccagaaaggtgaaatcatgccgaacatcccgcagatgtccgctttctggtatgccgtgcgtactgcggtgatcaacgccgccagcggtcgtcagactgtcgatgaagccctgaaagacgcgcagactggtggttctggtgagaacctgtactttcaaagctcagataatgggcctcaaaaccagcgcaacgctccacgtataaccttcggtggcccgtctgactccacaggcagcaaccagaatggtgagcgtagtggagccaggtctaagcagcgccgtccccagggtctgccgaacaacacggcgagctggtttactgcgcttacccaacacggtaaagaagacttaaaattcccgaaaggccagggcgtcccgatcaacactaactctaaaccggatgatcagattggttattggcgcagacaaactcgtcggtaccgcggcggcgacggtcaaatgaaagatttggatccgcgttggtacttttactatctcggcaccggtccggaagctggactgccctacggggcaaacaaggacgggatcatttgggtggctaccgaaggtgccctgaatactccaaaagatcatatcggcacccgtaaccctgctaataacgctgcgatcgttctgcaactgcctcagggtacaactctgccaaaaggcttctatgcagaagggtcgcgtggtggcagccaggcgagtagccgtagcagctcccgctctcgcaactcgtcccgtaactccactccgggctcttctcgcggcacgtccccggctcgtatggcaggtaacggtggtgacgctgctctggcgctgctactgctggacaggctgaaccagctggagtcgaagatgagtggtaaaggccaacagcagcagggccagaccgttaccaaaaagagcgcagctgaagcatctaaaaaaccgcgacagaaacgtaccgcgactaaagcgtacaatgtaacacaggccttcggtcgtcgaggtccggagcaaactcaaggaaactttggcgatcaggaattaatccgccaggggaccgactacaaacactggccgcaaattgcccagttcgccccatccgctagtgcattcttcggtatgagccgcatcggcatggaagtaacgccaagtggtacgtggctgacctacaccggtgctatcaagcttgatgacaaggacccgaactttaaagaccaggttattctgcttaacaaacatattgatgcctataaaactttcccgccgaccgaacccaaaaaggacaaaaagaaaaaagctgatgaaacccaggctctaccgcagcgtcagaaaaaacagcaaactgtgactctgctgccagctgcggacctggatgatttttccaagcagctgcaacagtctatgagctctgcggactctacgcaggctggtggttctggtcaccatcatcaccatcattaa

SEQ ID NO: 2637 - DNA, 2421 bp, Artificial Sequence
  Description of Artificial Sequence: Synthetic polynucleotide
atgaaaatcgaagaaggtaaactggtaatctggattaacggcgataaaggctataacggtctcgctgaagtcggtaagaaattcgagaaagataccggaattaaagtcaccgttgagcatccggataaactggaagagaaattcccacaggttgcggcaactggcgatggccctgacattatcttctgggcacacgaccgctttggtggctacgctcaatctggcctgttggctgaaatcaccccggacaaagcgttccaggacaagctgtatccgtttacctgggatgccgtacgttacaacggcaagctgattgcttacccgatcgctgttgaagcgttatcgctgatttataacaaagatctgctgccgaacccgccaaaaacctgggaagagatcccggcgctggataaagaactgaaagcgaaaggtaagagcgcgctgatgttcaacctgcaagaaccgtacttcacctggccgctgattgctgctgacgggggttatgcgttcaagtatgaaaacggcaagtacgacattaaagacgtgggcgtggataacgctggcgcgaaagcgggtctgaccttcctggttgacctgattaaaaacaaacacatgaatgcagacaccgattactccatcgcagaagctgcctttaataaaggcgaaacagcgatgaccatcaacggcccgtgggcatggtccaacatcgacaccagcaaagtgaattatggtgtaacggtactgccgaccttcaagggtcaaccatccaaaccgttcgttggcgtgctgagcgcaggtattaacgccgccagtccgaacaaagagctggcgaaagagttcctcgaaaactatctgctgactgatgaaggtctggaagcggttaataaagacaaaccgctgggtgccgtagcgctgaagtcttacgaggaagagttggcgaaagatccacgtattgccgccaccatggaaaacgcccagaaaggtgaaatcatgccgaacatcccgcagatgtccgctttctggtatgccgtgcgtactgcggtgatcaacgccgccagcggtcgtcagactgtcgatgaagccctgaaagacgcgcagactggtggttctggtgagaacctgtactttcaaagctcagataatgggcctcaaaaccagcgcaacgctccacgtataaccttcggtggcccgtctgactccacaggcagcaaccagaatggtgagcgtagtggagccaggtctaagcagcgccgtccccagggtctgccgaacaacacggcgagctggtttactgcgcttacccaacacggtaaagaagacttaaaattcccgcgtggccagggcgtcccgatcaacactaactcttccccggatgatcagattggttattaccgcagagcaactcgtcggattcgcggcggcgacggtaaaatgaaagatttgtctccgcgttggtacttttactatctcggcaccggtccggaagctggactgccctacggggcaaacaaggacgggatccattgggtggctaccgaaggtgccctgaatactccaaaagatcatatcggcacccgtaaccctgctaataacgctgcgatcgttctgcaactgcctcagggtacaactctgccaaaaggcttctatgcagaagggtcgcgtggtggcagccaggcgagtagccgtagcagctcccgctctcgcaactcgtcccgtaactccactccgggctcttctcgcggcacgtccccggctcgtatggcaggtaacggtggtgacgctgctctggcgctgctactgctggacaggctgaaccagctggagtcgaagatgagtggtaaaggccaacagcagcagggccagaccgttaccaaaaagagcgcagctgaagcatctaaaaaaccgcgacagaaacgtaccgcgactaaagcgtacaatgtaacacaggccttcggtcgtcgaggtccggagcaaactcaaggaaactttggcgatcaggaattaatccgccaggggaccgactacaaacactggccgcaaattgcccagttcgccccatccgctagtgcattcttcggtatgagccgcatcggcatggaagtaacgccaagtggtacgtggctgacctacaccggtgctatcaagcttgatgacaaggacccgaactttaaagaccaggttattctgcttaacaaacatattgatgcctataaaactttcccgccgaccgaacccaaaaaggacaaaaagaaaaaagctgatgaaacccaggctctaccgcagcgtcagaaaaaacagcaaactgtgactctgctgccagctgcggacctggatgatttttccaagcagctgcaacagtctatgagctctgcggactctacgcaggctggtggttctggtcaccatcatcaccatcattaa

SEQ ID NO: 2638 - DNA, 2421 bp, Artificial Sequence
  Description of Artificial Sequence: Synthetic polynucleotide
atgaaaatcgaagaaggtaaactggtaatctggattaacggcgataaaggctataacggtctcgctgaagtcggtaagaaattcgagaaagataccggaattaaagtcaccgttgagcatccggataaactggaagagaaattcccacaggttgcggcaactggcgatggccctgacattatcttctgggcacacgaccgctttggtggctacgctcaatctggcctgttggctgaaatcaccccggacaaagcgttccaggacaagctgtatccgtttacctgggatgccgtacgttacaacggcaagctgattgcttacccgatcgctgttgaagcgttatcgctgatttataacaaagatctgctgccgaacccgccaaaaacctgggaagagatcccggcgctggataaagaactgaaagcgaaaggtaagagcgcgctgatgttcaacctgcaagaaccgtacttcacctggccgctgattgctgctgacgggggttatgcgttcaagtatgaaaacggcaagtacgacattaaagacgtgggcgtggataacgctggcgcgaaagcgggtctgaccttcctggttgacctgattaaaaacaaacacatgaatgcagacaccgattactccatcgcagaagctgcctttaataaaggcgaaacagcgatgaccatcaacggcccgtgggcatggtccaacatcgacaccagcaaagtgaattatggtgtaacggtactgccgaccttcaagggtcaaccatccaaaccgttcgttggcgtgctgagcgcaggtattaacgccgccagtccgaacaaagagctggcgaaagagttcctcgaaaactatctgctgactgatgaaggtctggaagcggttaataaagacaaaccgctgggtgccgtagcgctgaagtcttacgaggaagagttggcgaaagatccacgtattgccgccaccatggaaaacgcccagaaaggtgaaatcatgccgaacatcccgcagatgtccgctttctggtatgccgtgcgtactgcggtgatcaacgccgccagcggtcgtcagactgtcgatgaagccctgaaagacgcgcagactggtggttctggtgagaacctgtactttcaaagctcagataatgggcctcaaaaccagcgcaacgctccacgtataaccttcggtggcccgtctgactccacaggcagcaaccagaatggtgagcgtagtggagccaggtctaagcagcgccgtccccagggtctgccgaacaacacggcgagctggtttactgcgcttacccaacacggtaaagaagacttaaaattcccgcgtggccagggcgtcccgatcaacactaactcttccccggatgatcagattggttattaccgcagagcaactcgtcggattcgcggcggcgacggtaaaatgaaagatttgtctccgcgttggtacttttactatctcggcaccggtccggaagctggactgccctacggggcaaacaaggacgggatcatttgggtggctaccgaaggtgccctgaatactccaaaagatcatatcggcacccgtaaccctgctaataacgctgcgatcgttctgcaactgcctcagggtacaactctgccaaaaggcttctatgcagaagggtcgcgtggtggcagccaggcgagtagccgtagcagctcccgctctcgcaactcgtcccgtaactccactccgggctcttctcgcggcacgtccccggctcgtatggcaggtaacggtggtgacgctgctctggcgctgctactgctggacaggctgaaccagctggagtcgaagatgagtggtaaaggccaacagcagcagggccagaccgttaccaaaaagagcgcagctgaagcatctaaaaaaccgcgacagaaacgtaccgcgactaaagcgtttaatgtaacacaggccttcggtcgtcgaggtccggagcaaactcaaggaaactttggcgatcaggaattaatccgccaggggaccgactacaaacactggccgcaaattgcccagttcgccccatccgctagtgcattcttcggtatgagccgcatcggcatggaagtaacgccaagtggtacgtggctgacctacaccggtgctatcaagcttgatgacaaggacccgaactttaaagaccaggttattctgcttaacaaacatattgatgcctataaaactttcccgccgaccgaacccaaaaaggacaaaaagaaaaaagctgatgaaacccaggctctaccgcagcgtcagaaaaaacagcaaactgtgactctgctgccagctgcggacctggatgatttttccaagcagctgcaacagtctatgagctctgcggactctacgcaggctggtggttctggtcaccatcatcaccatcattaa

SEQ ID NO: 2639 - DNA, 2421 bp, Artificial Sequence
  Description of Artificial Sequence: Synthetic polynucleotide
atgaaaatcgaagaaggtaaactggtaatctggattaacggcgataaaggctataacggtctcgctgaagtcggtaagaaattcgagaaagataccggaattaaagtcaccgttgagcatccggataaactggaagagaaattcccacaggttgcggcaactggcgatggccctgacattatcttctgggcacacgaccgctttggtggctacgctcaatctggcctgttggctgaaatcaccccggacaaagcgttccaggacaagctgtatccgtttacctgggatgccgtacgttacaacggcaagctgattgcttacccgatcgctgttgaagcgttatcgctgatttataacaaagatctgctgccgaacccgccaaaaacctgggaagagatcccggcgctggataaagaactgaaagcgaaaggtaagagcgcgctgatgttcaacctgcaagaaccgtacttcacctggccgctgattgctgctgacgggggttatgcgttcaagtatgaaaacggcaagtacgacattaaagacgtgggcgtggataacgctggcgcgaaagcgggtctgaccttcctggttgacctgattaaaaacaaacacatgaatgcagacaccgattactccatcgcagaagctgcctttaataaaggcgaaacagcgatgaccatcaacggcccgtgggcatggtccaacatcgacaccagcaaagtgaattatggtgtaacggtactgccgaccttcaagggtcaaccatccaaaccgttcgttggcgtgctgagcgcaggtattaacgccgccagtccgaacaaagagctggcgaaagagttcctcgaaaactatctgctgactgatgaaggtctggaagcggttaataaagacaaaccgctgggtgccgtagcgctgaagtcttacgaggaagagttggcgaaagatccacgtattgccgccaccatggaaaacgcccagaaaggtgaaatcatgccgaacatcccgcagatgtccgctttctggtatgccgtgcgtactgcggtgatcaacgccgccagcggtcgtcagactgtcgatgaagccctgaaagacgcgcagactggtggttctggtgagaacctgtactttcaaagctcagataatgggcctcaaaaccagcgcaacgctccacgtataaccttcggtggcccgtctgactccacaggcagcaaccagaatggtgagcgtagtggagccaggtctaagcagcgccgtccccagggtctgccgaacaacacggcgagctggtttactgcgcttacccaacacggtaaagaagacttaaaattcccgcgtggccagggcgtcccgatcaacactaactcttccccggatgatcagattggttattaccgcagagcaactcgtcggattcgcggcggcgacggtaaaatgaaagatttgtctccgcgttggtacttttactatctcggcaccggtccggaagctggactgccctacggggcaaacaaggacgggatcatttgggtggctaccgaaggtgccaataatactccaaaagatcatatcggcacccgtaaccctgctaataacgctgcgatcgttctgcaactgcctcagggtacaactctgccaaaaggcttctatgcagaagggtcgcgtggtggcagccaggcgagtagccgtagcagctcccgctctcgcaactcgtcccgtaactccactccgggctcttctcgcggcacgtccccggctcgtatggcaggtaacggtggtgacgctgctctggcgctgctactgctggacaggctgaaccagctggagtcgaagatgagtggtaaaggccaacagcagcagggccagaccgttaccaaaaagagcgcagctgaagcatctaaaaaaccgcgacagaaacgtaccgcgactaaagcgtacaatgtaacacaggccttcggtcgtcgaggtccggagcaaactcaaggaaactttggcgatcaggaattaatccgccaggggaccgactacaaacactggccgcaaattgcccagttcgccccatccgctagtgcattcttcggtatgagccgcatcggcatggaagtaacgccaagtggtacgtggctgacctacaccggtgctatcaagcttgatgacaaggacccgaactttaaagaccaggttattctgcttaacaaacatattgatgcctataaaactttcccgccgaccgaacccaaaaaggacaaaaagaaaaaagctgatgaaacccaggctctaccgcagcgtcagaaaaaacagcaaactgtgactctgctgccagctgcggacctggatgatttttccaagcagctgcaacagtctatgagctctgcggactctacgcaggctggtggttctggtcaccatcatcaccatcattaa

SEQ ID NO: 2640 - DNA, 2421 bp, Artificial Sequence
  Description of Artificial Sequence: Synthetic polynucleotide
atgaaaatcgaagaaggtaaactggtaatctggattaacggcgataaaggctataacggtctcgctgaagtcggtaagaaattcgagaaagataccggaattaaagtcaccgttgagcatccggataaactggaagagaaattcccacaggttgcggcaactggcgatggccctgacattatcttctgggcacacgaccgctttggtggctacgctcaatctggcctgttggctgaaatcaccccggacaaagcgttccaggacaagctgtatccgtttacctgggatgccgtacgttacaacggcaagctgattgcttacccgatcgctgttgaagcgttatcgctgatttataacaaagatctgctgccgaacccgccaaaaacctgggaagagatcccggcgctggataaagaactgaaagcgaaaggtaagagcgcgctgatgttcaacctgcaagaaccgtacttcacctggccgctgattgctgctgacgggggttatgcgttcaagtatgaaaacggcaagtacgacattaaagacgtgggcgtggataacgctggcgcgaaagcgggtctgaccttcctggttgacctgattaaaaacaaacacatgaatgcagacaccgattactccatcgcagaagctgcctttaataaaggcgaaacagcgatgaccatcaacggcccgtgggcatggtccaacatcgacaccagcaaagtgaattatggtgtaacggtactgccgaccttcaagggtcaaccatccaaaccgttcgttggcgtgctgagcgcaggtattaacgccgccagtccgaacaaagagctggcgaaagagttcctcgaaaactatctgctgactgatgaaggtctggaagcggttaataaagacaaaccgctgggtgccgtagcgctgaagtcttacgaggaagagttggcgaaagatccacgtattgccgccaccatggaaaacgcccagaaaggtgaaatcatgccgaacatcccgcagatgtccgctttctggtatgccgtgcgtactgcggtgatcaacgccgccagcggtcgtcagactgtcgatgaagccctgaaagacgcgcagactggtggttctggtgagaacctgtactttcaaagctcagataatgggcctcaaaaccagcgcaacgctccacgtataaccttcggtggcccgtctgactccacaggcagcaaccagaatggtgagcgtagtggagccaggtctaagcagcgccgtccccagggtctgccgaacaacacggcgagctggtttactgcgcttacccaacacggtaaagaagacttaaaattcccgcgtggccagggcgtcccgatcaacactaactcttccccggatgatcagattggttattaccgcagagcaactcgtcggattcgcggcggcgacggtaaaatgaaagatttgtctccgcgttggtacttttactatctcggcaccggtccggaagctggactgccctacggggcaaacaaggacgggatcatttgggtggctaccgaaggtgccctgaatactccaaaagatcatatcggcacccgtaaccctgctaataacgctgcgatcgttctgcaactgcctcagggtacaactctgccaaaaggcttctatgcagaagggtcgcgtggtggcagccaggcgagtagccgtagcagctcccgctctcgcaactcgtcccgtaactccactccgggctcttctcgcggcacgtccccggctcgtatggcaggtaacggtggtgacgctgctctggcgctgctactgctggacaggctgaaccagctggagtcgaagatgagtggtaaaggccaacagcagcagggccagaccgttaccaaaaagagcgcagctgaagcatctaaaaaaccgcgacagaaacgtaccgcgactaaagcgtacaatgtaacacaggccttcggtcgtcgaggtccggagcaaactcaaggaaactttggcgatcagcaattaatccgccaggggaccgactacaaacactggccgcaaattgcccagttcgccccatccgctagtgcattcttcggtatgagccgcatcggcatggaagtaacgccaagtggtacgtggctgacctacaccggtgctatcaagcttgatgacaaggacccgaactttaaagaccaggttattctgcttaacaaacatattgatgcctataaaactttcccgccgaccgaacccaaaaaggacaaaaagaaaaaagctgatgaaacccaggctctaccgcagcgtcagaaaaaacagcaaactgtgactctgctgccagctgcggacctggatgatttttccaagcagctgcaacagtctatgagctctgcggactctacgcaggctggtggttctggtcaccatcatcaccatcattaa

SEQ ID NO: 2641 - DNA, 2421 bp, Artificial Sequence
  Description of Artificial Sequence: Synthetic polynucleotide
atgaaaatcgaagaaggtaaactggtaatctggattaacggcgataaaggctataacggtctcgctgaagtcggtaagaaattcgagaaagataccggaattaaagtcaccgttgagcatccggataaactggaagagaaattcccacaggttgcggcaactggcgatggccctgacattatcttctgggcacacgaccgctttggtggctacgctcaatctggcctgttggctgaaatcaccccggacaaagcgttccaggacaagctgtatccgtttacctgggatgccgtacgttacaacggcaagctgattgcttacccgatcgctgttgaagcgttatcgctgatttataacaaagatctgctgccgaacccgccaaaaacctgggaagagatcccggcgctggataaagaactgaaagcgaaaggtaagagcgcgctgatgttcaacctgcaagaaccgtacttcacctggccgctgattgctgctgacgggggttatgcgttcaagtatgaaaacggcaagtacgacattaaagacgtgggcgtggataacgctggcgcgaaagcgggtctgaccttcctggttgacctgattaaaaacaaacacatgaatgcagacaccgattactccatcgcagaagctgcctttaataaaggcgaaacagcgatgaccatcaacggcccgtgggcatggtccaacatcgacaccagcaaagtgaattatggtgtaacggtactgccgaccttcaagggtcaaccatccaaaccgttcgttggcgtgctgagcgcaggtattaacgccgccagtccgaacaaagagctggcgaaagagttcctcgaaaactatctgctgactgatgaaggtctggaagcggttaataaagacaaaccgctgggtgccgtagcgctgaagtcttacgaggaagagttggcgaaagatccacgtattgccgccaccatggaaaacgcccagaaaggtgaaatcatgccgaacatcccgcagatgtccgctttctggtatgccgtgcgtactgcggtgatcaacgccgccagcggtcgtcagactgtcgatgaagccctgaaagacgcgcagactggtggttctggtgagaacctgtactttcaaagctcagataatgggcctcaaaaccagcgcaacgctccacgtataaccttcggtggcccgtctgactccacaggcagcaaccagaatggtgagcgtagtggagccaggtctaagcagcgccgtccccagggtctgccgaacaacacggcgagctggtttactgcgcttacccaacacggtaaagaagacttaaaattcccgcgtggccagggcgtcccgatcaacactaactcttccccggatgatcagattggttattaccgcagagcaactcgtcggattcgcggcggcgacggtaaaatgaaagatttgtctccgcgttggtacttttactatctcggcaccggtccggaagctggactgccctacggggcaaacaaggacgggatcatttgggtggctaccgaaggtgccctgaatactccaaaagatcatatcggcacccgtaaccctgctaataacgctgcgatcgttctgcaactgcctcagggtacaactctgccaaaaggcttctatgcagaagggtcgcgtggtggcagccaggcgagtagccgtagcagcgagcgctctcgcaactcgtcccgtaactccactccgggctctgagcgcggcacgtccccggctcgtatggcaggtaacggtggtgacgctgctctggcgctgctactgctggacaggctgaaccagctggagtcgaagatgagtggtaaaggccaacagcagcagggccagaccgttaccaaaaagagcgcagctgaagcatctaaaaaaccgcgacagaaacgtaccgcgactaaagcgtacaatgtaacacaggccttcggtcgtcgaggtccggagcaaactcaaggaaactttggcgatcaggaattaatccgccaggggaccgactacaaacactggccgcaaattgcccagttcgccccatccgctagtgcattcttcggtatgagccgcatcggcatggaagtaacgccaagtggtacgtggctgacctacaccggtgctatcaagcttgatgacaaggacccgaactttaaagaccaggttattctgcttaacaaacatattgatgcctataaaactttcccgccgaccgaacccaaaaaggacaaaaagaaaaaagctgatgaaacccaggctctaccgcagcgtcagaaaaaacagcaaactgtgactctgctgccagctgcggacctggatgatttttccaagcagctgcaacagtctatgagctctgcggactctacgcaggctggtggttctggtcaccatcatcaccatcattaa

SEQ ID NO: 2642 - DNA, 2421 bp, Artificial Sequence
  Description of Artificial Sequence: Synthetic polynucleotide
atgaaaatcgaagaaggtaaactggtaatctggattaacggcgataaaggctataacggtctcgctgaagtcggtaagaaattcgagaaagataccggaattaaagtcaccgttgagcatccggataaactggaagagaaattcccacaggttgcggcaactggcgatggccctgacattatcttctgggcacacgaccgctttggtggctacgctcaatctggcctgttggctgaaatcaccccggacaaagcgttccaggacaagctgtatccgtttacctgggatgccgtacgttacaacggcaagctgattgcttacccgatcgctgttgaagcgttatcgctgatttataacaaagatctgctgccgaacccgccaaaaacctgggaagagatcccggcgctggataaagaactgaaagcgaaaggtaagagcgcgctgatgttcaacctgcaagaaccgtacttcacctggccgctgattgctgctgacgggggttatgcgttcaagtatgaaaacggcaagtacgacattaaagacgtgggcgtggataacgctggcgcgaaagcgggtctgaccttcctggttgacctgattaaaaacaaacacatgaatgcagacaccgattactccatcgcagaagctgcctttaataaaggcgaaacagcgatgaccatcaacggcccgtgggcatggtccaacatcgacaccagcaaagtgaattatggtgtaacggtactgccgaccttcaagggtcaaccatccaaaccgttcgttggcgtgctgagcgcaggtattaacgccgccagtccgaacaaagagctggcgaaagagttcctcgaaaactatctgctgactgatgaaggtctggaagcggttaataaagacaaaccgctgggtgccgtagcgctgaagtcttacgaggaagagttggcgaaagatccacgtattgccgccaccatggaaaacgcccagaaaggtgaaatcatgccgaacatcccgcagatgtccgctttctggtatgccgtgcgtactgcggtgatcaacgccgccagcggtcgtcagactgtcgatgaagccctgaaagacgcgcagactggtggttctggtgagaacctgtactttcaaagctcagataatgggcctcaaaaccagcgcaacgctccacgtataaccttcggtggcccgtctgactccacaggcagcaaccagaatggtgagcgtagtggagccaggtctaagcagcgccgtccccagggtctgccgaacaacacggcgagctggtttactgcgcttacccaacacggtaaagaagacttaaaattcccgcgtggccagggcgtcccgatcaacactaactcttccccggatgatcagattggttattaccgcagagcaactcgtcggattcgcggcggcgacggtaaaatgaaagatttgtctccgcgttggtacttttactatctcggcaccggtccggaagctggactgccctacggggcaaacaaggacgggatcatttgggtggctaccgaaggtgccctgaatactccaaaagatcatatcggcacccgtaaccctgctaataacgctgcgatcgttctgcaactgcctcagggtacaactctgccaaaaggcttctatgcagaagggtcgcgtggtggcagccaggcgagtagccgtagcagctcccgctctcgcaactcgtcccgtaactccactccgggctcttctcgcggcacgtccccggctcgtatggcaggtaacggtggtgacgctgctctggcgctgctactgctggacaggctgaaccagctggagtcgaagatgagtggtaaaggccaacagcagcagggccagaccgttaccaaaaagagcgcagctgaagcatctaaaaaaccgcgacagaaacgtaccgcgactaaagcgtacaatgtaacacaggccttcggtcgtcgaggtccggagcaaactcaaggaaactttggcgatcaggaattaatccgccaggggaccgactacaaacactggccgcaaattgcccagttcgccccatccgctagtgcattcttcggtatgagccgcatcggcatggaagtaacgccaagtggtatttggctgacctacaccggtgctatcaagcttgatgacaaggacccgaactttaaagaccaggttattctgcttaacaaacatattgatgcctataaaactttcccgccgaccgaacccaaaaaggacaaaaagaaaaaagctgatgaaacccaggctctaccgcagcgtcagaaaaaacagcaaactgtgactctgctgccagctgcggacctggatgatttttccaagcagctgcaacagtctatgagctctgcggactctacgcaggctggtggttctggtcaccatcatcaccatcattaa

SEQ ID NO: 2643 - DNA, 2421 bp, Artificial Sequence
  Description of Artificial Sequence: Synthetic polynucleotide
atgaaaatcgaagaaggtaaactggtaatctggattaacggcgataaaggctataacggtctcgctgaagtcggtaagaaattcgagaaagataccggaattaaagtcaccgttgagcatccggataaactggaagagaaattcccacaggttgcggcaactggcgatggccctgacattatcttctgggcacacgaccgctttggtggctacgctcaatctggcctgttggctgaaatcaccccggacaaagcgttccaggacaagctgtatccgtttacctgggatgccgtacgttacaacggcaagctgattgcttacccgatcgctgttgaagcgttatcgctgatttataacaaagatctgctgccgaacccgccaaaaacctgggaagagatcccggcgctggataaagaactgaaagcgaaaggtaagagcgcgctgatgttcaacctgcaagaaccgtacttcacctggccgctgattgctgctgacgggggttatgcgttcaagtatgaaaacggcaagtacgacattaaagacgtgggcgtggataacgctggcgcgaaagcgggtctgaccttcctggttgacctgattaaaaacaaacacatgaatgcagacaccgattactccatcgcagaagctgcctttaataaaggcgaaacagcgatgaccatcaacggcccgtgggcatggtccaacatcgacaccagcaaagtgaattatggtgtaacggtactgccgaccttcaagggtcaaccatccaaaccgttcgttggcgtgctgagcgcaggtattaacgccgccagtccgaacaaagagctggcgaaagagttcctcgaaaactatctgctgactgatgaaggtctggaagcggttaataaagacaaaccgctgggtgccgtagcgctgaagtcttacgaggaagagttggcgaaagatccacgtattgccgccaccatggaaaacgcccagaaaggtgaaatcatgccgaacatcccgcagatgtccgctttctggtatgccgtgcgtactgcggtgatcaacgccgccagcggtcgtcagactgtcgatgaagccctgaaagacgcgcagactggtggttctggtgagaacctgtactttcaaagctcagataatgggcctcaaaaccagcgcaacgctccacgtataaccttcggtggcccgtctgactccacaggcagcaaccagaatggtgagcgtagtggagccaggtctaagcagcgccgtccccagggtctgccgaacaacacggcgagctggtttactgcgcttacccaacacggtaaagaagacttaaaattcccgcgtggccagggcgtcccgatcaacactaactcttccccggatgatcagattggttattaccgcagagcaactcgtcggattcgcggcggcgacggtaaaatgaaagatttgaatccgcgttggtacttttactatctcggcaccggtccggaagctggactgccctacggggcaaacaaggacgggatcatttgggtggctaccgaaggtgccctgaatactccaaaagatcatatcggcacccgtaaccctgctaataacgctgcgatcgttctgcaactgcctcagggtacaactctgccaaaaggcttctatgcagaagggtcgcgtggtggcagccaggcgagtagccgtagcagctcccgctctcgcaactcgtcccgtaactccactccgggctcttctcgcggcacgtccccggctcgtatggcaggtaacggtggtgacgctgctctggcgctgctactgctggacaggctgaaccagctggagtcgaagatgagtggtaaaggccaacagcagcagggccagaccgttaccaaaaagagcgcagctgaagcatctaaaaaaccgcgacagaaacgtaccgcgactaaagcgtacaatgtaacacaggccttcggtcgtcgaggtccggagcaaactcaaggaaactttggcgatcaggaattaatccgccaggggaccgactacaaacactggccgcaaattgcccagttcgccccatccgctagtgcattcttcggtatgagccgcatcggcatggaagtaacgccaagtggtacgtggctgacctacaccggtgctatcaagcttgatgacaaggacccgaactttaaagaccaggttattctgcttaacaaacatattgatgcctataaaactttcccgccgaccgaacccaaaaaggacaaaaagaaaaaagctgatgaaacccaggctctaccgcagcgtcagaaaaaacagcaaactgtgactctgctgccagctgcggacctggatgatttttccaagcagctgcaacagtctatgagctctgcggactctacgcaggctggtggttctggtcaccatcatcaccatcattaa

SEQ ID NO: 2644 - DNA, 2421 bp, Artificial Sequence
  Description of Artificial Sequence: Synthetic polynucleotide
atgaaaatcgaagaaggtaaactggtaatctggattaacggcgataaaggctataacggtctcgctgaagtcggtaagaaattcgagaaagataccggaattaaagtcaccgttgagcatccggataaactggaagagaaattcccacaggttgcggcaactggcgatggccctgacattatcttctgggcacacgaccgctttggtggctacgctcaatctggcctgttggctgaaatcaccccggacaaagcgttccaggacaagctgtatccgtttacctgggatgccgtacgttacaacggcaagctgattgcttacccgatcgctgttgaagcgttatcgctgatttataacaaagatctgctgccgaacccgccaaaaacctgggaagagatcccggcgctggataaagaactgaaagcgaaaggtaagagcgcgctgatgttcaacctgcaagaaccgtacttcacctggccgctgattgctgctgacgggggttatgcgttcaagtatgaaaacggcaagtacgacattaaagacgtgggcgtggataacgctggcgcgaaagcgggtctgaccttcctggttgacctgattaaaaacaaacacatgaatgcagacaccgattactccatcgcagaagctgcctttaataaaggcgaaacagcgatgaccatcaacggcccgtgggcatggtccaacatcgacaccagcaaagtgaattatggtgtaacggtactgccgaccttcaagggtcaaccatccaaaccgttcgttggcgtgctgagcgcaggtattaacgccgccagtccgaacaaagagctggcgaaagagttcctcgaaaactatctgctgactgatgaaggtctggaagcggttaataaagacaaaccgctgggtgccgtagcgctgaagtcttacgaggaagagttggcgaaagatccacgtattgccgccaccatggaaaacgcccagaaaggtgaaatcatgccgaacatcccgcagatgtccgctttctggtatgccgtgcgtactgcggtgatcaacgccgccagcggtcgtcagactgtcgatgaagccctgaaagacgcgcagactggtggttctggtgagaacctgtactttcaaagctcagataatgggcctcaaaaccagcgcaacgctccacgtataaccttcggtggcccgtctgactccacaggcagcaaccagaatggtgagcgtagtggagccaggtctaagcagcgccgtccccagggtctgccgaacaacacggcgagctggtttactgcgcttacccaacacggtaaagaagacttaaaattcccgcgtggccagggcgtcccgatcaacactaactcttccccggatgatcagattggttattaccgcagagcaactcgtcggattcgcggcggcgacggtaaaatgaaagatttgtctccgcgttggtacttttactatctcggcaccggtccggaagctggactgccctacggggcaaacaaggacgggatcatttgggtggctaccgaaggtgccctgaatactccaaaagatcatatcggcacccgtaaccctgctaataacgctgcgatcgttctgcaactgcctacgggtacaactctgccaaaaggcttctatgcagaagggtcgcgtggtggcagccaggcgagtagccgtagcagctcccgctctcgcaactcgtcccgtaactccactccgggctcttctcgcggcacgtccccggctcgtatggcaggtaacggtggtgacgctgctctggcgctgctactgctggacaggctgaaccagctggagtcgaagatgagtggtaaaggccaacagcagcagggccagaccgttaccaaaaagagcgcagctgaagcatctaaaaaaccgcgacagaaacgtaccgcgactaaagcgtacaatgtaacacaggccttcggtcgtcgaggtccggagcaaactcaaggaaactttggcgatcaggaattaatccgccaggggaccgactacaaacactggccgcaaattgcccagttcgccccatccgctagtgcattcttcggtatgagccgcatcggcatggaagtaacgccaagtggtacgtggctgacctacaccggtgctatcaagcttgatgacaaggacccgaactttaaagaccaggttattctgcttaacaaacatattgatgcctataaaactttcccgccgaccgaacccaaaaaggacaaaaagaaaaaagctgatgaaacccaggctctaccgcagcgtcagaaaaaacagcaaactgtgactctgctgccagctgcggacctggatgatttttccaagcagctgcaacagtctatgagctctgcggactctacgcaggctggtggttctggtcaccatcatcaccatcattaa

SEQ ID NO: 2645 - DNA, 2421 bp, Artificial Sequence
  Description of Artificial Sequence: Synthetic polynucleotide
atgaaaatcgaagaaggtaaactggtaatctggattaacggcgataaaggctataacggtctcgctgaagtcggtaagaaattcgagaaagataccggaattaaagtcaccgttgagcatccggataaactggaagagaaattcccacaggttgcggcaactggcgatggccctgacattatcttctgggcacacgaccgctttggtggctacgctcaatctggcctgttggctgaaatcaccccggacaaagcgttccaggacaagctgtatccgtttacctgggatgccgtacgttacaacggcaagctgattgcttacccgatcgctgttgaagcgttatcgctgatttataacaaagatctgctgccgaacccgccaaaaacctgggaagagatcccggcgctggataaagaactgaaagcgaaaggtaagagcgcgctgatgttcaacctgcaagaaccgtacttcacctggccgctgattgctgctgacgggggttatgcgttcaagtatgaaaacggcaagtacgacattaaagacgtgggcgtggataacgctggcgcgaaagcgggtctgaccttcctggttgacctgattaaaaacaaacacatgaatgcagacaccgattactccatcgcagaagctgcctttaataaaggcgaaacagcgatgaccatcaacggcccgtgggcatggtccaacatcgacaccagcaaagtgaattatggtgtaacggtactgccgaccttcaagggtcaaccatccaaaccgttcgttggcgtgctgagcgcaggtattaacgccgccagtccgaacaaagagctggcgaaagagttcctcgaaaactatctgctgactgatgaaggtctggaagcggttaataaagacaaaccgctgggtgccgtagcgctgaagtcttacgaggaagagttggcgaaagatccacgtattgccgccaccatggaaaacgcccagaaaggtgaaatcatgccgaacatcccgcagatgtccgctttctggtatgccgtgcgtactgcggtgatcaacgccgccagcggtcgtcagactgtcgatgaagccctgaaagacgcgcagactggtggttctggtgagaacctgtactttcaaagctcagataatgggcctcaaaaccagcgcaacgctccacgtataaccttcggtggcccgtctgactccacaggcagcaaccagaatggtgagcgtagtggagccaggtctaagcagcgccgtccccagggtctgccgaacaacacggcgagctggtttactgcgcttacccaacacggtaaagaagacttaaaattcccgcgtggccagggcgtcccgatcaacactaactcttccccggatgatcagattggttattaccgcagagcaactcgtcggattcgcggcggcgacggtaaaatgaaagatttgtctccgcgttggtacttttactatctcggcaccggtccggaagctggactgccctacggggcaaacaaggacgggatcatttgggtggctaccgaaggtgccctgaatactccaaaagatcatatcggcacccgtaaccctgctaataacgctgcgatcgttctgcaactgcctcagggtacaactctgccaaaaggcttctatgcagaagggtcgcgtggtggcagccaggcgagtagccgtagcagctcccgctctcgcaactcgtcccgtaactccactccgggctcttctcgcggcacgtccccggctcgtatggcaggtaacggtggtgacgctgctctggcgctgctactgctggacaggctgaaccagctggagtcgaagatgagtggtaaaggccaacagcagcagggccagaccgttaccaaaaagagcgcagctgaaatgtctaaaaaaccgcgacagaaacgtaccgcgactaaagagtgcaatgtaacacagtgtttcggtccacgaggtccggagcaaactcaaggaaactttggcgatgccgaattagtcaagaaagggaccgactacaaacactggccgcaaattgcccagttcgccccatccgctagtgcattcttcggtatgagccgcatctcatcgaaggaaacgccaagtggtacgtggctgacctacaccggtgctatcaagcttgataaggatgacccgaactttaaagaccaggttattctgcttaacaaacatattgatgcctataaaactttcccgccgaccgaacccaaaaaggacaaaaagaaaaaagctgatgaaacccaggctctaccgcagcgtcagaaaaaacagcaaactgtgactctgctgccagctgcggacctggatgatttttccaagcagctgcaacagtctatgagctctgcggactctacgcaggctggtggttctggtcaccatcatcaccatcattaa

SEQ ID NO: 2646 - DNA, 2421 bp, Artificial Sequence
  Description of Artificial Sequence: Synthetic polynucleotide
atgaaaatcgaagaaggtaaactggtaatctggattaacggcgataaaggctataacggtctcgctgaagtcggtaagaaattcgagaaagataccggaattaaagtcaccgttgagcatccggataaactggaagagaaattcccacaggttgcggcaactggcgatggccctgacattatcttctgggcacacgaccgctttggtggctacgctcaatctggcctgttggctgaaatcaccccggacaaagcgttccaggacaagctgtatccgtttacctgggatgccgtacgttacaacggcaagctgattgcttacccgatcgctgttgaagcgttatcgctgatttataacaaagatctgctgccgaacccgccaaaaacctgggaagagatcccggcgctggataaagaactgaaagcgaaaggtaagagcgcgctgatgttcaacctgcaagaaccgtacttcacctggccgctgattgctgctgacgggggttatgcgttcaagtatgaaaacggcaagtacgacattaaagacgtgggcgtggataacgctggcgcgaaagcgggtctgaccttcctggttgacctgattaaaaacaaacacatgaatgcagacaccgattactccatcgcagaagctgcctttaataaaggcgaaacagcgatgaccatcaacggcccgtgggcatggtccaacatcgacaccagcaaagtgaattatggtgtaacggtactgccgaccttcaagggtcaaccatccaaaccgttcgttggcgtgctgagcgcaggtattaacgccgccagtccgaacaaagagctggcgaaagagttcctcgaaaactatctgctgactgatgaaggtctggaagcggttaataaagacaaaccgctgggtgccgtagcgctgaagtcttacgaggaagagttggcgaaagatccacgtattgccgccaccatggaaaacgcccagaaaggtgaaatcatgccgaacatcccgcagatgtccgctttctggtatgccgtgcgtactgcggtgatcaacgccgccagcggtcgtcagactgtcgatgaagccctgaaagacgcgcagactggtggttctggtgagaacctgtactttcaaagctcagataatgggcctcaaaaccagcgcaacgctccacgtataaccttcggtggcccgtctgactccacaggcagcaaccagaatggtgagcgtagtggagccaggtctaagcagcgccgtccccagggtctgccgaacaacacggcgagctggtttactgcgcttacccaacacggtaaagaagacttaaaattcccgcgtggccagggcgtcccgatcaacactaactcttccccggatgatcagattggttattaccgcagagcaactcgtcggattcgcggcggcgacggtaaaatgaaagatttgtctccgcgttggtacttttactatctcggcaccggtccggaagctggactgccctacggggcaaacaaggacgggatcatttgggtggctaccgaaggtgccctgaatactccaaaagatcatatcggcacccgtaaccctgctaataacgctgcgatcgttctgcaactgcctcagggtacaactctgccaaaaggcttctatgcagaagggtcgcgtggtggcagccaggcgagtagccgtagcagctcccgctctcgcaactcgtcccgtaactccactccgggctcttctcgcggcacgtccccggctcgtatggcaggtaacggtggtgacgctgctctggcgctgctactgctggacaggctgaaccagctggagtcgaagatgagtggtaaaggccaacagcagcagggccagaccgttaccaaaaagagcgcagctgaagcatctaaaaaaccgcgacagaaacgtaccgcgactaaagcgtacaatgtaacacaggccttcggtcgtcgaggtccggagcaaactcaaggaaactttggcgatcaggaattaatccgccaggggaccgactacaaacactggccgcaaattgcccagttcgccccatccgctagtgcattcttcggtatgagccgcatcggcatggaagccacgccaagtggtacgtggctgacctacaccggtgctatcaagcttgatgacaaggacccgaactttaaagaccaggttattctgcttaacaaacatattgatgcctataaaactttcccgccgaccgaacccaaaaaggacaaaaagaaaaaagctgatgaaacccaggctctaccgcagcgtcagaaaaaacagcaaactgtgactctgctgccagctgcggacctggatgatttttccaagcagctgcaacagtctatgagctctgcggactctacgcaggctggtggttctggtcaccatcatcaccatcattaa

SEQ ID NO: 2647 - DNA, 2421 bp, Artificial Sequence
  Description of Artificial Sequence: Synthetic polynucleotide
atgaaaatcgaagaaggtaaactggtaatctggattaacggcgataaaggctataacggtctcgctgaagtcggtaagaaattcgagaaagataccggaattaaagtcaccgttgagcatccggataaactggaagagaaattcccacaggttgcggcaactggcgatggccctgacattatcttctgggcacacgaccgctttggtggctacgctcaatctggcctgttggctgaaatcaccccggacaaagcgttccaggacaagctgtatccgtttacctgggatgccgtacgttacaacggcaagctgattgcttacccgatcgctgttgaagcgttatcgctgatttataacaaagatctgctgccgaacccgccaaaaacctgggaagagatcccggcgctggataaagaactgaaagcgaaaggtaagagcgcgctgatgttcaacctgcaagaaccgtacttcacctggccgctgattgctgctgacgggggttatgcgttcaagtatgaaaacggcaagtacgacattaaagacgtgggcgtggataacgctggcgcgaaagcgggtctgaccttcctggttgacctgattaaaaacaaacacatgaatgcagacaccgattactccatcgcagaagctgcctttaataaaggcgaaacagcgatgaccatcaacggcccgtgggcatggtccaacatcgacaccagcaaagtgaattatggtgtaacggtactgccgaccttcaagggtcaaccatccaaaccgttcgttggcgtgctgagcgcaggtattaacgccgccagtccgaacaaagagctggcgaaagagttcctcgaaaactatctgctgactgatgaaggtctggaagcggttaataaagacaaaccgctgggtgccgtagcgctgaagtcttacgaggaagagttggcgaaagatccacgtattgccgccaccatggaaaacgcccagaaaggtgaaatcatgccgaacatcccgcagatgtccgctttctggtatgccgtgcgtactgcggtgatcaacgccgccagcggtcgtcagactgtcgatgaagccctgaaagacgcgcagactggtggttctggtgagaacctgtactttcaaagctcagataatgggcctcaaaaccagcgcaacgctccacgtataaccttcggtggcccgtctgactccacaggcagcaaccagaatggtgagcgtagtggagccaggtctaagcagcgccgtccccagggtctgccgaacaacacggcgagctggtttactgcgcttacccaacacggtaaagaagacttaaaattcccgcgtggccagggcgtcccgatcaacactaactcttccccggatgatcagattggttattaccgcagagaaactcgtcggattcgcggcggcgacggtaaaatgaaagatttgtctccgcgttggtacttttactatctcggcaccggtccggaagctggactgccctacggggcaaacaaggacgggatcatttgggtggctaccgaaggtgccctgaatactccaaaagatcatatcggcacccgtaaccctgctaataacgctgcgatcgttctgcaactgcctcagggtacaactctgccaaaaggcttctatgcagaagggtcgcgtggtggcagccaggcgagtagccgtagcagctcccgctctcgcaactcgtcccgtaactccactccgggctcttctcgcggcacgtccccggctcgtatggcaggtaacggtggtgacgctgctctggcgctgctactgctggacaggctgaaccagctggagtcgaagatgagtggtaaaggccaacagcagcagggccagaccgttaccaaaaagagcgcagctgaagcatctaaaaaaccgcgacagaaacgtaccgcgactaaagcgtacaatgtaacacaggccttcggtcgtcgaggtccggagcaaactcaaggaaactttggcgatcaggaattaatccgccaggggaccgactacaaacactggccgcaaattgcccagttcgccccatccgctagtgcattcttcggtatgagccgcatcggcatggaagtaacgccaagtggtacgtggctgacctacaccggtgctatcaagcttgatgacaaggacccgaactttaaagaccaggttattctgcttaacaaacatattgatgcctataaaactttcccgccgaccgaacccaaaaaggacaaaaagaaaaaagctgatgaaacccaggctctaccgcagcgtcagaaaaaacagcaaactgtgactctgctgccagctgcggacctggatgatttttccaagcagctgcaacagtctatgagctctgcggactctacgcaggctggtggttctggtcaccatcatcaccatcattaa

SEQ ID NO: 2648 - DNA, 2421 bp, Artificial Sequence
  Description of Artificial Sequence: Synthetic polynucleotide
atgaaaatcgaagaaggtaaactggtaatctggattaacggcgataaaggctataacggtctcgctgaagtcggtaagaaattcgagaaagataccggaattaaagtcaccgttgagcatccggataaactggaagagaaattcccacaggttgcggcaactggcgatggccctgacattatcttctgggcacacgaccgctttggtggctacgctcaatctggcctgttggctgaaatcaccccggacaaagcgttccaggacaagctgtatccgtttacctgggatgccgtacgttacaacggcaagctgattgcttacccgatcgctgttgaagcgttatcgctgatttataacaaagatctgctgccgaacccgccaaaaacctgggaagagatcccggcgctggataaagaactgaaagcgaaaggtaagagcgcgctgatgttcaacctgcaagaaccgtacttcacctggccgctgattgctgctgacgggggttatgcgttcaagtatgaaaacggcaagtacgacattaaagacgtgggcgtggataacgctggcgcgaaagcgggtctgaccttcctggttgacctgattaaaaacaaacacatgaatgcagacaccgattactccatcgcagaagctgcctttaataaaggcgaaacagcgatgaccatcaacggcccgtgggcatggtccaacatcgacaccagcaaagtgaattatggtgtaacggtactgccgaccttcaagggtcaaccatccaaaccgttcgttggcgtgctgagcgcaggtattaacgccgccagtccgaacaaagagctggcgaaagagttcctcgaaaactatctgctgactgatgaaggtctggaagcggttaataaagacaaaccgctgggtgccgtagcgctgaagtcttacgaggaagagttggcgaaagatccacgtattgccgccaccatggaaaacgcccagaaaggtgaaatcatgccgaacatcccgcagatgtccgctttctggtatgccgtgcgtactgcggtgatcaacgccgccagcggtcgtcagactgtcgatgaagccctgaaagacgcgcagactggtggttctggtgagaacctgtactttcaaagctcagataatgggcctcaaaaccagcgcaacgctccacgtataaccttcggtggcccgtctgactccacaggcagcaaccagaatggtgagcgtagtggagccaggtctaagcagcgccgtccccagggtctgccgaacaacacggcgagctggtttactgcgcttacccaacacggtaaagaagacttaaaattcccgcgtggccagggcgtcccgatcaacactaactcttccccggatgatcagattggtaaataccgcagagcaactcgtcggattcgcggcggcgacggtaaaatgaaagatttgtctccgcgttggtacttttactatctcggcaccggtccggaagctggactgccctacggggcaaacaaggacgggatcatttgggtggctaccgaaggtgccctgaatactccaaaagatcatatcggcacccgtaaccctgctaataacgctgcgatcgttctgcaactgcctcagggtacaactctgccaaaaggcttctatgcagaagggtcgcgtggtggcagccaggcgagtagccgtagcagctcccgctctcgcaactcgtcccgtaactccactccgggctcttctcgcggcacgtccccggctcgtatggcaggtaacggtggtgacgctgctctggcgctgctactgctggacaggctgaaccagctggagtcgaagatgagtggtaaaggccaacagcagcagggccagaccgttaccaaaaagagcgcagctgaagcatctaaaaaaccgcgacagaaacgtaccgcgactaaagcgtacaatgtaacacaggccttcggtcgtcgaggtccggagcaaactcaaggaaactttggcgatcaggaattaatccgccaggggaccgactacaaacactggccgcaaattgcccagttcgccccatccgctagtgcattcttcggtatgagccgcatcggcatggaagtaacgccaagtggtacgtggctgacctacaccggtgctatcaagcttgatgacaaggacccgaactttaaagaccaggttattctgcttaacaaacatattgatgcctataaaactttcccgccgaccgaacccaaaaaggacaaaaagaaaaaagctgatgaaacccaggctctaccgcagcgtcagaaaaaacagcaaactgtgactctgctgccagctgcggacctggatgatttttccaagcagctgcaacagtctatgagctctgcggactctacgcaggctggtggttctggtcaccatcatcaccatcattaa

SEQ ID NO: 2649 - DNA, 2421 bp, Artificial Sequence
  Description of Artificial Sequence: Synthetic polynucleotide
atgaaaatcgaagaaggtaaactggtaatctggattaacggcgataaaggctataacggtctcgctgaagtcggtaagaaattcgagaaagataccggaattaaagtcaccgttgagcatccggataaactggaagagaaattcccacaggttgcggcaactggcgatggccctgacattatcttctgggcacacgaccgctttggtggctacgctcaatctggcctgttggctgaaatcaccccggacaaagcgttccaggacaagctgtatccgtttacctgggatgccgtacgttacaacggcaagctgattgcttacccgatcgctgttgaagcgttatcgctgatttataacaaagatctgctgccgaacccgccaaaaacctgggaagagatcccggcgctggataaagaactgaaagcgaaaggtaagagcgcgctgatgttcaacctgcaagaaccgtacttcacctggccgctgattgctgctgacgggggttatgcgttcaagtatgaaaacggcaagtacgacattaaagacgtgggcgtggataacgctggcgcgaaagcgggtctgaccttcctggttgacctgattaaaaacaaacacatgaatgcagacaccgattactccatcgcagaagctgcctttaataaaggcgaaacagcgatgaccatcaacggcccgtgggcatggtccaacatcgacaccagcaaagtgaattatggtgtaacggtactgccgaccttcaagggtcaaccatccaaaccgttcgttggcgtgctgagcgcaggtattaacgccgccagtccgaacaaagagctggcgaaagagttcctcgaaaactatctgctgactgatgaaggtctggaagcggttaataaagacaaaccgctgggtgccgtagcgctgaagtcttacgaggaagagttggcgaaagatccacgtattgccgccaccatggaaaacgcccagaaaggtgaaatcatgccgaacatcccgcagatgtccgctttctggtatgccgtgcgtactgcggtgatcaacgccgccagcggtcgtcagactgtcgatgaagccctgaaagacgcgcagactggtggttctggtgagaacctgtactttcaaagctcagataatgggcctcaaaaccagcgcaacgctccacgtataaccttcggtggcccgtctgactccacaggcagcaaccagaatggtgagcgtagtggagccaggtctaagcagcgccgtccccagggtctgccgaacaacacggcgagctggtttactgcgcttacccaacacggtaaagaagacttaaaattcccgcgtggccagggcgtcccgatcaacactaactcttccccggatgatcagattggttattaccgcagagcaactcgtcggattcgcggcggcgacggtaaaatgaaagatttgtctccgcgttggtacttttactatctcggcaccggtccggaagctggactgccctacggggcaaacaaggacgggatcatttgggtggctaccgaaggtgccctgaatactccaaaagatcatatcggcacccgtaaccctgctaataacgctgcgatcgttctgcaactgcctcagggtacaactctgccaaaaggcttctatgcagaagggtcgcgtggtggcagccaggcgagtagccgtagcagctcccgctctcgcaactcgtcccgtaactccactccgggctcttctcgcggcacgtccccggctcgtatggcaggtaacggtggtgacgctgctctggcgctgctactgctggacaggctgaaccagctggagtcgaagatgagtggtaaaggccaacagcagcagggccagaccgttaccaaaaagagcgcagctgaagcatctaaaaaaccgcgacagaaacgtaccgcgactaaagcgtacaatgtaacacaggccttcggtcgtcgaggtccggagcaaactcaaggaaactttggcgatcaggaattaatccgccaggggaccgactacaaacactggccgcaaattgcccagttcgccccatccgctagtgcattcttcggtatgagccaaatcggcatggaagtaacgccaagtggtacgtggctgacctacaccggtgctatcaagcttgatgacaaggacccgaactttaaagaccaggttattctgcttaacaaacatattgatgcctataaaactttcccgccgaccgaacccaaaaaggacaaaaagaaaaaagctgatgaaacccaggctctaccgcagcgtcagaaaaaacagcaaactgtgactctgctgccagctgcggacctggatgatttttccaagcagctgcaacagtctatgagctctgcggactctacgcaggctggtggttctggtcaccatcatcaccatcattaa

SEQ ID NO: 2650 - DNA, 2421 bp, Artificial Sequence
  Description of Artificial Sequence: Synthetic polynucleotide
atgaaaatcgaagaaggtaaactggtaatctggattaacggcgataaaggctataacggtctcgctgaagtcggtaagaaattcgagaaagataccggaattaaagtcaccgttgagcatccggataaactggaagagaaattcccacaggttgcggcaactggcgatggccctgacattatcttctgggcacacgaccgctttggtggctacgctcaatctggcctgttggctgaaatcaccccggacaaagcgttccaggacaagctgtatccgtttacctgggatgccgtacgttacaacggcaagctgattgcttacccgatcgctgttgaagcgttatcgctgatttataacaaagatctgctgccgaacccgccaaaaacctgggaagagatcccggcgctggataaagaactgaaagcgaaaggtaagagcgcgctgatgttcaacctgcaagaaccgtacttcacctggccgctgattgctgctgacgggggttatgcgttcaagtatgaaaacggcaagtacgacattaaagacgtgggcgtggataacgctggcgcgaaagcgggtctgaccttcctggttgacctgattaaaaacaaacacatgaatgcagacaccgattactccatcgcagaagctgcctttaataaaggcgaaacagcgatgaccatcaacggcccgtgggcatggtccaacatcgacaccagcaaagtgaattatggtgtaacggtactgccgaccttcaagggtcaaccatccaaaccgttcgttggcgtgctgagcgcaggtattaacgccgccagtccgaacaaagagctggcgaaagagttcctcgaaaactatctgctgactgatgaaggtctggaagcggttaataaagacaaaccgctgggtgccgtagcgctgaagtcttacgaggaagagttggcgaaagatccacgtattgccgccaccatggaaaacgcccagaaaggtgaaatcatgccgaacatcccgcagatgtccgctttctggtatgccgtgcgtactgcggtgatcaacgccgccagcggtcgtcagactgtcgatgaagccctgaaagacgcgcagactggtggttctggtgagaacctgtactttcaaagctcagataatgggcctcaaaaccagcgcaacgctccacgtataaccttcggtggcccgtctgactccacaggcagcaaccagaatggtgagcgtagtggagccaggtctaagcagcgccgtccccagggtctgccgaacaacacggcgagctggtttactgcgcttacccaacacggtaaagaagacttaaaattcccgcgtggccagggcgtcccgatcaacactaactcttccccggatgatcagattggttattaccgcagagcaactcgtcggattcgcggcggcgacggtaaaatgaaagatttgtctccgcgttggtacttttactatctcggcaccggtccggaagctggactgccctacggggcaaacaaggacgggatcatttgggtggctaccgaaggtgccctgaatactccaaaagatcatatcggcacccgtaaccctgctaataacgctgcgatcgttctgcaactgcctcagggtacaagtctgccaaaaggcttctatgcagaagggtcgcgtggtggcagccaggcgagtagccgtagcagctcccgctctcgcaactcgtcccgtaactccactccgggctcttctcgcggcacgtccccggctcgtatggcaggtaacggtggtgacgctgctctggcgctgctactgctggacaggctgaaccagctggagtcgaagatgagtggtaaaggccaacagcagcagggccagaccgttaccaaaaagagcgcagctgaagcatctaaaaaaccgcgacagaaacgtaccgcgactaaagcgtacaatgtaacacaggccttcggtcgtcgaggtccggagcaaactcaaggaaactttggcgatcaggaattaatccgccaggggaccgactacaaacactggccgcaaattgcccagttcgccccatccgctagtgcattcttcggtatgagccgcatcggcatggaagtaacgccaagtggtacgtggctgacctacaccggtgctatcaagcttgatgacaaggacccgaactttaaagaccaggttattctgcttaacaaacatattgatgcctataaaactttcccgccgaccgaacccaaaaaggacaaaaagaaaaaagctgatgaaacccaggctctaccgcagcgtcagaaaaaacagcaaactgtgactctgctgccagctgcggacctggatgatttttccaagcagctgcaacagtctatgagctctgcggactctacgcaggctggtggttctggtcaccatcatcaccatcattaa

SEQ ID NO: 2651 - DNA, 2421 bp, Artificial Sequence
  Description of Artificial Sequence: Synthetic polynucleotide
atgaaaatcgaagaaggtaaactggtaatctggattaacggcgataaaggctataacggtctcgctgaagtcggtaagaaattcgagaaagataccggaattaaagtcaccgttgagcatccggataaactggaagagaaattcccacaggttgcggcaactggcgatggccctgacattatcttctgggcacacgaccgctttggtggctacgctcaatctggcctgttggctgaaatcaccccggacaaagcgttccaggacaagctgtatccgtttacctgggatgccgtacgttacaacggcaagctgattgcttacccgatcgctgttgaagcgttatcgctgatttataacaaagatctgctgccgaacccgccaaaaacctgggaagagatcccggcgctggataaagaactgaaagcgaaaggtaagagcgcgctgatgttcaacctgcaagaaccgtacttcacctggccgctgattgctgctgacgggggttatgcgttcaagtatgaaaacggcaagtacgacattaaagacgtgggcgtggataacgctggcgcgaaagcgggtctgaccttcctggttgacctgattaaaaacaaacacatgaatgcagacaccgattactccatcgcagaagctgcctttaataaaggcgaaacagcgatgaccatcaacggcccgtgggcatggtccaacatcgacaccagcaaagtgaattatggtgtaacggtactgccgaccttcaagggtcaaccatccaaaccgttcgttggcgtgctgagcgcaggtattaacgccgccagtccgaacaaagagctggcgaaagagttcctcgaaaactatctgctgactgatgaaggtctggaagcggttaataaagacaaaccgctgggtgccgtagcgctgaagtcttacgaggaagagttggcgaaagatccacgtattgccgccaccatggaaaacgcccagaaaggtgaaatcatgccgaacatcccgcagatgtccgctttctggtatgccgtgcgtactgcggtgatcaacgccgccagcggtcgtcagactgtcgatgaagccctgaaagacgcgcagactggtggttctggtgagaacctgtactttcaaagctcagataatgggcctcaaaaccagcgcaacgctccacgtataaccttcggtggcccgtctgactccacaggcagcaaccagaatggtgagcgtagtggagccaggtctaagcagcgccgtccccagggtctgccgaacaacacggcgagctggtttactgcgcttacccaacacggtaaagaagacttaaaattcccgcgtggccagggcgtcccgatcaacactaactcttccccggatgatcagattggttattaccgcagagcaactcgtcggattcgcggcggcgacggtaaaatgaaagatttgtctccgcgttggtacttttactatctcggcaccggtccggaagctggactgccctacggggcaaacaaggacgggatcatttgggtggctaccgaaggtgccctgaatactccaaaagatcatatcggcacccgtaaccctgctaataacgctgcgatcgttctgcaactgcctcagggtacaactctgccaaaaggcttctatgcagaagggtcgcgtggtggcagccaggcgagtagccgtagcagctcccgctctcgcaactcgtcccgtaactccactccgggctcttctcgcggcacgtccccggctcgtatggcaggtaacggtggtgacgctgctctggcgctgctactgctggacaggctgaaccagctggagtcgaagatgagtggtaaaggccaacagcagcagggccagaccgttaccaaaaagagcgcagctgaagcatctaaaaaaccgcgacagaaacgtaccgcgactaaagcgtacaatgtaacacaggccttcggtcgtcgaggtccggagcaaactcaaggaaactttggcgatcaggaattaatccgccaggggaccgactacaaacactggccgcaaattgcccagttcgccccatccgctagtgcattcttcggtatgagccgcatcggcatggaaggtacgccaagtggtacgtggctgacctacaccggtgctatcaagcttgatgacaaggacccgaactttaaagaccaggttattctgcttaacaaacatattgatgcctataaaactttcccgccgaccgaacccaaaaaggacaaaaagaaaaaagctgatgaaacccaggctctaccgcagcgtcagaaaaaacagcaaactgtgactctgctgccagctgcggacctggatgatttttccaagcagctgcaacagtctatgagctctgcggactctacgcaggctggtggttctggtcaccatcatcaccatcattaa

SEQ ID NO: 2652 - DNA, 2421 bp, Artificial Sequence
  Description of Artificial Sequence: Synthetic polynucleotide
atgaaaatcgaagaaggtaaactggtaatctggattaacggcgataaaggctataacggtctcgctgaagtcggtaagaaattcgagaaagataccggaattaaagtcaccgttgagcatccggataaactggaagagaaattcccacaggttgcggcaactggcgatggccctgacattatcttctgggcacacgaccgctttggtggctacgctcaatctggcctgttggctgaaatcaccccggacaaagcgttccaggacaagctgtatccgtttacctgggatgccgtacgttacaacggcaagctgattgcttacccgatcgctgttgaagcgttatcgctgatttataacaaagatctgctgccgaacccgccaaaaacctgggaagagatcccggcgctggataaagaactgaaagcgaaaggtaagagcgcgctgatgttcaacctgcaagaaccgtacttcacctggccgctgattgctgctgacgggggttatgcgttcaagtatgaaaacggcaagtacgacattaaagacgtgggcgtggataacgctggcgcgaaagcgggtctgaccttcctggttgacctgattaaaaacaaacacatgaatgcagacaccgattactccatcgcagaagctgcctttaataaaggcgaaacagcgatgaccatcaacggcccgtgggcatggtccaacatcgacaccagcaaagtgaattatggtgtaacggtactgccgaccttcaagggtcaaccatccaaaccgttcgttggcgtgctgagcgcaggtattaacgccgccagtccgaacaaagagctggcgaaagagttcctcgaaaactatctgctgactgatgaaggtctggaagcggttaataaagacaaaccgctgggtgccgtagcgctgaagtcttacgaggaagagttggcgaaagatccacgtattgccgccaccatggaaaacgcccagaaaggtgaaatcatgccgaacatcccgcagatgtccgctttctggtatgccgtgcgtactgcggtgatcaacgccgccagcggtcgtcagactgtcgatgaagccctgaaagacgcgcagactggtggttctggtgagaacctgtactttcaaagctcagataatgggcctcaaaaccagcgcaacgctccacgtataaccttcggtggcccgtctgactccacaggcagcaaccagaatggtgagcgtagtggagccaggtctaagcagcgccgtccccagggtctgccgaacaacacggcgagctggtttactgcgcttacccaacacggtaaagaagacttaaaattcccgcgtggccagggcgtcccgatcaacactaactcttccccggatgatcagattggttattaccgcagagcaactcgtcggattcgcggcggcgacggtaaaatgaaagatttgtctccgcgttggtacttttactatctcggcaccggtccggaagctggactgccctacggggcaaacaagcctgggatcatttgggtggctaccgaaggtgccctgaatactccaaaagatcatatcggcacccgtaaccctgctaataacgctgcgatcgttctgcaactgcctcagggtacaactctgccaaaaggcttctatgcagaagggtcgcgtggtggcagccaggcgagtagccgtagcagctcccgctctcgcaactcgtcccgtaactccactccgggctcttctcgcggcacgtccccggctcgtatggcaggtaacggtggtgacgctgctctggcgctgctactgctggacaggctgaaccagctggagtcgaagatgagtggtaaaggccaacagcagcagggccagaccgttaccaaaaagagcgcagctgaagcatctaaaaaaccgcgacagaaacgtaccgcgactaaagcgtacaatgtaacacaggccttcggtcgtcgaggtccggagcaaactcaaggaaactttggcgatcaggaattaatccgccaggggaccgactacaaacactggccgcaaattgcccagttcgccccatccgctagtgcattcttcggtatgagccgcatcggcatggaagtaacgccaagtggtacgtggctgacctacaccggtgctatcaagcttgatgacaaggacccgaactttaaagaccaggttattctgcttaacaaacatattgatgcctataaaactttcccgccgaccgaacccaaaaaggacaaaaagaaaaaagctgatgaaacccaggctctaccgcagcgtcagaaaaaacagcaaactgtgactctgctgccagctgcggacctggatgatttttccaagcagctgcaacagtctatgagctctgcggactctacgcaggctggtggttctggtcaccatcatcaccatcattaa

SEQ ID NO: 2653 - DNA, 2421 bp, Artificial Sequence
  Description of Artificial Sequence: Synthetic polynucleotide
atgaaaatcgaagaaggtaaactggtaatctggattaacggcgataaaggctataacggtctcgctgaagtcggtaagaaattcgagaaagataccggaattaaagtcaccgttgagcatccggataaactggaagagaaattcccacaggttgcggcaactggcgatggccctgacattatcttctgggcacacgaccgctttggtggctacgctcaatctggcctgttggctgaaatcaccccggacaaagcgttccaggacaagctgtatccgtttacctgggatgccgtacgttacaacggcaagctgattgcttacccgatcgctgttgaagcgttatcgctgatttataacaaagatctgctgccgaacccgccaaaaacctgggaagagatcccggcgctggataaagaactgaaagcgaaaggtaagagcgcgctgatgttcaacctgcaagaaccgtacttcacctggccgctgattgctgctgacgggggttatgcgttcaagtatgaaaacggcaagtacgacattaaagacgtgggcgtggataacgctggcgcgaaagcgggtctgaccttcctggttgacctgattaaaaacaaacacatgaatgcagacaccgattactccatcgcagaagctgcctttaataaaggcgaaacagcgatgaccatcaacggcccgtgggcatggtccaacatcgacaccagcaaagtgaattatggtgtaacggtactgccgaccttcaagggtcaaccatccaaaccgttcgttggcgtgctgagcgcaggtattaacgccgccagtccgaacaaagagctggcgaaagagttcctcgaaaactatctgctgactgatgaaggtctggaagcggttaataaagacaaaccgctgggtgccgtagcgctgaagtcttacgaggaagagttggcgaaagatccacgtattgccgccaccatggaaaacgcccagaaaggtgaaatcatgccgaacatcccgcagatgtccgctttctggtatgccgtgcgtactgcggtgatcaacgccgccagcggtcgtcagactgtcgatgaagccctgaaagacgcgcagactggtggttctggtgagaacctgtactttcaaagctcagataatgggcctcaaaaccagcgcaacgctccacgtataaccttcggtggcccgtctgactccacaggcagcaaccagaatggtgagcgtagtggagccaggtctaagcagcgccgtccccagggtctgccgaacaacacggcgagctggtttactgggcttacccaacacggtaaagaagacttaaaattcccgcccggccagggcgtcccgatcaacactaactcttccccggatgatcagattggttattaccgcagagcaactcgtcggattcgcggcggcgacggtaaaatgaaagatttgccaccgcgttggtacttttactatctcggcaccggtccggaagctgatctgccctacggggcagtaaagccagggatcttttgggtggctgaagaaggtgccctgaatactccaaaagatcatatcggcacccgtaaccctgctaataacgctgcgatcccgctgcaactgcctccgggtacaactctgccaaaaggcttctatgcagaagggtcgcgtggtggcagccaggcgagtagccgtagcagctcccgctctcgcaactcgtcccgtaactccactccgggctcttctcgcggcacgtccccggctcgtatggcaggtaacggtggtgacgctgctctggcgctgctactgctggacaggctgaaccagctggagtcgaagatgagtggtaaaggccaacagcagcagggccagaccgttaccaaaaagagcgcagctgaagcatctaaaaaaccgcgacagaaacgtaccgcgactaaagcgtacaatgtaacacaggccttcggtcgtcgaggtccggagcaaactcaaggaaactttggcgatcaggaattaatccgccaggggaccgactacaaacactggccgcaaattgcccagttcgccccatccgctagtgcattcttcggtatgagccgcatcggcatggaagtaacgccaagtggtacgtggctgacctacaccggtgctatcaagcttgatgacaaggacccgaactttaaagaccaggttattctgcttaacaaacatattgatgcctataaaactttcccgccgaccgaacccaaaaaggacaaaaagaaaaaagctgatgaaacccaggctctaccgcagcgtcagaaaaaacagcaaactgtgactctgctgccagctgcggacctggatgatttttccaagcagctgcaacagtctatgagctctgcggactctacgcaggctggtggttctggtcaccatcatcaccatcattaa

SEQ ID NO: 2654 - DNA, 2421 bp, Artificial Sequence
  Description of Artificial Sequence: Synthetic polynucleotide
atgaaaatcgaagaaggtaaactggtaatctggattaacggcgataaaggctataacggtctcgctgaagtcggtaagaaattcgagaaagataccggaattaaagtcaccgttgagcatccggataaactggaagagaaattcccacaggttgcggcaactggcgatggccctgacattatcttctgggcacacgaccgctttggtggctacgctcaatctggcctgttggctgaaatcaccccggacaaagcgttccaggacaagctgtatccgtttacctgggatgccgtacgttacaacggcaagctgattgcttacccgatcgctgttgaagcgttatcgctgatttataacaaagatctgctgccgaacccgccaaaaacctgggaagagatcccggcgctggataaagaactgaaagcgaaaggtaagagcgcgctgatgttcaacctgcaagaaccgtacttcacctggccgctgattgctgctgacgggggttatgcgttcaagtatgaaaacggcaagtacgacattaaagacgtgggcgtggataacgctggcgcgaaagcgggtctgaccttcctggttgacctgattaaaaacaaacacatgaatgcagacaccgattactccatcgcagaagctgcctttaataaaggcgaaacagcgatgaccatcaacggcccgtgggcatggtccaacatcgacaccagcaaagtgaattatggtgtaacggtactgccgaccttcaagggtcaaccatccaaaccgttcgttggcgtgctgagcgcaggtattaacgccgccagtccgaacaaagagctggcgaaagagttcctcgaaaactatctgctgactgatgaaggtctggaagcggttaataaagacaaaccgctgggtgccgtagcgctgaagtcttacgaggaagagttggcgaaagatccacgtattgccgccaccatggaaaacgcccagaaaggtgaaatcatgccgaacatcccgcagatgtccgctttctggtatgccgtgcgtactgcggtgatcaacgccgccagcggtcgtcagactgtcgatgaagccctgaaagacgcgcagactggtggttctggtgagaacctgtactttcaaagctcagataatgggcctcaaaaccagcgcaacgctccacgtataaccttcggtggcccgtctgactccacaggcagcaaccagaatggtgagcgtagtggagccaggtctaagcagcgccgtccccagggtctgccgaacaacacggcgagctggtttactgcgcttacccaacacggtaaagaagacttaaaattcccgcgtggccagggcgtcccgatcaacactaactcttccccggatgatcagattggttattaccgcagagcaactcgtcggattcgcggcggcgacggtaaaatgaaagatttgtctccgcgttggtacttttactatctcggcaccggtccggaagctggactgccctacggggcaaacaaggacgggatcatttgggtggctaccgaaggtgccctgaatactccaaaagatcatatcggcacccgtaaccctgctaataacgctgcgatcgttctgcaactgcctcagggtacaactctgccaaaaggcttctatgcagaagggtcgcgtggtggcagccaggcgagtagccgtagcagctcccgctctcgcaactcgtcccgtaactccactccgggctcttctcgcggcacgtccccggctcgtatggcaggtaacggtggtgacgctgctctggcgctgctactgctggacaggctgaaccagctggagtcgaagatgagtggtaaaggccaacagcagcagggccagaccgttaccaaaaagagcgcagctgaaatgtctaaaaaaccgcgatggaaacgtaccgcgactaaagagtacaatgtaacacaggccttcggtaaacgaggtccgaaggatactcaaggaaactttggcgatgccgaattaatcaagcaggggaccgactacaaacactggccgcaaattgcccagttcgtgccatccgctgcggcattcttctttatgagccgcatcggcatgaaagaaacgccagatggtgtgtggctgacctacaccggtacgatcaagcttgataaggatgacccgaactttgatgaccaggttaaactgcttaacaaacatattgatgcctataaaactttcccgccgaccgaacccaaaaaggacaaaaagaaaaaagctgatgaaacccaggctctaccgcagcgtcagaaaaaacagcaaactgtgactctgctgccagctgcggacctggatgatttttccaagcagctgcaacagtctatgagctctgcggactctacgcaggctggtggttctggtcaccatcatcaccatcattaa

SEQ ID NO: 2655 - DNA, 2421 bp, Artificial Sequence
  Description of Artificial Sequence: Synthetic polynucleotide
atgaaaatcgaagaaggtaaactggtaatctggattaacggcgataaaggctataacggtctcgctgaagtcggtaagaaattcgagaaagataccggaattaaagtcaccgttgagcatccggataaactggaagagaaattcccacaggttgcggcaactggcgatggccctgacattatcttctgggcacacgaccgctttggtggctacgctcaatctggcctgttggctgaaatcaccccggacaaagcgttccaggacaagctgtatccgtttacctgggatgccgtacgttacaacggcaagctgattgcttacccgatcgctgttgaagcgttatcgctgatttataacaaagatctgctgccgaacccgccaaaaacctgggaagagatcccggcgctggataaagaactgaaagcgaaaggtaagagcgcgctgatgttcaacctgcaagaaccgtacttcacctggccgctgattgctgctgacgggggttatgcgttcaagtatgaaaacggcaagtacgacattaaagacgtgggcgtggataacgctggcgcgaaagcgggtctgaccttcctggttgacctgattaaaaacaaacacatgaatgcagacaccgattactccatcgcagaagctgcctttaataaaggcgaaacagcgatgaccatcaacggcccgtgggcatggtccaacatcgacaccagcaaagtgaattatggtgtaacggtactgccgaccttcaagggtcaaccatccaaaccgttcgttggcgtgctgagcgcaggtattaacgccgccagtccgaacaaagagctggcgaaagagttcctcgaaaactatctgctgactgatgaaggtctggaagcggttaataaagacaaaccgctgggtgccgtagcgctgaagtcttacgaggaagagttggcgaaagatccacgtattgccgccaccatggaaaacgcccagaaaggtgaaatcatgccgaacatcccgcagatgtccgctttctggtatgccgtgcgtactgcggtgatcaacgccgccagcggtcgtcagactgtcgatgaagccctgaaagacgcgcagactggtggttctggtgagaacctgtactttcaaagctcagataatgggcctcaaaaccagcgcaacgctccacgtataaccttcggtggcccgtctgactccacaggcagcaaccagaatggtgagcgtagtggagccaggtctaagcagcgccgtccccagggtctgccgaacaacacggcgagctggtttactgcgcttacccaacacggtaaagaagacttaaaattcccgcgtggccagggcgtcccgatcaacactaactcttccccggatgatcagattggttattaccgcagagcaactcgtcggattcgcggcggcgacggtaaaatgaaagatttgtctccgcgttggtacttttactatctcggcaccggtccggaagctggactgccctacggggcaaacaaggacgggatcatttgggtggctaccgaaggtgccctgaatactccaaaagatcatatcggcacccgtaaccctgctaataacgctgcgatcgttctgcaactgcctcagggtacaactctgccaaaaggcttctatgcagaagggtcgcgtggtggcagccaggcgagtagccgtagcagctcccgctctcgcaactcgtcccgtaactccactccgggctcttctcgcggcacgtccccggctcgtatggcaggtaacggtggtgacgctgctctggcgctgctactgctggacaggctgaaccagctggagtcgaagatgagtggtaaaggccaacagcagcagggccagaccgttaccaaaaagagcgcagctgaaatgtctaaaaaaccgcgacagaaacgtaccgcgactaaaggatttaatgtaacacaggccttcggtcctcgaggtccggagcaaactcaaggaaactttggcgatgcggaattaatcaaaaaagggaccgactacaaacactggccgcaaattgcccagttcgccccatccgctagtgcattcttcggtatgagccgcatctcatcaaaggaaacgccaagtggtacgtggctgacctacaccggtgctatcaagcttgataaagatgacccgaactttaaagaccaggttattctgcttaacaaacatattgatgcctataaaactttcccgccgaccgaacccaaaaaggacaaaaagaaaaaagctgatgaaacccaggctctaccgcagcgtcagaaaaaacagcaaactgtgactctgctgccagctgcggacctggatgatttttccaagcagctgcaacagtctatgagctctgcggactctacgcaggctggtggttctggtcaccatcatcaccatcattaa

SEQ ID NO: 2656 - DNA, 2421 bp, Artificial Sequence
  Description of Artificial Sequence: Synthetic polynucleotide
atgaaaatcgaagaaggtaaactggtaatctggattaacggcgataaaggctataacggtctcgctgaagtcggtaagaaattcgagaaagataccggaattaaagtcaccgttgagcatccggataaactggaagagaaattcccacaggttgcggcaactggcgatggccctgacattatcttctgggcacacgaccgctttggtggctacgctcaatctggcctgttggctgaaatcaccccggacaaagcgttccaggacaagctgtatccgtttacctgggatgccgtacgttacaacggcaagctgattgcttacccgatcgctgttgaagcgttatcgctgatttataacaaagatctgctgccgaacccgccaaaaacctgggaagagatcccggcgctggataaagaactgaaagcgaaaggtaagagcgcgctgatgttcaacctgcaagaaccgtacttcacctggccgctgattgctgctgacgggggttatgcgttcaagtatgaaaacggcaagtacgacattaaagacgtgggcgtggataacgctggcgcgaaagcgggtctgaccttcctggttgacctgattaaaaacaaacacatgaatgcagacaccgattactccatcgcagaagctgcctttaataaaggcgaaacagcgatgaccatcaacggcccgtgggcatggtccaacatcgacaccagcaaagtgaattatggtgtaacggtactgccgaccttcaagggtcaaccatccaaaccgttcgttggcgtgctgagcgcaggtattaacgccgccagtccgaacaaagagctggcgaaagagttcctcgaaaactatctgctgactgatgaaggtctggaagcggttaataaagacaaaccgctgggtgccgtagcgctgaagtcttacgaggaagagttggcgaaagatccacgtattgccgccaccatggaaaacgcccagaaaggtgaaatcatgccgaacatcccgcagatgtccgctttctggtatgccgtgcgtactgcggtgatcaacgccgccagcggtcgtcagactgtcgatgaagccctgaaagacgcgcagactggtggttctggtgagaacctgtactttcaaagctcagataatgggcctcaaaaccagcgcaacgctccacgtataaccttcggtggcccgtctgactccacaggcagcaaccagaatggtgagcgtagtggagccaggtctaagcagcgccgtccccagggtctgccgaacaacacggcgagctggtttactgcgcttacccaacacggtaaagaagacttaaaattcccgcgtggccagggcgtcccgaaaaacactaactcttccccggatgatcagattggttattaccgcagagcaactcgtcggattcgcggcggcgacggtaaaatgaaagatttgtctccgcgttggtacttttactatctcggcaccggtccggaagctggactgccctacggggcaaacaaggacgggatcatttgggtggctaccgaaggtgccctgaatactccaaaagatcatatcggcacccgtaaccctgctaataacgctgcgatcgttctgcaactgcctcagggtacaactctgccaaaaggcttctatgcagaagggtcgcgtggtggcagccaggcgagtagccgtagcagctcccgctctcgcaactcgtcccgtaactccactccgggctcttctcgcggcacgtccccggctcgtatggcaggtaacggtggtgacgctgctctggcgctgctactgctggacaggctgaaccagctggagtcgaagatgagtggtaaaggccaacagcagcagggccagaccgttaccaaaaagagcgcagctgaagcatctaaaaaaccgcgacagaaacgtaccgcgactaaagcgtacaatgtaacacaggccttcggtcgtcgaggtccggagcaaactcaaggaaactttggcgatcaggaattaatccgccaggggaccgactacaaacactggccgcaaattgcccagttcgccccatccgctagtgcattcttcggtatgagccgcatcggcatggaagtaacgccaagtggtacgtggctgacctacaccggtgctatcaagcttgatgacaaggacccgaactttaaagaccaggttattctgcttaacaaacatattgatgcctataaaactttcccgccgaccgaacccaaaaaggacaaaaagaaaaaagctgatgaaacccaggctctaccgcagcgtcagaaaaaacagcaaactgtgactctgctgccagctgcggacctggatgatttttccaagcagctgcaacagtctatgagctctgcggactctacgcaggctggtggttctggtcaccatcatcaccatcattaa

SEQ ID NO: 2657 - DNA, 2421 bp, Artificial Sequence
  Description of Artificial Sequence: Synthetic polynucleotide
atgaaaatcgaagaaggtaaactggtaatctggattaacggcgataaaggctataacggtctcgctgaagtcggtaagaaattcgagaaagataccggaattaaagtcaccgttgagcatccggataaactggaagagaaattcccacaggttgcggcaactggcgatggccctgacattatcttctgggcacacgaccgctttggtggctacgctcaatctggcctgttggctgaaatcaccccggacaaagcgttccaggacaagctgtatccgtttacctgggatgccgtacgttacaacggcaagctgattgcttacccgatcgctgttgaagcgttatcgctgatttataacaaagatctgctgccgaacccgccaaaaacctgggaagagatcccggcgctggataaagaactgaaagcgaaaggtaagagcgcgctgatgttcaacctgcaagaaccgtacttcacctggccgctgattgctgctgacgggggttatgcgttcaagtatgaaaacggcaagtacgacattaaagacgtgggcgtggataacgctggcgcgaaagcgggtctgaccttcctggttgacctgattaaaaacaaacacatgaatgcagacaccgattactccatcgcagaagctgcctttaataaaggcgaaacagcgatgaccatcaacggcccgtgggcatggtccaacatcgacaccagcaaagtgaattatggtgtaacggtactgccgaccttcaagggtcaaccatccaaaccgttcgttggcgtgctgagcgcaggtattaacgccgccagtccgaacaaagagctggcgaaagagttcctcgaaaactatctgctgactgatgaaggtctggaagcggttaataaagacaaaccgctgggtgccgtagcgctgaagtcttacgaggaagagttggcgaaagatccacgtattgccgccaccatggaaaacgcccagaaaggtgaaatcatgccgaacatcccgcagatgtccgctttctggtatgccgtgcgtactgcggtgatcaacgccgccagcggtcgtcagactgtcgatgaagccctgaaagacgcgcagactggtggttctggtgagaacctgtactttcaaagctcagataatgggcctcaaaaccagcgcaacgctccacgtataaccttcggtggcccgtctgactccacaggcagcaaccagaatggtgagcgtagtggagccaggtctaagcagcgccgtccccagggtctgccgaacaacacggcgagctggtttactgcgcttacccaacacggtaaagaagacttaaaattcccgcgtggccagggcgtcccgatcaacactaactcttccccggatgatcagattggttattaccgcagagcaactcgtcggattcgcggcggcgacggtaaaatgaaagatttgtctccgcgttggtacttttactatctcggcaccggtccggaagctggactgccctacggggcaaacaaggacgggatcatttgggtggctaccgaaggtgccgataatactccaaaagatcatatcggcacccgtaaccctgctaataacgctgcgatcgttctgcaactgcctcagggtacaactctgccaaaaggcttctatgcagaagggtcgcgtggtggcagccaggcgagtagccgtagcagctcccgctctcgcaactcgtcccgtaactccactccgggctcttctcgcggcacgtccccggctcgtatggcaggtaacggtggtgacgctgctctggcgctgctactgctggacaggctgaaccagctggagtcgaagatgagtggtaaaggccaacagcagcagggccagaccgttaccaaaaagagcgcagctgaagcatctaaaaaaccgcgacagaaacgtaccgcgactaaagcgtacaatgtaacacaggccttcggtcgtcgaggtccggagcaaactcaaggaaactttggcgatcaggaattaatccgccaggggaccgactacaaacactggccgcaaattgcccagttcgccccatccgctagtgcattcttcggtatgagccgcatcggcatggaagtaacgccaagtggtacgtggctgacctacaccggtgctatcaagcttgatgacaaggacccgaactttaaagaccaggttattctgcttaacaaacatattgatgcctataaaactttcccgccgaccgaacccaaaaaggacaaaaagaaaaaagctgatgaaacccaggctctaccgcagcgtcagaaaaaacagcaaactgtgactctgctgccagctgcggacctggatgatttttccaagcagctgcaacagtctatgagctctgcggactctacgcaggctggtggttctggtcaccatcatcaccatcattaa

SEQ ID NO: 2658 - DNA, 2421 bp, Artificial Sequence
  Description of Artificial Sequence: Synthetic polynucleotide
atgaaaatcgaagaaggtaaactggtaatctggattaacggcgataaaggctataacggtctcgctgaagtcggtaagaaattcgagaaagataccggaattaaagtcaccgttgagcatccggataaactggaagagaaattcccacaggttgcggcaactggcgatggccctgacattatcttctgggcacacgaccgctttggtggctacgctcaatctggcctgttggctgaaatcaccccggacaaagcgttccaggacaagctgtatccgtttacctgggatgccgtacgttacaacggcaagctgattgcttacccgatcgctgttgaagcgttatcgctgatttataacaaagatctgctgccgaacccgccaaaaacctgggaagagatcccggcgctggataaagaactgaaagcgaaaggtaagagcgcgctgatgttcaacctgcaagaaccgtacttcacctggccgctgattgctgctgacgggggttatgcgttcaagtatgaaaacggcaagtacgacattaaagacgtgggcgtggataacgctggcgcgaaagcgggtctgaccttcctggttgacctgattaaaaacaaacacatgaatgcagacaccgattactccatcgcagaagctgcctttaataaaggcgaaacagcgatgaccatcaacggcccgtgggcatggtccaacatcgacaccagcaaagtgaattatggtgtaacggtactgccgaccttcaagggtcaaccatccaaaccgttcgttggcgtgctgagcgcaggtattaacgccgccagtccgaacaaagagctggcgaaagagttcctcgaaaactatctgctgactgatgaaggtctggaagcggttaataaagacaaaccgctgggtgccgtagcgctgaagtcttacgaggaagagttggcgaaagatccacgtattgccgccaccatggaaaacgcccagaaaggtgaaatcatgccgaacatcccgcagatgtccgctttctggtatgccgtgcgtactgcggtgatcaacgccgccagcggtcgtcagactgtcgatgaagccctgaaagacgcgcagactggtggttctggtgagaacctgtactttcaaagctcagataatgggcctcaaaaccagcgcaacgctccacgtataaccttcggtggcccgtctgactccacaggcagcaaccagaatggtgagcgtagtggagccaggtctaagcagcgccgtccccagggtctgccgaacaacacggcgagctggtttactgcgcttacccaacacggtaaagaagacttaaaattcccgcgtggccagggcgtcccgatcaacactaactcttccccggatgatcagattggttattaccgcagatttactcgtcggattcgcggcggcgacggtaaaatgaaagatttgtctccgcgttggtacttttactatctcggcaccggtccggaagctggactgccctacggggcaaacaaggacgggatcatttgggtggctaccgaaggtgccctgaatactccaaaagatcatatcggcacccgtaaccctgctaataacgctgcgatcgttctgcaactgcctcagggtacaactctgccaaaaggcttctatgcagaagggtcgcgtggtggcagccaggcgagtagccgtagcagctcccgctctcgcaactcgtcccgtaactccactccgggctcttctcgcggcacgtccccggctcgtatggcaggtaacggtggtgacgctgctctggcgctgctactgctggacaggctgaaccagctggagtcgaagatgagtggtaaaggccaacagcagcagggccagaccgttaccaaaaagagcgcagctgaagcatctaaaaaaccgcgacagaaacgtaccgcgactaaagcgtacaatgtaacacaggccttcggtcgtcgaggtccggagcaaactcaaggaaactttggcgatcaggaattaatccgccaggggaccgactacaaacactggccgcaaattgcccagttcgccccatccgctagtgcattcttcggtatgagccgcatcggcatggaagtaacgccaagtggtacgtggctgacctacaccggtgctatcaagcttgatgacaaggacccgaactttaaagaccaggttattctgcttaacaaacatattgatgcctataaaactttcccgccgaccgaacccaaaaaggacaaaaagaaaaaagctgatgaaacccaggctctaccgcagcgtcagaaaaaacagcaaactgtgactctgctgccagctgcggacctggatgatttttccaagcagctgcaacagtctatgagctctgcggactctacgcaggctggtggttctggtcaccatcatcaccatcattaa

SEQ ID NO: 2659 - DNA, 2421 bp, Artificial Sequence
  Description of Artificial Sequence: Synthetic polynucleotide
atgaaaatcgaagaaggtaaactggtaatctggattaacggcgataaaggctataacggtctcgctgaagtcggtaagaaattcgagaaagataccggaattaaagtcaccgttgagcatccggataaactggaagagaaattcccacaggttgcggcaactggcgatggccctgacattatcttctgggcacacgaccgctttggtggctacgctcaatctggcctgttggctgaaatcaccccggacaaagcgttccaggacaagctgtatccgtttacctgggatgccgtacgttacaacggcaagctgattgcttacccgatcgctgttgaagcgttatcgctgatttataacaaagatctgctgccgaacccgccaaaaacctgggaagagatcccggcgctggataaagaactgaaagcgaaaggtaagagcgcgctgatgttcaacctgcaagaaccgtacttcacctggccgctgattgctgctgacgggggttatgcgttcaagtatgaaaacggcaagtacgacattaaagacgtgggcgtggataacgctggcgcgaaagcgggtctgaccttcctggttgacctgattaaaaacaaacacatgaatgcagacaccgattactccatcgcagaagctgcctttaataaaggcgaaacagcgatgaccatcaacggcccgtgggcatggtccaacatcgacaccagcaaagtgaattatggtgtaacggtactgccgaccttcaagggtcaaccatccaaaccgttcgttggcgtgctgagcgcaggtattaacgccgccagtccgaacaaagagctggcgaaagagttcctcgaaaactatctgctgactgatgaaggtctggaagcggttaataaagacaaaccgctgggtgccgtagcgctgaagtcttacgaggaagagttggcgaaagatccacgtattgccgccaccatggaaaacgcccagaaaggtgaaatcatgccgaacatcccgcagatgtccgctttctggtatgccgtgcgtactgcggtgatcaacgccgccagcggtcgtcagactgtcgatgaagccctgaaagacgcgcagactggtggttctggtgagaacctgtactttcaaagctcagataatgggcctcaaaaccagcgcaacgctccacgtataaccttcggtggcccgtctgactccacaggcagcaaccagaatggtgagcgtagtggagccaggtctaagcagcgccgtccccagggtctgccgaacaacacggcgagctggtttactgcgcttacccaacacggtaaagaagacttaaaattcccgcgtggccagggcgtcccgatcaacactaactcttccccggatgatcagattggttattaccgcagagcaactcgtcggattcgcggcggcgacggtaaaatgaaagatttgtctccgcgttggtacttttactatctcggcaccggtccggaagctggactgccctacggggcaaacaaggacgggatcatttgggtggctaccgaaggtgccctgaatactccaaaagatcatatcggcacccgtaaccctgctaataacgctgcgatcgttctgcaactgcctcagggtacaactctgccaaaaggcttctatgcagaagggtcgcgtggtggcagccaggcgagtagccgtagcagctcccgctctcgcaactcgtcccgtaactccactccgggctcttctcgcggcacgtccccggctcgtatggcaggtaacggtggtgacgctgctctggcgctgctactgctggacaggctgaaccagctggagtcgaagatgagtggtaaaggccaacagcagcagggccagaccgttaccaaaaagagcgcagctgaagcatctaaaaaaccgcgacagaaacgtaccgcgactaaagcgtacaatgtaacacaggccttcggtcgtcgaggtccggagcaaactcaaggaaactttggcgatcaggaattaatccgccaggggaccgactacaaacactggccgcaaattgcccagttcgccccatccgctagtgcattcttcggtatgagccgcatcggcatggaagtaacgccaagtggtacgtggctgacctacaccggtgctatcaagcttgatcaaaaggacccgaactttaaagaccaggttattctgcttaacaaacatattgatgcctataaaactttcccgccgaccgaacccaaaaaggacaaaaagaaaaaagctgatgaaacccaggctctaccgcagcgtcagaaaaaacagcaaactgtgactctgctgccagctgcggacctggatgatttttccaagcagctgcaacagtctatgagctctgcggactctacgcaggctggtggttctggtcaccatcatcaccatcattaa

SEQ ID NO: 2660 - DNA, 2421 bp, Artificial Sequence
  Description of Artificial Sequence: Synthetic polynucleotide
atgaaaatcgaagaaggtaaactggtaatctggattaacggcgataaaggctataacggtctcgctgaagtcggtaagaaattcgagaaagataccggaattaaagtcaccgttgagcatccggataaactggaagagaaattcccacaggttgcggcaactggcgatggccctgacattatcttctgggcacacgaccgctttggtggctacgctcaatctggcctgttggctgaaatcaccccggacaaagcgttccaggacaagctgtatccgtttacctgggatgccgtacgttacaacggcaagctgattgcttacccgatcgctgttgaagcgttatcgctgatttataacaaagatctgctgccgaacccgccaaaaacctgggaagagatcccggcgctggataaagaactgaaagcgaaaggtaagagcgcgctgatgttcaacctgcaagaaccgtacttcacctggccgctgattgctgctgacgggggttatgcgttcaagtatgaaaacggcaagtacgacattaaagacgtgggcgtggataacgctggcgcgaaagcgggtctgaccttcctggttgacctgattaaaaacaaacacatgaatgcagacaccgattactccatcgcagaagctgcctttaataaaggcgaaacagcgatgaccatcaacggcccgtgggcatggtccaacatcgacaccagcaaagtgaattatggtgtaacggtactgccgaccttcaagggtcaaccatccaaaccgttcgttggcgtgctgagcgcaggtattaacgccgccagtccgaacaaagagctggcgaaagagttcctcgaaaactatctgctgactgatgaaggtctggaagcggttaataaagacaaaccgctgggtgccgtagcgctgaagtcttacgaggaagagttggcgaaagatccacgtattgccgccaccatggaaaacgcccagaaaggtgaaatcatgccgaacatcccgcagatgtccgctttctggtatgccgtgcgtactgcggtgatcaacgccgccagcggtcgtcagactgtcgatgaagccctgaaagacgcgcagactggtggttctggtgagaacctgtactttcaaagctcagataatgggcctcaaaaccagcgcaacgctccacgtataaccttcggtggcccgtctgactccacaggcagcaaccagaatggtgagcgtagtggagccaggtctaagcagcgccgtccccagggtctgccgaacaacacggcgagctggtttactcctcttacccaaaatggtaaagaagacttaaaattcccgccgggccagggcgtcccgatcaacactaactcttccccggatgatcagattggttattaccgcagagcaactcgtcggattcgcggcggcgacggtaaaatgaaagatttgccaccgaaatggtacttttactatctcggcaccggtccgcatgctgatctgccctacgggcaaaagaaggacggggttttttgggtggctcggcctggtgccctgaatactccaaaagatcatatcggcacccgtaaccctgctaataacgctgcgatcccgctgcaactgcctccgggtacaaaactgccaaaaggcttctatgcagaagggtcgcgtggtggcagccaggcgagtagccgtagcagctcccgctctcgcaactcgtcccgtaactccactccgggctcttctcgcggcacgtccccggctcgtatggcaggtaacggtggtgacgctgctctggcgctgctactgctggacaggctgaaccagctggagtcgaagatgagtggtaaaggccaacagcagcagggccagaccgttaccaaaaagagcgcagctgaagcatctaaaaaaccgcgacagaaacgtaccgcgactaaagcgtacaatgtaacacaggccttcggtcgtcgaggtccggagcaaactcaaggaaactttggcgatcaggaattaatccgccaggggaccgactacaaacactggccgcaaattgcccagttcgccccatccgctagtgcattcttcggtatgagccgcatcggcatggaagtaacgccaagtggtacgtggctgacctacaccggtgctatcaagcttgatgacaaggacccgaactttaaagaccaggttattctgcttaacaaacatattgatgcctataaaactttcccgccgaccgaacccaaaaaggacaaaaagaaaaaagctgatgaaacccaggctctaccgcagcgtcagaaaaaacagcaaactgtgactctgctgccagctgcggacctggatgatttttccaagcagctgcaacagtctatgagctctgcggactctacgcaggctggtggttctggtcaccatcatcaccatcattaa

SEQ ID NO: 2661 - DNA, 2421 bp, Artificial Sequence
  Description of Artificial Sequence: Synthetic polynucleotide
atgaaaatcgaagaaggtaaactggtaatctggattaacggcgataaaggctataacggtctcgctgaagtcggtaagaaattcgagaaagataccggaattaaagtcaccgttgagcatccggataaactggaagagaaattcccacaggttgcggcaactggcgatggccctgacattatcttctgggcacacgaccgctttggtggctacgctcaatctggcctgttggctgaaatcaccccggacaaagcgttccaggacaagctgtatccgtttacctgggatgccgtacgttacaacggcaagctgattgcttacccgatcgctgttgaagcgttatcgctgatttataacaaagatctgctgccgaacccgccaaaaacctgggaagagatcccggcgctggataaagaactgaaagcgaaaggtaagagcgcgctgatgttcaacctgcaagaaccgtacttcacctggccgctgattgctgctgacgggggttatgcgttcaagtatgaaaacggcaagtacgacattaaagacgtgggcgtggataacgctggcgcgaaagcgggtctgaccttcctggttgacctgattaaaaacaaacacatgaatgcagacaccgattactccatcgcagaagctgcctttaataaaggcgaaacagcgatgaccatcaacggcccgtgggcatggtccaacatcgacaccagcaaagtgaattatggtgtaacggtactgccgaccttcaagggtcaaccatccaaaccgttcgttggcgtgctgagcgcaggtattaacgccgccagtccgaacaaagagctggcgaaagagttcctcgaaaactatctgctgactgatgaaggtctggaagcggttaataaagacaaaccgctgggtgccgtagcgctgaagtcttacgaggaagagttggcgaaagatccacgtattgccgccaccatggaaaacgcccagaaaggtgaaatcatgccgaacatcccgcagatgtccgctttctggtatgccgtgcgtactgcggtgatcaacgccgccagcggtcgtcagactgtcgatgaagccctgaaagacgcgcagactggtggttctggtgagaacctgtactttcaaagctcagataatgggcctcaaaaccagcgcaacgctccacgtataaccttcggtggcccgtctgactccacaggcagcaaccagaatggtgagcgtagtggagccaggtctaagcagcgccgtccccagggtctgccgaacaacacggcgagctggtttactgcgcttacccaacacggtaaagaagacttaaaattcccgaaaggccagggcgtcccgatcaacactaactctaaaccggatgatcagattggttattggcgcagacaagtgcgtcggtaccgcggcggcgacggtcagatgaaagatttgaatccgcgttggtacttttactatctcggcaccggtccggaagctggactgccctacggggcaaacaaggacgggatcatttgggtggctaccgaaggtgccctgaatactccaaaagatcatatcggcacccgtaaccctgctaataacgctgcgatcgttctgcaactgcctcagggtacaactctgccaaaaggcttctatgcagaagggtcgcgtggtggcagccaggcgagtagccgtagcagctcccgctctcgcaactcgtcccgtaactccactccgggctcttctcgcggcacgtccccggctcgtatggcaggtaacggtggtgacgctgctctggcgctgctactgctggacaggctgaaccagctggagtcgaagatgagtggtaaaggccaacagcagcagggccagaccgttaccaaaaagagcgcagctgaagcatctaaaaaaccgcgacagaaacgtaccgcgactaaagcgtacaatgtaacacaggccttcggtcgtcgaggtccggagcaaactcaaggaaactttggcgatcaggaattaatccgccaggggaccgactacaaacactggccgcaaattgcccagttcgccccatccgctagtgcattcttcggtatgagccgcatcggcatggaagtaacgccaagtggtacgtggctgacctacaccggtgctatcaagcttgatgacaaggacccgaactttaaagaccaggttattctgcttaacaaacatattgatgcctataaaactttcccgccgaccgaacccaaaaaggacaaaaagaaaaaagctgatgaaacccaggctctaccgcagcgtcagaaaaaacagcaaactgtgactctgctgccagctgcggacctggatgatttttccaagcagctgcaacagtctatgagctctgcggactctacgcaggctggtggttctggtcaccatcatcaccatcattaa

SEQ ID NO: 2662 - DNA, 2421 bp, Artificial Sequence
  Description of Artificial Sequence: Synthetic polynucleotide
atgaaaatcgaagaaggtaaactggtaatctggattaacggcgataaaggctataacggtctcgctgaagtcggtaagaaattcgagaaagataccggaattaaagtcaccgttgagcatccggataaactggaagagaaattcccacaggttgcggcaactggcgatggccctgacattatcttctgggcacacgaccgctttggtggctacgctcaatctggcctgttggctgaaatcaccccggacaaagcgttccaggacaagctgtatccgtttacctgggatgccgtacgttacaacggcaagctgattgcttacccgatcgctgttgaagcgttatcgctgatttataacaaagatctgctgccgaacccgccaaaaacctgggaagagatcccggcgctggataaagaactgaaagcgaaaggtaagagcgcgctgatgttcaacctgcaagaaccgtacttcacctggccgctgattgctgctgacgggggttatgcgttcaagtatgaaaacggcaagtacgacattaaagacgtgggcgtggataacgctggcgcgaaagcgggtctgaccttcctggttgacctgattaaaaacaaacacatgaatgcagacaccgattactccatcgcagaagctgcctttaataaaggcgaaacagcgatgaccatcaacggcccgtgggcatggtccaacatcgacaccagcaaagtgaattatggtgtaacggtactgccgaccttcaagggtcaaccatccaaaccgttcgttggcgtgctgagcgcaggtattaacgccgccagtccgaacaaagagctggcgaaagagttcctcgaaaactatctgctgactgatgaaggtctggaagcggttaataaagacaaaccgctgggtgccgtagcgctgaagtcttacgaggaagagttggcgaaagatccacgtattgccgccaccatggaaaacgcccagaaaggtgaaatcatgccgaacatcccgcagatgtccgctttctggtatgccgtgcgtactgcggtgatcaacgccgccagcggtcgtcagactgtcgatgaagccctgaaagacgcgcagactggtggttctggtgagaacctgtactttcaaagctcagataatgggcctcaaaaccagcgcaacgctccacgtataaccttcggtggcccgtctgactccacaggcagcaaccagaatggtgagcgtagtggagccaggtctaagcagcgccgtccccagggtctgccgaacaacacggcgagctggtttactgcgcttacccaacacggtaaagaagacttaaaattcccgcgtggccagggcgtcccgatcaacactaactcttccccggatgatcagattggttattaccgcagagcaactcgtcggattcgcggcggcgacggtaaaatgaaagatttgtctccgcgttggtacttttactatctcggcaccggtccggaagctggactgccctacggggcaaaccaagacgggatcatttgggtggctaccgaaggtgccctgaatactccaaaagatcatatcggcacccgtaaccctgctaataacgctgcgatcgttctgcaactgcctcagggtacaactctgccaaaaggcttctatgcagaagggtcgcgtggtggcagccaggcgagtagccgtagcagctcccgctctcgcaactcgtcccgtaactccactccgggctcttctcgcggcacgtccccggctcgtatggcaggtaacggtggtgacgctgctctggcgctgctactgctggacaggctgaaccagctggagtcgaagatgagtggtaaaggccaacagcagcagggccagaccgttaccaaaaagagcgcagctgaagcatctaaaaaaccgcgacagaaacgtaccgcgactaaagcgtacaatgtaacacaggccttcggtcgtcgaggtccggagcaaactcaaggaaactttggcgatcaggaattaatccgccaggggaccgactacaaacactggccgcaaattgcccagttcgccccatccgctagtgcattcttcggtatgagccgcatcggcatggaagtaacgccaagtggtacgtggctgacctacaccggtgctatcaagcttgatgacaaggacccgaactttaaagaccaggttattctgcttaacaaacatattgatgcctataaaactttcccgccgaccgaacccaaaaaggacaaaaagaaaaaagctgatgaaacccaggctctaccgcagcgtcagaaaaaacagcaaactgtgactctgctgccagctgcggacctggatgatttttccaagcagctgcaacagtctatgagctctgcggactctacgcaggctggtggttctggtcaccatcatcaccatcattaa

SEQ ID NO: 2663 - DNA, 2421 bp, Artificial Sequence
  Description of Artificial Sequence: Synthetic polynucleotide
atgaaaatcgaagaaggtaaactggtaatctggattaacggcgataaaggctataacggtctcgctgaagtcggtaagaaattcgagaaagataccggaattaaagtcaccgttgagcatccggataaactggaagagaaattcccacaggttgcggcaactggcgatggccctgacattatcttctgggcacacgaccgctttggtggctacgctcaatctggcctgttggctgaaatcaccccggacaaagcgttccaggacaagctgtatccgtttacctgggatgccgtacgttacaacggcaagctgattgcttacccgatcgctgttgaagcgttatcgctgatttataacaaagatctgctgccgaacccgccaaaaacctgggaagagatcccggcgctggataaagaactgaaagcgaaaggtaagagcgcgctgatgttcaacctgcaagaaccgtacttcacctggccgctgattgctgctgacgggggttatgcgttcaagtatgaaaacggcaagtacgacattaaagacgtgggcgtggataacgctggcgcgaaagcgggtctgaccttcctggttgacctgattaaaaacaaacacatgaatgcagacaccgattactccatcgcagaagctgcctttaataaaggcgaaacagcgatgaccatcaacggcccgtgggcatggtccaacatcgacaccagcaaagtgaattatggtgtaacggtactgccgaccttcaagggtcaaccatccaaaccgttcgttggcgtgctgagcgcaggtattaacgccgccagtccgaacaaagagctggcgaaagagttcctcgaaaactatctgctgactgatgaaggtctggaagcggttaataaagacaaaccgctgggtgccgtagcgctgaagtcttacgaggaagagttggcgaaagatccacgtattgccgccaccatggaaaacgcccagaaaggtgaaatcatgccgaacatcccgcagatgtccgctttctggtatgccgtgcgtactgcggtgatcaacgccgccagcggtcgtcagactgtcgatgaagccctgaaagacgcgcagactggtggttctggtgagaacctgtactttcaaagctcagataatgggcctcaaaaccagcgcaacgctccacgtataaccttcggtggcccgtctgactccacaggcagcaaccagaatggtgagcgtagtggagccaggtctaagcagcgccgtccccagggtctgccgaacaacacggcgagctggtttactgcgcttacccaacacggtaaagaagacttaaaattcccgcgtggccagggcgtcccgatcaacactaactcttccccggatgatcagattggttattaccgcagagcaactcgtcggattcgcggcggcgacggtaaaatgaaagatttgtctccgcgttggtacttttactatctcggcaccggtccggaagctggactgccctacggggcaaacaaggacgggatcatttgggtggctaccgaaggtgccctgaatactccaaaagatcatatcggcacccgtaaccctgctaataacgctgcgatcgttctgcgactgcctcagggtacaactctgccaaaaggcttctatgcagaagggtcgcgtggtggcagccaggcgagtagccgtagcagctcccgctctcgcaactcgtcccgtaactccactccgggctcttctcgcggcacgtccccggctcgtatggcaggtaacggtggtgacgctgctctggcgctgctactgctggacaggctgaaccagctggagtcgaagatgagtggtaaaggccaacagcagcagggccagaccgttaccaaaaagagcgcagctgaagcatctaaaaaaccgcgacagaaacgtaccgcgactaaagcgtacaatgtaacacaggccttcggtcgtcgaggtccggagcaaactcaaggaaactttggcgatcaggaattaatccgccaggggaccgactacaaacactggccgcaaattgcccagttcgccccatccgctagtgcattcttcggtatgagccgcatcggcatggaagtaacgccaagtggtacgtggctgacctacaccggtgctatcaagcttgatgacaaggacccgaactttaaagaccaggttattctgcttaacaaacatattgatgcctataaaactttcccgccgaccgaacccaaaaaggacaaaaagaaaaaagctgatgaaacccaggctctaccgcagcgtcagaaaaaacagcaaactgtgactctgctgccagctgcggacctggatgatttttccaagcagctgcaacagtctatgagctctgcggactctacgcaggctggtggttctggtcaccatcatcaccatcattaa

SEQ ID NO: 2664 - DNA, 2421 bp, Artificial Sequence
  Description of Artificial Sequence: Synthetic polynucleotide
atgaaaatcgaagaaggtaaactggtaatctggattaacggcgataaaggctataacggtctcgctgaagtcggtaagaaattcgagaaagataccggaattaaagtcaccgttgagcatccggataaactggaagagaaattcccacaggttgcggcaactggcgatggccctgacattatcttctgggcacacgaccgctttggtggctacgctcaatctggcctgttggctgaaatcaccccggacaaagcgttccaggacaagctgtatccgtttacctgggatgccgtacgttacaacggcaagctgattgcttacccgatcgctgttgaagcgttatcgctgatttataacaaagatctgctgccgaacccgccaaaaacctgggaagagatcccggcgctggataaagaactgaaagcgaaaggtaagagcgcgctgatgttcaacctgcaagaaccgtacttcacctggccgctgattgctgctgacgggggttatgcgttcaagtatgaaaacggcaagtacgacattaaagacgtgggcgtggataacgctggcgcgaaagcgggtctgaccttcctggttgacctgattaaaaacaaacacatgaatgcagacaccgattactccatcgcagaagctgcctttaataaaggcgaaacagcgatgaccatcaacggcccgtgggcatggtccaacatcgacaccagcaaagtgaattatggtgtaacggtactgccgaccttcaagggtcaaccatccaaaccgttcgttggcgtgctgagcgcaggtattaacgccgccagtccgaacaaagagctggcgaaagagttcctcgaaaactatctgctgactgatgaaggtctggaagcggttaataaagacaaaccgctgggtgccgtagcgctgaagtcttacgaggaagagttggcgaaagatccacgtattgccgccaccatggaaaacgcccagaaaggtgaaatcatgccgaacatcccgcagatgtccgctttctggtatgccgtgcgtactgcggtgatcaacgccgccagcggtcgtcagactgtcgatgaagccctgaaagacgcgcagactggtggttctggtgagaacctgtactttcaaagctcagataatgggcctcaaaaccagcgcaacgctccacgtataaccttcggtggcccgtctgactccacaggcagcaaccagaatggtgagcgtagtggagccaggtctaagcagcgccgtccccagggtctgccgaacaacacggcgagctggtttactgcgcttacccaacacggtaaagaagacttaaaattcccgcgtggccagggcgtcccgatcaacactaactcttccccggatgatcagattggttattaccgcagagcaactcgtcggattcgcggcggcgacggtaaaatgaaagatttgtctccgcgttggtacttttactatctcggcaccggtccggaagctggactgccctacggggcaaacaaggacgggatcatttgggtggctaccccaggtgccctgaatactccaaaagatcatatcggcacccgtaaccctgctaataacgctgcgatcgttctgcaactgcctcagggtacaactctgccaaaaggcttctatgcagaagggtcgcgtggtggcagccaggcgagtagccgtagcagctcccgctctcgcaactcgtcccgtaactccactccgggctcttctcgcggcacgtccccggctcgtatggcaggtaacggtggtgacgctgctctggcgctgctactgctggacaggctgaaccagctggagtcgaagatgagtggtaaaggccaacagcagcagggccagaccgttaccaaaaagagcgcagctgaagcatctaaaaaaccgcgacagaaacgtaccgcgactaaagcgtacaatgtaacacaggccttcggtcgtcgaggtccggagcaaactcaaggaaactttggcgatcaggaattaatccgccaggggaccgactacaaacactggccgcaaattgcccagttcgccccatccgctagtgcattcttcggtatgagccgcatcggcatggaagtaacgccaagtggtacgtggctgacctacaccggtgctatcaagcttgatgacaaggacccgaactttaaagaccaggttattctgcttaacaaacatattgatgcctataaaactttcccgccgaccgaacccaaaaaggacaaaaagaaaaaagctgatgaaacccaggctctaccgcagcgtcagaaaaaacagcaaactgtgactctgctgccagctgcggacctggatgatttttccaagcagctgcaacagtctatgagctctgcggactctacgcaggctggtggttctggtcaccatcatcaccatcattaa

SEQ ID NO: 2665 - DNA, 2421 bp, Artificial Sequence
  Description of Artificial Sequence: Synthetic polynucleotide
atgaaaatcgaagaaggtaaactggtaatctggattaacggcgataaaggctataacggtctcgctgaagtcggtaagaaattcgagaaagataccggaattaaagtcaccgttgagcatccggataaactggaagagaaattcccacaggttgcggcaactggcgatggccctgacattatcttctgggcacacgaccgctttggtggctacgctcaatctggcctgttggctgaaatcaccccggacaaagcgttccaggacaagctgtatccgtttacctgggatgccgtacgttacaacggcaagctgattgcttacccgatcgctgttgaagcgttatcgctgatttataacaaagatctgctgccgaacccgccaaaaacctgggaagagatcccggcgctggataaagaactgaaagcgaaaggtaagagcgcgctgatgttcaacctgcaagaaccgtacttcacctggccgctgattgctgctgacgggggttatgcgttcaagtatgaaaacggcaagtacgacattaaagacgtgggcgtggataacgctggcgcgaaagcgggtctgaccttcctggttgacctgattaaaaacaaacacatgaatgcagacaccgattactccatcgcagaagctgcctttaataaaggcgaaacagcgatgaccatcaacggcccgtgggcatggtccaacatcgacaccagcaaagtgaattatggtgtaacggtactgccgaccttcaagggtcaaccatccaaaccgttcgttggcgtgctgagcgcaggtattaacgccgccagtccgaacaaagagctggcgaaagagttcctcgaaaactatctgctgactgatgaaggtctggaagcggttaataaagacaaaccgctgggtgccgtagcgctgaagtcttacgaggaagagttggcgaaagatccacgtattgccgccaccatggaaaacgcccagaaaggtgaaatcatgccgaacatcccgcagatgtccgctttctggtatgccgtgcgtactgcggtgatcaacgccgccagcggtcgtcagactgtcgatgaagccctgaaagacgcgcagactggtggttctggtgagaacctgtactttcaaagctcagataatgggcctcaaaaccagcgcaacgctccacgtataaccttcggtggcccgtctgactccacaggcagcaaccagaatggtgagcgtagtggagccaggtctaagcagcgccgtccccagggtctgccgaacaacacggcgagctggtttactgcgcttacccaacacggtaaagaagacttaaaattcccgcgtggccagggcgtcccgatcaacactaactcttccccggatgatcagattggttattaccgcagagcaactcgtcggattcgcggcggcgacggtaaaatgaaagatttgtctccgcgttggtacttttactatctcggcaccggtccggaagctggactgccctacggggcaaacaaggacgggatcatttgggtggctaccgaaggtgccctgaatactccaaaagatcatatcggcacccgtaaccctgctaataacgctgcgatcgttctgcaactgcctcagggtacaactctgccaaaaggcttctatgcagaagggtcgcgtggtggcagccaggcgagtagccgtagcagctcccgctctcgcaactcgtcccgtaactccactccgggctcttctcgcggcacgtccccggctcgtatggcaggtaacggtggtgacgctgctctggcgctgctactgctggacaggctgaaccagctggagtcgaagatgagtggtaaaggccaacagcagcagggccagaccgttaccaaaaagagcgcagctgaagcatctaaaaaaccgcgacagaaacgtaccgcgactaaagcgtacaatgtaacacaggccttcggtcgtcgaggtccggagcaaactcaaggaaactttggcgatcaggaattaatccgccaggggaccgactacaaacactggccgcaaattgcccagttcgccccatccgctagtgcattcttcggtatgagccgcatcggcatgacggtaacgccaagtggtacgtggctgacctacaccggtgctatcaagcttgatgacaaggacccgaactttaaagaccaggttattctgcttaacaaacatattgatgcctataaaactttcccgccgaccgaacccaaaaaggacaaaaagaaaaaagctgatgaaacccaggctctaccgcagcgtcagaaaaaacagcaaactgtgactctgctgccagctgcggacctggatgatttttccaagcagctgcaacagtctatgagctctgcggactctacgcaggctggtggttctggtcaccatcatcaccatcattaa

SEQ ID NO: 2666 - DNA, 2421 bp, Artificial Sequence
  Description of Artificial Sequence: Synthetic polynucleotide
atgaaaatcgaagaaggtaaactggtaatctggattaacggcgataaaggctataacggtctcgctgaagtcggtaagaaattcgagaaagataccggaattaaagtcaccgttgagcatccggataaactggaagagaaattcccacaggttgcggcaactggcgatggccctgacattatcttctgggcacacgaccgctttggtggctacgctcaatctggcctgttggctgaaatcaccccggacaaagcgttccaggacaagctgtatccgtttacctgggatgccgtacgttacaacggcaagctgattgcttacccgatcgctgttgaagcgttatcgctgatttataacaaagatctgctgccgaacccgccaaaaacctgggaagagatcccggcgctggataaagaactgaaagcgaaaggtaagagcgcgctgatgttcaacctgcaagaaccgtacttcacctggccgctgattgctgctgacgggggttatgcgttcaagtatgaaaacggcaagtacgacattaaagacgtgggcgtggataacgctggcgcgaaagcgggtctgaccttcctggttgacctgattaaaaacaaacacatgaatgcagacaccgattactccatcgcagaagctgcctttaataaaggcgaaacagcgatgaccatcaacggcccgtgggcatggtccaacatcgacaccagcaaagtgaattatggtgtaacggtactgccgaccttcaagggtcaaccatccaaaccgttcgttggcgtgctgagcgcaggtattaacgccgccagtccgaacaaagagctggcgaaagagttcctcgaaaactatctgctgactgatgaaggtctggaagcggttaataaagacaaaccgctgggtgccgtagcgctgaagtcttacgaggaagagttggcgaaagatccacgtattgccgccaccatggaaaacgcccagaaaggtgaaatcatgccgaacatcccgcagatgtccgctttctggtatgccgtgcgtactgcggtgatcaacgccgccagcggtcgtcagactgtcgatgaagccctgaaagacgcgcagactggtggttctggtgagaacctgtactttcaaagctcagataatgggcctcaaaaccagcgcaacgctccacgtataaccttcggtggcccgtctgactccacaggcagcaaccagaatggtgagcgtagtggagccaggtctaagcagcgccgtccccagggtctgccgaacaacacggcgagctggtttactgcgcttacccaacacggtaaagaagacttaaaattcccgcgtggccagggcgtcccgatcaacactaactcttccccggatgatcagattggttattaccgcagagcaactcgtcggattcgcggcggcgacggtaaaatgaaagatttgtctccgcgttggtacttttactatctcggcaccggtccggaagctggactgccctacggggcaaacaaggacgggatcatttgggtggctaccgaaggtgccctgaatactccaaaagatcatatcggcacccgtaaccctgctaataacgctgcgatcgttctgcaactgcctcagggtacaactctgccaaaaggcttctatgcagaagggtcgcgtggtggcagccaggcgagtagccgtagcagctcccgctctcgcaactcgtcccgtaactccactccgggctcttctcgcggcacgtccccggctcgtatggcaggtaacggtggtgacgctgctctggcgctgctactgctggacaggctgaaccagctggagtcgaagatgagtggtaaaggccaacagcagcagggccagaccgttaccaaaaagagcgcagctgaaatgtctaaaaaaccgcgatggaaacgtaccccgactaaagagtacaatgtaacacaggccttcggtcctcgaggtccgaaagatactcaaggaaactttggcgatgccgaattaatcaagcaggggaccgactacaaacactggccgcaaattgcccagttcgtgccatccgctgcggcattcttctttatgagccgcatctcgatgaaagaaacgccagatggtgtgtggctgacctacaccggtacgatcaagcttgataaagatgacccgaactttgatgaccaggttaaactgcttaacaaacatattgatgcctataaaactttcccgccgaccgaacccaaaaaggacaaaaagaaaaaagctgatgaaacccaggctctaccgcagcgtcagaaaaaacagcaaactgtgactctgctgccagctgcggacctggatgatttttccaagcagctgcaacagtctatgagctctgcggactctacgcaggctggtggttctggtcaccatcatcaccatcattaa

SEQ ID NO: 2667 - DNA, 2421 bp, Artificial Sequence
  Description of Artificial Sequence: Synthetic polynucleotide
atgaaaatcgaagaaggtaaactggtaatctggattaacggcgataaaggctataacggtctcgctgaagtcggtaagaaattcgagaaagataccggaattaaagtcaccgttgagcatccggataaactggaagagaaattcccacaggttgcggcaactggcgatggccctgacattatcttctgggcacacgaccgctttggtggctacgctcaatctggcctgttggctgaaatcaccccggacaaagcgttccaggacaagctgtatccgtttacctgggatgccgtacgttacaacggcaagctgattgcttacccgatcgctgttgaagcgttatcgctgatttataacaaagatctgctgccgaacccgccaaaaacctgggaagagatcccggcgctggataaagaactgaaagcgaaaggtaagagcgcgctgatgttcaacctgcaagaaccgtacttcacctggccgctgattgctgctgacgggggttatgcgttcaagtatgaaaacggcaagtacgacattaaagacgtgggcgtggataacgctggcgcgaaagcgggtctgaccttcctggttgacctgattaaaaacaaacacatgaatgcagacaccgattactccatcgcagaagctgcctttaataaaggcgaaacagcgatgaccatcaacggcccgtgggcatggtccaacatcgacaccagcaaagtgaattatggtgtaacggtactgccgaccttcaagggtcaaccatccaaaccgttcgttggcgtgctgagcgcaggtattaacgccgccagtccgaacaaagagctggcgaaagagttcctcgaaaactatctgctgactgatgaaggtctggaagcggttaataaagacaaaccgctgggtgccgtagcgctgaagtcttacgaggaagagttggcgaaagatccacgtattgccgccaccatggaaaacgcccagaaaggtgaaatcatgccgaacatcccgcagatgtccgctttctggtatgccgtgcgtactgcggtgatcaacgccgccagcggtcgtcagactgtcgatgaagccctgaaagacgcgcagactggtggttctggtgagaacctgtactttcaaagctcagataatgggcctcaaaaccagcgcaacgctccacgtataaccttcggtggcccgtctgactccacaggcagcaaccagaatggtgagcgtagtggagccaggtctaagcagcgccgtccccagggtctgccgaacaacacggcgagctggtttactgcgcttacccaacacggtaaagaagacttaaaattcccgcgtggccagggcgtcccgatcaacactaactcttccccggatgatcagattggttattaccgcagagcaactcgtcggattcgcggcggcgacggtaaaatgaaagatttgtctccgcgttggtacttttactatctcggcaccggtccggaagctggactgccctacggggcaaacaaggacgggatcatttgggtggctaccgaaggtgccctgaatactccaaaagatcatatcggcacccgtaaccctgctaataacgatgcgatcgttctgcaactgcctcagggtacaactctgccaaaaggcttctatgcagaagggtcgcgtggtggcagccaggcgagtagccgtagcagctcccgctctcgcaactcgtcccgtaactccactccgggctcttctcgcggcacgtccccggctcgtatggcaggtaacggtggtgacgctgctctggcgctgctactgctggacaggctgaaccagctggagtcgaagatgagtggtaaaggccaacagcagcagggccagaccgttaccaaaaagagcgcagctgaagcatctaaaaaaccgcgacagaaacgtaccgcgactaaagcgtacaatgtaacacaggccttcggtcgtcgaggtccggagcaaactcaaggaaactttggcgatcaggaattaatccgccaggggaccgactacaaacactggccgcaaattgcccagttcgccccatccgctagtgcattcttcggtatgagccgcatcggcatggaagtaacgccaagtggtacgtggctgacctacaccggtgctatcaagcttgatgacaaggacccgaactttaaagaccaggttattctgcttaacaaacatattgatgcctataaaactttcccgccgaccgaacccaaaaaggacaaaaagaaaaaagctgatgaaacccaggctctaccgcagcgtcagaaaaaacagcaaactgtgactctgctgccagctgcggacctggatgatttttccaagcagctgcaacagtctatgagctctgcggactctacgcaggctggtggttctggtcaccatcatcaccatcattaa

SEQ ID NO: 2668 - DNA, 2421 bp, Artificial Sequence
  Description of Artificial Sequence: Synthetic polynucleotide
atgaaaatcgaagaaggtaaactggtaatctggattaacggcgataaaggctataacggtctcgctgaagtcggtaagaaattcgagaaagataccggaattaaagtcaccgttgagcatccggataaactggaagagaaattcccacaggttgcggcaactggcgatggccctgacattatcttctgggcacacgaccgctttggtggctacgctcaatctggcctgttggctgaaatcaccccggacaaagcgttccaggacaagctgtatccgtttacctgggatgccgtacgttacaacggcaagctgattgcttacccgatcgctgttgaagcgttatcgctgatttataacaaagatctgctgccgaacccgccaaaaacctgggaagagatcccggcgctggataaagaactgaaagcgaaaggtaagagcgcgctgatgttcaacctgcaagaaccgtacttcacctggccgctgattgctgctgacgggggttatgcgttcaagtatgaaaacggcaagtacgacattaaagacgtgggcgtggataacgctggcgcgaaagcgggtctgaccttcctggttgacctgattaaaaacaaacacatgaatgcagacaccgattactccatcgcagaagctgcctttaataaaggcgaaacagcgatgaccatcaacggcccgtgggcatggtccaacatcgacaccagcaaagtgaattatggtgtaacggtactgccgaccttcaagggtcaaccatccaaaccgttcgttggcgtgctgagcgcaggtattaacgccgccagtccgaacaaagagctggcgaaagagttcctcgaaaactatctgctgactgatgaaggtctggaagcggttaataaagacaaaccgctgggtgccgtagcgctgaagtcttacgaggaagagttggcgaaagatccacgtattgccgccaccatggaaaacgcccagaaaggtgaaatcatgccgaacatcccgcagatgtccgctttctggtatgccgtgcgtactgcggtgatcaacgccgccagcggtcgtcagactgtcgatgaagccctgaaagacgcgcagactggtggttctggtgagaacctgtactttcaaagctcagataatgggcctcaaaaccagcgcaacgctccacgtataaccttcggtggcccgtctgactccacaggcagcaaccagaatggtgagcgtagtggagccaggtctaagcagcgccgtccccagggtctgccgaacaacacggcgagctggtttactgcgcttacccaacacggtaaagaagacttaaaattcccgcgtggccagggcgtcccgatcaacactaactcttccccggatgatcagattggttattaccgcagaagcactcgtcggattcgcggcggcgacggtaaaatgaaagatttgtctccgcgttggtacttttactatctcggcaccggtccggaagctggactgccctacggggcaaacaaggacgggatcatttgggtggctaccgaaggtgccctgaatactccaaaagatcatatcggcacccgtaaccctgctaataacgctgcgatcgttctgcaactgcctcagggtacaactctgccaaaaggcttctatgcagaagggtcgcgtggtggcagccaggcgagtagccgtagcagctcccgctctcgcaactcgtcccgtaactccactccgggctcttctcgcggcacgtccccggctcgtatggcaggtaacggtggtgacgctgctctggcgctgctactgctggacaggctgaaccagctggagtcgaagatgagtggtaaaggccaacagcagcagggccagaccgttaccaaaaagagcgcagctgaagcatctaaaaaaccgcgacagaaacgtaccgcgactaaagcgtacaatgtaacacaggccttcggtcgtcgaggtccggagcaaactcaaggaaactttggcgatcaggaattaatccgccaggggaccgactacaaacactggccgcaaattgcccagttcgccccatccgctagtgcattcttcggtatgagccgcatcggcatggaagtaacgccaagtggtacgtggctgacctacaccggtgctatcaagcttgatgacaaggacccgaactttaaagaccaggttattctgcttaacaaacatattgatgcctataaaactttcccgccgaccgaacccaaaaaggacaaaaagaaaaaagctgatgaaacccaggctctaccgcagcgtcagaaaaaacagcaaactgtgactctgctgccagctgcggacctggatgatttttccaagcagctgcaacagtctatgagctctgcggactctacgcaggctggtggttctggtcaccatcatcaccatcattaa

SEQ ID NO: 2669 - DNA, 2421 bp, Artificial Sequence
  Description of Artificial Sequence: Synthetic polynucleotide
atgaaaatcgaagaaggtaaactggtaatctggattaacggcgataaaggctataacggtctcgctgaagtcggtaagaaattcgagaaagataccggaattaaagtcaccgttgagcatccggataaactggaagagaaattcccacaggttgcggcaactggcgatggccctgacattatcttctgggcacacgaccgctttggtggctacgctcaatctggcctgttggctgaaatcaccccggacaaagcgttccaggacaagctgtatccgtttacctgggatgccgtacgttacaacggcaagctgattgcttacccgatcgctgttgaagcgttatcgctgatttataacaaagatctgctgccgaacccgccaaaaacctgggaagagatcccggcgctggataaagaactgaaagcgaaaggtaagagcgcgctgatgttcaacctgcaagaaccgtacttcacctggccgctgattgctgctgacgggggttatgcgttcaagtatgaaaacggcaagtacgacattaaagacgtgggcgtggataacgctggcgcgaaagcgggtctgaccttcctggttgacctgattaaaaacaaacacatgaatgcagacaccgattactccatcgcagaagctgcctttaataaaggcgaaacagcgatgaccatcaacggcccgtgggcatggtccaacatcgacaccagcaaagtgaattatggtgtaacggtactgccgaccttcaagggtcaaccatccaaaccgttcgttggcgtgctgagcgcaggtattaacgccgccagtccgaacaaagagctggcgaaagagttcctcgaaaactatctgctgactgatgaaggtctggaagcggttaataaagacaaaccgctgggtgccgtagcgctgaagtcttacgaggaagagttggcgaaagatccacgtattgccgccaccatggaaaacgcccagaaaggtgaaatcatgccgaacatcccgcagatgtccgctttctggtatgccgtgcgtactgcggtgatcaacgccgccagcggtcgtcagactgtcgatgaagccctgaaagacgcgcagactggtggttctggtgagaacctgtactttcaaagctcagataatgggcctcaaaaccagcgcaacgctccacgtataaccttcggtggcccgtctgactccacaggcagcaaccagaatggtgagcgtagtggagccaggtctaagcagcgccgtccccagggtctgccgaacaacacggcgagctggtttactggccttacccaatttggtaaagaagacttaaaattcccgccgggccagggcgtcccgatcaacactaactcttccccggatgatcagattggttattaccgcagagcaactcgtcggattcgcggcggcgacggtaaaatgaaagatttgccaccgaagtggtacttttactatctcggcaccggtccgcacgctgatctgccctacgggcaaaaacaagacggggtattttgggtggctcgacctggtgccctgaatactccaaaagatcatatcggcacccgtaaccctgctaataacgctgcgatccccctgcaactgcctccgggtacaaagctgccaaaaggcttctatgcagaagggtcgcgtggtggcagccaggcgagtagccgtagcagctcccgctctcgcaactcgtcccgtaactccactccgggctcttctcgcggcacgtccccggctcgtatggcaggtaacggtggtgacgctgctctggcgctgctactgctggacaggctgaaccagctggagtcgaagatgagtggtaaaggccaacagcagcagggccagaccgttaccaaaaagagcgcagctgaagcatctaaaaaaccgcgacagaaacgtaccgcgactaaagcgtacaatgtaacacaggccttcggtcgtcgaggtccggagcaaactcaaggaaactttggcgatcaggaattaatccgccaggggaccgactacaaacactggccgcaaattgcccagttcgccccatccgctagtgcattcttcggtatgagccgcatcggcatggaagtaacgccaagtggtacgtggctgacctacaccggtgctatcaagcttgatgacaaggacccgaactttaaagaccaggttattctgcttaacaaacatattgatgcctataaaactttcccgccgaccgaacccaaaaaggacaaaaagaaaaaagctgatgaaacccaggctctaccgcagcgtcagaaaaaacagcaaactgtgactctgctgccagctgcggacctggatgatttttccaagcagctgcaacagtctatgagctctgcggactctacgcaggctggtggttctggtcaccatcatcaccatcattaa

SEQ ID NO: 2670 - DNA, 2421 bp, Artificial Sequence
  Description of Artificial Sequence: Synthetic polynucleotide
atgaaaatcgaagaaggtaaactggtaatctggattaacggcgataaaggctataacggtctcgctgaagtcggtaagaaattcgagaaagataccggaattaaagtcaccgttgagcatccggataaactggaagagaaattcccacaggttgcggcaactggcgatggccctgacattatcttctgggcacacgaccgctttggtggctacgctcaatctggcctgttggctgaaatcaccccggacaaagcgttccaggacaagctgtatccgtttacctgggatgccgtacgttacaacggcaagctgattgcttacccgatcgctgttgaagcgttatcgctgatttataacaaagatctgctgccgaacccgccaaaaacctgggaagagatcccggcgctggataaagaactgaaagcgaaaggtaagagcgcgctgatgttcaacctgcaagaaccgtacttcacctggccgctgattgctgctgacgggggttatgcgttcaagtatgaaaacggcaagtacgacattaaagacgtgggcgtggataacgctggcgcgaaagcgggtctgaccttcctggttgacctgattaaaaacaaacacatgaatgcagacaccgattactccatcgcagaagctgcctttaataaaggcgaaacagcgatgaccatcaacggcccgtgggcatggtccaacatcgacaccagcaaagtgaattatggtgtaacggtactgccgaccttcaagggtcaaccatccaaaccgttcgttggcgtgctgagcgcaggtattaacgccgccagtccgaacaaagagctggcgaaagagttcctcgaaaactatctgctgactgatgaaggtctggaagcggttaataaagacaaaccgctgggtgccgtagcgctgaagtcttacgaggaagagttggcgaaagatccacgtattgccgccaccatggaaaacgcccagaaaggtgaaatcatgccgaacatcccgcagatgtccgctttctggtatgccgtgcgtactgcggtgatcaacgccgccagcggtcgtcagactgtcgatgaagccctgaaagacgcgcagactggtggttctggtgagaacctgtactttcaaagctcagataatgggcctcaaaaccagcgcaacgctccacgtataaccttcggtggcccgtctgactccacaggcagcaaccagaatggtgagcgtagtggagccaggtctaagcagcgccgtccccagggtctgccgaacaacacggcgagctggtttactgcgcttacccaacacggtaaagaagacttaaaattcccgcgtggccagggcgtcccgatcaacactaactcttccccggatgatcagattggttattaccgcagagcaactcgtcggattcgcggcggcgacggtaaaatgaaagatttgctcccgcgttggtacttttactatctcggcaccggtccggaagctggactgccctacggggcaaacaaggacgggatcatttgggtggctaccgaaggtgccctgaatactccaaaagatcatatcggcacccgtaaccctgctaataacgctgcgatcgttctgcaactgcctcagggtacaactctgccaaaaggcttctatgcagaagggtcgcgtggtggcagccaggcgagtagccgtagcagctcccgctctcgcaactcgtcccgtaactccactccgggctcttctcgcggcacgtccccggctcgtatggcaggtaacggtggtgacgctgctctggcgctgctactgctggacaggctgaaccagctggagtcgaagatgagtggtaaaggccaacagcagcagggccagaccgttaccaaaaagagcgcagctgaagcatctaaaaaaccgcgacagaaacgtaccgcgactaaagcgtacaatgtaacacaggccttcggtcgtcgaggtccggagcaaactcaaggaaactttggcgatcaggaattaatccgccaggggaccgactacaaacactggccgcaaattgcccagttcgccccatccgctagtgcattcttcggtatgagccgcatcggcatggaagtaacgccaagtggtacgtggctgacctacaccggtgctatcaagcttgatgacaaggacccgaactttaaagaccaggttattctgcttaacaaacatattgatgcctataaaactttcccgccgaccgaacccaaaaaggacaaaaagaaaaaagctgatgaaacccaggctctaccgcagcgtcagaaaaaacagcaaactgtgactctgctgccagctgcggacctggatgatttttccaagcagctgcaacagtctatgagctctgcggactctacgcaggctggtggttctggtcaccatcatcaccatcattaa

SEQ ID NO: 2671 - DNA, 2421 bp, Artificial Sequence
  Description of Artificial Sequence: Synthetic polynucleotide
atgaaaatcgaagaaggtaaactggtaatctggattaacggcgataaaggctataacggtctcgctgaagtcggtaagaaattcgagaaagataccggaattaaagtcaccgttgagcatccggataaactggaagagaaattcccacaggttgcggcaactggcgatggccctgacattatcttctgggcacacgaccgctttggtggctacgctcaatctggcctgttggctgaaatcaccccggacaaagcgttccaggacaagctgtatccgtttacctgggatgccgtacgttacaacggcaagctgattgcttacccgatcgctgttgaagcgttatcgctgatttataacaaagatctgctgccgaacccgccaaaaacctgggaagagatcccggcgctggataaagaactgaaagcgaaaggtaagagcgcgctgatgttcaacctgcaagaaccgtacttcacctggccgctgattgctgctgacgggggttatgcgttcaagtatgaaaacggcaagtacgacattaaagacgtgggcgtggataacgctggcgcgaaagcgggtctgaccttcctggttgacctgattaaaaacaaacacatgaatgcagacaccgattactccatcgcagaagctgcctttaataaaggcgaaacagcgatgaccatcaacggcccgtgggcatggtccaacatcgacaccagcaaagtgaattatggtgtaacggtactgccgaccttcaagggtcaaccatccaaaccgttcgttggcgtgctgagcgcaggtattaacgccgccagtccgaacaaagagctggcgaaagagttcctcgaaaactatctgctgactgatgaaggtctggaagcggttaataaagacaaaccgctgggtgccgtagcgctgaagtcttacgaggaagagttggcgaaagatccacgtattgccgccaccatggaaaacgcccagaaaggtgaaatcatgccgaacatcccgcagatgtccgctttctggtatgccgtgcgtactgcggtgatcaacgccgccagcggtcgtcagactgtcgatgaagccctgaaagacgcgcagactggtggttctggtgagaacctgtactttcaaagctcagataatgggcctcaaaaccagcgcaacgctccacgtataaccttcggtggcccgtctgactccacaggcagcaaccagaatggtgagcgtagtggagccaggtctaagcagcgccgtccccagggtctgccgaacaacacggcgagctggtttactgcgcttacccaacacggtaaagaagacttaaaattcccgcgtggccagggcgtcccgatcaacactaactcttccccggatgatcagattggttattaccgcagagcaactcgtcggattcgcggcggcgacggtaaaatgaaagatttgtctccgcgttggtacttttactatctcggcaccggtccggaagctggactgccctacggggcaaacaaggacgggatcatttgggtggctaccgaaggtgccctgaatactccaaaagatcatatcggctcgcgtaaccctgctaataacgctgcgatcgttctgcaactgcctcagggtacaactctgccaaaaggcttctatgcagaagggtcgcgtggtggcagccaggcgagtagccgtagcagctcccgctctcgcaactcgtcccgtaactccactccgggctcttctcgcggcacgtccccggctcgtatggcaggtaacggtggtgacgctgctctggcgctgctactgctggacaggctgaaccagctggagtcgaagatgagtggtaaaggccaacagcagcagggccagaccgttaccaaaaagagcgcagctgaagcatctaaaaaaccgcgacagaaacgtaccgcgactaaagcgtacaatgtaacacaggccttcggtcgtcgaggtccggagcaaactcaaggaaactttggcgatcaggaattaatccgccaggggaccgactacaaacactggccgcaaattgcccagttcgccccatccgctagtgcattcttcggtatgagccgcatcggcatggaagtaacgccaagtggtacgtggctgacctacaccggtgctatcaagcttgatgacaaggacccgaactttaaagaccaggttattctgcttaacaaacatattgatgcctataaaactttcccgccgaccgaacccaaaaaggacaaaaagaaaaaagctgatgaaacccaggctctaccgcagcgtcagaaaaaacagcaaactgtgactctgctgccagctgcggacctggatgatttttccaagcagctgcaacagtctatgagctctgcggactctacgcaggctggtggttctggtcaccatcatcaccatcattaa

SEQ ID NO: 2672 - DNA, 2421 bp, Artificial Sequence
  Description of Artificial Sequence: Synthetic polynucleotide
atgaaaatcgaagaaggtaaactggtaatctggattaacggcgataaaggctataacggtctcgctgaagtcggtaagaaattcgagaaagataccggaattaaagtcaccgttgagcatccggataaactggaagagaaattcccacaggttgcggcaactggcgatggccctgacattatcttctgggcacacgaccgctttggtggctacgctcaatctggcctgttggctgaaatcaccccggacaaagcgttccaggacaagctgtatccgtttacctgggatgccgtacgttacaacggcaagctgattgcttacccgatcgctgttgaagcgttatcgctgatttataacaaagatctgctgccgaacccgccaaaaacctgggaagagatcccggcgctggataaagaactgaaagcgaaaggtaagagcgcgctgatgttcaacctgcaagaaccgtacttcacctggccgctgattgctgctgacgggggttatgcgttcaagtatgaaaacggcaagtacgacattaaagacgtgggcgtggataacgctggcgcgaaagcgggtctgaccttcctggttgacctgattaaaaacaaacacatgaatgcagacaccgattactccatcgcagaagctgcctttaataaaggcgaaacagcgatgaccatcaacggcccgtgggcatggtccaacatcgacaccagcaaagtgaattatggtgtaacggtactgccgaccttcaagggtcaaccatccaaaccgttcgttggcgtgctgagcgcaggtattaacgccgccagtccgaacaaagagctggcgaaagagttcctcgaaaactatctgctgactgatgaaggtctggaagcggttaataaagacaaaccgctgggtgccgtagcgctgaagtcttacgaggaagagttggcgaaagatccacgtattgccgccaccatggaaaacgcccagaaaggtgaaatcatgccgaacatcccgcagatgtccgctttctggtatgccgtgcgtactgcggtgatcaacgccgccagcggtcgtcagactgtcgatgaagccctgaaagacgcgcagactggtggttctggtgagaacctgtactttcaaagctcagataatgggcctcaaaaccagcgcaacgctccacgtataaccttcggtggcccgtctgactccacaggcagcaaccagaatggtgagcgtagtggagccaggtctaagcagcgccgtccccagggtctgccgaacaacacggcgagctggtttactgcgcttacccaacacggtaaagaagacttaaaattcccgcgtggccagggcgtcccgatcaacactaactcttccccggatgatcagattggttattaccgcagagcaactcgtcggattcgcggcggcgacggtaaaatgaaagatttgtctccgcgttggtacttttactatctcggcaccggtccggaagctggactgccctacggggcaaacaaggacgggatcatttgggtggctaccgaaggtgccctgaatactccaaaagatcatatcggcacccgtaaccctgctaataaccaagcgatcgttctgcaactgcctcagggtacaactctgccaaaaggcttctatgcagaagggtcgcgtggtggcagccaggcgagtagccgtagcagctcccgctctcgcaactcgtcccgtaactccactccgggctcttctcgcggcacgtccccggctcgtatggcaggtaacggtggtgacgctgctctggcgctgctactgctggacaggctgaaccagctggagtcgaagatgagtggtaaaggccaacagcagcagggccagaccgttaccaaaaagagcgcagctgaagcatctaaaaaaccgcgacagaaacgtaccgcgactaaagcgtacaatgtaacacaggccttcggtcgtcgaggtccggagcaaactcaaggaaactttggcgatcaggaattaatccgccaggggaccgactacaaacactggccgcaaattgcccagttcgccccatccgctagtgcattcttcggtatgagccgcatcggcatggaagtaacgccaagtggtacgtggctgacctacaccggtgctatcaagcttgatgacaaggacccgaactttaaagaccaggttattctgcttaacaaacatattgatgcctataaaactttcccgccgaccgaacccaaaaaggacaaaaagaaaaaagctgatgaaacccaggctctaccgcagcgtcagaaaaaacagcaaactgtgactctgctgccagctgcggacctggatgatttttccaagcagctgcaacagtctatgagctctgcggactctacgcaggctggtggttctggtcaccatcatcaccatcattaa

SEQ ID NO: 2673 - DNA, 2421 bp, Artificial Sequence
  Description of Artificial Sequence: Synthetic polynucleotide
atgaaaatcgaagaaggtaaactggtaatctggattaacggcgataaaggctataacggtctcgctgaagtcggtaagaaattcgagaaagataccggaattaaagtcaccgttgagcatccggataaactggaagagaaattcccacaggttgcggcaactggcgatggccctgacattatcttctgggcacacgaccgctttggtggctacgctcaatctggcctgttggctgaaatcaccccggacaaagcgttccaggacaagctgtatccgtttacctgggatgccgtacgttacaacggcaagctgattgcttacccgatcgctgttgaagcgttatcgctgatttataacaaagatctgctgccgaacccgccaaaaacctgggaagagatcccggcgctggataaagaactgaaagcgaaaggtaagagcgcgctgatgttcaacctgcaagaaccgtacttcacctggccgctgattgctgctgacgggggttatgcgttcaagtatgaaaacggcaagtacgacattaaagacgtgggcgtggataacgctggcgcgaaagcgggtctgaccttcctggttgacctgattaaaaacaaacacatgaatgcagacaccgattactccatcgcagaagctgcctttaataaaggcgaaacagcgatgaccatcaacggcccgtgggcatggtccaacatcgacaccagcaaagtgaattatggtgtaacggtactgccgaccttcaagggtcaaccatccaaaccgttcgttggcgtgctgagcgcaggtattaacgccgccagtccgaacaaagagctggcgaaagagttcctcgaaaactatctgctgactgatgaaggtctggaagcggttaataaagacaaaccgctgggtgccgtagcgctgaagtcttacgaggaagagttggcgaaagatccacgtattgccgccaccatggaaaacgcccagaaaggtgaaatcatgccgaacatcccgcagatgtccgctttctggtatgccgtgcgtactgcggtgatcaacgccgccagcggtcgtcagactgtcgatgaagccctgaaagacgcgcagactggtggttctggtgagaacctgtactttcaaagctcagataatgggcctcaaaaccagcgcaacgctccacgtataaccttcggtggcccgtctgactccacaggcagcaaccagaatggtgagcgtagtggagccaggtctaagcagcgccgtccccagggtctgccgaacaacacggcgagctggtttactgcgcttacccaacacggtaaagaagacttaaaattcccgcgtggccagggcgtcccgatcaacactaactcttccccggatgatcagattggttattaccgcagagcaactcgtcggattcgcggcggcgacggtaaaatgaaagatttgtctccgttttggtacttttactatctcggcaccggtccggaagctggactgccctacggggcaaacaaggacgggatcatttgggtggctaccgaaggtgccctgaatactccaaaagatcatatcggcacccgtaaccctgctaataacgctgcgatcgttctgcaactgcctcagggtacaactctgccaaaaggcttctatgcagaagggtcgcgtggtggcagccaggcgagtagccgtagcagctcccgctctcgcaactcgtcccgtaactccactccgggctcttctcgcggcacgtccccggctcgtatggcaggtaacggtggtgacgctgctctggcgctgctactgctggacaggctgaaccagctggagtcgaagatgagtggtaaaggccaacagcagcagggccagaccgttaccaaaaagagcgcagctgaagcatctaaaaaaccgcgacagaaacgtaccgcgactaaagcgtacaatgtaacacaggccttcggtcgtcgaggtccggagcaaactcaaggaaactttggcgatcaggaattaatccgccaggggaccgactacaaacactggccgcaaattgcccagttcgccccatccgctagtgcattcttcggtatgagccgcatcggcatggaagtaacgccaagtggtacgtggctgacctacaccggtgctatcaagcttgatgacaaggacccgaactttaaagaccaggttattctgcttaacaaacatattgatgcctataaaactttcccgccgaccgaacccaaaaaggacaaaaagaaaaaagctgatgaaacccaggctctaccgcagcgtcagaaaaaacagcaaactgtgactctgctgccagctgcggacctggatgatttttccaagcagctgcaacagtctatgagctctgcggactctacgcaggctggtggttctggtcaccatcatcaccatcattaa

SEQ ID NO: 2674 - DNA, 2421 bp, Artificial Sequence
  Description of Artificial Sequence: Synthetic polynucleotide
atgaaaatcgaagaaggtaaactggtaatctggattaacggcgataaaggctataacggtctcgctgaagtcggtaagaaattcgagaaagataccggaattaaagtcaccgttgagcatccggataaactggaagagaaattcccacaggttgcggcaactggcgatggccctgacattatcttctgggcacacgaccgctttggtggctacgctcaatctggcctgttggctgaaatcaccccggacaaagcgttccaggacaagctgtatccgtttacctgggatgccgtacgttacaacggcaagctgattgcttacccgatcgctgttgaagcgttatcgctgatttataacaaagatctgctgccgaacccgccaaaaacctgggaagagatcccggcgctggataaagaactgaaagcgaaaggtaagagcgcgctgatgttcaacctgcaagaaccgtacttcacctggccgctgattgctgctgacgggggttatgcgttcaagtatgaaaacggcaagtacgacattaaagacgtgggcgtggataacgctggcgcgaaagcgggtctgaccttcctggttgacctgattaaaaacaaacacatgaatgcagacaccgattactccatcgcagaagctgcctttaataaaggcgaaacagcgatgaccatcaacggcccgtgggcatggtccaacatcgacaccagcaaagtgaattatggtgtaacggtactgccgaccttcaagggtcaaccatccaaaccgttcgttggcgtgctgagcgcaggtattaacgccgccagtccgaacaaagagctggcgaaagagttcctcgaaaactatctgctgactgatgaaggtctggaagcggttaataaagacaaaccgctgggtgccgtagcgctgaagtcttacgaggaagagttggcgaaagatccacgtattgccgccaccatggaaaacgcccagaaaggtgaaatcatgccgaacatcccgcagatgtccgctttctggtatgccgtgcgtactgcggtgatcaacgccgccagcggtcgtcagactgtcgatgaagccctgaaagacgcgcagactggtggttctggtgagaacctgtactttcaaagctcagataatgggcctcaaaaccagcgcaacgctccacgtataaccttcggtggcccgtctgactccacaggcagcaaccagaatggtgagcgtagtggagccaggtctaagcagcgccgtccccagggtctgccgaacaacacggcgagctggtttactgcgcttacccaacacggtaaagaagacttaaaattcccgcgtggccagggcgtcccgatcaacactaactcttccccggatgatcagattggttattaccgcagagcaactcgtcggattcgcggcggcgacggtaaaatgaaagatttgtctccgcgttggtacttttactatctcggcaccggtccggaagctggactgccctacggggcaaacaagcaagggatcatttgggtggctaccgaaggtgccctgaatactccaaaagatcatatcggcacccgtaaccctgctaataacgctgcgatcgttctgcaactgcctcagggtacaactctgccaaaaggcttctatgcagaagggtcgcgtggtggcagccaggcgagtagccgtagcagctcccgctctcgcaactcgtcccgtaactccactccgggctcttctcgcggcacgtccccggctcgtatggcaggtaacggtggtgacgctgctctggcgctgctactgctggacaggctgaaccagctggagtcgaagatgagtggtaaaggccaacagcagcagggccagaccgttaccaaaaagagcgcagctgaagcatctaaaaaaccgcgacagaaacgtaccgcgactaaagcgtacaatgtaacacaggccttcggtcgtcgaggtccggagcaaactcaaggaaactttggcgatcaggaattaatccgccaggggaccgactacaaacactggccgcaaattgcccagttcgccccatccgctagtgcattcttcggtatgagccgcatcggcatggaagtaacgccaagtggtacgtggctgacctacaccggtgctatcaagcttgatgacaaggacccgaactttaaagaccaggttattctgcttaacaaacatattgatgcctataaaactttcccgccgaccgaacccaaaaaggacaaaaagaaaaaagctgatgaaacccaggctctaccgcagcgtcagaaaaaacagcaaactgtgactctgctgccagctgcggacctggatgatttttccaagcagctgcaacagtctatgagctctgcggactctacgcaggctggtggttctggtcaccatcatcaccatcattaa

SEQ ID NO: 2675 - DNA, 2421 bp, Artificial Sequence
  Description of Artificial Sequence: Synthetic polynucleotide
atgaaaatcgaagaaggtaaactggtaatctggattaacggcgataaaggctataacggtctcgctgaagtcggtaagaaattcgagaaagataccggaattaaagtcaccgttgagcatccggataaactggaagagaaattcccacaggttgcggcaactggcgatggccctgacattatcttctgggcacacgaccgctttggtggctacgctcaatctggcctgttggctgaaatcaccccggacaaagcgttccaggacaagctgtatccgtttacctgggatgccgtacgttacaacggcaagctgattgcttacccgatcgctgttgaagcgttatcgctgatttataacaaagatctgctgccgaacccgccaaaaacctgggaagagatcccggcgctggataaagaactgaaagcgaaaggtaagagcgcgctgatgttcaacctgcaagaaccgtacttcacctggccgctgattgctgctgacgggggttatgcgttcaagtatgaaaacggcaagtacgacattaaagacgtgggcgtggataacgctggcgcgaaagcgggtctgaccttcctggttgacctgattaaaaacaaacacatgaatgcagacaccgattactccatcgcagaagctgcctttaataaaggcgaaacagcgatgaccatcaacggcccgtgggcatggtccaacatcgacaccagcaaagtgaattatggtgtaacggtactgccgaccttcaagggtcaaccatccaaaccgttcgttggcgtgctgagcgcaggtattaacgccgccagtccgaacaaagagctggcgaaagagttcctcgaaaactatctgctgactgatgaaggtctggaagcggttaataaagacaaaccgctgggtgccgtagcgctgaagtcttacgaggaagagttggcgaaagatccacgtattgccgccaccatggaaaacgcccagaaaggtgaaatcatgccgaacatcccgcagatgtccgctttctggtatgccgtgcgtactgcggtgatcaacgccgccagcggtcgtcagactgtcgatgaagccctgaaagacgcgcagactggtggttctggtgagaacctgtactttcaaagctcagataatgggcctcaaaaccagcgcaacgctccacgtataaccttcggtggcccgtctgactccacaggcagcaaccagaatggtgagcgtagtggagccaggtctaagcagcgccgtccccagggtctgccgaacaacacggcgagctggtttactgcgcttacccaacacggtaaagaagacttaaaattcccgcgtggccagggcgtcccgatcaacactaactcttccccggatgatcagattggttattaccgcagagcaactcgtcggattcgcggcggcgacggtaaaatgaaagatttgtctccgcgttggtacttttactatctcggcaccggtccggaagctggactgccctacggggcaaacaaggacgggatcatttgggtggctaccgaaggtgccctgaatactccaaaagatcatatcggcacccgtaaccctgctaataacgctgcgatcgttctgcaactgcctcagggtacaactctgccaaaaggcttctatgcagaagggtcgcgtggtggcagccaggcgagtagccgtagcagctcccgctctcgcaactcgtcccgtaactccactccgggctcttctcgcggcacgtccccggctcgtatggcaggtaacggtggtgacgctgctctggcgctgctactgctggacaggctgaaccagctggagtcgaagatgagtggtaaaggccaacagcagcagggccagaccgttaccaaaaagagcgcagctgaagcatctaaaaaaccgcgacagaaacgtaccgcgactaaagcgtacaatgtaacacaggccttcggtcgtcgaggtccggagcaaactcaaggaaactttggcgatcaggaattaatccgccaggggaccgactacaaacactggccgcaaattgcccagttcgccccatccgctagtgcattcttcggtatgagccgcatcggcatgcgggtaacgccaagtggtacgtggctgacctacaccggtgctatcaagcttgatgacaaggacccgaactttaaagaccaggttattctgcttaacaaacatattgatgcctataaaactttcccgccgaccgaacccaaaaaggacaaaaagaaaaaagctgatgaaacccaggctctaccgcagcgtcagaaaaaacagcaaactgtgactctgctgccagctgcggacctggatgatttttccaagcagctgcaacagtctatgagctctgcggactctacgcaggctggtggttctggtcaccatcatcaccatcattaa

SEQ ID NO: 2676 - DNA, 2421 bp, Artificial Sequence
  Description of Artificial Sequence: Synthetic polynucleotide
atgaaaatcgaagaaggtaaactggtaatctggattaacggcgataaaggctataacggtctcgctgaagtcggtaagaaattcgagaaagataccggaattaaagtcaccgttgagcatccggataaactggaagagaaattcccacaggttgcggcaactggcgatggccctgacattatcttctgggcacacgaccgctttggtggctacgctcaatctggcctgttggctgaaatcaccccggacaaagcgttccaggacaagctgtatccgtttacctgggatgccgtacgttacaacggcaagctgattgcttacccgatcgctgttgaagcgttatcgctgatttataacaaagatctgctgccgaacccgccaaaaacctgggaagagatcccggcgctggataaagaactgaaagcgaaaggtaagagcgcgctgatgttcaacctgcaagaaccgtacttcacctggccgctgattgctgctgacgggggttatgcgttcaagtatgaaaacggcaagtacgacattaaagacgtgggcgtggataacgctggcgcgaaagcgggtctgaccttcctggttgacctgattaaaaacaaacacatgaatgcagacaccgattactccatcgcagaagctgcctttaataaaggcgaaacagcgatgaccatcaacggcccgtgggcatggtccaacatcgacaccagcaaagtgaattatggtgtaacggtactgccgaccttcaagggtcaaccatccaaaccgttcgttggcgtgctgagcgcaggtattaacgccgccagtccgaacaaagagctggcgaaagagttcctcgaaaactatctgctgactgatgaaggtctggaagcggttaataaagacaaaccgctgggtgccgtagcgctgaagtcttacgaggaagagttggcgaaagatccacgtattgccgccaccatggaaaacgcccagaaaggtgaaatcatgccgaacatcccgcagatgtccgctttctggtatgccgtgcgtactgcggtgatcaacgccgccagcggtcgtcagactgtcgatgaagccctgaaagacgcgcagactggtggttctggtgagaacctgtactttcaaagctcagataatgggcctcaaaaccagcgcaacgctccacgtataaccttcggtggcccgtctgactccacaggcagcaaccagaatggtgagcgtagtggagccaggtctaagcagcgccgtccccagggtctgccgaacaacacggcgagctggtttactgcgcttacccaacacggtaaagaagacttaaaattcccgcgtggccagggcgtcccgatcaacactaactcttccccggatgatcagattggttattaccgcagagcaactcgtcggattcgcggcggcgacggtaaaatgaaagatttgtctccgcgttggtacttttactatctcggcaccggtccggaagctgccctgccctacggggcaaacaaggacgggatcatttgggtggctaccgaaggtgccctgaatactccaaaagatcatatcggcacccgtaaccctgctaataacgctgcgatcgttctgcaactgcctcagggtacaactctgccaaaaggcttctatgcagaagggtcgcgtggtggcagccaggcgagtagccgtagcagctcccgctctcgcaactcgtcccgtaactccactccgggctcttctcgcggcacgtccccggctcgtatggcaggtaacggtggtgacgctgctctggcgctgctactgctggacaggctgaaccagctggagtcgaagatgagtggtaaaggccaacagcagcagggccagaccgttaccaaaaagagcgcagctgaagcatctaaaaaaccgcgacagaaacgtaccgcgactaaagcgtacaatgtaacacaggccttcggtcgtcgaggtccggagcaaactcaaggaaactttggcgatcaggaattaatccgccaggggaccgactacaaacactggccgcaaattgcccagttcgccccatccgctagtgcattcttcggtatgagccgcatcggcatggaagtaacgccaagtggtacgtggctgacctacaccggtgctatcaagcttgatgacaaggacccgaactttaaagaccaggttattctgcttaacaaacatattgatgcctataaaactttcccgccgaccgaacccaaaaaggacaaaaagaaaaaagctgatgaaacccaggctctaccgcagcgtcagaaaaaacagcaaactgtgactctgctgccagctgcggacctggatgatttttccaagcagctgcaacagtctatgagctctgcggactctacgcaggctggtggttctggtcaccatcatcaccatcattaa

SEQ ID NO: 2677 - DNA, 2421 bp, Artificial Sequence
  Description of Artificial Sequence: Synthetic polynucleotide
atgaaaatcgaagaaggtaaactggtaatctggattaacggcgataaaggctataacggtctcgctgaagtcggtaagaaattcgagaaagataccggaattaaagtcaccgttgagcatccggataaactggaagagaaattcccacaggttgcggcaactggcgatggccctgacattatcttctgggcacacgaccgctttggtggctacgctcaatctggcctgttggctgaaatcaccccggacaaagcgttccaggacaagctgtatccgtttacctgggatgccgtacgttacaacggcaagctgattgcttacccgatcgctgttgaagcgttatcgctgatttataacaaagatctgctgccgaacccgccaaaaacctgggaagagatcccggcgctggataaagaactgaaagcgaaaggtaagagcgcgctgatgttcaacctgcaagaaccgtacttcacctggccgctgattgctgctgacgggggttatgcgttcaagtatgaaaacggcaagtacgacattaaagacgtgggcgtggataacgctggcgcgaaagcgggtctgaccttcctggttgacctgattaaaaacaaacacatgaatgcagacaccgattactccatcgcagaagctgcctttaataaaggcgaaacagcgatgaccatcaacggcccgtgggcatggtccaacatcgacaccagcaaagtgaattatggtgtaacggtactgccgaccttcaagggtcaaccatccaaaccgttcgttggcgtgctgagcgcaggtattaacgccgccagtccgaacaaagagctggcgaaagagttcctcgaaaactatctgctgactgatgaaggtctggaagcggttaataaagacaaaccgctgggtgccgtagcgctgaagtcttacgaggaagagttggcgaaagatccacgtattgccgccaccatggaaaacgcccagaaaggtgaaatcatgccgaacatcccgcagatgtccgctttctggtatgccgtgcgtactgcggtgatcaacgccgccagcggtcgtcagactgtcgatgaagccctgaaagacgcgcagactggtggttctggtgagaacctgtactttcaaagctcagataatgggcctcaaaaccagcgcaacgctccacgtataaccttcggtggcccgtctgactccacaggcagcaaccagaatggtgagcgtagtggagccaggtctaagcagcgccgtccccagggtctgccgaacaacacggcgagctggtttactgcgcttacccaacacggtaaagaagacttaaaattcccgcgtggccagggcgtcccgatcaacactaactcttccccggatgatcagattggttattaccgcagagcaactcgtcggattcgcggcggcgacggtaaaatgaaagatttgtctccgcgttggtacttttactatctcggcaccggtccggaagctggactgccctacggggcaaacaaggacgggatcatttgggtggctaccgaaggtgccctgaatactccaaaagatcatatcggcacccgtaaccctgctaataacgctgcgatcgttctgcaactgcctcagggtacaactctgccaaaaggcttctatgcagaagggtcgcgtggtggcagccaggcgagtagccgtagcagctcccgctctcgcaactcgtcccgtaactccactccgggctcttctcgcggcacgtccccggctcgtatggcaggtaacggtggtgacgctgctctggcgctgctactgctggacaggctgaaccagctggagtcgaagatgagtggtaaaggccaacagcagcagggccagaccgttaccaaaaagagcgcagctgaagcatctaaaaaaccgcgacagaaacgtaccgcgactaaagcgtacaatgtaacacaggccttcggtcgtcgaggtccggagcaaactcaaggaaactttggcgatcaggaattaatccgccaggggaccgacgataaacactggccgcaaattgcccagttcgccccatccgctagtgcattcttcggtatgagccgcatcggcatggaagtaacgccaagtggtacgtggctgacctacaccggtgctatcaagcttgatgacaaggacccgaactttaaagaccaggttattctgcttaacaaacatattgatgcctataaaactttcccgccgaccgaacccaaaaaggacaaaaagaaaaaagctgatgaaacccaggctctaccgcagcgtcagaaaaaacagcaaactgtgactctgctgccagctgcggacctggatgatttttccaagcagctgcaacagtctatgagctctgcggactctacgcaggctggtggttctggtcaccatcatcaccatcattaa

SEQ ID NO: 2678 - DNA, 2421 bp, Artificial Sequence
  Description of Artificial Sequence: Synthetic polynucleotide
atgaaaatcgaagaaggtaaactggtaatctggattaacggcgataaaggctataacggtctcgctgaagtcggtaagaaattcgagaaagataccggaattaaagtcaccgttgagcatccggataaactggaagagaaattcccacaggttgcggcaactggcgatggccctgacattatcttctgggcacacgaccgctttggtggctacgctcaatctggcctgttggctgaaatcaccccggacaaagcgttccaggacaagctgtatccgtttacctgggatgccgtacgttacaacggcaagctgattgcttacccgatcgctgttgaagcgttatcgctgatttataacaaagatctgctgccgaacccgccaaaaacctgggaagagatcccggcgctggataaagaactgaaagcgaaaggtaagagcgcgctgatgttcaacctgcaagaaccgtacttcacctggccgctgattgctgctgacgggggttatgcgttcaagtatgaaaacggcaagtacgacattaaagacgtgggcgtggataacgctggcgcgaaagcgggtctgaccttcctggttgacctgattaaaaacaaacacatgaatgcagacaccgattactccatcgcagaagctgcctttaataaaggcgaaacagcgatgaccatcaacggcccgtgggcatggtccaacatcgacaccagcaaagtgaattatggtgtaacggtactgccgaccttcaagggtcaaccatccaaaccgttcgttggcgtgctgagcgcaggtattaacgccgccagtccgaacaaagagctggcgaaagagttcctcgaaaactatctgctgactgatgaaggtctggaagcggttaataaagacaaaccgctgggtgccgtagcgctgaagtcttacgaggaagagttggcgaaagatccacgtattgccgccaccatggaaaacgcccagaaaggtgaaatcatgccgaacatcccgcagatgtccgctttctggtatgccgtgcgtactgcggtgatcaacgccgccagcggtcgtcagactgtcgatgaagccctgaaagacgcgcagactggtggttctggtgagaacctgtactttcaaagctcagataatgggcctcaaaaccagcgcaacgctccacgtataaccttcggtggcccgtctgactccacaggcagcaaccagaatggtgagcgtagtggagccaggtctaagcagcgccgtccccagggtctgccgaacaacacggcgagctggtttactgcgcttacccaacacggtaaagaagacttaaaattcccgcgtggccagggcgtcccgatcaacactaactcttccccggatgatcagattggttattaccgcagagcaactcgtcggattcgcggcggcgacggtaaaatgaaagatttgtctccgcgttggtacttttactatctcggcaccggtccggaagctggactgccctacggggcaaacaaggacgggatcatttgggtggctaccgaaggtgccctgaatactccaaaagatcatatcggcacccgtaaccctgctaataacgctgcgatcgttctgcaactgcctcagggtacaactctgccaaaaggcttctatgcagaagggtcgcgtggtggcagccaggcgagtagccgtagcagctcccgctctcgcaactcgtcccgtaactccactccgggctcttctcgcggcacgtccccggctcgtatggcaggtaacggtggtgacgctgctctggcgctgctactgctggacaggctgaaccagctggagtcgaagatgagtggtaaaggccaacagcagcagggccagaccgttaccaaaaagagcgcagctgaaatgtctaaaaaaccgcgatggaaacgtaccccgactaaagggtacaatgtaacacaggccttcggtccacgaggtccgaaagatactcaaggaaactttggcgatgccgaattaatcaaacaggggaccgactacaaacactggccgcaaattgcccagttcgtgccatccgctgcggcattcttctttatgagccgcatctcgatgaaagaaacgccagatggtgtctggctgacctacaccggtacgatcaagcttgataaagatgacccgaactttgatgaccaggttaagctgcttaacaaacatattgatgcctataaaactttcccgccgaccgaacccaaaaaggacaaaaagaaaaaagctgatgaaacccaggctctaccgcagcgtcagaaaaaacagcaaactgtgactctgctgccagctgcggacctggatgatttttccaagcagctgcaacagtctatgagctctgcggactctacgcaggctggtggttctggtcaccatcatcaccatcattaa

SEQ ID NO: 2679 - DNA, 2421 bp, Artificial Sequence
  Description of Artificial Sequence: Synthetic polynucleotide
atgaaaatcgaagaaggtaaactggtaatctggattaacggcgataaaggctataacggtctcgctgaagtcggtaagaaattcgagaaagataccggaattaaagtcaccgttgagcatccggataaactggaagagaaattcccacaggttgcggcaactggcgatggccctgacattatcttctgggcacacgaccgctttggtggctacgctcaatctggcctgttggctgaaatcaccccggacaaagcgttccaggacaagctgtatccgtttacctgggatgccgtacgttacaacggcaagctgattgcttacccgatcgctgttgaagcgttatcgctgatttataacaaagatctgctgccgaacccgccaaaaacctgggaagagatcccggcgctggataaagaactgaaagcgaaaggtaagagcgcgctgatgttcaacctgcaagaaccgtacttcacctggccgctgattgctgctgacgggggttatgcgttcaagtatgaaaacggcaagtacgacattaaagacgtgggcgtggataacgctggcgcgaaagcgggtctgaccttcctggttgacctgattaaaaacaaacacatgaatgcagacaccgattactccatcgcagaagctgcctttaataaaggcgaaacagcgatgaccatcaacggcccgtgggcatggtccaacatcgacaccagcaaagtgaattatggtgtaacggtactgccgaccttcaagggtcaaccatccaaaccgttcgttggcgtgctgagcgcaggtattaacgccgccagtccgaacaaagagctggcgaaagagttcctcgaaaactatctgctgactgatgaaggtctggaagcggttaataaagacaaaccgctgggtgccgtagcgctgaagtcttacgaggaagagttggcgaaagatccacgtattgccgccaccatggaaaacgcccagaaaggtgaaatcatgccgaacatcccgcagatgtccgctttctggtatgccgtgcgtactgcggtgatcaacgccgccagcggtcgtcagactgtcgatgaagccctgaaagacgcgcagactggtggttctggtgagaacctgtactttcaaagctcagataatgggcctcaaaaccagcgcaacgctccacgtataaccttcggtggcccgtctgactccacaggcagcaaccagaatggtgagcgtagtggagccaggtctaagcagcgccgtccccagggtctgccgaacaacacggcgagctggtttactgcgcttacccaacacggtaaagaagacttaaaattcccgcgtggccagggcgtcccgatcaacactaactcttccccggatgatcagattggttattaccgcagagcaactcgtcggattcgcggcggcgacggtaaaatgaaagatttgtctccgcgttggtacttttactatctcggcaccggtccggaagctggactgccctacggggcaaacaaggacgggatcatttgggtggctaccgaaggtgccctgaatactccaaaagatcatatcggcacccgtaaccctgctaataacgctgcgatcgttctgcaactgcctcagggtacaactctgccaaaaggcttctatgcagaagggtcgcgtggtggcagccaggcgagtagccgtagcagctcccgctctcgcaactcgtcccgtaactccactccgggctcttctcgcggcacgtccccggctcgtatggcaggtaacggtggtgacgctgctctggcgctgctactgctggacaggctgaaccagctggagtcgaagatgagtggtaaaggccaacagcagcagggccagaccgttaccaaaaagagcgcagctgaaatgtctaaaaaaccgcgacagaaacgtaccgcgactaaaggatacaatgtaacacagtgtttcggtccgcgaggtccggagcaaactcaaggaaactttggcgatgccgaattagtgaaaaaagggaccgactacaaacactggccgcaaattgcccagttcgccccatccgctagtgcattcttcggtatgagccgcatctcgtcaaaagaaacgccaagtggtacgtggctgacctacaccggtgctatcaagcttgataaagatgacccgaactttaaagaccaggttattctgcttaacaaacatattgatgcctataaaactttcccgccgaccgaacccaaaaaggacaaaaagaaaaaagctgatgaaacccaggctctaccgcagcgtcagaaaaaacagcaaactgtgactctgctgccagctgcggacctggatgatttttccaagcagctgcaacagtctatgagctctgcggactctacgcaggctggtggttctggtcaccatcatcaccatcattaa

SEQ ID NO: 2680 - DNA, 2421 bp, Artificial Sequence
  Description of Artificial Sequence: Synthetic polynucleotide
atgaaaatcgaagaaggtaaactggtaatctggattaacggcgataaaggctataacggtctcgctgaagtcggtaagaaattcgagaaagataccggaattaaagtcaccgttgagcatccggataaactggaagagaaattcccacaggttgcggcaactggcgatggccctgacattatcttctgggcacacgaccgctttggtggctacgctcaatctggcctgttggctgaaatcaccccggacaaagcgttccaggacaagctgtatccgtttacctgggatgccgtacgttacaacggcaagctgattgcttacccgatcgctgttgaagcgttatcgctgatttataacaaagatctgctgccgaacccgccaaaaacctgggaagagatcccggcgctggataaagaactgaaagcgaaaggtaagagcgcgctgatgttcaacctgcaagaaccgtacttcacctggccgctgattgctgctgacgggggttatgcgttcaagtatgaaaacggcaagtacgacattaaagacgtgggcgtggataacgctggcgcgaaagcgggtctgaccttcctggttgacctgattaaaaacaaacacatgaatgcagacaccgattactccatcgcagaagctgcctttaataaaggcgaaacagcgatgaccatcaacggcccgtgggcatggtccaacatcgacaccagcaaagtgaattatggtgtaacggtactgccgaccttcaagggtcaaccatccaaaccgttcgttggcgtgctgagcgcaggtattaacgccgccagtccgaacaaagagctggcgaaagagttcctcgaaaactatctgctgactgatgaaggtctggaagcggttaataaagacaaaccgctgggtgccgtagcgctgaagtcttacgaggaagagttggcgaaagatccacgtattgccgccaccatggaaaacgcccagaaaggtgaaatcatgccgaacatcccgcagatgtccgctttctggtatgccgtgcgtactgcggtgatcaacgccgccagcggtcgtcagactgtcgatgaagccctgaaagacgcgcagactggtggttctggtgagaacctgtactttcaaagctcagataatgggcctcaaaaccagcgcaacgctccacgtataaccttcggtggcccgtctgactccacaggcagcaaccagaatggtgagcgtagtggagccaggtctaagcagcgccgtccccagggtctgccgaacaacacggcgagctggtttactgcgcttacccaacacggtaaagaagacttaaaattcccgcgtggccagggcgtcccgatcaacactaactcttccccggatgatcagattggttattaccgcagagcaactcgtcggattcgcggcggcgacggtaaaatgaaagatttgtctccgcgttggtacttttactatctcggcaccggtccggaagctggactgccctacggggcaaacaaggacgggatcatttgggtggctaccgaaggtgccctgaatactccaaaagatcatatcggcacccgtaaccctgctaataacgctgcgctggttctgcaactgcctcagggtacaactctgccaaaaggcttctatgcagaagggtcgcgtggtggcagccaggcgagtagccgtagcagctcccgctctcgcaactcgtcccgtaactccactccgggctcttctcgcggcacgtccccggctcgtatggcaggtaacggtggtgacgctgctctggcgctgctactgctggacaggctgaaccagctggagtcgaagatgagtggtaaaggccaacagcagcagggccagaccgttaccaaaaagagcgcagctgaagcatctaaaaaaccgcgacagaaacgtaccgcgactaaagcgtacaatgtaacacaggccttcggtcgtcgaggtccggagcaaactcaaggaaactttggcgatcaggaattaatccgccaggggaccgactacaaacactggccgcaaattgcccagttcgccccatccgctagtgcattcttcggtatgagccgcatcggcatggaagtaacgccaagtggtacgtggctgacctacaccggtgctatcaagcttgatgacaaggacccgaactttaaagaccaggttattctgcttaacaaacatattgatgcctataaaactttcccgccgaccgaacccaaaaaggacaaaaagaaaaaagctgatgaaacccaggctctaccgcagcgtcagaaaaaacagcaaactgtgactctgctgccagctgcggacctggatgatttttccaagcagctgcaacagtctatgagctctgcggactctacgcaggctggtggttctggtcaccatcatcaccatcattaa

SEQ ID NO: 2681 - DNA, 2421 bp, Artificial Sequence
  Description of Artificial Sequence: Synthetic polynucleotide
atgaaaatcgaagaaggtaaactggtaatctggattaacggcgataaaggctataacggtctcgctgaagtcggtaagaaattcgagaaagataccggaattaaagtcaccgttgagcatccggataaactggaagagaaattcccacaggttgcggcaactggcgatggccctgacattatcttctgggcacacgaccgctttggtggctacgctcaatctggcctgttggctgaaatcaccccggacaaagcgttccaggacaagctgtatccgtttacctgggatgccgtacgttacaacggcaagctgattgcttacccgatcgctgttgaagcgttatcgctgatttataacaaagatctgctgccgaacccgccaaaaacctgggaagagatcccggcgctggataaagaactgaaagcgaaaggtaagagcgcgctgatgttcaacctgcaagaaccgtacttcacctggccgctgattgctgctgacgggggttatgcgttcaagtatgaaaacggcaagtacgacattaaagacgtgggcgtggataacgctggcgcgaaagcgggtctgaccttcctggttgacctgattaaaaacaaacacatgaatgcagacaccgattactccatcgcagaagctgcctttaataaaggcgaaacagcgatgaccatcaacggcccgtgggcatggtccaacatcgacaccagcaaagtgaattatggtgtaacggtactgccgaccttcaagggtcaaccatccaaaccgttcgttggcgtgctgagcgcaggtattaacgccgccagtccgaacaaagagctggcgaaagagttcctcgaaaactatctgctgactgatgaaggtctggaagcggttaataaagacaaaccgctgggtgccgtagcgctgaagtcttacgaggaagagttggcgaaagatccacgtattgccgccaccatggaaaacgcccagaaaggtgaaatcatgccgaacatcccgcagatgtccgctttctggtatgccgtgcgtactgcggtgatcaacgccgccagcggtcgtcagactgtcgatgaagccctgaaagacgcgcagactggtggttctggtgagaacctgtactttcaaagctcagataatgggcctcaaaaccagcgcaacgctccacgtataaccttcggtggcccgtctgactccacaggcagcaaccagaatggtgagcgtagtggagccaggtctaagcagcgccgtccccagggtctgccgaacaacacggcgagctggtttactgcgcttacccaacacggtaaagaagacttaaaattcccgcgtggccagggcgtcccgatcaacactaactcttccccggatgatcagattggttattaccgcagagcaactcgtcggattcgcggcggcgacggtaaaatgaaagatttgtctccgcgttggtacttttactatctcggcaccggtccggaagctggactgccctacggggcaaacaaggacgggatcatttgggtggctaccgaaggtgccctgaatactccaaaagatcatatcggcacccgtaaccctgctaataacgctgcgatcgttctgcaactgcctcagggtacaactctgccaaaaggcttctatgcagaagggtcgcgtggtggcagccaggcgagtagccgtagcagctcccgctctcgcaactcgtcccgtaactccactccgggctcttctcgcggcacgtccccggctcgtatggcaggtaacggtggtgacgctgctctggcgctgctactgctggacaggctgaaccagctggagtcgaagatgagtggtaaaggccaacagcagcagggccagaccgttaccaaaaagagcgcagctgaagcatctaaaaaaccgcgacagaaacgtaccgcgactaaagcgtacaatgtaacacaggccttcggtcgtcgaggtccggagcaaactcaaggaaactttggcgatcaggaattaatccgccaggggaccgactacaaacactggccgcaaattgcccagttcgccccatccgctagtgcattcttcggtatgagccgcatcggcatggaagtaacgccaagtggtacgtggctgacctacaccggtgctatcaagcttgatgacaaggacccgaactttaatgaccaggttattctgcttaacaaacatattgatgcctataaaactttcccgccgaccgaacccaaaaaggacaaaaagaaaaaagctgatgaaacccaggctctaccgcagcgtcagaaaaaacagcaaactgtgactctgctgccagctgcggacctggatgatttttccaagcagctgcaacagtctatgagctctgcggactctacgcaggctggtggttctggtcaccatcatcaccatcattaa

SEQ ID NO: 2682 - DNA, 2421 bp, Artificial Sequence
  Description of Artificial Sequence: Synthetic polynucleotide
atgaaaatcgaagaaggtaaactggtaatctggattaacggcgataaaggctataacggtctcgctgaagtcggtaagaaattcgagaaagataccggaattaaagtcaccgttgagcatccggataaactggaagagaaattcccacaggttgcggcaactggcgatggccctgacattatcttctgggcacacgaccgctttggtggctacgctcaatctggcctgttggctgaaatcaccccggacaaagcgttccaggacaagctgtatccgtttacctgggatgccgtacgttacaacggcaagctgattgcttacccgatcgctgttgaagcgttatcgctgatttataacaaagatctgctgccgaacccgccaaaaacctgggaagagatcccggcgctggataaagaactgaaagcgaaaggtaagagcgcgctgatgttcaacctgcaagaaccgtacttcacctggccgctgattgctgctgacgggggttatgcgttcaagtatgaaaacggcaagtacgacattaaagacgtgggcgtggataacgctggcgcgaaagcgggtctgaccttcctggttgacctgattaaaaacaaacacatgaatgcagacaccgattactccatcgcagaagctgcctttaataaaggcgaaacagcgatgaccatcaacggcccgtgggcatggtccaacatcgacaccagcaaagtgaattatggtgtaacggtactgccgaccttcaagggtcaaccatccaaaccgttcgttggcgtgctgagcgcaggtattaacgccgccagtccgaacaaagagctggcgaaagagttcctcgaaaactatctgctgactgatgaaggtctggaagcggttaataaagacaaaccgctgggtgccgtagcgctgaagtcttacgaggaagagttggcgaaagatccacgtattgccgccaccatggaaaacgcccagaaaggtgaaatcatgccgaacatcccgcagatgtccgctttctggtatgccgtgcgtactgcggtgatcaacgccgccagcggtcgtcagactgtcgatgaagccctgaaagacgcgcagactggtggttctggtgagaacctgtactttcaaagctcagataatgggcctcaaaaccagcgcaacgctccacgtataaccttcggtggcccgtctgactccacaggcagcaaccagaatggtgagcgtagtggagccaggtctaagcagcgccgtccccagggtctgccgaacaacacggcgagctggtttactgcgcttacccaacacggtaaagaagacttaaaattcccgcgtggccagggcgtcccgatcaacactaactcttccccggatgatcagattggttattaccgcagagcaactcgtcggtttcgcggcggcgacggtaaaatgaaagatttgtctccgcgttggtacttttactatctcggcaccggtccggaagctggactgccctacggggcaaacaaggacgggatcatttgggtggctaccgaaggtgccctgaatactccaaaagatcatatcggcacccgtaaccctgctaataacgctgcgatcgttctgcaactgcctcagggtacaactctgccaaaaggcttctatgcagaagggtcgcgtggtggcagccaggcgagtagccgtagcagctcccgctctcgcaactcgtcccgtaactccactccgggctcttctcgcggcacgtccccggctcgtatggcaggtaacggtggtgacgctgctctggcgctgctactgctggacaggctgaaccagctggagtcgaagatgagtggtaaaggccaacagcagcagggccagaccgttaccaaaaagagcgcagctgaagcatctaaaaaaccgcgacagaaacgtaccgcgactaaagcgtacaatgtaacacaggccttcggtcgtcgaggtccggagcaaactcaaggaaactttggcgatcaggaattaatccgccaggggaccgactacaaacactggccgcaaattgcccagttcgccccatccgctagtgcattcttcggtatgagccgcatcggcatggaagtaacgccaagtggtacgtggctgacctacaccggtgctatcaagcttgatgacaaggacccgaactttaaagaccaggttattctgcttaacaaacatattgatgcctataaaactttcccgccgaccgaacccaaaaaggacaaaaagaaaaaagctgatgaaacccaggctctaccgcagcgtcagaaaaaacagcaaactgtgactctgctgccagctgcggacctggatgatttttccaagcagctgcaacagtctatgagctctgcggactctacgcaggctggtggttctggtcaccatcatcaccatcattaa

SEQ ID NO: 2683 - DNA, 2421 bp, Artificial Sequence
  Description of Artificial Sequence: Synthetic polynucleotide
atgaaaatcgaagaaggtaaactggtaatctggattaacggcgataaaggctataacggtctcgctgaagtcggtaagaaattcgagaaagataccggaattaaagtcaccgttgagcatccggataaactggaagagaaattcccacaggttgcggcaactggcgatggccctgacattatcttctgggcacacgaccgctttggtggctacgctcaatctggcctgttggctgaaatcaccccggacaaagcgttccaggacaagctgtatccgtttacctgggatgccgtacgttacaacggcaagctgattgcttacccgatcgctgttgaagcgttatcgctgatttataacaaagatctgctgccgaacccgccaaaaacctgggaagagatcccggcgctggataaagaactgaaagcgaaaggtaagagcgcgctgatgttcaacctgcaagaaccgtacttcacctggccgctgattgctgctgacgggggttatgcgttcaagtatgaaaacggcaagtacgacattaaagacgtgggcgtggataacgctggcgcgaaagcgggtctgaccttcctggttgacctgattaaaaacaaacacatgaatgcagacaccgattactccatcgcagaagctgcctttaataaaggcgaaacagcgatgaccatcaacggcccgtgggcatggtccaacatcgacaccagcaaagtgaattatggtgtaacggtactgccgaccttcaagggtcaaccatccaaaccgttcgttggcgtgctgagcgcaggtattaacgccgccagtccgaacaaagagctggcgaaagagttcctcgaaaactatctgctgactgatgaaggtctggaagcggttaataaagacaaaccgctgggtgccgtagcgctgaagtcttacgaggaagagttggcgaaagatccacgtattgccgccaccatggaaaacgcccagaaaggtgaaatcatgccgaacatcccgcagatgtccgctttctggtatgccgtgcgtactgcggtgatcaacgccgccagcggtcgtcagactgtcgatgaagccctgaaagacgcgcagactggtggttctggtgagaacctgtactttcaaagctcagataatgggcctcaaaaccagcgcaacgctccacgtataaccttcggtggcccgtctgactccacaggcagcaaccagaatggtgagcgtagtggagccaggtctaagcagcgccgtccccagggtctgccgaacaacacggcgagctggtttactgcgcttacccaacacggtaaagaagacttaaaattcccgcgtggccagggcgtcccgatcaacactaactcttccccggatgatcagattggttattaccgcagagcaactcgtcggattcgcggcggcgacggtaaaatgaaagatttgtctccgcgttggtacttttactatctcggcaccggtccggaagctggactgccctacggggcaaacaaggacgggatcatttgggtggctaccgaaggtgccctgaatactccaaaagatcatatcggcacccgtaaccctgctaataacgctgcgatcgttctgcaactgcctcagggtacaactctgccaaaaggcttctatgcagaagggtcgcgtggtggcagccaggcgagtagccgtagcagctcccgctctcgcaactcgtcccgtaactccactccgggctcttctcgcggcacgtccccggctcgtatggcaggtaacggtggtgacgctgctctggcgctgctactgctggacaggctgaaccagctggagtcgaagatgagtggtaaaggccaacagcagcagggccagaccgttaccaaaaagagcgcagctgaagcatctaaaaaaccgcgacagaaacgtaccgcgactaaagcgtacaatgtaacacagtgtttcggtcgtcgaggtccggagcaaactcaaggaaactttggcgatcaggaattaatccgccaggggaccgactacaaacactggccgcaaattgcccagttcgccccatccgctagtgcattcttcggtatgagccgcatcggcatggaagtaacgccaagtggtacgtggctgacctacaccggtgctatcaagcttgatgacaaggacccgaactttaaagaccaggttattctgcttaacaaacatattgatgcctataaaactttcccgccgaccgaacccaaaaaggacaaaaagaaaaaagctgatgaaacccaggctctaccgcagcgtcagaaaaaacagcaaactgtgactctgctgccagctgcggacctggatgatttttccaagcagctgcaacagtctatgagctctgcggactctacgcaggctggtggttctggtcaccatcatcaccatcattaa

SEQ ID NO: 2684 - DNA, 2421 bp, Artificial Sequence
  Description of Artificial Sequence: Synthetic polynucleotide
atgaaaatcgaagaaggtaaactggtaatctggattaacggcgataaaggctataacggtctcgctgaagtcggtaagaaattcgagaaagataccggaattaaagtcaccgttgagcatccggataaactggaagagaaattcccacaggttgcggcaactggcgatggccctgacattatcttctgggcacacgaccgctttggtggctacgctcaatctggcctgttggctgaaatcaccccggacaaagcgttccaggacaagctgtatccgtttacctgggatgccgtacgttacaacggcaagctgattgcttacccgatcgctgttgaagcgttatcgctgatttataacaaagatctgctgccgaacccgccaaaaacctgggaagagatcccggcgctggataaagaactgaaagcgaaaggtaagagcgcgctgatgttcaacctgcaagaaccgtacttcacctggccgctgattgctgctgacgggggttatgcgttcaagtatgaaaacggcaagtacgacattaaagacgtgggcgtggataacgctggcgcgaaagcgggtctgaccttcctggttgacctgattaaaaacaaacacatgaatgcagacaccgattactccatcgcagaagctgcctttaataaaggcgaaacagcgatgaccatcaacggcccgtgggcatggtccaacatcgacaccagcaaagtgaattatggtgtaacggtactgccgaccttcaagggtcaaccatccaaaccgttcgttggcgtgctgagcgcaggtattaacgccgccagtccgaacaaagagctggcgaaagagttcctcgaaaactatctgctgactgatgaaggtctggaagcggttaataaagacaaaccgctgggtgccgtagcgctgaagtcttacgaggaagagttggcgaaagatccacgtattgccgccaccatggaaaacgcccagaaaggtgaaatcatgccgaacatcccgcagatgtccgctttctggtatgccgtgcgtactgcggtgatcaacgccgccagcggtcgtcagactgtcgatgaagccctgaaagacgcgcagactggtggttctggtgagaacctgtactttcaaagctcagataatgggcctcaaaaccagcgcaacgctccacgtataaccttcggtggcccgtctgactccacaggcagcaaccagaatggtgagcgtagtggagccaggtctaagcagcgccgtccccagggtctgccgaacaacacggcgagctggtttactgcgcttacccaacacggtaaagaagacttaaaattcccgcgtggccagggcgtcccgatcaacactaactcttccccggatgatcagattggttattaccgcagagcaactcgtcggattcgcggcggcgacggtaaaatgaaagatttgtctccgcgttggtacttttactatctcggcaccggtccggaagctggactgccctacggggcaaacaaggacgggatcatttgggtggctaccgaaggtgccctgaatactccaaaagatcatatcggcacccgtaaccctgctaataacgctgcgatcgttctgcaactgcctcagggtacaactctgccaaaaggcttctatgcagaagggtcgcgtggtggcagccaggcgagtagccgtagcagctcccgctctcgcaactcgtcccgtaactccactccgggctcttctcgcggcacgtccccggctcgtatggcaggtaacggtggtgacgctgctctggcgctgctactgctggacaggctgaaccagctggagtcgaagatgagtggtaaaggccaacagcagcagggccagaccgttaccaaaaagagcgcagctgaagcatctaaaaaaccgcgacagaaacgtaccgcgactaaagcgtacaatgtaacacaggccttcggtcgtcgaggtccggagcaaactcaaggaaactttggcgatcaggaattaatccgccaggggaccgactacaaacactggccgcaaattgcccagttcgccccatccgctagtgcattcttcggtatgagccgcatcggcatggaagtaacgccaagtggtacgtggctgacctacaccggtgctatcaagcttgatgacaaggacccgaactttcgcgaccaggttattctgcttaacaaacatattgatgcctataaaactttcccgccgaccgaacccaaaaaggacaaaaagaaaaaagctgatgaaacccaggctctaccgcagcgtcagaaaaaacagcaaactgtgactctgctgccagctgcggacctggatgatttttccaagcagctgcaacagtctatgagctctgcggactctacgcaggctggtggttctggtcaccatcatcaccatcattaa

SEQ ID NO: 2685 - DNA, 2421 bp, Artificial Sequence
  Description of Artificial Sequence: Synthetic polynucleotide
atgaaaatcgaagaaggtaaactggtaatctggattaacggcgataaaggctataacggtctcgctgaagtcggtaagaaattcgagaaagataccggaattaaagtcaccgttgagcatccggataaactggaagagaaattcccacaggttgcggcaactggcgatggccctgacattatcttctgggcacacgaccgctttggtggctacgctcaatctggcctgttggctgaaatcaccccggacaaagcgttccaggacaagctgtatccgtttacctgggatgccgtacgttacaacggcaagctgattgcttacccgatcgctgttgaagcgttatcgctgatttataacaaagatctgctgccgaacccgccaaaaacctgggaagagatcccggcgctggataaagaactgaaagcgaaaggtaagagcgcgctgatgttcaacctgcaagaaccgtacttcacctggccgctgattgctgctgacgggggttatgcgttcaagtatgaaaacggcaagtacgacattaaagacgtgggcgtggataacgctggcgcgaaagcgggtctgaccttcctggttgacctgattaaaaacaaacacatgaatgcagacaccgattactccatcgcagaagctgcctttaataaaggcgaaacagcgatgaccatcaacggcccgtgggcatggtccaacatcgacaccagcaaagtgaattatggtgtaacggtactgccgaccttcaagggtcaaccatccaaaccgttcgttggcgtgctgagcgcaggtattaacgccgccagtccgaacaaagagctggcgaaagagttcctcgaaaactatctgctgactgatgaaggtctggaagcggttaataaagacaaaccgctgggtgccgtagcgctgaagtcttacgaggaagagttggcgaaagatccacgtattgccgccaccatggaaaacgcccagaaaggtgaaatcatgccgaacatcccgcagatgtccgctttctggtatgccgtgcgtactgcggtgatcaacgccgccagcggtcgtcagactgtcgatgaagccctgaaagacgcgcagactggtggttctggtgagaacctgtactttcaaagctcagataatgggcctcaaaaccagcgcaacgctccacgtataaccttcggtggcccgtctgactccacaggcagcaaccagaatggtgagcgtagtggagccaggtctaagcagcgccgtccccagggtctgccgaacaacacggcgagctggtttactgcgcttacccaacacggtaaagaagacttaaaattcccgcgtggccagggcgtcccgatcaacactaactcttccccggatgatcagattggttattaccgcagagcaactcgtcggattcgcggcggcgacggtaaaatgaaagatttgtctccgcgttggtacttttactattcgggcaccggtccggaagctggactgccctacggggcaaacaaggacgggatcatttgggtggctaccgaaggtgccctgaatactccaaaagatcatatcggcacccgtaaccctgctaataacgctgcgatcgttctgcaactgcctcagggtacaactctgccaaaaggcttctatgcagaagggtcgcgtggtggcagccaggcgagtagccgtagcagctcccgctctcgcaactcgtcccgtaactccactccgggctcttctcgcggcacgtccccggctcgtatggcaggtaacggtggtgacgctgctctggcgctgctactgctggacaggctgaaccagctggagtcgaagatgagtggtaaaggccaacagcagcagggccagaccgttaccaaaaagagcgcagctgaagcatctaaaaaaccgcgacagaaacgtaccgcgactaaagcgtacaatgtaacacaggccttcggtcgtcgaggtccggagcaaactcaaggaaactttggcgatcaggaattaatccgccaggggaccgactacaaacactggccgcaaattgcccagttcgccccatccgctagtgcattcttcggtatgagccgcatcggcatggaagtaacgccaagtggtacgtggctgacctacaccggtgctatcaagcttgatgacaaggacccgaactttaaagaccaggttattctgcttaacaaacatattgatgcctataaaactttcccgccgaccgaacccaaaaaggacaaaaagaaaaaagctgatgaaacccaggctctaccgcagcgtcagaaaaaacagcaaactgtgactctgctgccagctgcggacctggatgatttttccaagcagctgcaacagtctatgagctctgcggactctacgcaggctggtggttctggtcaccatcatcaccatcattaa

SEQ ID NO: 2686 - DNA, 2421 bp, Artificial Sequence
  Description of Artificial Sequence: Synthetic polynucleotide
atgaaaatcgaagaaggtaaactggtaatctggattaacggcgataaaggctataacggtctcgctgaagtcggtaagaaattcgagaaagataccggaattaaagtcaccgttgagcatccggataaactggaagagaaattcccacaggttgcggcaactggcgatggccctgacattatcttctgggcacacgaccgctttggtggctacgctcaatctggcctgttggctgaaatcaccccggacaaagcgttccaggacaagctgtatccgtttacctgggatgccgtacgttacaacggcaagctgattgcttacccgatcgctgttgaagcgttatcgctgatttataacaaagatctgctgccgaacccgccaaaaacctgggaagagatcccggcgctggataaagaactgaaagcgaaaggtaagagcgcgctgatgttcaacctgcaagaaccgtacttcacctggccgctgattgctgctgacgggggttatgcgttcaagtatgaaaacggcaagtacgacattaaagacgtgggcgtggataacgctggcgcgaaagcgggtctgaccttcctggttgacctgattaaaaacaaacacatgaatgcagacaccgattactccatcgcagaagctgcctttaataaaggcgaaacagcgatgaccatcaacggcccgtgggcatggtccaacatcgacaccagcaaagtgaattatggtgtaacggtactgccgaccttcaagggtcaaccatccaaaccgttcgttggcgtgctgagcgcaggtattaacgccgccagtccgaacaaagagctggcgaaagagttcctcgaaaactatctgctgactgatgaaggtctggaagcggttaataaagacaaaccgctgggtgccgtagcgctgaagtcttacgaggaagagttggcgaaagatccacgtattgccgccaccatggaaaacgcccagaaaggtgaaatcatgccgaacatcccgcagatgtccgctttctggtatgccgtgcgtactgcggtgatcaacgccgccagcggtcgtcagactgtcgatgaagccctgaaagacgcgcagactggtggttctggtgagaacctgtactttcaaagctcagataatgggcctcaaaaccagcgcaacgctccacgtataaccttcggtggcccgtctgactccacaggcagcaaccagaatggtgagcgtagtggagccaggtctaagcagcgccgtccccagggtctgccgaacaacacggcgagctggtttactgcgcttacccaacacggtaaagaagacttaaaattcccgaaaggccagggcgtcccgatcaacactaactctaaaccggatgatcagattggttattaccgcagacaaactcgtcggtatcgcggcggcgacggtcaaatgaaagatttggatccgcgttggtacttttactatctcggcaccggtccggaagctggactgccctacggggcaaacaaggacgggatcatttgggtggctaccgaaggtgccctgaatactccaaaagatcatatcggcacccgtaaccctgctaataacgctgcgatcgttctgcaactgcctcagggtacaactctgccaaaaggcttctatgcagaagggtcgcgtggtggcagccaggcgagtagccgtagcagctcccgctctcgcaactcgtcccgtaactccactccgggctcttctcgcggcacgtccccggctcgtatggcaggtaacggtggtgacgctgctctggcgctgctactgctggacaggctgaaccagctggagtcgaagatgagtggtaaaggccaacagcagcagggccagaccgttaccaaaaagagcgcagctgaagcatctaaaaaaccgcgacagaaacgtaccgcgactaaagcgtacaatgtaacacaggccttcggtcgtcgaggtccggagcaaactcaaggaaactttggcgatcaggaattaatccgccaggggaccgactacaaacactggccgcaaattgcccagttcgccccatccgctagtgcattcttcggtatgagccgcatcggcatggaagtaacgccaagtggtacgtggctgacctacaccggtgctatcaagcttgatgacaaggacccgaactttaaagaccaggttattctgcttaacaaacatattgatgcctataaaactttcccgccgaccgaacccaaaaaggacaaaaagaaaaaagctgatgaaacccaggctctaccgcagcgtcagaaaaaacagcaaactgtgactctgctgccagctgcggacctggatgatttttccaagcagctgcaacagtctatgagctctgcggactctacgcaggctggtggttctggtcaccatcatcaccatcattaa

SEQ ID NO: 2687 - DNA, 2421 bp, Artificial Sequence
  Description of Artificial Sequence: Synthetic polynucleotide
atgaaaatcgaagaaggtaaactggtaatctggattaacggcgataaaggctataacggtctcgctgaagtcggtaagaaattcgagaaagataccggaattaaagtcaccgttgagcatccggataaactggaagagaaattcccacaggttgcggcaactggcgatggccctgacattatcttctgggcacacgaccgctttggtggctacgctcaatctggcctgttggctgaaatcaccccggacaaagcgttccaggacaagctgtatccgtttacctgggatgccgtacgttacaacggcaagctgattgcttacccgatcgctgttgaagcgttatcgctgatttataacaaagatctgctgccgaacccgccaaaaacctgggaagagatcccggcgctggataaagaactgaaagcgaaaggtaagagcgcgctgatgttcaacctgcaagaaccgtacttcacctggccgctgattgctgctgacgggggttatgcgttcaagtatgaaaacggcaagtacgacattaaagacgtgggcgtggataacgctggcgcgaaagcgggtctgaccttcctggttgacctgattaaaaacaaacacatgaatgcagacaccgattactccatcgcagaagctgcctttaataaaggcgaaacagcgatgaccatcaacggcccgtgggcatggtccaacatcgacaccagcaaagtgaattatggtgtaacggtactgccgaccttcaagggtcaaccatccaaaccgttcgttggcgtgctgagcgcaggtattaacgccgccagtccgaacaaagagctggcgaaagagttcctcgaaaactatctgctgactgatgaaggtctggaagcggttaataaagacaaaccgctgggtgccgtagcgctgaagtcttacgaggaagagttggcgaaagatccacgtattgccgccaccatggaaaacgcccagaaaggtgaaatcatgccgaacatcccgcagatgtccgctttctggtatgccgtgcgtactgcggtgatcaacgccgccagcggtcgtcagactgtcgatgaagccctgaaagacgcgcagactggtggttctggtgagaacctgtactttcaaagctcagataatgggcctcaaaaccagcgcaacgctccacgtataaccttcggtggcccgtctgactccacaggcagcaaccagaatggtgagcgtagtggagccaggtctaagcagcgccgtccccagggtctgccgaacaacacggcgagctggtttactgcgcttacccaacacggtaaagaagacttaaaattcccgcgtggccagggcgtcccgatcaacactaactcttccccggatgatcagattggttattaccgcagagcaactcgtcggattcgcggcggcgacggtaaaatgaaagatttgtctccgcgttggtacttttactatctcggcaccggtccggaagctggactgccctacggggcaaacaaggacgggatcatttgggtggctaccgaaggtgccctgaatactccaaaagatcatatcggcacccgtaaccctgctaataacgctgcgatcgttctgcaactgcctcagggtacaactctgccaaaaggcttctatgcagaagggtcgcgtggtggcagccaggcgagtagccgtagcagctcccgctctcgcaactcgtcccgtaactccactccgggctcttctcgcggcacgtccccggctcgtatggcaggtaacggtggtgacgctgctctggcgctgctactgctggacaggctgaaccagctggagtcgaagatgagtggtaaaggccaacagcagcagggccagaccgttaccaaaaagagcgcagctgaagcatctaaaaaaccgcgacagaaacgtaccgcgactaaagcgtacaatgtaacacaggccttcggtcgtcgaggtccggagcaaactcaaggaaactttggcgatcaggaattaatccgccaggggaccgactacaaacactggccgcaaattgcccagttcgccccatccgctagtgcattcttcggtatgagccgcatcggcatggaaccaacgccaagtggtacgtggctgacctacaccggtgctatcaagcttgatgacaaggacccgaactttaaagaccaggttattctgcttaacaaacatattgatgcctataaaactttcccgccgaccgaacccaaaaaggacaaaaagaaaaaagctgatgaaacccaggctctaccgcagcgtcagaaaaaacagcaaactgtgactctgctgccagctgcggacctggatgatttttccaagcagctgcaacagtctatgagctctgcggactctacgcaggctggtggttctggtcaccatcatcaccatcattaa

SEQ ID NO: 2688 - DNA, 2421 bp, Artificial Sequence
  Description of Artificial Sequence: Synthetic polynucleotide
atgaaaatcgaagaaggtaaactggtaatctggattaacggcgataaaggctataacggtctcgctgaagtcggtaagaaattcgagaaagataccggaattaaagtcaccgttgagcatccggataaactggaagagaaattcccacaggttgcggcaactggcgatggccctgacattatcttctgggcacacgaccgctttggtggctacgctcaatctggcctgttggctgaaatcaccccggacaaagcgttccaggacaagctgtatccgtttacctgggatgccgtacgttacaacggcaagctgattgcttacccgatcgctgttgaagcgttatcgctgatttataacaaagatctgctgccgaacccgccaaaaacctgggaagagatcccggcgctggataaagaactgaaagcgaaaggtaagagcgcgctgatgttcaacctgcaagaaccgtacttcacctggccgctgattgctgctgacgggggttatgcgttcaagtatgaaaacggcaagtacgacattaaagacgtgggcgtggataacgctggcgcgaaagcgggtctgaccttcctggttgacctgattaaaaacaaacacatgaatgcagacaccgattactccatcgcagaagctgcctttaataaaggcgaaacagcgatgaccatcaacggcccgtgggcatggtccaacatcgacaccagcaaagtgaattatggtgtaacggtactgccgaccttcaagggtcaaccatccaaaccgttcgttggcgtgctgagcgcaggtattaacgccgccagtccgaacaaagagctggcgaaagagttcctcgaaaactatctgctgactgatgaaggtctggaagcggttaataaagacaaaccgctgggtgccgtagcgctgaagtcttacgaggaagagttggcgaaagatccacgtattgccgccaccatggaaaacgcccagaaaggtgaaatcatgccgaacatcccgcagatgtccgctttctggtatgccgtgcgtactgcggtgatcaacgccgccagcggtcgtcagactgtcgatgaagccctgaaagacgcgcagactggtggttctggtgagaacctgtactttcaaagctcagataatgggcctcaaaaccagcgcaacgctccacgtataaccttcggtggcccgtctgactccacaggcagcaaccagaatggtgagcgtagtggagccaggtctaagcagcgccgtccccagggtctgccgaacaacacggcgagctggtttactgcgcttacccaacacggtaaagaagacttaaaattcccgcgtggccagggcgtcccgatcaacactaactcttccccggatgatcagattggttattaccgcagagcaactcgtcggattcgcggcggcgacggtaaaatgaaagatttgtctccgcgttggtacttttactatctcggcaccggtccggaagctggactgccctacggggcaaacaaggacgggatcatttgggtggctaccgaaggtgccctgaatactccaaaagatcatatcggcacccgtaaccctgctaataacgctgcgatcgttctgcaactgcctcagggtacaactctgccaaaaggcttctatgcagaagggtcgcgtggtggcagccaggcgagtagccgtagcagctcccgctctcgcaactcgtcccgtaactccactccgggctcttctcgcggcacgtccccggctcgtatggcaggtaacggtggtgacgctgctctggcgctgctactgctggacaggctgaaccagctggagtcgaagatgagtggtaaaggccaacagcagcagggccagaccgttaccaaaaagagcgcagctgaagcatctaaaaaaccgcgacagaaacgtaccgcgactaaagcgtacaatgtaacacaggccttcggtcgtcgaggtccggagcccactcaaggaaactttggcgatcaggaattaatccgccaggggaccgactacaaacactggccgcaaattgcccagttcgccccatccgctagtgcattcttcggtatgagccgcatcggcatggaagtaacgccaagtggtacgtggctgacctacaccggtgctatcaagcttgatgacaaggacccgaactttaaagaccaggttattctgcttaacaaacatattgatgcctataaaactttcccgccgaccgaacccaaaaaggacaaaaagaaaaaagctgatgaaacccaggctctaccgcagcgtcagaaaaaacagcaaactgtgactctgctgccagctgcggacctggatgatttttccaagcagctgcaacagtctatgagctctgcggactctacgcaggctggtggttctggtcaccatcatcaccatcattaa
